United States Patent Application Publication US 2024/0327476 A1 - sequence listing, part 102

SEQ ID NO: 196152 - DNA, 3363 bp, synthetic construct
  misc_feature 1..3363: note = Description of Artificial Sequence: Synthetic coding sequence
  source 1..3363: mol_type = other DNA
atgcccgagcccaccaagaaggaggactggaccctggtggagaccccgcccggtgaggaacaggcgaagcagaacgctaacagccaactcagcatactgtttattgagaaaccacagggcgggacagtaaaggtaggggaggacattacatttattgctaaagttaaagcggaagatctgttacgaaaacctacaatcaaatggtttaaaggaaagtggatggacttagctagtaaggcagggaagcacctgcaactgaaagaaacgtttgagagacacagtagggtgtatacatttgagatgcaaataattaaagcaaaggataacttcgctggcaattaccggtgcgaagtcacatataaggacaagttcgactcatgttcctttgatctcgaggtccacgagagcaccgggactactccaaatattgatatcaggtcagcctttaaacgaagtggtgaagggcaagaggacgccggcgaattagatttctctggtctgctcaaaaggcgggaagttaaacaacaggaggaagagccgcaggtggacgtgtgggagcttctgaaaaatgccaagccgagcgagtacgagaagatcgctttccagtacggcattactgacctgcgcgggatgctaaagaggctgaaaagaatgagaagggaagaaaaaaagtccgcagcctttgcgaaaattcttgatcccgcgtatcaagtcgacaaaggtggtcgggtgagatttgtggtagaactagctgaccccaagctggaggtaaaatggtataagaatgggcaggaaatacgccctagcactaagtatatcttcgagcataaaggatgccaacggatattgtttataaataactgccagatgactgatgatagtgagtattacgtgacagcaggcgacgagaagtgtagtaccgagctgttcgtgcgcgagccgcctatcatggtaacaaaacagctggaggacaccaccgcttactgtggcgagcgtgtagagctggagtgcgaggtgagtgaggatgacgcaaatgtgaaatggttcaagaatggcgaagagattattcctgggccaaaatctcgatacaggatccgcgtggagggcaagaagcacattttgattatcgaaggagcgacgaaagccgacgccgccgagtattccgtgatgacaacgggcggacagtcgtccgcaaagttgtccgtggatctcaaacccctaaaaattttaacacccctcactgaccaaactgtcaatcttggcaaggagatctgtttgaagtgtgaaatatcagagaacatccctgggaagtggactaagaacggtctgcccgtacaggagtctgatagactgaaggtggttcataaggggcgtatccacaaactggttatcgccaatgctctgactgaagacgaaggagattatgtctttgctcctgacgcgtacaatgtcaccttaccggcgaaggtgcacgtgattgatccgcctaagattatcctggatgggcttgatgccgacaatacagtgacagtcattgcaggcaacaagctgaggctggagatcccgatttccggcgagcctccaccaaaagctatgtggagccgcggggacaaggccattatggagggctcggggagaatccgcacagaaagctatccagattcttctaccctggtaatcgatatcgccgagagagatgacagcggagtgtaccatattaatctcaaaaatgaagccggtgaagctcacgcatcaattaaggtcaaggtggtcgacttccctgatcctcctgttgcaccgactgtgactgaagtcggtgacgactggtgcattatgaactgggaacctccagcctacgatggtggatcaccaatacttgggtattttatcgagcggaaaaagaaacaatcctcacgatggatgaggctcaacttcgatctctgcaaagaaactactttcgaacctaaaaaaatgattgaaggagtggcttacgaggtccgtattttcgccgtgaatgccatcggaatctccaaaccatccatgccctcgcgcccttttgttcctctagcagtgacttccccaccgacccttctgacagtagactccgtgactgacaccaccgtgaccatgcgctggcgaccaccagaccacatcggcgcggccggcctggatgggtatgtcctggagtactgtttcgaaggcaccgaggattggatcgtggcgaacaaagacctaattgataagaccaagttcactatcacagggttacccacagacgcgaaaatctttgtccgagtgaaagccgtaaatgccgccggggcttctgaaccaaaatattacagccagcccatacttgtaaaggagatcatcgagcccccgaagattcgtatacctcgacacctcaagcagacttacatccggagggttggagaggctgtgaatctggtaattcctttccagggaaagcctcggccagaattgacctggaagaaggatggagctgagattgacaagaaccagattaatatccgcaactctgagactgacactataatcttcatccgaaaagccgaaagatcgcattccggtaaatatgatttgcaagtcaaagtcgataaattcgttgaaaccgcttcaattgacatccaaattatagaccgccccgggccgccacaaattgttaagatcgaagacgtctggggtgagaacgtggcattgacgtggactccccctaaggatgacggcaacgctgccattactgggtacaccatacaaaaagccgacaagaaatccatggaatggtttactgttatcgagcactatcaccgcaccagcgcgacaattactgaactcgttatcggcaatgaatactacttcagagtcttttcggaaaacatgtgtggactgtcggaggatgctaccatgacaaaggagtctgcagtgattgcccgcgatggaaaaatttataaaaatcccgtatatgaagacttcgatttcagtgaagcccctatgtttactcagccacttgttaatacatacgctatcgctggctataacgcgacccttaattgttctgtgcgcgggaaccctaagcctaagataacttggatgaagaataaagtggccattgtagatgatccgcgatacagaatgttcagtaaccagggggtgtgcacactagagattaggaaacccagtccctatgatggcggtacatactgttgcaaggccgtgaatgacctgggaactgtagagatagagtgcaagctggaagtgaaggtaatctatcagggggtaaacacacccggacagcctgtttttttggagggacagcaacaaagcctgcacaacaaggacttttag

SEQ ID NO: 196153 - DNA, 3399 bp, synthetic construct
  misc_feature 1..3399: note = Description of Artificial Sequence: Synthetic coding sequence
  source 1..3399: mol_type = other DNA
atgcccgagcccaccaagaaggaggagaacgaggtgcccgcccccgctcccccacctgaagactggactctcgtggagacgccaccaggtgaggagcaagctaagcagaacgcaaacagccaactgtcaattctctttatcgaaaaaccacagggcggaaccgtaaaagtgggcgaggacatcacttttattgctaaagtgaaggcagaggatctgttgcggaaaccaaccatcaaatggtttaagggcaagtggatggacctggcgagtaaggctggtaagcacctccagctcaaagaaaccttcgaacgccactcacgtgtgtatacatttgagatgcaaattattaaggcgaaggacaatttcgcagggaattaccgctgtgaagttacctataaggacaagttcgatagctgttcatttgacttggaggtccacgagagcaccgggactacacccaatatcgatatccgctcggcgtttaaacggtcgggtgagggccaggaagacgctggggaactagacttcagcggcctgctcaagaggagggaagtcaaacagcaagaagaggagccacaagtggatgtgtgggaactgcttaaaaacgccaaaccgtccgaatacgagaagatagccttccagtacggtatcacggatttaagaggaatgctaaaaaggcttaagagaatgagacgtgaagagaagaagtcggcagccttcgccaaaatcctggatcccgcctatcaggtggataagggagggagggtgagattcgtggtcgaactcgccgatccaaagcttgaagtcaaatggtacaaaaatgggcaggaaattagacctagcactaaatacatctttgaacacaagggctgccagcggattctcttcattaataattgccagatgaccgacgactccgagtactacgtcacggcaggcgatgagaagtgcagtacagagttatttgtacgagagccccctattatggttacgaaacaattggaagacactacggcgtattgcggggaaagagtagagcttgaatgcgaagtgagcgaggatgacgccaatgtgaaatggtttaagaatggagaagagattatcccgggccctaagagtcggtaccgcatcagggttgaaggaaaaaagcacatcctgatcattgaaggggcgacaaaagccgatgctgcagagtacagtgtcatgacgactggcggacagtcatctgctaaactcagcgttgacttaaagccactgaagatcttgactccgttaaccgaccagacggtgaatctgggtaaggagatctgcctcaaatgcgagatcagtgagaacatccccggaaagtggaccaagaacggattgccagtgcaggaatctgatagattaaaggtcgttcacaaagggcggattcacaagttggttatcgccaacgccctaacggaggacgaaggtgattatgtctttgcaccagacgcttataatgtcaccctgccagcgaaagtgcacgttatcgatcctcccaagatcattctggatggactggacgctgacaataccgtgacagtgatcgccggtaataaactgagactggagattcccatctcaggcgaaccgcccccaaaggcgatgtggtcccgcggtgataaggccatcatggaggggagtgggcggatccgaacggaatcctaccctgacagcagtacgttggtgatcgatattgctgaacgcgacgattccggggtctatcacataaatctgaagaacgaggccggggaggcacatgcatccattaaagtgaaggtcgtcgacttcccagaccctcccgtcgcaccaactgtgaccgaagtcggtgacgactggtgcattatgaattgggagccccctgcctacgatggcgggtctcccatcttggggtacttcattgagaggaagaagaagcaaagctccaggtggatgagactgaatttcgatctgtgtaaagagactaccttcgagcccaaaaaaatgatcgaaggcgtcgcctatgaggtgcgcatttttgcagtaaatgccatcggtatctcaaaaccaagcatgccaagtcgcccatttgtgcctctagcggtaacttcccccccaaccctcttaactgtagatagtgttactgataccacagtcactatgcgttggcgaccacctgaccacatcggcgctgcgggcctcgatggctacgtgctcgagtattgctttgaaggaaccgaggattggatcgtagcaaataaggacctcattgacaagacaaaattcacaatcacaggattgccgacggacgctaaaatcttcgttagggttaaagcagtcaatgccgcaggcgcctccgagcccaagtattactcccaacctattcttgttaaggagatcattgaaccacctaagattaggatcccccggcacctgaagcagacttatatcagacgcgtgggagaggctgtcaacctcgtgatcccgttccagggcaaacctagaccagagctgacttggaaaaaagatggagcagaaattgataagaatcagatcaacattcggaattccgagaccgataccatcattttcataaggaaggctgagagaagtcattcaggcaagtacgacttacaggtgaaagttgacaaattcgttgagacagcgtctattgacatacaaatcattgataggcctggacctccccagattgtaaaaatcgaggacgtttggggtgagaacgtggccttaacttggaccccaccaaaagacgacggcaatgctgctatcactgggtatacaattcagaaggccgacaagaaatctatggagtggttcaccgtcatcgagcattaccacagaacgtccgctaccataaccgaactggtcatagggaatgaatattacttcagggtcttttcagagaatatgtgtggattgagcgaggatgcgaccatgacaaaggagtccgctgtgattgccagagacggcaagatctataaaaatccagtgtatgaagacttcgacttttccgaggctcccatgttcactcagccactagtaaacacctatgcaatcgcgggatacaatgctaccttgaactgtagtgttcggggaaaccccaaacccaaaattacatggatgaagaacaaggtggccatcgtcgacgacccgagatatagaatgttctcgaaccagggtgtgtgtactctggagattcggaaacctagcccctacgacggtggtacatactgttgcaaagctgtcaacgatcttggcactgtggaaattgagtgcaaattggaggtgaaggtgatctaccagggcgtcaatactcctggccagccggtcttcctggaaggacagcaacagagtctgcacaacaaggacttttag

SEQ ID NO: 196154 - DNA, 3822 bp, synthetic construct
  misc_feature 1..3822: note = Description of Artificial Sequence: Synthetic coding sequence
  source 1..3822: mol_type = other DNA
atgcccgagcccggcaagaagcccgtgagcgccttcagcaagaagccaagatcagtggaggtagcagcaggaagccccgccgttttcgaggcggaaacggaaagggccggggttaaagtgcgctggcagcggggaggttctgacatttcagcctccaacaagtatgggttggccaccgagggaactcggcacacgctgacggtgagggaggtcggccctgcagaccaagggtcatatgcggtgattgccgggtctagtaaggtcaaatttgacctcaaggttattgaggccgaaaaggcagaacccatgttggccccagcccccgcacccgctgaagccacgggggctcctggtgaggcacctgcacctgctgccgaacttggcgaatctgctccatctcctaagggctcttcctccgcagccttgaatggacccactcctggtgcccccgacgacccaatcggcctctttgtaatgaggccgcaggatggggaggtcaccgtgggcgggagtatcacattttctgccagggtggctggtgcctcgctacttaagcctcccgttgtgaagtggttcaaggggaagtgggtggacctgtcttccaaggttggccagcacttgcaacttcacgacagctacgatcgggcatcaaaagtgtatcttttcgagttgcacatcacagatgcacaacctgcctttaccggatcttacaggtgtgaagtgagtacaaaagacaagttcgactgctccaactttaacttaactgtgcacgaggctatgggaacgggtgacctcgacttgctctccgcgttcaggcggactagtctggcaggggggggtaggcggatttccgactcccatgaagacaccgggatactcgacttcagtagcttgctgaagaagagttcttcattccggacccctcgcgattccaagcttgaggcgccagctgaagaagacgtctgggaaatcctgaggcaggccccaccatcggagtacgaaaggatagccttccagtatggagtgactgatctccgggggatgctcaagaggttaaagggaatgaggcgggatgagaaaaagagcaccgccttccaaaaaaaactcgagccagcttatcaggtgtctaaaggacacaagattagattgactgttgagctggccgaccacgacgccgaagtgaaatggttgaaaaatgggcaggaaatccagatgagcggaagatacatctttgaaagtattggtgctaagaggacactgaccatcagtcaatgcagtttggctgatgacgccgcatatcagtgtgtcgttggcggagagaagtgttctaccgagctgttcgttaaggagcctcccgttctaattacacgccctctggaagatcaactcgtgatggtggggcaaagagtggaatttgagtgtgaggtgagcgaggagggtgcgcaggtcaaatggctgaaggatggcgttgaactcacccgagaggagacattcaagtatcgttttaagaaggacggacaacggcaccacctcatcatcaatgaggcaatgctggaagacgccgggcactacgccctgtgtacgagtggcggacaggcattggctgagctgattgtgcaggagaagaaactggaggtgtatcagagcattgctgacctaatggtgggagcgaaagaccaggcagttttcaagtgtgaggtttctgatgaaaacgtacgcggcgtctggttaaagaatggaaaggaactggtgcccgatagccggattaaggtttctcacattggcagggttcataagttaacaatcgatgacgtgactccagcggatgaggctgactacagcttcgttcccgaaggctttgcttgcaatctgtcggccaagcttcacttcatggaagtgaaaatcgactttgttcctcgacaggaaccacctaaaatccaccttgattgccccggtcgaattcctgacactatcgtagtggtggctggcaacaaactgcggcttgacgtgccaattagtggggatcctgcacccaccgttatttggcagaaagccataactcagggcaacaaggctcctgccaggcctgcccccgacgcccctgaagacactggagattctgatgaatgggtatttgacaaaaagttgttgtgtgagaccgagggtagggttcgggttgagactactaaggatcgcagcatttttaccgtggaaggggcagaaaaagaagatgagggcgtctacactgtgactgttaaaaacccagtgggagaggaccaggtcaaccttacagtgaaagtgattgacgtgcctgatgcgccagcggctccgaagatctccaacgttggcgaggatagctgtacagtccaatgggagcctcctgcgtatgacggaggccaacctatactggggtatattctcgagcggaagaagaaaaaaagttatcgctggatgcgactcaacttcgatttgattcaggagcttagtcatgaggcaaggcgaatgatcgagggcgtagtgtacgagatgagggtttatgcagtgaatgctatcggcatgagccgcccatctcccgcttcccaaccctttatgcccatcggacccccatcggagcctactcatcttgctgtggaggacgtgtccgacaccactgtttctctgaagtggcgcccacctgaaagggtgggcgctggcggattagacggttactcagtggaatattgccccgaggggtgtagcgaatgggtggcggccctacagggcctcaccgagcacacctcaatactggtgaaggatctgccaaccggcgccaggctcttgtttcgcgtccgggcccataacatggctgggccaggcgcccctgtcacgaccactgagcctgttaccgtgcaggaaattctccaaagacctaggttgcaactaccccggcacctccggcagacaatccaaaaaaaggtcggagaaccggtcaatctgctgataccgtttcaaggtaagccacggccgcaagtgacatggacaaaggagggccagccactcgccggtgaagaagtctccatcagaaactcaccaaccgacaccatccttttcataagagctgctcggcgagtccattccggaacatatcaggttactgtgagaattgagaatatggaggacaaggctactctcgttctgcaagtcgttgacaaaccgagtcctccccaggatttgagagtgaccgatgcctggggactgaatgtcgctctggagtggaaacccccccaggatgtcggcaacacggaactgtggggttacaccgtccaaaaggccgacaagaagaccatggagtggtttaccgttctcgagcactatcgccggacccactgcgtggtgcccgaactcatcatcggcaatgggtattattttcgcgtattttcccagaacatggtgggattctccgacagagccgcgaccaccaaggaacctgtgtttatccctaggccgggaattacctatgagcctccgaactataaggctctggacttctcggaggccccgagctttacccagccccttgttaaccggagtgtaatcgccggctacaccgccatgctgtgttgtgcggtgcgggggtcccctaaacccaagatcagctggttcaaaaatggcttagatctaggggaggacgctaggtttcgcatgttttcaaagcagggagtgttgactctggagatcagaaaaccctgtccatttgacggtggaatctatgtgtgtagagctacaaaccttcagggggaagccagatgtgaatgcagattagaggtacgcgtgccacagtag

SEQ ID NO: 196155 - DNA, 3825 bp, synthetic construct
  misc_feature 1..3825: note = Description of Artificial Sequence: Synthetic coding sequence
  source 1..3825: mol_type = other DNA
atgcccgagcccggcaagaagcccgtgagcgccttcagcaagaagcccaggagtgtggaagtagcggcggggagtcctgccgtctttgaagccgagactgagcgggcgggggtgaaggttcggtggcaacgcgggggttctgatatatcggcatcaaataaatacgggctcgcaaccgagggcacacggcacactctgaccgtgcgcgaggtgggccctgcagaccaaggctcctacgcagtaattgcaggatcatccaaggtgaaatttgatctgaaagtgattgaagcagagaaagccgagcccatgctggcacctgcgcctgcaccggccgaggctacaggggcgcccggagaggcccctgcgcctgcggccgaactgggagagtccgctccatcgcctaagggaagctcctccgctgctctcaacggccctacccctggtgcacctgatgaccccatcggactgttcgtcatgcgccctcaggacggcgaggttactgttggtggttcgatcacattcagtgcacgagttgctggggccagcctattgaagcctcctgtggtgaaatggtttaagggtaagtgggtagacctcagcagtaaagtcggtcagcaccttcagctgcacgacagctacgatcgagcgtccaaggtgtacctttttgagctgcacatcacggacgcacagcctgcctttacaggtagctatcgttgcgaagtttcgactaaggacaagtttgactgctccaactttaacctcacagtccatgaagcaatggggaccggggaccttgatctgctttctgcttttaggcgtacgtccctggcaggtggtggcaggaggatctccgactcgcatgaggatactggaatcttggacttttcctctctcctcaaaaagagctcttctttccggactcccagggacagcaagctggaagcacctgccgaagaggacgtctgggagatccttcgtcaggcccctccctcggaatatgagcggatcgcattccaatatggtgtcacagatctccgcgggatgctcaagaggctgaaggggatgcggcgagacgaaaaaaagtcaaccgctttccagaagaaattagagcctgcttaccaggtgtccaaagggcacaaaattagacttactgtcgagctggctgatcacgatgccgaagttaagtggctcaagaacggacaagaaattcagatgtctggaagcaaatacattttcgaatctattggagcgaagaggaccttaaccataagccagtgctctctggcagacgacgccgcataccaatgtgtggtgggcggagaaaagtgctccacggaactgttcgttaaagagccgcccgtactgatcactaggccgctcgaggaccagttagtgatggtagggcagcgagtggagttcgagtgtgaggtgtccgaggagggggctcaagtgaagtggctgaaggacggggttgaactgactcgcgaagagacctttaagtatcgctttaagaaagatggtcagcgccaccatctaattatcaatgaagctatgctggaagacgctggccactacgcactgtgcacatcaggcgggcaggctctggctgaactgatagtgcaggaaaagaagcttgaggtataccaatccatcgccgaccttatggttggggccaaggatcaggccgtgtttaagtgcgaggtgtccgacgagaatgtccgcggagtgtggttgaagaacggtaaagagctggtccctgactcgcgaatcaaagtctctcacattggtcgcgtacataagcttacaatcgatgacgtgacccccgccgacgaggccgattactctttcgtccctgagggtttcgcctgtaacctatcagcaaagctgcacttcatggaagtgaagatagattttgtgccaagacaggaaccccccaagatccacctggactgcccaggccgcatccctgacacaatagtcgtggtggcgggaaacaaacttcgcttagacgtccccatctcaggagatcccgcccccaccgttatctggcagaaagcaataacccaaggaaacaaagccccagcacggcctgcccctgatgcccctgaagacactggggactctgacgaatgggtcttcgacaaaaaactgctgtgcgaaactgagggccgggtgcgcgtggaaaccactaaggatagatctatcttcacagttgagggggccgaaaaagaagatgagggcgtgtatactgttaccgtgaaaaatccagtgggggaggatcaggttaatttgaccgtcaaggtgatcgacgtgcctgatgcacccgctgcacctaaaatctcaaatgtcggcgaggacagctgtaccgtccagtgggaacctccagcttatgacggcggccagccaatcctcgggtatattttggaaaggaagaaaaagaagagctatcggtggatgcgcctgaatttcgatctcatacaggaactaagccacgaggctagaagaatgattgagggcgtcgtgtacgaaatgcgcgtatatgcagtcaatgccatcggaatgtctcgaccaagtcctgcctcccagcccttcatgcctattggtccacctagtgaaccaacgcacctggcagtggaagacgtgtctgatacaacagtgagccttaaatggcgaccccctgagcgcgttggagccggcggcctcgacggctactcagtcgaatactgccccgaaggatgctccgaatgggtcgccgccctgcaaggactgacagagcacacgtctatattagtgaaggaccttccgacaggagcacgcctgctctttcgtgttcgagcccataacatggctggccctggtgccccagtcaccaccaccgagcccgtgacagtgcaggagatcttacaacgcccgcgtttgcaactcccaaggcacctcaggcagaccatacagaagaaagttggggagccagtaaatctgcttattccatttcaggggaagccgcgaccccaggtcacctggactaaggaaggacagcctctcgctggcgaggaggtgtctataagaaatagccctacagatacaattctctttattagggccgccaggagagtgcactctggtacctaccaggttaccgtgagaattgagaatatggaagataaggccacactcgtcctccaggttgtggacaagccctcgccacctcaagatcttcgcgtcacggacgcatggggcctcaatgttgcccttgaatggaaacctcctcaggatgtgggcaataccgagctctggggctacacagttcaaaaggccgataaaaagacgatggaatggtttactgttctggagcactatcgtagaacccactgtgttgtcccagaactgatcatcgggaatggatactatttccgggtgtttagtcaaaacatggtaggcttttcagatagagctgcgactactaaagagccagtgttcattccgcgccctggaattacctatgagccccctaattacaaggccctggacttcagtgaagccccctcttttacacagccgctggtgaacagaagtgttattgccggatataccgccatgttgtgctgcgctgtccgaggttctcccaaacctaaaatctcttggttcaaaaacggcctggacctgggggaggacgccaggttccgaatgttttccaagcaaggtgttcttacattggagatccgtaaaccctgcccttttgatggcgggatatacgtgtgccgggccacgaatctgcaaggagaagcccgatgcgaatgcaggcttgaggtgcgggttcctcaatag

SEQ ID NO: 196156 - DNA, 3825 bp, synthetic construct
  misc_feature 1..3825: note = Description of Artificial Sequence: Synthetic coding sequence
  source 1..3825: mol_type = other DNA
atgcccgagcccggcaagaagcccgtgagcgccttcagcaagaagccgaggagcgtggaggtcgccgctggcagtcccgcagtatttgaggccgaaactgagagagctggtgtgaaagttcgatggcagcgcggcggtagcgatatctccgcctcaaacaagtacggacttgctaccgaggggaccaggcacactctgacagtcagagaagtgggccccgcagatcagggcagttacgctgttatcgccggtagttccaaagtgaagttcgatctcaaagttatagaggcagagaaggccgaaccgatgttagctcccgcacccgcccccgctgaggcgactggtgcacctggagaggctcctgccccggcggctgagctgggcgagagcgcaccctccccaaaaggtagcagttcagctgctctgaatggcccgacacccggtgcaccagacgatcccatcggattattcgtaatgagaccccaggacggggaggtgacagttggcgggtctatcacattctcagccagagtggccggcgcatccctgcttaaaccgccagtggtgaagtggtttaaggggaaatgggtggacctatcctccaaagtggggcagcacctccagctgcatgacagttatgacagggcatcaaaagtctatctctttgagttgcatattaccgatgcacaacccgcctttaccggctcctacaggtgcgaggtctcaaccaaggacaagtttgattgttccaacttcaacctcaccgtgcacgaggccatggggactggtgacctggatctattaagcgcattccggcgtacaagtctggcaggcggcggaaggcgtattagtgattcccatgaagacacagggattctggatttttcatcccttctgaagaagcgtgattcatttcggacacccagagacagtaagctcgaagcccctgcagaggaggatgtctgggagattcttcgacaggccccgccctcagagtacgaaaggatagcgttccaatatggcgtaaccgacctaagggggatgctgaagaggcttaagggcatgcggcgcgacgagaagaagagtacagcttttcaaaagaagctcgagcccgcctaccaagtttctaagggccataaaataagactaaccgttgagttggctgaccacgacgcggaagtcaagtggctcaaaaacggtcaggagattcagatgagcggcagtaagtacatcttcgaatcaatcggcgccaagagaactcttactatctcacagtgtagcttggctgacgacgctgcataccagtgcgtggtcggtggcgagaagtgctctacagagctgtttgtgaaagagccgcccgtgttgatcacacggcccctcgaagaccaactggttatggtgggacaacgtgttgaatttgagtgcgaggtcagcgaagagggcgctcaggtgaaatggctcaaggatggagtcgagctgactcgcgaggaaaccttcaaatatagatttaagaaggacggtcagcgccatcatttgatcataaacgaggctatgctggaagacgccggtcattatgccttgtgcacctcgggcgggcaggccctggctgaactgattgtccaagagaaaaaactggaggtttatcagtcgatcgccgacctcatggtgggggctaaggaccaggccgtgttcaagtgtgaagtgagcgacgagaatgtgcggggcgtgtggctgaagaatggcaaggagctggttcccgactcacgaatcaaggtctctcacattggccgggttcataaacttactatagatgatgtcacacccgccgacgaagcagactactcatttgtgcccgaaggtttcgcctgtaatctatccgcaaagcttcacttcatggaagtcaagatcgactttgtgccaagacaagagccacccaagattcacttagattgtcctggcaggatacccgataccatcgtggtggtggctggcaataagctgaggttggacgtgccaatttcaggcgaccctgcccccactgtgatatggcagaaggcaataacacaaggtaacaaggcgcctgcgcgcccagctcctgatgcacccgaggataccggggactcagatgagtgggtgttcgataaaaagttactctgcgagactgaagggagagtgcgggtcgagactactaaagaccgttctatttttactgtggagggggccgagaaggaggatgagggggtgtacaccgtcacagttaaaaaccccgtaggcgaggatcaggttaatctgactgttaaggtgatagacgtcccagatgcacctgctgcacccaaaatctcaaatgtgggggaggattcgtgtacggtgcagtgggaacctccggcctatgacggcgggcagccaattctcggctatattttggaaagaaagaaaaaaaaatcctaccgatggatgcggctgaactttgatttgattcaagaacttagtcacgaggcccgccggatgattgagggcgtggtctatgagatgagagtctacgcagtaaatgccattggtatgtccagaccctctccggcctcgcagcccttcatgccaatcggcccaccctccgaaccaactcatctcgccgttgaggacgtgtcagatacaaccgttagcctgaagtggcgcccacctgagcgagtcggagcaggaggcttagacggttattcggtggagtattgccccgaaggatgtagcgaatgggttgcggcactgcaggggctcacggagcacactagcattctcgtgaaggacctccctacaggcgcacggctgctgtttcgcgtccgagctcataatatggcaggcccgggcgcacccgtgacaactacagagccagtgaccgttcaagaaatcctgcagagacctcggctacaactgccacgtcacctccggcaaactatccagaagaaggtcggcgaaccagtgaaccttctgattccgtttcagggtaagccccggccccaggtcacttggacgaaggaagggcaacctcttgccggggaagaggtctcaatacggaattccccgacagataccatcctgtttattagggccgcccgaagagttcacagcggtacctatcaggtaactgtaaggatagagaatatggaggacaaggccacattggtacttcaggtcgtggataaaccctcccctccccaagacttgcgcgtgactgacgcctggggattaaatgtggctctcgagtggaagccgccccaggacgtgggaaatactgaactgtggggctataccgtccagaaggcagataaaaaaaccatggaatggtttaccgtgttagaacactatcgtcggactcattgcgttgttcccgaactgatcattggaaacgggtactacttccgcgtcttcagccagaatatggtcggattcagcgatagagctgctacaaccaaggagccagtgtttattccccgtccagggattacctacgagcccccgaattacaaagcccttgatttctccgaggctcccagtttcacccaaccactagtgaatagaagcgttatcgcaggttacacagccatgctgtgctgtgctgtccgcggctctcccaagccaaagatctcttggttcaagaacgggctcgatctaggagaggatgcccggtttcgaatgttcagcaagcagggagttcttaccctggagattcggaaaccctgtccctttgatggaggcatttacgtttgtagagctacaaacctccaaggagaagcgcgctgcgagtgtagactcgaagtccgggtcccgcagtag

SEQ ID NO: 196157 - DNA, 3426 bp, synthetic construct
  misc_feature 1..3426: note = Description of Artificial Sequence: Synthetic coding sequence
  source 1..3426: mol_type = other DNA
atgcccgaggccaagcccgccgccaagaaggcccccaagggcaaggacgctccgaaaggtgctccaaaggaggcccctccgaaggaagccccagcagaggcccctaaggaagcgcctcctgaagaccagtcacccaccgcagaagaacctacaggggtctttttaaagaagccagattccgttagcgtggagacgggtaaagacgcagtagtcgtagctaaggtgaatgggaaggagctgccagataaacccacaatcaagtggttcaagggtaaatggttggaactggggtccaaatcaggagcaagattcagcttcaaagaatcccacaatagcgctagtaatgtgtacaccgtggagctgcacataggaaaggtcgtactgggtgatcgcggctactaccggcttgaggtgaaggccaaagatacatgtgacagctgtggtttcaacatagacgtggaggctccacgccaggatgcttcaggccaatcgttagaaagtttcaagcgcaccagcgagaaaaagtcagatacagcaggcgaactcgattttagtggcctcctgaagaagagagaggttgttgaagaagaaaaaaaaaagaaaaagaaagacgacgacgacctggggatccctcccgaaatttgggaactcttaaagggagctaagaagtccgagtacgagaaaatcgcgttccagtatggaataacagatctaagagggatgctgaagcgtctcaaaaaggctaaggtggaagttaagaagagcgcagcttttaccaagaagctagaccctgcataccaggtagatcgcggcaataagataaaactgatggtggagattagtgatcctgatctgacgcttaagtggtttaagaacgggcaggaaatcaagccatcttcaaagtacgtctttgagaatgtgggaaagaaacgtatccttactatcaataagtgtactctcgccgacgatgccgcttacgaagtagccgtcaaagacgaaaagtgcttcaccgaactgtttgtgaaggagccccccgttctgatcgttacaccactggaggaccagcaggtgttcgtaggagacagggtggagatggctgtagaggtgtccgaagagggtgcccaggtaatgtggatgaaggacggagtggagctgactcgtgaggattccttcaaagcacgctataggttcaaaaaggatgggaagagacacatcctgattttctctgatgtggtgcaggaggatcgcggacggtaccaagtcatcacaaacgggggtcaatgcgaagctgaacttatcgttgaagaaaaacagctggaagtgcttcaggacatcgccgatttgaccgtaaaggccagtgaacaagccgtattcaaatgcgaggtgagcgatgagaaagtgactggaaagtggtataagaatggtgtggaagtgagaccatccaaaaggatcactatcagccacgtgggcaggttccataagctggtcatagatgatgttcgccctgaagacgagggcgattatacatttgttcccgacgggtacgccctgtcactttctgccaagttaaattttctggaaattaaggtggaatatgtgcctaagcaggagccccccaaaattcacttggactgtagcggaaagacttccgagaatgctattgtcgttgtggctggtaacaagctgaggttagatgtgtcaatcactggcgagccaccgcccgtggccacatggctcaaaggtgatgaggtgttcaccacaaccgaaggccggactcgaatcgagaagcgcgtggactgctcaagttttgtgatcgaatcggcacagcgtgaggacgagggccgctacacaattaaagtcaccaatcccgtcggggaggacgtagccagtattttcctccaggtggtggatgtgcctgacccacctgaagcagtccggatcaccagcgtgggtgaagactgggctattctcgtttgggagcctcctatgtatgatgggggcaagccagttaccggatatctggttgagcgaaaaaagaagggatcccagaggtggatgaaacttaactttgaggttttcacagaaacaacttacgagagcactaaaatgatcgagggcatactgtatgaaatgcgggtcttcgctgtcaatgccatcggcgtgtcgcagccatctatgaatactaagcccttcatgcctatcgccccaacgtctgaaccgttgcatcttattgtggaggatgtaacagacactacaactaccctgaagtggcgcccacccaaccgcattggcgctgggggcatcgacgggtacctagtggaatactgcctggaaggttcagaggaatgggtgcccgctaacacagaacctgtcgagcgatgcggtttcaccgtgaaaaatctgccaactggtgcccgcatcctgttcagagtggtgggcgtcaatattgccggaaggtccgaacccgcgacactcgcccagcccgtgactatacgcgaaatagcagaacctcccaagattcgcctgcctcgacacttacggcagacttatatcaggaaagtgggcgagcagctgaatctggtcgttccatttcaaggcaaacccagacctcaggtcgtctggactaagggaggcgcccctctggacacaagccgagtccacgtgcgcaccagtgatttcgacacagtgttcttcgtcaggcaggccgccaggtctgactccggtgaatacgaactgagtgttcagatcgagaacatgaaggatactgctaccatccggatccgggttgtcgagaaagctggtcccccaataaatgtgatggtcaaagaggtgtgggggaccaacgccctcgtggagtggcaggcccccaaggacgatggtaattcggagattatgggctattttgtgcagaaggcagataagaaaaccatggaatggttcaatgtctacgagagaaacagacacacgtcctgtaccgtgagtgacctgattgtggggaatgaatactatttccgggtctacactgagaacatatgcggactgtcagactctccaggcgtgagtaagaataccgccagaatattaaagaccgggatcacattcaagccttttgaatacaaagagcatgattttcgtatggcgcctaaattcttgaccccactaattgaccgggtagtggtcgcaggctattctgctgcactgaactgcgcagtcagggggcatccgaaaccaaaagtcgtttggatgaagaataaaatggagatacgggaggaccccaaattccttattaccaattaccagggagttctgactctcaacatacgaaggcccagtccattcgacgcaggcacatatacttgtcgtgccgtaaacgaactgggggaagctctggcagagtgtaaactggaagttcgagtgcctcagtag

SEQ ID NO: 196158 - DNA, 3426 bp, synthetic construct
  misc_feature 1..3426: note = Description of Artificial Sequence: Synthetic coding sequence
  source 1..3426: mol_type = other DNA
atgcccgagcccaccaagaaggaggagaacgaggtgcccgcccccgcgcctccccccgaggagcctagcaaagaaaaggaggctggaaccacgcctgccaaggactggaccctggtggagacaccccctggggaggagcaagcaaagcagaacgcgaattcccaactatccatcttgttcatagagaagccccagggcggcaccgtcaaagtcggtgaggatattacttttattgcaaaagtaaaagccgaggacttattacggaaacccaccataaaatggttcaaaggcaagtggatggaccttgcctcaaaggccggtaaacatcttcagctgaaggaaacattcgaaaggcactctagagtgtatacttttgaaatgcagatcatcaaagctaaagacaattttgccggtaactatcggtgcgaggtcacatacaaggataaattcgattcttgttccttcgatctggaggttcacgaaagtacgggtacaactcccaatatcgacattcggagcgcgtttaaacggtcaggcgagggccaggaggatgccggtgagttggatttctcaggtctgcttaaacggcgggaagtgaagcagcaggaggaggaaccccaagtagatgtttgggaactgctcaagaatgctaaaccatctgagtatgagaaaatcgccttccagtacggcatcaccgatctgcgcggcatgttgaagcgcctaaagaggatgcgcagggaggagaagaagagtgcagcatttgctaagatcttggaccccgcttaccaggtcgataagggcggtcgcgttagatttgtggtggagctggcagatcccaagctggaggttaagtggtataaaaacggtcaggaaattaggcccagcacgaagtatatctttgagcacaaggggtgccagaggatcctctttatcaataactgccaaatgacagacgattccgaatactacgtgacggctggcgatgagaaatgctctactgagctgttcgtgcgggaaccccctataatggttactaaacaactcgaggacactacagcttactgtggcgaacgagtagaactggaatgcgaggtttctgaggacgacgcaaacgtcaaatggttcaaaaatggcgaggagataataccgggcccaaagtctaggtaccgcatccgcgttgaggggaaaaagcatattttgatcatcgagggggctactaaagccgacgccgcagagtactctgttatgacaacgggcggccagagtagtgccaagctcagtgtggatcttaaaccactaaaaatacttacccctctgactgatcaaacagtcaatctgggaaaggagatttgtctgaaatgtgaaatctctgagaacatccccggcaagtggaccaagaatggactgcccgttcaggagagcgatagactgaaagtggtgcataaagggagaattcataagcttgtcatagccaatgctttgaccgaggatgagggcgattacgtcttcgcgccagacgcgtacaacgtgacgttacctgccaaggtacatgtaatcgatccccctaagattattctcgacggtcttgatgccgacaatacagtgaccgtgattgccggtaacaaactgaggcttgagatacccatctccggtgaacctcctcccaaagccatgtggagtcgcggggacaaagccattatggaaggtagcggccgaatcaggactgagtcttacccggattcctcaaccttggtgatagacattgcagaacgtgatgacagtggcgtgtaccatattaatctcaaaaacgaagcaggggaggctcatgcctccatcaaggtgaaggtggttgactttcccgacccccccgtcgcccctacggtaaccgaggtgggcgatgattggtgcatcatgaactgggaacctcctgcttatgatggtggctcacccatccttgggtacttcatcgagagaaagaagaagcagagttcgagatggatgagattaaactttgacctctgcaaggaaaccacattcgagcccaagaaaatgatcgagggggtagcttacgaagtccgcatctttgccgtgaatgccataggcatctccaaaccttcaatgccaagcagacccttcgtgcctttggcagtcacttctccccccaccctgctgaccgtggactcagtgactgacactactgtcaccatgaggtggaggccacctgatcatatcggcgccgcaggcctggatggttacgttctcgagtattgctttgagggctcaacctccgcaaaacagtcggatgagaacggggaggcggcgtatgatctaccagccgaggattggattgtggcaaacaaggacctgatcgacaagaccaagtttactatcactggcctgccaactgacgccaaaatatttgtaagggttaaggcagtgaatgccgcaggcgcctctgagccgaaatattacagccagcccatcctggttaaagaaattattgaacccccgaagattcgaataccaaggcatctgaaacagacttatatacgacgagtcggcgaggctgtgaacctcgtcatcccattccaaggtaagccccgacctgagctaacgtggaagaaagatggggcggagattgataaaaatcagataaacataagaaacagtgaaacagatacaatcatatttatcagaaaagctgaaaggagccacagcggcaaatatgatctccaggtgaaggtagataaattcgtggagacagcctccatcgatatccagattatcgatcgaccgggtcctcctcagattgtaaaaatcgaggatgtgtggggcgagaatgtggctttgacctggacaccaccaaaggacgacggtaacgccgccatcacagggtacacaattcaaaaagcagacaagaaatccatggagtggttcaccgtcattgagcactaccataggactagcgcaaccatcactgaacttgttattggaaatgagtactactttagggtgttttccgagaatatgtgtggactgagcgaggacgcaactatgacaaaggaatcggctgtgatcgcccgggatggcaagatctataagaaccccgtgtacgaggactttgatttctccgaagccccaatgttcacacagcctctagtgaatacatacgccatcgcaggctacaacgcaaccctgaattgttccgtgcgggggaatcctaagcctaagattacttggatgaaaaacaaggtcgcaatcgtggatgatccaagatatcgcatgtttagcaaccagggcgtgtgcaccctcgagattcgcaaaccgtccccgtacgacggtgggacgtactgttgcaaagccgttaacgaccttggcactgtagagatcgagtgtaaactggaggtgaaagtcatcgcccagtag

SEQ ID NO: 196159 - DNA, 3516 bp, synthetic construct
  misc_feature 1..3516: note = Description of Artificial Sequence: Synthetic coding sequence
  source 1..3516: mol_type = other DNA
atgcccgagcccaccaagaaggaggagaacgaggtgcccgcccccgcacccccacccgaggaaccatcaaaagaaaaggaagcaggcaccactccggccaaagatgaagaagaagtaagtccaccttccgccctgccacccggactggggagccgtgcgctggaaagaaaagattccgattggaccctcgtcgaaacaccccctggagaggagcaggccaagcaaaacgccaatagccagctctccatcctcttcatcgagaaaccccagggtggaacggttaaagtaggcgaagacatcacttttatcgccaaagttaaggccgaagacttacttcgcaagcccaccatcaagtggttcaaaggcaagtggatggatctggcaagtaaagccggaaaacacttgcagctgaaggaaacctttgaacgtcacagtcgcgtgtacacttttgaaatgcagatcatcaaagcaaaggacaacttcgctgggaattaccgctgcgaagtcacctataaggacaagttcgatagttgcagttttgaccttgaagtccacgaaagtacaggaaccacccccaacatcgatattcgctccgcgtttaaaaggagcggagaagggcaggaagatgccggcgagctggattttagcgggctactcaagcggcgcgaggtaaagcaacaggaagaggagccacaggtagatgtctgggaactcttaaagaatgcaaaaccttccgaatacgagaagatcgcctttcagtacggcatcactgacctacggggtatgttaaagcgactgaaaagaatgcggcgagaggaaaagaagagcgccgcgttcgctaagattctagatccagcctatcaggtcgataagggagggagggtgaggttcgtcgttgaactggcagaccctaagctcgaggtaaagtggtataagaacggccaggaaattaggccctccactaaatacatatttgaacataaggggtgtcagcggatcctattcattaataactgccaaatgaccgacgattccgagtactatgtcacagccggcgatgagaaatgtagcactgaactatttgtccgcgagcccccaatcatggttaccaaacagctggaggacactaccgcctattgtggcgagagggtagagctggagtgtgaggtgtccgaagacgacgccaatgtgaagtggtttaagaacggcgaggagattatcccaggtccaaagagtagatatcggattagggtggagggtaaaaagcatattctcataattgagggcgcgaccaaagccgacgcagcagagtattccgtgatgacaaccgggggacagagtagcgccaaactcagcgtagatctgaagcccctcaaaatcctcacaccactgacagatcaaaccgtcaatctgggtaaggagatctgcctgaagtgtgagattagcgagaatattcctggaaaatggactaagaatggcctgcccgtgcaagagagtgacaggctgaaggtggtccacaaaggcaggattcacaaactggtgatagccaacgccctgacagaagatgagggagactacgtattcgctcctgatgcctacaacgtgaccctgcccgcgaaagttcacgtaatagaccctcctaagattatcctcgacggcctcgatgcagacaatacagtcaccgtcatcgctgggaacaaactccgtcttgagattcctatcagcggcgagccaccccccaaggcaatgtggtcgagaggggacaaagcaatcatggaggggtccggacggatcagaacagagagctatcccgattccagcactttggtgatcgacattgcagaaagagatgattccggagtgtaccatatcaacctgaagaatgaagctggtgaggcacacgcaagtatcaaggtgaaagtcgttgattttcctgacccacctgtcgccccgaccgtcactgaagtgggagatgattggtgcatcatgaattgggagccacctgcttatgatggaggcagcccgatactcgggtacttcatcgaacgcaaaaaaaaacaaagtagtagatggatgcggcttaactttgatctatgcaaggaaaccacctttgagccgaagaaaatgattgaaggagttgcttacgaggtgagaatcttcgctgtgaacgctattgggatcagcaagccgtccatgccgtcccggcctttcgtgcctctggcggtgacttccccacctacccttctaaccgtggattctgtaacagatactaccgtcaccatgcgttggcggccaccagatcatattggagcagcagggctggacggctatgtgctggaatattgttttgagggaacggaggactggatcgtggccaacaaagatcttatcgataagacaaagttcaccatcacaggcctgcctacggacgctaaaattttcgtgcgcgtgaaggcagttaacgccgctggggcatcagagcccaagtattattctcagccaatcctcgtaaaggagatcatcgaacccccaaaaatccgcatccccaggcatctgaagcagacctatattcggcgggttggggaagccgtaaacctcgtgataccctttcaggggaaaccccgcccggagctgacctggaagaaagacggtgcagagattgacaagaaccagatcaacataagaaattcagaaacagacaccattatcttcatacgcaaagctgaacggagccactcaggcaagtatgacctacaggtgaaagtggataagttcgttgaaactgcttctatcgatatccagatcatcgaccggcctggccctcctcagatcgtaaagatagaagatgtctggggcgagaatgtggccttgacctggacccctccgaaggatgacggcaatgccgctatcacagggtacacaatccagaaagccgacaaaaagtctatggagtggtttacagtcattgaacactatcaccgcacttctgccactatcaccgaactagtcattggcaacgaatactattttcgcgtattcagcgagaacatgtgcgggctctccgaggacgcgaccatgactaaggagtctgcggtgatcgctcgggatggcaagatctacaagaacccggtgtatgaggacttcgatttctctgaggccccgatgtttactcagcctctggtgaacacttatgctatcgcaggatataacgccaccctgaattgcagcgttcgcgggaatcccaagccaaagatcacctggatgaaaaataaagtcgctatcgtagatgatccacggtacagaatgttttctaaccaaggcgtatgcaccctggagatccgcaaaccttccccatacgatggtgggacgtattgttgcaaggccgtgaacgacttgggcacggttgagattgaatgcaagcttgaggtgaaggtgatttatcagggtgtcaacacacctggtcagcccgtgtttctcgaggggcagcagcagtctctgcacaacaaagatttctag

SEQ ID NO: 196160 - DNA, 3447 bp, synthetic construct
  misc_feature 1..3447: note = Description of Artificial Sequence: Synthetic coding sequence
  source 1..3447: mol_type = other DNA
atgcccgagcccaccaagaaggaggagaacgaggtgcccgcccccgccccccctcctgaggagcccagcaaggagaaagaggccggcaccacacctgctaaggacgaagaggaggtaagcccacccagcgcgttgccacctggccttggctccagggccctcgagcgtaaggactcagattggaccctagtcgagaccccgcccggagaagagcaggcaaagcagaacgctaattcacagttatcaatactgttcatcgaaaagcctcagggcggtacagtgaaagtgggggaagatatcacttttatcgctaaggtgaaggcagaagacctcctcaggaagccaacaatcaaatggtttaaggggaaatggatggacttggcaagcaaggcggggaagcacctgcagttgaaggaaacattcgagaggcactctcgtgtgtacacgttcgaaatgcagataatcaaggccaaggataatttcgccggcaactataggtgtgaagtgacgtataaggacaaattcgactcttgcagcttcgacttggaagtgcacgaatcaacaggaactacacctaacatagacatccgctccgcatttaaacgcagcggagagggccaggaagacgccggggagctggatttcagtggtcttctcaagcgccgtgaagtgaaacagcaggaggaagaaccacaggtcgatgtgtgggagctcctgaaaaatgcgaaaccctcagaatacgaaaagatagcctttcagtatggaattacggacctccgcggcatgctaaagcgactgaagcgcatgcggagagaggaaaagaagagtgccgcctttgcgaagattctggaccccgcttaccaggtggacaagggaggaagggtgcggttcgtcgtggaattagccgacccaaagttagaagtcaagtggtataaaaatggacaggaaattcgcccctccaccaaatacatattcgaacataaaggttgccaaagaattctgtttattaacaactgtcagatgacagatgatagcgagtattacgttactgcgggcgacgagaaatgttctaccgagctgttcgtcagggagcctcctattatggtcactaaacaattggaagatacaaccgcctactgtggagaacgtgttgaacttgagtgtgaggtgtccgaggatgatgcaaatgtaaagtggttcaagaatggtgaagagatcattccaggccctaagtcacggtataggattcgggttgagggaaaaaagcacattctaatcattgagggcgctacgaaagccgacgccgctgaatactcagtgatgactaccggtggtcagagcagtgcaaagttaagcgtggatcttaaacctcttaagattctgactccattgactgaccagaccgtaaatttaggcaaagaaatttgcctgaagtgtgaaatctctgaaaatattccaggcaaatggacaaaaaacggactgccggtccaggagagtgatcgccttaaagtggttcataaggggcgcatacacaaactcgtgatcgccaacgcactgaccgaagacgagggtgactacgttttcgccccagatgcatataacgtaaccctgccagcaaaggtccatgtgattgacccgccaaagatcatcctcgatggtctggacgcagataacaccgtcacagtgattgcagggaataagctgcggcttgaaatccctatctccggtgaaccgcccccaaaggcaatgtggtctcggggtgacaaagctatcatggaaggcagcggtcgcattaggactgaatcctatccggattcatctacactggtcattgacattgccgagagggatgacagtggagtctatcacatcaacctaaaaaacgaggcgggtgaggcccatgcgtccatcaaggtcaaagtggttgacttccctgatcctccagtcgccccaacagtgaccgaagtaggtgacgattggtgtattatgaactgggaacccccagcatatgacggcggaagtcccatcctgggttactttattgaaagaaaaaagaaacaaagcagcagatggatgagactcaattttgacttgtgcaaggaaacgacgtttgagcccaagaagatgatagaaggtgtcgcttacgaggtgcgcatctttgcagtgaacgcaatcggcataagcaagcccagtatgccaagtagaccatttgtgcccctggcagtgacatctccacctactttgcttaccgtggatagtgtaacagacacaaccgtgaccatgcgttggcggccacctgaccatattggcgctgccggtctcgatgggtacgtgcttgagtactgcttcgagggcacggaggactggattgtggctaacaaggaccttatcgacaagaccaaattcaccattactggattgcccacagacgcgaaaatcttcgtacgggtaaaggcagtcaacgcagctggagcttccgagccaaaatactatagccagcccattctggttaaggagataatagaacctccaaaaatcagaataccccggcatctgaagcagacctacattaggcgcgtgggtgaagccgtcaacctcgtcattcccttccagggtaagcctcggcctgagcttacttggaaaaaagacggcgcagagatcgacaagaatcagataaacatacggaatagcgagaccgacacaattatcttcattagaaaggccgaacgttcccactctgggaagtacgatttgcaggtgaaggtcgacaaattcgtggaaaccgcctctatagatatccagattatagaccgccctggacccccccaaattgtaaaaatcgaggatgtgtggggtgagaacgtcgcgctgacctggacaccccccaaggatgacggtaatgcagccattactggttacactattcaaaaagcagacaagaagtctatggagtggttcacggtgatagaacattaccataggactagtgcaaccatcaccgagttggtcattggtaatgaatactactttagagtcttcagcgaaaacatgtgcggcctatccgaagatgccacgatgactaaagaatcagcagtaatcgcccgggatggtaaaatctataagaatccggtttacgaggattttgacttctcagaggcgcccatgtttactcagcccctggttaacacttatgccatcgcaggctacaatgctaccttaaattgctctgtgcggggcaaccccaagcctaaaatcacctggatgaagaacaaagtggccattgtggatgaccctaggtatcgcatgttctcaaaccaaggcgtttgcaccctggagatcaggaagccgagcccttatgatggcggcacttattgctgcaaagccgtcaacgacctcggtactgtggagatcgaatgcaagcttgaagttaaggtgatcgcccagtag

SEQ ID NO: 196161 - DNA, 3495 bp, synthetic construct
  misc_feature 1..3495: note = Description of Artificial Sequence: Synthetic coding sequence
  source 1..3495: mol_type = other DNA
atgcccgagcccaccaagaaggaggagaacgaggtgcccgcccccgccccgcccccagaagaaccaagcaaggagaaggaggccggcacgactcccgctaaagattggactttggtcgagacccctcctggtgaagagcaagcaaaacaaaatgccaatagtcaactcagcattctgttcatagaaaagccccagggggggacggtgaaggtgggggaagacataactttcatcgcaaaggtgaaagctgaggacttactgcgtaagcctactatcaaatggttcaaggggaaatggatggacctcgctagtaaagccgggaagcacttacagctgaaagagactttcgagagacactcgagggtatacactttcgaaatgcagatcattaaagcgaaggacaatttcgcaggaaactataggtgcgaagtgacctacaaggataagttcgactcctgctctttcgacctcgaagttcacgagagtacgggaactacacccaatatcgacattagaagcgccttcaaacggtccggggagggccaggaagacgccggtgagctggatttttccggcctgctgaagagaagggaggtgaagcagcaggaagaagagccccaagtggatgtttgggagctgctaaagaacgccaaaccaagtgaatatgaaaagattgccttccagtacgggataacagatctcagggggatgctaaagcgactcaaacgcatgaggagagaagagaagaaaagtgcagctttcgcaaaaattctggacccagcctaccaggtggataagggaggaagagtgcggttcgtggtggaattggctgatccaaagcttgaggtgaaatggtataaaaatgggcaagagatcaggccatctacaaagtatatattcgagcataaaggctgccagcgaattctgttcatcaataactgccagatgacagatgactctgagtattacgtgaccgcaggcgatgagaaatgcagcacagaattatttgtcagagaacccccaatcatggtcaccaaacagctggaagacacaacagcgtactgtggggagcgcgtggagctcgaatgtgaggtgtccgaggatgatgcaaatgttaagtggttcaaaaatggggaagagatcattcccggccctaaaagccgctatagaatccgagtcgaggggaagaagcacattttgatcatcgagggggccacaaaggcagatgctgctgagtactccgtcatgactaccggaggccagtcatcagccaagctgagtgtcgacctcaaacctctgaagattcttactcccctcaccgatcagactgttaatttaggcaaagaaatctgtctgaaatgcgagattagtgagaatattcctggaaagtggactaagaatggccttcccgtgcaggaatcggaccgcctcaaggtggttcacaaggggagaatccataaacttgttattgctaacgccttgacagaggatgaaggcgactatgtgttcgcccccgacgcttataacgtcaccctgccagctaaagttcatgtgattgaccccccaaaaataattcttgatggactagatgcggataatactgtaaccgtcatcgccggaaataagctacggcttgagatccccatttccggagaaccgccccccaaagctatgtggagccgcggcgacaaggccatcatggaagggtcaggcaggatccgcacagagtcttatcccgattcctcaaccttagtcatcgacatagccgagcgcgacgactctggggtttaccacatcaatctcaagaacgaggccggcgaggcacacgcatctattaaggtgaaggtggttgacttccccgacccaccggtggcgccaaccgttaccgaggtcggggacgactggtgcattatgaattgggaaccacccgcctatgatggcggctctccaattctgggatacttcatcgaacggaagaagaagcagtcttctcgatggatgaggcttaacttcgacctctgcaaagagaccacgttcgagcccaagaaaatgatagagggcgtggcctatgaggtcagaatatttgctgtcaatgccatcggaatctccaagccatccatgccaagcaggccttttgtcccactggctgtgaccagtcctcccactctcctgacagtggacagtgtgacggacacaaccgtgacgatgcgctggcgaccacccgaccacattggtgctgcgggactcgatgggtacgtcttagagtactgtttcgaaggatctacatctgcaaaacagagcgatgagaatggggaggccgcctacgatctgcccgccgaggactggattgtggcaaacaaagacctcatagataagacaaagtttaccattactggcctaccaacagacgcaaagatctttgtgcgcgtgaaagcagtgaatgcagccggagcttctgagccaaaatattactcccaaccgattctggtcaaagagatcattgagccacccaagatacgaattcctaggcacttgaagcagacatatattaggcgtgtaggagaagctgtcaatttggtaattccatttcaaggaaaacctagaccagagctgacctggaaaaaagacggagccgagatcgacaagaaccaaattaatattcggaatagcgaaacagacactattatttttatccgaaaagcggagaggagccattcgggaaagtacgacctgcaagtaaaggtggataagtttgtagagacagcctccatagacatccagatcatcgatcgccctggacccccgcagatcgttaaaattgaggatgtttggggagagaacgtggctctgacttggacacccccgaaggacgacggaaacgcagccatcactggttataccatccaaaaggcagacaaaaagtccatggaatggttcacagtaattgaacactaccacaggacatcagccacaatcactgagcttgtcataggaaacgaatactattttcgtgtcttctccgagaacatgtgcggactgtcagaagatgcaaccatgaccaaagagtccgcggttatcgcccgagatggcaagatctataagaacccagtgtatgaagacttcgatttcagcgaggctccaatgttcactcagccactcgtgaatacttatgccattgcaggctacaatgcgactctcaactgtagcgtccgcggaaacccaaagccgaagattacatggatgaagaacaaggtcgcgatagttgatgatccccgctacaggatgttcagcaatcaaggggtgtgcacccttgagatccgtaaaccctcaccctatgacgggggcacttactgttgcaaggcagtcaatgatctaggaacggtggaaatcgaatgtaagctggaggtgaaagtaatatatcagggtgtgaacacccctggacagcctgtctttctcgaaggccagcaacagtcactgcataataaggacttctag

SEQ ID NO: 196162 - DNA, 2349 bp, synthetic construct
  misc_feature 1..2349: note = Description of Artificial Sequence: Synthetic coding sequence
  source 1..2349: mol_type = other DNA
atgcccgagcccaccaagaaggaggagaacgaggtgcccgcccccgcccccccccctgaggagcctagcaaggaaaaggaagccggcaccaccccagccaaggatgaggaagaggtttcaccccctagtgcgctgcccccaggactggggtctcgagccctggaaaggaaggatagcgactggacgctggtggagaccccccctggtgaagaacaggccaagcagaacgctaattctcaactgagtattttgttcatcgaaaaacctcagggcggcactgtgaaggttggggaggacatcacctttatcgccaaggtgaaggcggaggacctgctgcgaaagccgactattaaatggttcaagggtaagtggatggacctcgcatccaaggccggaaagcacctgcaacttaaagaaacgtttgagagacactcacgagtgtatactttcgagatgcagattatcaaagcaaaggataacttcgctggcaactacagatgtgaggtgacatataaggacaagtttgattcctgttcttttgacctggaggtgcacgagagcactgggacaacacccaatatagatatcaggtccgccttcaagagaagcggcgaaggacaggaagatgctggagagctggatttttcgggtctcctcaaaagaagggaggttaaacagcaggaggaggaaccccaggtggatgtgtgggaattgctaaagaatgccaaaccttccgagtacgaaaagatcgcctttcagtatggtatcacagacctgcgtggaatgctgaagagactcaagaggatgcgccgtgaagagaaaaagtcagcggctttcgctaaaatcctggacccggcgtaccaggtggacaagggaggcagagttaggtttgtagttgagctggccgatccgaaactggaggttaaatggtataaaaacgggcaggagattcgaccttctaccaaatacatttttgagcacaaggggtgtcagcgcattctctttataaataactgccagatgaccgacgacagcgaatattacgtaaccgccggtgacgaaaagtgcagtactgagctttttgtgagagagccaccaatcatggtgacaaaacagcttgaagataccacggcctactgcggagagcgagtggagctggagtgtgaagtttccgaggatgacgccaacgtcaaatggtttaaaaatggggaagagatcatccccggccccaaaagccgctaccgcattcgggttgaaggaaagaaacacatcctgatcatcgaaggtgcaacaaaggccgacgccgccgagtatagtgtcatgaccaccgggggtcagtcatccgcgaaattgagcgtagacctcaagcctctgaagatcctgacccctctgactgatcagacagttaacctaggcaaggaaatctgtctgaaatgcgaaatcagcgagaatattcctggcaaatggacgaagaacggactaccagtgcaggagagcgaccggctgaaggtggtacacaaaggacgcatccataaactggtgattgctaatgcgctgactgaagatgagggcgactatgtgttcgcgccagatgcgtacaacgtgacacttcctgcgaaggttcacgtgattgaccccccaaaaattattttagacggcctggacgcggacaacaccgtaaccgtgattgctggcaacaaactcagactggaaattcctatcagtggagaaccaccacctaaagccatgtggtctcgcggcgataaagctattatggagggcagcggacggattaggacagaatcatatcctgacagctcaacgctggtgattgacatcgctgaaagagatgatagcggggtgtatcatattaaccttaagaacgaggccggagaagcacacgcatcaattaaggtgaaagtggtcgacttccccgatccacccgtggcccccaccgtcactgaggtcggtgacgattggtgcatcatgaactgggagccacccgcctacgacggaggttcccccatcctcgggtacttcattgaacgcaaaaaaaagcaatcaagccgctggatgagattgaacttcgatctatgcaaagagacaacgttcgaacccaaaaaaatgatcgagggcgtggcttatgaggtcaggatctttgctgtcaatgcgatcggaatcagcaagccctcaatgccttcacggccctttgtgcctctggctgtgacatctcctcctacattgctgaccgtggatagcgtgacagacaccaccgtgacaatgcggtggcgtcctcgaccccattggtgttccagattccgatggctttgtgccagggtcctgctgtag

SEQ ID NO: 196163 - DNA, 3426 bp, synthetic construct
  misc_feature 1..3426: note = Description of Artificial Sequence: Synthetic coding sequence
  source 1..3426: mol_type = other DNA
atgcccgagcccaccaagaaggaggagaacgaggtgcccgcccccgcacccccccctgaagaaccctctaaagagaaggaggccggcacaactcctgccaaggattggacattggtagaaacaccacctggtgaagagcaggcaaagcagaacgccaatagccaattaagcatcctttttatagaaaaacctcaggggggcactgtgaaggtcggggaagacatcacgttcattgctaaagtcaaggcagaggacttgctgcggaaacctacgatcaagtggtttaagggaaagtggatggacctggcctccaaagccggcaagcacctgcaactgaaggaaaccttcgaacggcactcccgcgtctacacattcgagatgcagataattaaggcaaaagacaatttcgccggcaactacagatgtgaggtcacttacaaggacaagtttgactcatgctcctttgacttagaggtgcacgagagcacaggcaccaccccgaacatcgatatccggtccgccttcaagaggagtggcgaaggtcaagaggacgctggcgaactggacttcagtggtctgctcaaacggcgggaggtcaaacaacaagaagaagagccacaggtggacgtctgggaactgcttaaaaatgcaaaaccttccgagtatgaaaagatcgctttccagtacggtattaccgaccttcgagggatgctcaagagattgaaaagaatgcggcgagaagagaaaaagtccgcagcttttgctaaaatccttgaccccgcttatcaggtagataagggcgggagggtccgcttcgtcgtggagttggcagaccctaaactggaggtgaagtggtacaagaatggacaagagatacgaccatctaccaaatatatcttcgaacataaaggatgtcagcgaatcttatttattaacaattgtcagatgacagacgactcagaatattatgttaccgcgggcgacgaaaaatgctctacggaattgtttgttagggagcctcctattatggtgacgaagcagctggaggacaccacggcttactgcggagagcgcgtcgagcttgagtgtgaggtgtctgaggacgacgcgaacgtcaaatggttcaaaaatggtgaagagatcatcccggggcctaaatccaggtataggatcagagttgaagggaagaagcacatccttatcatcgagggcgccaccaaagcagatgctgcagaatactccgttatgactaccggtggccaaagttcggcaaaactgtctgttgatctcaagcctctcaagatcctgacccccctgaccgatcagaccgtgaacctcggcaaagaaatctgtttgaagtgcgaaatctccgagaacatcccgggcaagtggacaaagaatggtcttcccgtccaagagtccgatagactgaaggtcgtccacaaggggcggatacacaagctggtgatagcaaatgccctgacggaggacgagggggattacgtgtttgctcctgatgcctacaacgtaaccctgcccgccaaagtgcacgtcatcgacccccctaaaattatccttgatggcttggatgccgacaacaccgtgactgtcatcgcgggcaacaagttgcgtctggaaataccaattagcggcgagcctccaccgaaagctatgtggtccaggggtgacaaggccatcatggagggatccggtagaatcaggaccgagagctaccccgattctagtaccctggttatagatattgcagagagggacgattccggcgtatatcatatcaacctgaagaatgaggctggagaggcacatgcttctattaaagttaaggtggtggactttcccgaccctccggtggcccccacagtgactgaggtaggtgatgactggtgcataatgaactgggaaccccccgcttacgacggaggttcccctatcctgggctacttcattgaaagaaaaaaaaaacagtcctcccggtggatgcgcctcaactttgatttatgtaaagagacaacgtttgagccgaagaagatgatcgagggggttgcctatgaggtaagaatctttgcagtcaatgcgatcgggattagcaaaccctctatgccctctcgacccttcgtgccactcgccgtgacatctcctcctaccctgctcactgtggactccgttacggacacaaccgtcacaatgcgatggagaccaccggatcacatcggagccgccgggttagatggatatgttctggaatactgcttcgaaggttccacttcagccaagcagagtgacgagaacggagaggccgcatatgacctccctgccgaggactggattgtggccaacaaagacctcattgacaagactaagtttacaataactggcctgccgacagatgccaagatctttgttcgtgtcaaggccgtgaacgctgcaggggcctctgagcccaagtattactcccaaccaattttagtgaaggaaattatcgaacctcccaagattcgcatcccccggcaccttaaacagacatacatccgccgcgtgggagaggccgtcaacctggtgatcccattccaaggcaagcctcgtcccgagttaacctggaaaaaggacggtgccgagattgacaaaaatcaaatcaacattcggaactcagagacagacaccattatttttattaggaaagccgaacgctcccactctgggaaatacgatcttcaagtgaaggtagacaagttcgtcgagaccgcttctatcgacatccagatcatagatcggccaggaccaccgcagatcgtcaaaatagaggatgtgtggggggagaatgtggctttgacttggacgcctcctaaagatgatgggaacgcagccataactggatacaccatccagaaggccgacaagaaatcaatggaatggttcaccgtcatcgaacactaccaccgaacgtccgccacaatcaccgaactggtgatagggaacgaatattattttcgggtctttagcgagaatatgtgtgggctgtcagaggacgcaactatgaccaaggaatccgccgtaatcgctcgggacgggaagatctataagaaccccgtgtacgaggattttgacttcagcgaggccccaatgttcacacaacccttagtgaacacctacgcaatcgctggatacaatgctaccctgaattgttccgtaaggggcaaccctaagccgaagattacttggatgaaaaacaaggtcgccattgtggatgaccctagatacaggatgttctctaaccagggggtgtgcaccctggaaatcagaaaacccagcccgtacgatgggggtacatactgttgtaaagcagtgaatgatctgggcaccgtggagattgaatgcaaattggaggtaaaggttattgctcagtag

SEQ ID NO: 196164 - DNA, 3372 bp, synthetic construct
  misc_feature 1..3372: note = Description of Artificial Sequence: Synthetic coding sequence
  source 1..3372: mol_type = other DNA
atgcccgagcccaccaagaaggaggagaacgaggtgcccgcccccgctcctcctccagaggaaccaagtaaagaaaaagaagccggcacgactccagcgaaagactggaccttggtggagactccccctggtgaagaacaggcaaagcagaacgcaaacagccagctttcaattctcttcatcgagaagccccaaggggggaccgttaaggtcggcgaggacattacatttatcgccaaggtgaaggcagaggatctacttcgcaaaccaactatcaagtggtttaaaggaaaatggatggatttagcttcgaaagccgggaagcacctgcagctgaaagagacttttgagagacattcgcgcgtctataccttcgaaatgcagatcatcaaagccaaagataatttcgctggtaattaccgatgtgaagtgacctacaaggacaagttcgactcctgctcttttgacctcgaggtgcacgaatctaccgggacgacccccaatatcgatattcgcagtgcctttaagagaagcggagagggacaggaagatgcgggtgagcttgattttagtggtttactgaaacgccgcgaggtgaaacagcaggaggaagagcctcaagtggacgtctgggagctcctgaagaacgctaagccttctgaatatgaaaaaatcgccttccagtacggtatcacggacttacggggtatgctcaaacgcctcaagcggatgcggcgtgaggaaaagaagtccgcagcctttgctaagatcctagacccagcctatcaggtcgacaagggaggccgcgtgcgcttcgtggtcgagctggctgaccccaagctggaagttaagtggtataagaatggccaggagatacggccctctacaaagtacatcttcgaacataagggatgccaaaggattttattcattaataattgtcaaatgaccgatgatagcgaatattacgtgactgccggcgacgagaagtgtagcacagagcttttcgtgcgcgaaccgcctatcatggttactaagcaattggaagatacgaccgcctattgcggcgagagagtcgagctggagtgcgaggtgagcgaggacgacgcgaacgtgaagtggttcaagaatggagaggaaatcatccccggccctaagtcacggtatagaatccgcgtagagggcaagaagcatatattaatcattgagggagcaaccaaggcggacgccgctgagtatagtgtgatgacaacaggagggcagtctagtgctaaactcagcgtggacctcaaacctttgaagatccttacccctctaactgatcagaccgtcaacttgggaaaggagatttgtctgaagtgcgagatatcagaaaatatccctggcaaatggacgaagaatggcctgccggtgcaagagtccgatcgactgaaagtcgtgcacaagggtagaattcacaagctggttattgccaatgccctgacagaagatgaaggagattatgtcttcgcgcccgatgcctacaatgtgaccttaccagcaaaggtgcacgtcatcgatcctcctaagattattctggatggcctggatgccgacaacacagtcacagttatcgctggaaacaagttacggctggaaattcctatcagtggcgaaccaccgcccaaagcaatgtggtctaggggcgacaaagcaattatggaggggagtgggcgcatccgaacagaaagctatccagacagctcaaccttggtgattgacatagccgagcgcgatgactcaggcgtataccatatcaacctgaagaatgaagctggtgaggcccacgcaagcatcaaggtcaaagtggtcgacttcccggatcccccagttgcgcccaccgtcacggaggtgggggatgattggtgtatcatgaattgggaaccacccgcttacgatggggggtctcccatcctgggatatttcatcgaaaggaaaaagaagcagagcagtagatggatgaggctgaactttgacctgtgcaaagagaccacctttgagcctaagaaaatgatcgagggcgttgcctacgaagttaggatcttcgcagttaacgccataggcatatccaagccaagtatgccctcaagaccctttgtgccgttagctgtgactagtcctcccacactgcttactgtagactccgttaccgacacgaccgtcacaatgcgctggaggccccccgaccatatcggcgcagccggattggacggatacgtcttggagtattgtttcgaggggacagaggactggatagtagctaataaggatcttatagataaaacaaagtttacaataactggcctccctactgatgcaaaaattttcgtgcgggtgaaagccgtcaatgcggccggcgcgagtgagccgaagtactatagccagcccatactggtcaaggagatcatcgagcctcctaaaattaggatccctaggcatctcaaacaaacctacattcggcgcgtgggcgaggcagtcaacctggttattccattccaggggaaacctagaccagaactgacctggaagaaggacggcgccgagattgataaaaaccagatcaatatcaggaattctgagactgacaccattatcttcatcagaaaggcagagcgctcgcattccggaaagtacgacttacaagtgaaggtcgataaattcgtggaaacggccagcatcgacatccaaatcatagataggcctggacccccccagattgtcaagatagaggatgtgtggggcgagaacgtggccctcacttggacgccaccaaaagacgatgggaatgctgccatcaccggctataccattcagaaggccgacaaaaaatctatggaatggtttactgtcatcgaacactatcaccggacatccgccacaattaccgaactggtgattggcaacgaatactatttcagagtcttctctgagaatatgtgtggactgagcgaagatgccacgatgaccaaagagagtgccgttatagcgcgagacggtaagatctacaaaaatcctgtatacgaagacttcgattttagcgaagcgcccatgtttacgcaacccctggtgaacacttacgctatagcagggtacaatgcgaccctgaactgctccgtacgaggcaatccaaagccgaagattacctggatgaagaacaaagtggcaatcgtagatgaccctagatatcgaatgttttccaatcaaggtgtgtgcaccctggagattcgtaaacctagcccttatgacggaggtacttactgctgtaaggccgtaaacgacctgggcaccgtggaaattgagtgcaaattagaggtgaaggtgatcgcccagtag

SEQ ID NO: 196165 - DNA, 1434 bp, synthetic construct
  misc_feature 1..1434: note = Description of Artificial Sequence: Synthetic coding sequence
  source 1..1434: mol_type = other DNA
atgatggagaagaacaccagcgagggccccgcctgcagccccgaggagacagcttctgagagtgcgaaagtgcctacagctgaaccccccggagaagtggccgtgagcgagagcacaagggaggaacaagtacctaaaccccaggcccccgcgccccaggccccaacagccagcacagccaccaagccagcgcctcccagcgaggatgtgccctccgccccgctcctgctgacactcgacgatgtgtcatccagttctgtcactgttagttgggagccgcccgagcggctggggaggcttggtctgcaggggtacgtgcttgaactatgtcgtgagggcgcctccgaatgggtaccagtgtccgcccggccaatgatggttacacagcagacggtgcgtaatctagctctcggcgataaattccttctgcgggtctctgccgtgtcttctgccggagcaggaccgcctgccatgctggaccagcccatacacataagggaaaacatcgaagctcccaaaattcgcgtgccgcgacacttgcgccagacttacatccgccaggtgggggagaccgtaaacctccagattcctttccagggcaagcctaagccacaggcgacatggacccacaatggacacgcactcgacagccagcgagtgagtatgagaaccggagatcaggacagcatactttttatccggtcggcgcagagatcagatagcgggcgctacgagctgacggtgcgggtcgaagatctagaggctaaggccgtgattgatatcctggtcatcgaaaagcctgggcctccgtcttccattcgcctgctggatgtgtgggggtgtaatgccgccttgcagtggacccccccacaggacaccggcaacaccgaactgctcggttatatggtacagaaagctgacaagaaaaccgggcagtggttcaccgttctggaacgttatcatcctactacttgcacgatctctgatctcattatcggcaactcctactcgttccgggtgttcagtgagaacctctgcgggttatcgacttccgccacagtgactaaggagctggcccacatccagaaggctgacattgctgctaaaccaaagggctttatagaacgggatttctctgaagcgccgtctttcactcagcctctggcagaccacaccagcacaccgggctactctacccagcttttttgtagtgtgcgcgccagccctaagcctaagatcatttggatgaaaaacaaaatggaaatccagggaaatcccaaataccgcgcactgtcagagcagggtgtctgtacactggagatccgaaaaccatcaccattcgatagcggcgtctatacctgtaaggctatcaatgtgttgggggaggcctccgtcgactgtaggctggaagtaaaagccagcgcggcccattag

SEQ ID NO: 196166 - DNA, 5817 bp, synthetic construct
  misc_feature 1..5817: note = Description of Artificial Sequence: Synthetic coding sequence
  source 1..5817: mol_type = other DNA
atgagcagcgacgccgagatggccatcttcggcgaggccgccccctatcttagaaaacctgaaaaggagcgaattgaggcacaaaaccggcccttcgatagcaagaaggcctgcttcgtcgccgacaacaaggaaatgtatgttaaaggcatgattcagacccgggaaaacgacaaggtgatagttaaaacactggatgaccggatgctcactttgaataatgatcaagtttttcctatgaaccctccgaagtttgacaagattgaggatatggccatgatgacgcatctgcacgagcctgcagttctctataacttgaaagagcggtacgcagcctggatgatctacacatactctggcctattctgtgttactgtaaacccatataaatggctgccggtctacaagccagaagtggtagcggcctacagagggaagaaaagacaggaggcgcccccccatatctttagcattagcgacaatgcatatcagtttatgctgaccgaccgcgacaatcaatcaatactcatcacaggcgagtccggagcaggcaagactgtgaacacaaagcgtgttatccaatactttgccaccatcgccgtgaccggggacaaaaaaaaagagacacaacctgggaaaatgcagggcacactggaagaccagataattcaggcaaaccccctactggaggcgtttggtaatgcgaaaacagtgagaaatgacaattcgtcgcgatttgggaagtttattagaatccacttcggggcgacagggaagcttgcctccgctgatattgaaacgtaccttctggagaaaagcagggttactttccaacttagctctgagcggtcatatcacatcttctaccaaatcatgagcaacaagaagccagagttgatcgatttgctgctgatttctaccaatccctttgatttccccttcgtctctcaaggcgaggttacagttgcatccatcgacgattcagaagaactgctggcgacggataacgctatagacatcttaggattctcttctgaggagaaagtaggtatttataaattaacaggagctgtcatgcactacggtaacatgaaattcaagcagaaacaaagagaggagcaagcagaacccgacggaaccgaggtagcggacaaggccggctatctgatgggactgaactctgccgagatgctgaaggggctgtgctgtccgagggtgaaagtgggtaatgaatacgtgacgaagggacaaaatgtccagcaggtcacaaatagcgtcggcgcgcttgcgaaagctgtgtacgagaagatgtttctgtggatggtcaccaggatcaatcagcaactggacactaaacagcctaggcagtacttcattggtgtcttggacatagctggatttgagatttttgactttaattcgctagagcagctatgcatcaacttcaccaacgagaagcttcagcagttttttaaccaccacatgtttgtgcttgaacaagaggaatacaaaaaagaaggcattgaatgggaattcatcgattttggcatggacctcgcagcctgcatagagctgattgaaaagccaatggggattttttcaattttggaagaggagtgcatgttccccaaagctacggatacctcttttaaaaataagttatatgatcagcatctgggcaaatcaaataatttccagaaaccaaagcctgcaaaaggcaaggcggaagcacacttctctttagtccactacgctggcaccgtggactacaacatcgcgggatggttggacaagaacaaggaccccttgaatgaaactgtggtgggcctgtatcaaaaaagtagcctcaagctgctgagctttctttttagcaattatgccggggctgagacgggcgatagtggtggttccaagaagggtggcaaaaaaaaaggtagtagcttccaaaccgtatctgcggtcttccgcgaaaacctaaacaagttaatgacgaaccttagatccacccaccctcattttgtgagatgtcttattcctaacgaaacaaaaacacccggagtgatggaccattatctggtgatgcatcagttgcgttgcaacggagtgctcgagggcatccgcatttgtagaaaggggttcccctctcgtatactgtacgcggacttcaaacagagatatcggattttaaatgcgtcagccattcccgaaggccagttcattgatagcaaaaatgctagcgagaagctgctgaactctatcgacgtagatcgcgagcagttccgctttgggaatactaaagttttcttcaaagccggcctactggggctgctcgaggagatgagagacgaaaagttagtaaccctcatgacttctacccaggcagtttgtagggggtatctgatgagggtggagtttaagaagatgatggagcgtcgggacagtattttctgtattcagtataacatccgctcattcatgaatgtgaagcactggccttggatgaatctttttttcaagatcaaacccttgctaaagagtgccgaagcagagaaagagatggccaccatgaaagaggacttcgagcggactaaggaagaactcgctcgaagcgaagcacggcggaaagagttggaggagaaaatggtgagcctcttgcaggagaagaacgacctccagcttcaggtgcagagcgaaacggaaaaccttatggatgccgaggaacggtgcgagggcctgatcaagtctaaaattctgcttgaggcgaaagtcaaggagctgaccgaacgtctggaagaagaagaggagatgaatagcgaactcgtggctaagaagcgcaacctggaggacaaatgctcctccctcaaaagagatatagacgatcttgaactcaccctgaccaaggtcgagaaggagaaacacgctaccgaaaacaaagtgaagaatctttctgaagagatgacagctctcgaggagaatatctctaagctcacaaaagagaagaagtccctccaggaagcacatcagcagacactggatgacctgcaggtcgaagaagataaagtgaacggtctgattaagattaatgctaagttagaacagcagaccgatgatctggaagggtctctcgagcaagagaagaagctgcgggcagacctggaacgagccaagagaaagcttgagggcgacctgaaaatgtcacaggaaagcatcatggatctggagaatgacaaacagcaaattgaagagaaactgaagaaaaaggagtttgagttaagtcagttacaagcaaaaatagacgacgagcaggtgcacagcctgcagttccaaaagaagataaaggaattacaagctcgaattgaggagctcgaggaagagattgaagctgaacacacactccgtgccaaaattgaaaagcagcggtcggatttggcccgagagttggaggaaatcagcgagaggctggaggaagcgtcgggagccacgagtgcgcagattgagatgaacaaaaagcgggaggccgaatttcagaagatgcgacgcgatttggaggaggctacactgcagcacgaggccacggctgccactctgaggaagaagcaagccgattccgtggccgagttgggagaacagatcgataacctgcagagggtgaagcaaaagctggagaaggagaagagtgagttgaagatggagatcgacgacatggcctccaatatcgaggctctgtccaaatccaaatccaatatcgagcgcacttgcaggaccgtggaagaccagttttccgagatcaaagccaaagacgagcagcaaacgcagctcatccacgatttgaacatgcaaaaagcccgactgcagactcaaaatggggagctgagtcatcgcgtcgaagaaaaagaatccctgatatctcaactgacgaaaagtaagcaagccttgacccaacagttggaggaactcaagcgccagatggaagaggaaacaaaagcaaaaaatgccatggctcatgccctgcaatctagtagacacgattgtgaccttctgagagagcaatatgaggaggaacaggaagcaaaagcagaactccagcgcgcgctttccaaagcgaacagcgaagttgcgcagtggaggacaaagtatgagaccgatgcgatccagagaactgaggagctggaggaggctaaaaaaaagctggctcagcggctccaggaagctgaggagaacactgagacagctaacagtaaatgtgcaagtctggagaaaaccaagcagagacttcagggggaagttgaggatttaatgcgcgacttagagcgaagccacaccgcatgtgccacgcttgacaagaagcagcgcaatttcgataaggtgctggccgaatggaaacagaagctggacgagtcacaagcagagctggaagccgctcagaaggagtcaaggtccctcagcaccgaactgtttaagatgcgtaatgcctatgaagaagtggtggaccaactcgaaacccttaggagggagaacaagaatctccaggaggagattagcgacctgacagagcagatcgccgagaccggtaagaatttacaagaggctgagaaaacgaaaaagttggttgaacaggagaaaagcgatctccaggtggctcttgaagaggtggagggaagcctagaacacgaggaatccaaaattcttcgcgtgcaactggagttatctcaggtgaagagcgaactggacaggaaggtgattgagaaggacgaggagattgaacagttgaagagaaactcacagcgagctgctgaggcactccagtcagtcctggacgccgagattaggagtcggaacgacgcgctcaggctcaagaaaaagatggagggggacctgaatgaaatggagatccagctggggcactccaatagacagatggcagagacacaaaagcacttgagaacggttcagggacagctcaaagactcccagctacacctagacgacgcactgagatccaacgaagatcttaaggagcagctggctatagtagaacgccgtaacgggctgttgcttgaggaactggaggagatgaaggtggccttagagcagaccgaacgcacacgtcgactatctgagcaggaactcctggacgcatccgacagagttcaactgctccattctcagaacacaagcctgataaacacgaagaagaagttggaggcagatatcgcccagtgccaggcagaggtggaaaactctatccaagaatcacgcaacgcggaggagaaggcgaagaaggccattacagacgcggccatgatggctgaagaactgaaaaaggaacaagacacatccgctcacctagagcgtatgaagaaaaatctcgaacaaaccgtgaaagacttgcagcataggctggacgaagctgagcaacttgcattaaagggcggcaaaaagcagattcagaagttggagaaccgcgttagggaactggaaaatgaactggacgttgagcagaagcgaggcgcagaagccctgaaaggggctcacaagtacgaaagaaaggtgaaagagatgacatatcaagccgaggaagaccataagaacatcctaaggcttcaagatctcgtggataagctgcaggctaaagtgaagagttataaacggcaggccgaagaggccgaggagcaggctaatactcaactcagcaggtgcaggagagtacaacacgagctagaagaggctgctgaacgggccgacatcgctgagagtcaggtaaataaactgcgtgccaagtcgcgtgacgtggggtctcaaaagatggaagagtag

SEQ ID NO: 196167 - DNA, 6111 bp, synthetic construct
  misc_feature 1..6111: note = Description of Artificial Sequence: Synthetic coding sequence
  source 1..6111: mol_type = other DNA
atggccgccgtgaccatgagcgtgcccggccggaaggccccccccagacctggccctgtccctgaggcagcccagcctttcctgtttacgccaaggggcccttcagccgggggggggcctggctccggtacctctcctcaggttgagtggacagcccgcagacttgtgtgggtgccatctgaacttcacgggttcgaagccgctgcactccgcgatgaaggcgaggaggaagcagaagtggagcttgctgaatccggccgccggctgcgtctcccacgggatcagatacagcgaatgaatccccccaaattcagtaaagcagaggacatggcggaactgacatgtctaaatgaggcaagcgtgctacataacctcagagaacgttactattctggtttgatctacacttacagtggacttttctgtgtagttattaacccctacaagcaactccctatatacaccgaagctatagttgaaatgtacagaggtaaaaagcgccacgaagtcccaccccatgtttacgcagtgactgaaggcgcctataggtcgatgctacaggatcgcgaggaccagtcaatcctctgtaccggtgagagcggcgccggaaaaaccgagaatactaagaaagtgatccagtacttggcccatgttgccagttctccaaaaggacgcaaggagccgggggttcctgccagcgtcagcaccgtctcatatggagagttggaacgccagctccttcaggccaatccaattttagaggccttcgggaatgccaaaactgtgaagaacgacaactcctcccgttttgggaagttcattcgtatcaactttgatgtggccggctacatcgttggagcaaatatagaaacatacttgctggagaagagccgagccatcaggcaggccaaggacgagtgttcttttcacattttctaccaattgcttgggggcgcgggggagcagctgaaggccgacctgttgctggagccctgctcccactacagatttttaaccaacgggcctagctctagccccgggcaggaacgagaactgtttcaagagaccttggaaagcctgcgggtgctgggcttcagccacgaggagatcatcagcatgctcaggatggtctccgcagtgctgcagttcgggaacattgccctgaaacgggagcgcaacactgaccaggccacaatgcctgataataccgccgcccagaagctctgtagacttcttggtcttggcgttaccgatttcagccgggcccttttgactccgcggattaaagtgggaagagattacgtccagaaggcccagacaaaagaacaagccgatttcgctttagaagccctcgccaaagccacgtacgaaagattgtttcggtggctggttcttaggctaaaccgagccctggataggtctcctcgacagggtgcaagttttctgggtattctggacatcgccgggtttgagatctttcaactgaattcatttgaacaactgtgtattaactacaccaatgaaaaactgcagcaattatttaaccacaccatgtttgttctagaacaggaggagtatcagcgggaagggataccatggacttttctcgatttcgggcttgatttacaaccctgcatagatttgattgagaggccggccaatccccctggcttactggcccttcttgatgaggaatgctggttccctaaggccacagataaatccttcgtggagaaagtggctcaggaacaggggggccatcctaagttccagaggcccaggcatctccgagaccaggccgacttcagcgttctgcactacgcaggcaaggtggactataaagccaacgaatggctgatgaagaatatggatcctcttaatgataatgtcgctgcactgctgcatcagagtacagataggctgactgccgaaatctggaaagacgagcacgggggttttcagcagttcagctttctgggctcattcccaccaagcccccccgggagcgcggaacgttgttcttcagctatatcacctccgggcgtcgaggggatagtgggcctggagcaggttagcagtctcggggacgggccccctggggggcgtccccgcagaggcatgtttcggacagttgggcagctctacaaagaaagcttatcgcggcttatggcaacactgtccaacaccaatccatcattcgtcaggtgcatcgtgcctaaccatgaaaaacgtgccgggaaacttgagccacggctggttttagatcagctccgatgtaatggtgtgttggaaggcatacgcatatgtcggcagggtttccctaaccggatcctcttccaggagtttcgacaacgctacgagatcctgacacccaatgccattccaaaaggctttatggatggcaagcaggcatgcgagaaaatgattcaggctcttgagctggatcccaatttgtaccgcgtcggccagtctaagattttcttcagggcgggggtactggcccagctagaagaagaacgtgatttaaaagtgaccgacataatcgttagctttcaagctgcagctagggggtacctggcccggagggccttccaaaagcggcagcaacagcaaagcgccttgcgcgtaatgcagcgtaactgcgccgcctacctgaagctccgtcattggcagtggtggcgcttattcacaaaagtcaagcctttactccaggttacccgccaggatgaagtgctacaggcaagggcgcaagagctgcaaaaggtgcaggaactgcaacagcaaagtgcccgagaagtgggcgagctacagggtcgggtcgcccagttggaagaggagcgagcacgcctagctgagcagctgcgggccgaagcagagttgtgtgctgaagccgaggagacccgtgggcggctggcggccagaaaacaggagctcgagctggtggtaagcgaactcgaggcacgggtcggggaggaggaggagtgctctagacaaatgcaaaccgagaaaaaaaggctccagcagcacatccaggagcttgaggctcacttggaagcagaagagggagctaggcaaaaactgcagctggagaaagtgactaccgaagcgaagatgaaaaaattcgaagaggatctgctcctgctggaagaccagaactccaaacttagtaaagagagaaagttgctggaagatcggctggcggaattctcttcccaggccgccgaggaagaggaaaaggtgaagtcattgaacaaattgagactcaaatatgaagccacaatcgccgacatggaggaccggctgcgtaaggaggagaaggggaggcaggagctggagaagctgaagaggcgccttgatggcgagagcagtgagcttcaggagcagatggtggagcagcagcagcgcgctgaagagcttagggctcagctcgggcgaaaggaagaggagttgcaggcggcattagcgagagccgaggacgaaggcggcgcccgggctcagctgctgaagtccctgcgggaagcccaagctgcactcgccgaagcccaggaagatctcgagagtgagcgggttgcccgcaccaaggccgagaaacagaggcgggatttaggcgaagagttggaagccctccgtggcgaattagaggatacactcgactctacgaatgcccaacaggaacttcgctctaagcgagagcaagaagttacggagctcaagaagactctggaagaggaaactcgcattcacgaggcagcggtgcaagagctccgccagagacacggtcaggccctcggggagctcgcagagcagcttgaacaggcccgaaggggcaaaggtgcctgggagaagacgcgcctagctctcgaagccgaagtgtcagagttgcgcgcagagttgtcctccctgcagacggccagacaggaaggcgaacagcggcgtcgtcgcttggaactgcagctgcaggaggtgcagggccgggcgggagatggggaacgagcccgcgccgaagcggccgagaagctgcagcgggcacaggccgaactggaaaacgtgagcggtgctcttaacgaggccgaaagcaaaaccataaggctctcaaaggaattaagcagtacagaagcacaactgcacgacgcccaggagctgttacaagaagaaacgcgcgccaagctggcactgggatcacgcgtgagagccatggaggccgaggccgccggcctgcgagagcagctggaagaagaagcagcagctcgcgaacgagctggacgggagctacagacagcccaagcacagctgagtgagtggcgacgaaggcaggaagaagaggccggtgcgctcgaagccggtgaggaagcccgcagacgggcagccagggaggcggaagccctgactcagcgcctcgccgagaaaactgagaccgtcgatagacttgaacgcgggagaaggcggttgcagcaggagctggacgacgccacgatggacctcgagcagcagcggcagttggtgagcacactcgagaagaagcagcgtaaatttgaccagttacttgccgaggagaaagcggccgttttgagggctgtagaagaacgggagcgggctgaagcagaagggcgcgaacgagaggccagggcactgtctctcaccagagcattggaggaagagcaggaggcccgggaggagctcgagaggcaaaaccgggcactgagagccgagcttgaagccttgctatcatccaaggatgatgtgggaaagtccgttcacgagctagagagagcctgccgcgtagcagaacaggcggccaatgatctgcgggcacaggtgacagagctggaagatgagttgaccgctgcagaggatgccaagttgagactggaagtgaccgttcaggccttgaaaacacaacacgagcgcgatctgcagggtcgcgacgaggctggagaagaaaggaggcggcagcttgccaagcagctcagagatgctgaggtggagcgcgatgaagagcgtaaacagaggactctcgctgtagccgcccgaaagaaactcgaaggcgagttggaagagttaaaggcacagatggcatccgcaggccagggaaaagaggaagcggtgaagcagctgcgaaagatgcaggctcagatgaaggaactgtggcgggaggtagaagagacacgcacctcacgggaggaaattttttcccagaatagggagtcagagaaaagactgaagggcttagaggcggaggtgttgaggctacaggaggaattggcagcctctgacagagcaagacgccaggcccagcaggacagagacgagatggcggatgaagtagcgaatggcaatctgagcaaggccgcaatcttggaggagaagcgccagcttgaaggccggttaggccagctggaggaagagcttgaggaggagcaatccaatagcgagctgctgaacgaccgttacaggaagctacttctccaagtggagtccttgactactgagctgtccgctgaaaggtctttcagcgctaaggccgagtctggacggcaacagttggaaagacagatccaggaattgcggggtaggctgggagaggaagatgccggggcccgtgcgagacacaagatgacgatcgcggccttggaatctaagttagcacaggctgaggagcagctggagcaggagaccagagagcgtattctctccggtaaactggtgaggagggctgagaagagattgaaagaagtggtcctacaggtcgaggaggagcgcagggtggcagatcagctgcgtgaccagctggaaaaggggaatcttcgggtaaagcaattaaagcggcagttagaggaggctgaagaggaagcgagtagggctcaggctgggagaaggcggctacagcgtgagttagaagatgtgaccgaatcagctgagagcatgaacagagaagtcaccactctgagaaaccgcctgaggaggggacccctaacttttacaactcgcacggtaaggcaggttttccggctagaggagggcgtggcttctgatgaagaggcagaggaggcccaaccgggatctggcccatcccctgagccagaaggaagcccccctgcccatccacagtag

SEQ ID NO: 196168 - DNA, 5823 bp, synthetic construct
  misc_feature 1..5823: note = Description of Artificial Sequence: Synthetic coding sequence
  source 1..5823: mol_type = other DNA
atgagcagcgacaccgagatggaggtgttcggcatcgccgccccctttctgagaaagtccgagaaagaaagaatcgaagcccaaaaccagcccttcgatgccaaaacgtattgctttgtggtggactcgaaggaagagtatgcgaaaggaaagatcaaatccagtcaggacggaaaggtaacggtggaaacagaagacaatcggaccctcgtggtcaagcctgaggatgtctatgcaatgaacccccccaaatttgatagaatcgaggatatggccatgcttactcacctgaatgagccagcggtgctttataacctcaaggacaggtacacatcctggatgatttacacctatagtggtctgttctgcgtcacagttaatccctacaagtggctcccagtctacaatccagaggttgtagaaggctatcgggggaagaagcgccaggaggcacctcctcacatattctcaatctctgataacgcttaccagtttatgcttaccgaccgagaaaatcagagcatcctgataaccggggaatccggtgctggcaagacagtcaacaccaaacgggtgatccagtactttgccaccatcgccgccacgggagacctggccaagaagaaggattcaaagatgaaaggtaccctcgaagatcaaatcattagcgcaaatcctctgctcgaagcttttggaaatgccaaaacagtccgcaacgataactcttccaggttcggtaaattcattcgcatccattttgggaccacgggcaagctggcctctgccgatatcgaaacctatcttctggaaaaatctcgcgtgaccttccaactgaaggctgagaggtcctatcacattttctaccaaatcctctctaacaaaaaacccgaacttatcgaactcctcctcattacaaccaacccctacgattaccccttcatatcccagggcgagattcttgtggcctccatcgacgacgccgaggaactgttagccacggattctgcaatcgacatcttaggtttcactcctgaagaaaaatccggactgtacaaactgactggcgccgtcatgcattatgggaacatgaaattcaagcagaaacagagggaagagcaggccgaaccagacggaacagaggttgccgacaagactgcgtacctgatgggcctcaatagttcagatctgctaaaagctctttgtttcccgcgcgtgaaagtaggcaatgaatatgtgaccaagggccaaacagtggatcaagtacatcacgcagtaaatgcgctgtctaaaagtgtatatgaaaaactgttcctgtggatggtcacacggatcaaccagcagctggacaccaagttgcccaggcagcacttcatcggcgtgctggacatcgctgggttcgaaatttttgaatataacagtctggaacagctctgcatcaactttactaacgagaagctgcagcagttcttcaaccaccatatgtttgtgttagagcaggaggaatataaaaaagaaggaatcgaatggaccttcatcgactttggtatggacctggctgcctgcatcgaactcatcgagaagcctatggggattttctcaatactggaggaggaatgcatgtttccgaaagccactgatacgtcatttaagaacaagctgtacgatcagcacctgggcaagtctaataattttcaaaaacccaaagtggttaaaggacgggccgaagcccatttctcactgattcattatgccggtactgtagactactccgtgtccgggtggctggagaagaacaaggaccctttgaacgaaactgtcgtggggctctaccagaagagttccaaccgtttgctcgcccacctgtacgcgactttcgcaaccgcagatgcagactcaggcaagaagaaggttgccaagaaaaaggggagtagcttccagaccgtctccgccttgtttcgcgagaatcttaataagcttatgtccaacctaagaactacacatcctcattttgtgcggtgcattattccaaacgagactaaaaccccaggggcaatggagcatagtctcgttctgcaccagctccggtgtaatggcgtactggagggtattcgcatatgcaggaaaggttttccaaatagaatactttatggggatttcaagcagcggtacagggtattgaacgctagcgccataccagaaggccagttcatcgatagcaaaaaagcgtgcgagaagctgctcgcgagcatcgatatagatcatacacagtacaaatttggacataccaaggtctttttcaaggcggggctgctgggaacccttgaggaaatgcgtgatgaccggctggcaaagctgataacaagaactcaggccgtgtgccggggattcctcatgcgcgttgagtttcagaagatggtgcagaggcgagagtctatcttctgcattcaatataacatacgctcatttatgaatgtaaaacactggccctggatgaagctgttttttaagattaagccgctcctgaagtctgctgaaacagagaaggagatggctacaatgaaagaggagttccagaagacaaaggatgagctggccaaatctgaagcgaaacgcaaagaactggaggagaagctcgtgaccctggtgcaagagaagaatgatctccagctgcaagtccaggcagagtccgagaacctgttggatgctgaggagcgttgtgatcagctgatcaaggccaaattccagctggaggccaagatcaaggaggtcaccgaacgggcggaggatgaggaagagataaatgctgagctaaccgcaaagaagcggaaactggaggatgagtgcagcgagctcaaaaaggacatagatgacctcgagttgactctggcaaaggtggagaaggagaagcacgccactgaaaacaaggttaaaaatttgaccgaggagctgagtggcctggacgaaactattgctaaactcacgcgagaaaaaaaggcactacaggaagctcatcaacaggccctcgacgatctgcaggctgaagaggacaaagttaattccctcaacaaaacaaaatctaaactggagcagcaggttgaagacctggagtcctcattggaacaagaaaagaaacttagagttgaccttgaacggaataaacgcaagctcgagggcgacctgaagttggcccaggaaagtatccttgacctagagaatgacaaacagcagctggacgaacggctgaagaaaaaggattttgagtactgtcagctccagagcaaggtggaggatgagcaaaccctggggctccaattccaaaaaaaaatcaaggaactgcaggcccggatagaggagctcgaagaagagatagaggctgagcgggccacccgggccaaaacagaaaaacagcgctcagattatgccagagagctcgaagaactgtccgaacggctagaagaggccggtggtgtgacctctacccagatagagcttaacaaaaaacgtgaagcggagtttctcaagctccgccgagacctggaggaagctactttacagcatgaggctatggtagccgcactcagaaaaaaacatgccgattcagtggccgagcttggtgagcagatcgacaacctccaacgggtgaagcagaaactcgaaaaagagaaaagcgagttcaaactcgaaattgacgacttatcttcgtccatggagtctgtgtctaaaagcaaggccaacctggaaaaaatatgcagaacactggaggatcaactgtccgaagctagagggaaaaatgaggaaatccagcggagcctgtctgaattgacaacccagaagtcaagactgcaaactgaggcaggcgaactcagtaggcagcttgaggagaaggaatccattgttagtcagctgtctaggtctaagcaggcatttactcagcagaccgaggaactgaagcggcagctcgaggaagaaaacaaggcgaagaatgccctcgcacatgctctgcagagttctcgacacgattgtgatcttctccgggagcaatacgaggaggaacaggagggcaaggccgagttgcagagagcccttagcaaggcaaacagcgaggttgcccagtggcgcactaaatacgaaacagacgcaattcaacgaaccgaagagctcgaagaggccaaaaaaaaactggcacaacgtctgcaagattccgaggaacaggtagaggcagtgaacgccaagtgcgccagcctggagaaaactaagcagagactgcagggcgaggtcgaagacttaatggtggatgtcgagagagctaatagcctggctgcagcgctggataaaaaacagcgaaattttgacaaggtcctggccgagtggaagacaaagtgcgaagagtcccaggcagagctcgaggccagcctgaaggagagccgatctctaagcaccgagctgtttaaacttaagaacgcctacgaggaggctctggaccagttggagacggtgaaaagagagaataaaaacctggagcaggaaatcgccgacttgactgagcagattgctgaaaatggcaaaacaattcacgagcttgaaaagagccgcaaacagatcgagctcgaaaaggccgacattcagcttgccttggaggaggcagaagccgcgctagagcacgaggaggccaagattctgagaatccagctggaacttacccaggtgaaaagcgagatcgaccggaagattgcggagaaggatgaagagattgaacagttgaagaggaattatcaaaggacagtggagacaatgcagagcgctctcgatgccgaggttaggtcaagaaacgaagctattcggttgaaaaagaagatggaaggcgacctgaatgagattgagattcaactgagccacgcaaacagacaggccgccgagaccctgaagcacttgagatccgtgcagggtcagctgaaagacacccagctccatctcgatgatgctctaagaggacaggaggacctgaaagaacaactggccatcgtggagcggagagcaaatctgctgcaagctgaggtcgaagagctgcgggctacactcgaacagacagagcgagctcggaagctggctgagcaggaactgctggattcaaacgaacgggtccaactgctccacacccaaaatacctctctaatccatacaaagaagaagctggagacggacctgatgcagctccagtccgaagtcgaagatgccagccgagatgcaagaaatgccgaggagaaagcaaagaaggcaataacagatgccgctatgatggcggaggagctcaaaaaggagcaggatacatcagctcatttagagaggatgaaaaagaacctggaacagacagtaaaggacctgcagcaccgattagacgaggccgaacagctggccctgaaaggagggaagaaacagatccagaagctcgaaacccgaatcagggagctcgagttcgaattggagggcgagcagaaaaaaaacaccgaaagcgtgaaagggcttcgcaagtacgaacgacgcgttaaagagctgacttatcagagtgaggaggaccgaaagaacgtgttaagactccaggacctggttgataagctgcaggtgaaagtgaaatcatacaaaaggcaagcggaggaggccgatgagcaggccaatgcccatctcaccaagtttcggaaggcgcagcacgaattggaagaagccgaagagagagcagacattgcggaaagtcaggtgaataagctccgtgcaaaaactagagatttcacctcttcacgaatggtcgtccatgagtcagaagagtag

SEQ ID NO: 196169 - DNA, 3132 bp, synthetic construct
  misc_feature 1..3132: note = Description of Artificial Sequence: Synthetic coding sequence
  source 1..3132: mol_type = other DNA
atgcccctgctggagggcagcgtgggcgtggaggacctggtgctgctcgagcctctggtagaagaatcgttgctaaagaacctgcagctgcgctacgagaataaggaaatttatacttacattggaaatgttgtcatctcagtgaacccctatcagcagctgccaatctatgggccagagttcattgcgaaataccaggactatacgttttatgaactcaagcctcacatctatgctctggcaaacgtggcataccagtccctccgggacagagaccgggaccaatgcatactgataaccggcgagtccggaagcggcaagaccgaggccagtaagcttgttatgtcctatgtcgctgccgtctgcggtaaaggtgagcaagtcaactccgtcaaggaacagttgttgcagtccaaccccgtgcttgaagctttcggcaacgccaaaacaatacgcaataacaattcatcaagatttggaaagtacatggacatcgagtttgactttaagggctcgccattagggggcgtcatcacgaattacctcttggagaaatcaagattagttaagcaactgaaaggcgaaaggaacttccacattttctaccagctccttgccggagccgatgaacagttgttgaaagcactgaagttagaaagagacacgactggctatgcctaccttaatcacgaggtgagccgtgtcgatggcatggacgacgcatcttcttttcgcgcggtgcaatccgccatggctgttatcggcttttccgaagaggagatacgccaggtgttggaggtgacctccatggtcctaaagttaggtaatgtgctggttgccgacgaatttcaggcaagcggcattcctgcaagcgggattagggatgggagaggggtgagggaaattggcgagatggtgggtctgaattcagaagaggtggaaagggctctgtgttctcgtacgatggagacagcaaaggagaaggtcgttaccgcattaaacgtcatgcaagcccagtatgctagggatgcccttgccaagaacatatattcccgcctctttgactggatcgttaacaggataaacgagtccattaaggttgggatcggagagaagaagaaagtcatgggtgtgctcgacatttatgggttcgagatcctggaagacaacagcttcgaacagttcgtgatcaactactgcaacgagaaactgcagcaggtgtttatcgagatgaccctgaaggaggaacaggaagagtacaagagagagggtatcccctggactaaggtggattattttgacaatgggatcatatgtaagctcatcgagcacaaccagcgaggcatactggcaatgctggatgaagagtgcttgcgcccaggagtggttagtgatagcacttttctagcaaaactgaatcagctgtttagtaaacatggccattatgaatcaaaagtgacccagaacgcgcagcgccaatacgatcacacaatgggcttaagctgttttagaatttgccactatgcaggcaaagttacctataacgtaaccagcttcattgacaagaataacgatctcctgttcagagatctcttgcaggcaatgtggaaagcccagcatcctctgttgaggtcccttttccccgaagggaacccaaagcaagcgtcactgaaacggcctcctactgccggagcacagttcaaatcatcggtggcgatactcatgaagaacctttatagcaaatctcccaattatatacgctgtatcaagcccaatgaacaccagcagcggggacagttctcctctgaccttgtggcaacccaggcacggtaccttggcctgctggagaacgtgcgcgtgagacgcgcgggctatgcccatcggcagggctacggcccctttctggagcggtatagacttctgagccgcagcacctggccccattggaacgggggagaccgtgagggagtggaaaaagtactgggggagctctctatgtccagtggcgagctcgcattcggaaaaaccaaaatctttattaggtctcctaaaacactcttttatctggaggagcaacggagacttaggttgcaacagttggcaacattgatccagaagatctatagaggctggagatgccggactcattaccagctgatgcgaaaatctcagatcttgatatccagctggtttcgcggaaacatgcaaaagaaatgttatggcaaaatcaaagcgagtgttttattaatccaagcatttgtgcgcggttggaaggcccgaaagaactatcggaaatatttccgctctgaggccgccttaaccctcgctgatttcatctacaagagcatggtgcagaaatttctgctggggctgaaaaacaacctgccttctactaacgtccttgataaaacttggcccgcagcaccttacaagtgcctctccactgcgaaccaggagctccaacagctcttttatcagtggaaatgcaagaggttccgtgaccagctgtcacctaagcaggtggagatcctacgtgagaagctttgtgccagtgaactgtttaaaggaaaaaaggccagctatccacaaagcgtgccaatccctttctgtggcgattatatcggcctgcagggcaatcccaagctgcagaaattgaaaggcggcgaagagggtcccgtgttgatggccgaagcagttaaaaaggtgaacagaggcaacggaaagacaagctcccgtatcctgttgctgaccaaagggcacgtcatcttgaccgacacaaagaaatcacaggccaagatagtgatcggcctagacaatgtcgcaggtgtgtccgttacaagcctgaaagacgggttgttcagcctgcacctatccgagatgagtagcgtcggatcgaaaggggatttcctcctggtttccgagcatgtcattgagttacttactaagatgtaccgcgcggtactggatgcaactcaaaggcagctgactgtgactgtcacagaaaaattttctgtacgctttaaagagaatagcgtcgctgtcaaagtggtgcagggtccagcaggcggcgataattcaaagcttcgctacaagaaaaaagggagccattgcctggaggtgacagttcagtag

SEQ ID NO: 196170 - DNA, 291 bp, synthetic construct
  misc_feature 1..291: note = Description of Artificial Sequence: Synthetic coding sequence
  source 1..291: mol_type = other DNA
atgcccctgctggagggcagcgtgggcgtggaggacctggtgctgctcgaaccactggttgaggagagcttgctgaaaaaccttcaactgcgctatgagaacaaagagatttacacctatatcgggaatgtggttatttcggtgaatccataccagcagcttcccatttacggcccagagtttattgccaaatatcaagactataccttttacgagctaaagccgcacatatacgccctggccaacgtggcctatcagtctctaagagatcgcgatagagaccagtgttag

SEQ ID NO: 196171 - DNA, 3132 bp, synthetic construct
  misc_feature 1..3132: note = Description of Artificial Sequence: Synthetic coding sequence
  source 1..3132: mol_type = other DNA
atgcccctgctggagggcagcgtgggcgtggaggacctggtgctgctggaaccactggtcgaagaaagcctcttgaagaaccttcagctgaggtacgagaacaaggagatatacacttacattggaaacgtagtcatctccgtaaacccataccagcaactccctatttacggtcccgagtttatcgcgaagtaccaggattacaccttctatgaactgaaaccgcatatttacgcactcgcaaatgtcgcttatcagagtttgagagaccgcgatcgtgaccaatgcattcttattaccggcgagagcggctccggaaagaccgaggcatcgaaacttgtgatgagttatgtggcggccgtgtgtggcaagggagagcaggtgaatagtgtgaaggagcagctgctgcagtccaacccggttttggaggcctttggcaatgccaaaacaatccggaataataattctagtcgatttggtaaatatatggacattgaatttgacttcaagggcagtccactggggggtgtgatcactaattacttactggagaagtcacgattggtaaaacagctgaagggcgaacgtaactttcacattttttaccagctgctggccggcgcagatgaacagcttttgaaagctttgaagctcgagcgggacacaaccggttacgcctatctcaaccatgaggtcagcagagtagacgggatggatgacgcctctagctttcgggccgtccagagtgcgatggcggtcattggattcagcgaggaagagatacgccaggtcctggaggtcaccagcatggtgttgaagctgggcaacgtgctggtcgctgatgagtttcaggccagtgggattcctgcctccggtatccgggatggaagaggagtgcgcgagatcggagagatggtgggtttaaactcggaagaggtggagagggcgctgtgtagcaggacgatggaaaccgcaaaagagaaagttgtcacagcattaaatgtgatgcaggcgcagtacgccagggacgcacttgcgaagaatatctatagccgcctgtttgattggattgttaaccggataaacgagtccattaaagtcggcattggggaaaagaaaaaagtgatgggcgtgttggatatatatggattcgaaatattggaggacaatagcttcgaacaatttgtcattaactactgcaatgagaagttacaacaggtgttcatcgaaatgaccctgaaagaggagcaagaagagtacaagagagagggaatcccatggactaaggtggactattttgacaatggtatcatctgcaaactgatcgagcacaaccagcgcggtatactcgcgatgttggatgaagagtgtctcagaccgggtgtcgtgtctgacagcactttcctggctaaactgaatcaacttttttcaaaacacggacattacgaatcaaaagtcactcagaacgcccagcggcagtatgaccatactatggggctgtcgtgtttccgcatttgccactacgcagggaaggtgacgtacaatgtgacatcgtttatagacaaaaacaatgatcttctgttcagagatctgctgcaggcaatgtggaaggcccagcaccctctgttgcggtcactttttccagaggggaaccccaagcaggcttctctcaagaggccccccacggccggtgctcaattcaaaagtagtgtggcaatcctgatgaagaacctgtatagcaagtcaccaaactatatcaggtgcatcaaaccaaatgagcaccagcagcgaggacaattttcctcagatcttgtcgcaacccaggccagatacctcggcctcctagaaaatgtccgtgtccgacgtgccgggtatgctcaccgccaaggctacggccctttcctggaaaggtacagacttctgtctcgttcaacttggcctcactggaacgggggtgatcgcgagggcgttgagaaagtcctcggagaactcagtatgagctccggggagctcgctttcgggaagacaaaaatcttcatccggtccccgaagactctgttttatctggaggagcagcggcggctgcgcctgcaacagctagccactcttatacagaaaatttaccgagggtggcggtgtcgaacgcattaccagctgatgaggaaatcacagatactgatcagttcctggttccgcgggaacatgcagaaaaaatgctatggtaagataaaggccagcgtgctgcttatccaggccttcgttcgcggatggaaggcgcgtaaaaattaccgcaaatacttccggagcgaggctgcactcacgctggccgacttcatttataagtcaatggtccagaagtttttgctgggactcaagaacaacctcccaagtacaaacgtcctcgataaaacttggccagcagctccctacaagtgcttgtctacagcaaatcaggagctgcagcagttgttctaccagtggaaatgcaagcgtttcagggatcagctgtcccctaagcaggtggaaatcctccgggagaagttgtgcgccagtgagctctttaaagggaagaaggccagctatccccaatcagttccgattcccttctgcggtgactatattggcctgcaggggaatccaaaactccagaagctgaagggtggggaagaaggacctgtcctaatggctgaagccgtgaaaaaggttaatcggggaaatggcaaaaccagttcacgtattctgcttctaactaagggacatgtcatccttaccgataccaagaagagtcaggccaagattgttatcggtctcgacaatgtcgccggcgtcagcgttacctcgctgaaagacggactgtttagcttgcacctgtctgagatgagtagcgtcggcagcaaaggggatttcctgctggtgagtgagcacgtgatcgagctgctgacaaaaatgtaccgagccgtgctggacgcaacccagaggcaattgactgttaccgtgaccgagaagttctccgtgcgattcaaggaaaattccgtcgccgtgaaagtggtccagggtcccgccgggggagacaattccaaacttcggtacaaaaagaaggggtctcattgtctggaggtgaccgtgcagtag

SEQ ID NO: 196172 - DNA, 2646 bp, synthetic construct
  misc_feature 1..2646: note = Description of Artificial Sequence: Synthetic coding sequence
  source 1..2646: mol_type = other DNA
atggacatcgagttcgacttcaagggcagccccctgggcggcgtgattaccaactacttgcttgaaaaatctcgactcgtcaagcaattgaaaggtgagagaaacttccacatattctatcaactgctggcgggggccgacgaacagctgctcaaagcccttaaacttgaaagggataccaccggatacgcgtatttaaaccacgaagtctcccgggttgatggcatggacgacgcttcttctttccgagccgtacaatcagctatggctgtgattggcttcagcgaggaggagattaggcaggtccttgaggtgacttcgatggttctgaagctgggtaacgtgctagttgcagatgaattccaggctagcggaatccccgcatccgggatcagggatggccgcggcgtgcgggagataggtgaaatggttggtttgaacagcgaggaagttgaacgcgcgttatgcagtcgcacaatggaaacagctaaggagaaggttgtcaccgctcttaacgtgatgcaggcgcagtacgctagggatgccttggccaagaacatctactcacgactcttcgattggatcgtgaatcgaatcaacgaaagtatcaaggtcggaatcggggagaagaaaaaggtgatgggggtcctagacatctatgggtttgagattctcgaggacaattcctttgagcaatttgtgattaactattgcaacgagaaactgcagcaggttttcatcgagatgactcttaaagaagagcaggaggaatacaagagagaaggtatcccctggacaaaagtagactatttcgacaatgggatcatctgtaaactgatcgaacacaatcagaggggcattctggccatgcttgacgaagaatgtcttcggcccggtgtcgtgtctgactccactttcctggctaaactgaaccagctcttctccaagcatgggcactatgaaagtaaggtgacccagaatgctcagagacagtacgaccacacaatggggctcagttgttttcgtatctgtcactacgccggaaaagtcacatacaatgtcacatcctttattgacaagaacaatgacctgttattcagagaccttctacaggccatgtggaaggcgcagcatccactgttgcggtcgctgtttcccgaagggaaccctaaacaggctagtcttaaacgacctccaacagccggcgcacagttcaaatcttccgttgcgatcctgatgaagaacctgtattcgaagagccccaattatatcaggtgcattaagccaaatgaacaccaacagcgaggacagttcagttcagatctcgtcgccactcaagcacgctacttgggcctgttagagaacgtgcgcgtgagacgcgccgggtatgcccaccgacagggttatggaccattcctcgaacgctatagactactttcgcgcagtacttggcctcattggaacgggggcgaccgcgaaggcgtggagaaggtgctgggtgaactatccatgtcttccggagagctggctttcggaaagaccaaaatcttcattcgaagccctaaaaccctgttttacttggaggagcagcggcggttacgtctgcaacagctcgcaactctgatacagaagatttatagggggtggcgttgccggacacattaccagctcatgaggaagtcccagatcttgatttctagttggtttcgcggtaacatgcagaaaaagtgttacggaaaaataaaagcaagcgtgctgttgatacaagcatttgtgagaggctggaaggccaggaagaattatcgcaagtattttagatctgaagctgcactcacactggctgatttcatatacaaatcaatggtgcagaagttcctgctcgggctcaagaataatctgccaagcactaatgtcctcgataaaacatggcccgcagccccttacaagtgtctgtctactgcgaaccaggagctgcaacagctgttttaccagtggaagtgtaagcgatttcgcgaccagctgtctcctaaacaggtagagattcttcgcgagaagctgtgtgcgagcgaactctttaaaggcaagaaagcaagctatccccaatcggtgccgattccattttgtggtgattacatcggccttcagggaaacccaaagctgcagaagctcaagggcggcgaagagggccctgtgctgatggcggaggctgtcaaaaaggtgaaccggggtaatggcaagaccagtagcagaattctactcttgacgaagggccacgttatcttaactgacactaagaagtcacaggcgaagattgtaattgggttagacaacgtggctggggtctcagtgacgtcactgaaggatggactttttagcctccatctctctgaaatgtcttctgtgggttctaaaggtgattttttgctcgttagtgagcacgtgatcgagctactgactaaaatgtatcgtgcagtcctggacgccacccaacggcagttgaccgtgacagttaccgagaagttttctgtgcgcttcaaggaaaattctgtggctgtgaaggtggtgcaggggccggctggaggagacaacagcaagttaaggtacaagaaaaagggatctcactgtctggaggtgacagtgcaatag

SEQ ID NO: 196173 - DNA, 3411 bp, synthetic construct
  misc_feature 1..3411: note = Description of Artificial Sequence: Synthetic coding sequence
  source 1..3411: mol_type = other DNA
atggccaagatggaggtgaagaccagcctgctggacaacatgatcggtgtgggagacatggttctgcttgaacctttgaacgaagagacttttatcaataacctgaagaaacgattcgaccattccgagatttatacatatatcgggagcgtggtcattagtgtgaatccctacagaagcctgcctatctatagtccagagaaggtagaagaataccgcaaccgcaatttctatgaactgagcccccacatcttcgcgctaagcgacgaagcctatcggtctctccgagaccaggacaaagaccaatgcattctcatcaccggagagtcaggagctggcaagactgaggccagtaaactggtgatgtcgtatgtcgccgcagtgtgtgggaagggagctgaagtgaaccaagtaaaggagcagctccttcagtctaaccctgtgttagaggccttcggtaatgccaaaacagtgcggaacgacaactcttctcggttcggaaaatatatggacattgaattcgattttaaaggcgatccccttggaggcgtcatcagcaactacctcctggagaaatcacgggtcgtgaagcagcctaggggggagcgaaatttccatgttttttaccagctgttgtctggtgcctcagaagaactgctgaataaacttaagcttgagcgcgatttctcccgctacaattacctgagtctcgacagtgccaaagtcaacggcgtggacgatgcagccaacttccgaaccgtcaggaacgctatgcagatcgtgggatttatggatcacgaggctgagtccgtgctcgctgttgtggccgctgtgctcaagttggggaacattgaatttaaacccgagtccagagtcaacggcctggacgaatccaagattaaggataagaatgaattaaaagaaatatgtgaattgaccgggatcgatcagtctgttctcgagcgggccttttcctttcgcacggttgaagcaaaacaggaaaaggtctctaccacacttaacgtcgctcaggcttactatgcacgggatgctttagctaaaaatctgtactctagactgtttagctggctggtcaaccgtatcaacgaaagcattaaggcgcaaaccaaagtccgcaagaaagtgatgggagtactcgacatatacgggtttgaaatcttcgaagataactctttcgagcagtttataatcaactattgcaatgaaaaactgcagcaaatctttatcgagctgaccttgaaagaagaacaggaggaatacattagggaggatattgaatggacacacattgattatttcaacaacgcaattatctgtgacttgatcgagaataacactaacggcatcctcgcgatgctagatgaggagtgtctgaggccaggaacggtaaccgacgaaaccttccttgagaagttgaaccaggtgtgcgccactcatcagcattttgagtcaagaatgtccaagtgtagccgattcctcaatgacacttcattgccccacagctgttttcggattcagcactacgccgggaaggtactgtaccaagtagaaggctttgttgacaaaaataacgatcttctctacagagacctcagtcaagctatgtggaaagcctcccacgcattgatcaagagcctgttccccgagggcaatcccgcaaagataaacttaaagagacccccaaccgctgggagtcagttcaaggcgagcgtggcaacccttatgaaaaacttgcaaacaaaaaatccaaactacattcgttgcatcaagcccaatgacaaaaaagcggcgcatatcttcaacgaagccctggtctgtcatcagattagatacctgggtctattagaaaacgttcgcgtgagacgcgctggatacgccttcagacaggcttacgagccatgtctggaacgttataaaatgctgtgcaagcagacgtggccccactggaagggccctgcccgttctggagttgaggtgctgttcaacgagctggaaatccccgtagaggaatactctttcggccggagtaaaattttcattaggaatcctagaaccttgtttaagctggaggatctacgtaagcaaaggctggaagatctcgctacccttatccagaaaatctaccgggggtggaaatgtcggacgcactttcttttgatgaagaagagtcagatcgttatcgctgcctggtaccgaagatacgcacagcaaaagcggtatcagcagacaaaaagctccgctctggtgatccagtcttatatacgagggtggaaagcacgcaagattctgagggaactgaagcatcagaagcgctgcaaggaggccgtcactaccatcgcagcttattggcatggaacacaagctagacgagagctgcggcggctcaaggaagaagccaggaacaagcacgctattgccgtgatatgggcttactggctcgggagcaaggccagacgagagttgaagagactgaaggaagaggcccggagaaaacatgccgtcgctgtgatctgggcctactggttagggctgaaggtgcgtcgagaataccgaaagttcttcagagccaatgcaggcaagaagatatatgagttcacactgcagcggattgtgcagaaatacttcctagagatgaaaaacaaaatgccttcactctctccgatcgataaaaactggccgagtaggccatacctgttcctcgattcgactcacaaagagttaaagaggatatttcacttatggcgctgtaaaaaataccgggatcagtttaccgatcagcagaagctcatttacgaggagaagttagaggcctcagaactgtttaaggacaagaaagccttgtacccttctagcgtggggcagcccttccaaggcgcctacctggaaataaataagaaccctaagtacaagaaactgaaggacgctatagaagaaaagataattatcgctgaagtcgtgaacaaaataaatagggctaatggcaaatccacctcacgaatcttcctcttgaccaacaacaatctactcttggccgaccaaaaatctgggcaaattaaatccgaagttccactggtagacgtgacgaaagtgagcatgtcaagtcagaatgatgggttttttgcagttcatttgaaggagggcagcgaagctgcttccaaaggtgactttctgttctcctctgaccacctcatcgagatggctaccaagttgtaccgaacgactctctcccaaacgaagcagaagctgaacattgagatttcggatgagtttttagtccagtttcgccaggacaaagtctgtgtcaaattcatccagggcaatcagaagaatggaagcgtgcctacctgcaaacggaagaataaccggttactggaagtcgcggtgccttag

SEQ ID NO: 196174 - DNA, 3237 bp, synthetic construct
  misc_feature 1..3237: note = Description of Artificial Sequence: Synthetic coding sequence
  source 1..3237: mol_type = other DNA
atggccaagatggaggtgaagaccagcctgctggacaacatgatcggggtcggtgatatggtactgctagagccgctgaacgaagaaacttttattaacaacctcaaaaagcggtttgaccacagcgagatttacacatacattggctccgtggtgatctccgtgaacccttaccggagtctcccaatttactcgcctgaaaaggtggaagagtatcgcaaccgcaacttttacgaactgtctcctcatatcttcgctttatccgatgaagcctatcgcagtctccgagaccaagataaggaccaatgcatacttatcactggcgaatctggagccggaaaaacagaggcctccaagctggtaatgtcatatgtcgctgccgtgtgtgggaaaggggcggaggtgaaccaagtcaaagagcaactactgcagagcaacccagtactggaggcctttggcaacgccaaaactgttagaaacgataattcgtcccggttcgggaagtacatggacatcgagttcgacttcaaaggcgaccctcttgggggagtcatctcaaattatttactggaaaagagtagagttgtcaaacagcctcgtggggaacgcaactttcatgtgttttatcagctgctgtctggagcgagcgaggagctgcttaataagctgaagctggagcgcgatttctcaagatataactatctgagtctcgattcagctaaagtcaatggcgtggacgatgcggcaaactttcgaacggtccgcaatgcaatgcagattgtcggctttatggaccacgaggcagagtctgtattagccgtggtcgccgccgtgctcaagctcggtaatatcgagttcaagcctgaatcccgggtgaacgggttagatgaatcaaagattaaggacaagaatgagctgaaggagatctgtgaactcactggtattgatcagtctgtgctggagcgggcgtttagtttccgtacagtggaggctaagcaggagaaggtttcaacaaccctcaacgtggctcaagcttactatgcccgtgacgcgctagcaaaaaatctgtattcccgactcttctcctggttagtcaatagaattaacgagagtatcaaagcccagactaaggtcagaaagaaagtgatgggcgtactcgacatatacggttttgagatcttcgaagataattcctttgagcagtttattatcaattactgcaatgagaaactgcaacaaatcttcatagagctaacgctgaaggaagaacaagaggaatatatccgggaagacatcgaatggacgcatatagattactttaacaacgccatcatttgcgatctgatagagaataacactaacgggattctagccatgctcgatgaggaatgcttacgacctggcaccgttaccgacgaaacattcttggagaagctaaatcaggtctgcgccactcaccaacacttcgagtctcgaatgagtaaatgcagtcgcttcctgaatgacaccagcttgccacattcttgtttccggatccaacattatgcaggtaaagttctgtatcaggtggaagggtttgtggacaagaacaacgacctgctgtacagggacctcagtcaggcaatgtggaaagcttcccatgccctaatcaaatccctcttccctgaaggcaatcctgccaagatcaatttgaaaaggcccccgaccgcgggatcccagtttaaggccagcgtggcaactctaatgaaaaacttacagaccaagaaccccaattatatcagatgcattaagccgaacgataagaaagctgctcacatcttcaacgaagcgctcgtgtgtcaccagatcagatacttgggcttactggaaaatgtgagggtgaggcgcgccgggtacgcattccggcaggcttacgagccatgtctagagagatataaaatgctctgtaaacagacctggcctcactggaagggacctgccaggagcggcgttgaagtgttgtttaatgaactggagattcctgtggaagaatatagttttggccgctcaaaaatattcatcagaaaccccaggacactgttcaaactcgaggatctccgcaaacagagactagaggatctggcaactctcatacagaagatctatcgcggctggaaatgtcgcacccactttttgttaatgaagaaatctcaaattgttatcgcagcctggtacagacgctatgcccagcaaaaacggtaccagcagaccaaatccagtgcactcgttattcagtcctatatccgtggatggaaagcacggaaaattctgagagagttgaagcatcagaaaagatgcaaggaagcagtaaccaccatcgcagcttattggcacgggacccaggtgcggagagagtaccgtaagtttttccgcgctaatgcaggaaaaaaaatctacgaattcacacttcagcgcatcgttcaaaagtactttctggaaatgaagaacaaaatgcccagtttaagccccatcgacaagaactggccgagccgaccttacctattcctggattccacacacaaggaacttaagagaatttttcatttatggaggtgcaaaaaatatcgggaccagtttaccgaccagcaaaaactaatctacgaagagaaattagaagcgtcggagctgttcaaagacaaaaaagcactgtatcctagctcagtgggacagcccttccagggggcttatctagagattaataagaacccaaagtacaagaaactgaaagacgccattgaagagaaaatcatcattgcagaagttgtgaataaaatcaatagggcgaacggaaagagtacaagcaggatctttttgcttacaaataataatttgctcttagccgatcagaaatcaggccagatcaaaagtgaagttcccctggtggatgtgaccaaggtgtccatgtcttctcagaacgacggcttctttgccgtgcatctcaaagagggctccgaagccgcttctaaaggggacttcctattctcatcggaccacctcatcgaaatggcaaccaaactgtatcgcaccaccctctcccaaacaaagcagaagctgaacatagaaatcagcgatgagttcttagtccagttccgtcaggataaagtctgtgtcaaatttatccaggggaatcaaaaaaatggaagcgtgccaacatgtaagcgcaagaacaatcgtctcctggaagtggccgtcccatag

SEQ ID NO: 196175 - DNA, 3324 bp, synthetic construct
  misc_feature 1..3324: note = Description of Artificial Sequence: Synthetic coding sequence
  source 1..3324: mol_type = other DNA
atggccaagatggaggtgaagaccagcctgctggacaacatgatcggcgtcggcgacatggttctccttgagcctctaaacgaagaaactttcattaataatctgaagaaaaggtttgaccattccgagatttatacatatatcggaagcgtggttatctctgtcaacccatatagatccctgccaatctactcccccgagaaggtcgaggaataccgaaacagaaacttctacgagttgagtccacatatatttgcactgtctgacgaagcatacagaagtttgcgcgaccaagacaaggaccagtgtatcctcattactggtgaatctggagccggaaagaccgaagcaagcaagcttgtcatgtcgtacgtcgccgccgtctgtgggaaaggcgcagaggttaaccaggtaaaggaacagttactgcagagcaacccagtccttgaagcctttgggaatgccaaaacggtgagaaatgacaattcttcgcggtttggcaagtacatggacatcgagttcgactttaaaggtgatcctcttgggggggtgattagtaattacctcctcgagaaaagccgcgttgtgaaacaacctcgaggggagcgcaattttcatgttttttaccagctgctgtcaggtgcaagcgaagagctgcttaacaagctcaaactggagcgggacttcagtcgatacaattacctgagtttggatagtgcaaaggtcaacggtgttgacgatgcagctaactttagaactgtgcgcaacgctatgcagatagtgggctttatggatcacgaggcagagtctgtgctggccgtggttgcagcggtgttgaagttaggcaacatagaatttaaaccggagtctcgggtaaatgggctcgacgagtctaaaattaaagataaaaatgagctgaaagagatttgtgaactgacaggcattgaccaatctgtcttggagcgagcatttagtttcagaaccgtagaagccaagcaggagaaggtctccacaaccctgaatgtcgcccaggcttactatgcccgggatgcgctggcaaagaatctctattctagacttttctcatggttagtcaacaggattaatgaatcaataaaggctcagacaaaagttagaaaaaaggtgatgggtgtactcgatatatacggattcgagatcttcgaagacaattctttcgaacagttcattattaattattgcaatgaaaagctgcagcaaatcttcatcgagcttactctgaaagaggagcaagaggagtacattcgcgaagacatcgagtggacacatatcgactacttcaacaatgccattatttgtgacctgattgaaaacaacaccaatggcatcctcgccatgctggatgaagaatgcctgagaccggggaccgttaccgacgagacattcttggaaaaattaaatcaagtgtgtgcaacacatcaacacttcgaatccagaatgagcaaatgtagccggttcctgaatgacactagccttccacactcatgtttcaggatacagcactacgctggaaaggttctgtatcaggtcgaagggttcgtggacaagaataatgacctcctgtatcgagacttgagccaagcgatgtggaaagcgtctcacgccctgatcaagtcgctcttcccagaggggaacccggctaaaattaacctcaagagaccacccacagccggaagccaattcaaagcctcagttgctaccctcatgaaaaatctgcaaacaaaaaaccctaattatattcgctgtattaaaccaaacgacaagaaggcggcacacatcttcaacgaggccctggtgtgccaccaaatacgctacctcgggctgttagagaatgtcagggtgcgaagggcgggctacgcatttcgacaggcgtacgagccctgcctggaacgttacaaaatgttgtgcaaacagacatggccacattggaagggtcctgctcggtcaggggttgaggtgctctttaacgagctggaaattccagtcgaggagtatagcttcggtcgctcaaaaatcttcattcgcaatccccgcactctgttcaagctcgaagacctgcgaaaacagcgtttggaggaccttgccacccttatccagaaaatttacagaggttggaagtgccggactcattttctgctcatgaaaaagtcgcagattgtcatcgctgcttggtatcggcggtatgctcagcagaaaagataccagcagacgaagagttctgccctggtcattcagagctacatacggggctggaaagctcgtaaaattctcagagaactgaagcaccagaaaaggtgtaaagaagcagtgacaactatagccgcctactggcatggtacgcaggctcgccgtgaactgaaacgccttaaggaggaggctcgcaggaagcacgctgtggctgtcatctgggcttactggcttgggttgaaggtacgccgcgagtatcggaagttcttccgcgctaatgccggcaagaagatctatgagtttacccttcaacgcattgtccagaagtatttccttgaaatgaagaacaagatgccttctctgagtcccattgacaaaaactggccgagtaggccgtacctgttcttggactccacgcataaagaattaaagcggatctttcatctgtggagatgtaagaagtatcgggaccagtttacagaccagcagaagctcatctacgaggagaagttggaagcctctgagctgttcaaggataaaaaggcgctgtaccccagctcagtggggcaaccatttcagggggcctatttagaaataaacaagaatcccaagtataaaaagctgaaggatgcgatagaagagaaaatcatcatcgcggaggtcgtgaataagatcaaccgtgcaaatggaaagtctacgtcccggatatttctgctcactaacaataatcttctcctcgccgaccagaagagcggtcagataaagagcgaagtgccacttgtggacgttactaaagttagcatgtccagtcaaaacgatgggtttttcgccgttcatttgaaggagggatcagaggccgcttccaaaggcgactttttgttcagcagcgaccacctgatagagatggcgactaagctctatcggacaacgctgtcccagactaagcagaaactgaacatcgagatatcagacgagttcctggtccagtttagacaagataaggtctgcgtgaagtttatccagggaaaccagaaaaatggcagcgtgcccacatgcaaacgaaaaaataacagattgctagaggtggccgtgccgtag

SEQ ID NO: 196176 - DNA, 3411 bp, synthetic construct
  misc_feature 1..3411: note = Description of Artificial Sequence: Synthetic coding sequence
  source 1..3411: mol_type = other DNA
atggccaagatggaggtgaagaccagcctgctggacaacatgatcggtgtaggggacatggtgctgcttgagcctctgaacgaagaaacttttatcaataacctgaagaagcgcttcgaccacagcgagatctacacctatattggcagcgtcgtgattagcgtgaatccctataggtcgcttccaatctattcaccagaaaaggtcgaggagtaccgcaacagaaacttctatgaattgtctcctcacattttcgctctttccgatgaggcatacaggagtctgagagatcaggacaaggatcagtgtattttgatcactggagagtccggcgcaggaaagaccgaggcgagtaaactggttatgagttatgtggctgccgtttgtggcaagggggcagaagtaaatcaggtcaaagaacaacttctccaaagtaacccagtgctggaggcctttgggaacgccaagaccgtgaggaatgataatagtagcaggtttggaaaatacatggacattgaattcgattttaaaggagacccactgggaggagtgatctctaactacctgctggagaaaagccgcgtggtgaagcagccaagaggcgaaaggaacttccacgtgttttatcagctgctctccggcgcaagcgaagagctccttaataaactgaagcttgaacgcgatttctcccgctacaattacctgtctctcgattctgccaaggttaacggtgtggacgacgcggccaattttaggacggtacgaaatgctatgcaaatcgtgggattcatggatcatgaggcggagtcagttctagcggttgtggccgctgtgctgaaacttggaaacattgaattcaagcctgaatctcgagtcaacggacttgacgagagtaagataaaagacaagaacgagctcaaagagatctgcgaactaacagggattgaccagtccgtgttggagagggccttctcattccgaacggttgaggctaagcaagaaaaggtgtccacaactttgaatgtggcccaggcatattacgcaagagatgctttggcaaaaaacctctattccagactcttctcttggctagtaaatcgcatcaatgagagtatcaaagctcagacaaaggtgcgtaagaaagtgatgggcgtgctggacatctacggcttcgaaattttcgaggacaacagttttgagcagtttattataaattattgtaacgagaaattgcagcagatttttattgaattgactttaaaggaagagcaagaagaatacatacgtgaggatatcgagtggacacacatcgattacttcaacaacgcgatcatttgcgacctgatcgagaacaacaccaacggcattcttgctatgctggacgaggagtgcttgcgaccaggaacagtgactgacgagaccttcttggagaagctgaatcaggtttgcgcaacccatcagcacttcgaatcgcgtatgtcgaagtgcagccgatttcttaatgacacctcactcccgcattcctgcttcaggatccagcattatgctggaaaagtcctttaccaagttgagggtttcgttgataagaataacgacttgctgtaccgcgatttatctcaggccatgtggaaggctagtcacgctctcatcaagtccttattccctgagggaaatcctgctaagatcaatctgaagaggccaccaacagccggctctcagtttaaggcgagcgtcgccacactgatgaagaatttgcagacaaagaacccaaattacatccgctgtatcaaaccaaatgacaaaaaggccgcacatatcttcaacgaagccctggtgtgccaccaaataaggtatctgggtttgcttgagaatgtgcgcgttcggcgggctggatatgcatttcgacaggcttacgaaccctgcctggagcgctacaagatgctgtgcaagcaaacatggccacattggaaaggcccggctaggagtggcgtggaggtgttgtttaacgaactggagatccccgtggaagagtacagctttgggcgctcaaaaatctttatcagaaacccccgtactctgtttaagctggaggatttgagaaaacagcggctggaggacctggctaccctcatccagaaaatctacaggggatggaagtgtagaacacacttcctcctgatgaaaaaaagccagatagtgatcgccgcttggtacagaagatatgctcaacagaaaagataccagcagacaaaatcaagcgcacttgtcattcagagctacattcgaggatggaaagcacgtaagatacttcgcgagttaaagcatcagaaaaggtgcaaagaggctgtgaccaccatcgcagcatactggcacggcacccaggccagacgcgagctgcggcggttgaaggaggaggccagaaacaagcacgcaatcgcagtgatctgggcctactggctgggaagcaaagcaaggcgagaactgaaaagactcaaggaagaagcccgtagaaaacacgccgtcgctgtgatttgggcatactggcttggactaaaggtgcggagagagtacaggaaattctttagggccaacgccgggaaaaagatctacgaattcaccctgcaaaggattgtccagaaatactttcttgaaatgaagaataagatgccgtctctgtcccccatcgataagaactggccatccaggccctacctcttcctcgactccacccataaagagctgaaaagaatctttcacctgtggcgttgcaagaaataccgggaccagttcacggaccagcaaaaactgatctacgaagaaaaactggaggcttccgagttgtttaaagataaaaaggccctgtaccccagctccgttggccagcccttccagggggcgtaccttgaaattaacaagaatccaaagtacaaaaagttaaaggacgccattgaggagaagatcatcatcgccgaggtcgtgaacaagattaaccgcgccaacgggaaaagtacttccagaattttcttgctgaccaacaacaatttgctcctcgccgatcagaagagcggacagattaaatctgaggtgcctctggtcgatgttacaaaagtatctatgtcttcacaaaatgatggtttttttgccgttcacttaaaagaaggctcagaagctgccagcaagggggactttctgtttagttccgatcatctgatcgagatggctactaaactgtaccgcactactctcagccagactaagcagaaattgaacatagagatttcagacgagttcctagtccagtttagacaggataaagtttgtgtgaagttcatccaaggaaatcaaaaaaacggtagtgtaccaacatgtaagaggaaaaacaatagactcctcgaggttgccgttccatag

SEQ ID NO: 196177 - DNA, 492 bp, synthetic construct
  misc_feature 1..492: note = Description of Artificial Sequence: Synthetic coding sequence
  source 1..492: mol_type = other DNA
atggccaagatggaggtgaagaccagcctgctggacaacatgatcggcgtcggcgatatggtgctgttagagcctctcaatgaggagactttcattaacaatctcaaaaagaggtttgaccactcagaaatctacacttacatcggctctgtcgtgatcagtgttaacccatacagatcgcttcctatctacagccccgaaaaagtggaagagtacagaaacagaaacttttatgaactgtccccacacattttcgctctgtccgatgaggcctacaggagtcttcgggatcaggacaaggaccaatgtatcctaatcactggcgagtcaggcgccggcaagaccgaagcctccaagctggttatgagctacgtcgctgcagtctgcggcaaaggagccgaagttaatcaggtgaaagagcaactcctgcagagcaatcccgtcctcgaggcctttggcaatgctaagacagttcggaatgacaattcctag

SEQ ID NO: 196178 - DNA, 252 bp, synthetic construct
  misc_feature 1..252: note = Description of Artificial Sequence: Synthetic coding sequence
  source 1..252: mol_type = other DNA
atggccaagatggaggtgaagaccagcctgctggacaacatgatcggggtgggggatatggtcctgctggaacctttaaacgaagagacatttatcaacaaccttaaaaagcgatttgaccatagtgagatttatacatatatcggatctgtggtgatttcggtgaatccatacagatccctgcccatttatagtcctgaaaaggtggaggagtataggaaccgaaacttctatgaactgtcaccgcattag

SEQ ID NO: 196179 - DNA, 450 bp, synthetic construct
  misc_feature 1..450: note = Description of Artificial Sequence: Synthetic coding sequence
  source 1..450: mol_type = other DNA
atggccaagatggaggtgaagaccagcctgctggacaacatgatcggagtgggcgatatggttctgctggaaccccttaacgaagagacattcatcaataatctaaagaagcgctttgaccactccgagatctacacttatattggatctgtggttatttccgtgaacccctaccggtccctaccaatctatagccccgagaaagtggaagagtatagaaatagaaacttctatgagctgagtccccatatcttcgctctttccgacgaagcttataggagcttaagggatcaggataaagaccaatgtattctgattacgggcgagtccggcgcaggcaaaacagaagcctcaaaactggttatgtcatacgtggccgccgtttgcggcaagggagctgaggttaaccaggttaaagaacagctgttacagagcaaccctgttctatag

SEQ ID NO: 196180 - DNA, 1146 bp, synthetic construct
  misc_feature 1..1146: note = Description of Artificial Sequence: Synthetic coding sequence
  source 1..1146: mol_type = other DNA
atgaagaagagccagatcgtgatcgccgcctggtaccggcggtacgcccagcagaagagataccagcaaacaaaatcgagtgccttggtgattcagtcctatatcaggggctggaaagcaagaaaaattcttagggaactgaagcatcagaaaagatgcaaagaggcagtaacgaccattgctgcttattggcatggaactcaagccaggagggaactgaagagacttaaagaggaagctcgtcgaaagcacgcggtggccgtgatttgggcatattggctcggactgaaggtgagaagggaataccggaaattttttagagcaaatgctggcaagaagatttacgaattcacgctacagcgtatcgtacagaaatacttcctggagatgaaaaacaagatgccatccctaagtcctatcgataaaaattggccatcaagaccttacctgtttctggatagcacgcacaaagaactgaaaaggatcttccatctttggcgctgtaagaagtacagagatcagttcacggaccagcagaaactaatctacgaagaaaaattggaggccagcgagttgttcaaggataaaaaagctctttatcccagctcagtggggcagcccttccagggtgcgtatctcgagatcaataagaatccgaagtataaaaagttgaaggatgcgatagaagaaaaaataattattgcggaagttgtcaataagattaaccgcgcaaacggcaaatccacctccaggatttttctcctgaccaacaacaacctgctgctggccgaccagaaatctggacaaataaaatcagaggttcccctggtggacgtgaccaaggtgtcaatgagctcccagaatgacggcttttttgccgttcatcttaaggagggatctgaggcagcctcaaagggggactttttattctcctcagaccatctcattgagatggcaacaaagctgtataggacaacactgtcccagaccaagcagaagctcaatattgagataagtgatgaattcctcgtgcagtttaggcaggacaaggtatgcgtgaagtttatacaaggaaatcaaaaaaatggttccgttcccacgtgtaagcggaagaataatagactgctggaagtcgcagtgccgtag

SEQ ID NO: 196181 - DNA, 924 bp, synthetic construct
  misc_feature 1..924: note = Description of Artificial Sequence: Synthetic coding sequence
  source 1..924: mol_type = other DNA
atggccaagatggaggtgaagaccagcctgctggacaacatgatcggcgtgggggatatggttcttctagagccactgaacgaagagactttcatcaacaacctgaagaagcgttttgaccatagtgagatctacacctatatcggtagcgtcgtcattagtgtgaacccttatcggtcactgcctatctatagccccgaaaaggtggaggagtataggaatcgaaatttttacgaactgtccccacacatttttgcactttctgacgaagcttatagaagtctgcgagatcaggacaaggaccagtgtattctgattacgggtgaaagcggtgccggaaagaccgaagcctccaagttggtcatgtcctacgtcgcagctgtgtgtggaaagggggccgaagttaatcaggtgaaggaacagttgctgcagtccaacccagtactggaggcttttgggaacgctaaaactgttaggaacgacaattcaagtcgattcgggaaatatatggacatagaattcgacttcaaaggcgaccccctcgggggagtgatatcgaattacctgcttgaaaagtcgagggtcgttaaacagcctaggggcgaacgcaattttcacgtattttaccagctgctgtccggtgcatctgaagagctgctgaataaactgaagctggagagggactttagcaggtataactacctgtccctggatagcgcgaaagtcaatggcgtggatgatgctgcaaacttcagaaccgtccggaacgcaatgcagatcgtcgggttcatggatcacgaggcagagtccgtgttagcagtggtggccgctgtcctcaagctcggcaatatagagttcaaacccgagtccagagtgaacggcctggacgaaagcaagatcaaggacaagaatgaatccaagtag

SEQ ID NO: 196182 - DNA, 912 bp, synthetic construct
  misc_feature 1..912: note = Description of Artificial Sequence: Synthetic coding sequence
  source 1..912: mol_type = other DNA
atggccaagatggaggtgaagaccagcctgctggacaacatgatcggagtaggcgacatggtgctgcttgagcctctgaatgaggagacgttcattaataatctgaaaaaacggtttgaccattctgagatctatacatacatagggtctgtcgttatctctgtgaacccttaccggagcctgcctatttatagccccgaaaaagtggaggaatataggaatagaaacttttatgagcttagtccacatattttcgccctatccgacgaggcataccgctctctgcgcgaccaggacaaggatcagtgtattctgataacgggcgagtctggggccggcaagactgaagcgagtaagcttgtgatgagctatgtggccgcagtgtgcggtaaaggcgctgaagtcaaccaggtgaaggagcagctcttgcagtccaatcctgtgctggaagcgtttggcaatgctaagaccgttcgcaatgacaacagcagtcgcttcggaaagtacatggacatcgaattcgatttcaagggggacccgctcgggggcgtaataagtaattacctgctagaaaaatctagggtcgtgaaacagcccaggggtgagagaaacttccacgttttctaccaacttttaagcggagcctccgaggaactgttgaacaagttaaaactagagagggatttctcccgctacaactacctgtctcttgactctgccaaggtgaatggagttgatgacgcggcaaacttcagaaccgtcagaaatgcaatgcaaattgtcgggtttatggaccatgaagcagagtctgtgttggcagtggtggccgccgtcttgaagcttggcaacatcgagtttaagcccgaaagcagggtgaatgggctcgacgagtcaaagatcaaggataaatag

SEQ ID NO: 196183 - DNA, 3192 bp, synthetic construct
  misc_feature 1..3192: note = Description of Artificial Sequence: Synthetic coding sequence
  source 1..3192: mol_type = other DNA
atggccctgcaggtggagctggtgcccaccggcgagatcatccgggtggtgcacccccaccgaccctgcaaattggcgctaggcagcgatggcgtgagagttacaatggagagtgcattaacggcccgggatagagttggggtccaggatttcgtcctgctggagaatttcactagcgaagctgcatttatcgaaaacctgcgccgaaggtttagggaaaatttgatatacacatatatcggacctgtgctggtgagcgtcaatccctatcgggatctgcaaatatattctcgacagcatatggagcggtaccgtggtgtttctttttacgaggtccctccccacttgttcgccgtggccgacactgtgtatcgcgccttgagaactgaacggagagaccaggccgtgatgatttccggtgagagcggcgccggtaaaacggaggccacaaagagactcctccagttctacgctgagacctgccccgcaccagaacgaggtggcgcagtgcgcgaccgcctgctgcagagcaaccctgtcctagaagctttcggcaatgccaaaactctgcgtaacgacaactcctctagattcgggaagtatatggatgtacagttcgatttcaaaggcgcacctgttggaggacatattctgagttacctgttagagaagagcagggtggtgcaccagaaccacggggaaaggaatttccatatcttttatcaactcttagaagggggtgaggaggaaactctgcgccgcttgggactggagcgtaatcctcagtcctacctgtatctggtgaagggacagtgtgcaaaagtctcctccatcaatgacaaatccgattggaaagttgtgcgtaaagctctgactgtaattgactttaccgaggatgaggtagaggatctgctcagtatcgtcgctagcgtgctgcacctgggcaatatccactttgccgcaaacgaggagtcaaatgctcaggttactaccgagaatcaactgaagtacttgacccggcttctgtctgtagagggctccactctgcgggaggctctgacacatcggaagataatagcgaagggtgaagagttactaagtcctctcaatctcgagcaggccgcttacgctagagacgccctcgcaaaagccgtttattctcgcacatttacatggttggttgggaagataaaccggtcactggctagcaaggatgtggaaagcccctcttggcgcagcaccactgtccttggtctactagatatctacggctttgaggtattccagcacaattcttttgagcagttttgcatcaactattgtaacgaaaagttacagcagctgttcattgaattgactctaaagtctgagcaggaagagtatgaggccgaaggtatcgcctgggagccggtgcagtactttaataacaagattatttgcgatcttgtggaagaaaagtttaagggtatcatcagcattctcgatgaggagtgtttgcgtccaggcgaagcgacggacctcaccttcttggagaaactggaggacactgtgaagcatcacccccatttcctgacgcataaactggctgaccagcgcactcggaagtctctgggaaggggtgaatttcgtcttttgcattatgctggtgaggtcacttactccgtgactggcttcctggacaaaaacaatgatctattgttccgcaacttgaaagaaacaatgtgttccagtaagaacccgattatgtcacagtgtttcgaccggtctgagttaagtgacaagaaacgccccgaaactgttgcaacacaatttaaaatgtcccttctccagctagtggagatcctgcagagtaaagagcctgcctacgtgaggtgcattaagccaaacgatgctaagcaacctgggcgattcgatgaggtgctcattagacatcaggtcaagtatctggggctcctggaaaatctgagggtgaggcgggccggcttcgcttataggaggaagtatgaggcttttcttcagcgctacaagagcctatgtcccgagacttggcccacttgggccggtaggccgcaggacggggtggccgtgctcgtgcgacatttggggtacaaaccggaagagtataaaatgggaagaacgaagatctttatccggtttcccaaaaccctctttgccactgaagacgctctggaagtgcggagacagagccttgctacaaaaatccaagctgcctggcgcgggtttcactggaggcagaagttcctccgcgttaagcgttctgccatctgcatccaatcttggtggcggggcacgttaggacgcaggaaagctgccaaacgcaagtgggcggcccaaaccatccgacgcctgattaggggattcgtgttgcgccacgcacccaggtgtcccgagaacgccttctttttagatcacgtgcgcacatcattcctgctgaatctccgccggcagctcccgcaaaatgtgctcgataccagctggccaactcccccccccgcactgcgcgaagcatccgagctgttgagagagctctgcattaagaatatggtctggaagtattgtaggagcatctcgcccgaatggaagcagcaattgcaacagaaggctgtggccagcgagatcttcaaaggcaagaaggacaactatccgcagagtgtaccacgactgttcatttcaaccagactggggactgatgagatcagtcccagagtattacaggcactcgggtcggagcctatccaatatgctgttccagtggtgaagtacgatcgcaagggctacaagcctaggtcacggcagttactcctaacccccaacgcagtggtgatagtcgaggatgctaaggtgaagcagagaattgattatgctaatctgaccgggatttccgtgtcatctctcagcgactctctttttgtcctgcatgttcagagagctgacaataaacagaagggcgatgtcgttcttcaatccgaccacgtcattgaaacgctgaccaaaacagctctgagcgccaaccgcgtgaacagtatcaatatcaaccagggtagcatcaccttcgctggaggaccaggcagggatgggaccattgatttcacaccagggtccgagctgctgataaccaaggcgaagaatggacacctggcagtagttgcaccgaggctcaacagccgctag

SEQ ID NO: 196184 - DNA, 3087 bp, synthetic construct
  misc_feature 1..3087: note = Description of Artificial Sequence: Synthetic coding sequence
  source 1..3087: mol_type = other DNA
atggagagcgccctgaccgcccgggaccgggtgggcgtgcaggacttcgtgttactggaaaattttacgtccgaagccgcattcatagagaatctgcggcggcgttttagagagaacctgatatacacctacattggtcctgttttggtttctgtgaacccgtaccgggatctgcaaatctacagccgtcagcatatggaacgctatcgcggagttagcttctatgaggtccccccccacttgtttgccgtcgcagacacagtgtaccgcgctttacgaacggaaagacgagatcaggctgtaatgatctctggggagagcggtgcaggcaagaccgaggcaacaaagcgtctgctacagttctatgctgaaacttgtccagctccagaacggggtggcgctgttagggatagacttctccagtctaatccggtgctggaagccttcggaaacgcaaaaactttgcgcaatgataacagctcccggtttggcaaatatatggacgtgcaatttgacttcaagggcgctccagtgggcgggcacattctaagctatctcttagagaagtcccgggtggtgcatcagaaccacggagaacgaaactttcacattttttatcagctgttggagggcggcgaagaggagactctgcggcgccttggactcgagcggaacccccagtcttatctctacctggtaaaggggcagtgtgccaaagtgtcttctattaacgacaaaagtgactggaaagtggtgcgtaaagcacttacagtcatcgatttcacggaggacgaggttgaagacctactgtctatcgtggccagcgtcttgcatttgggcaacatccactttgccgctaacgaagaatctaacgcacaagtgaccactgagaaccaactgaaatacctgacccggcttctgtcggtcgagggctctaccctgagggaggctttaacccacaggaagattatcgcaaaaggagaggagcttctgtctcccctcaatttagagcaggcagcatatgcccgggatgcactcgctaaggctgtctattctaggaccttcacatggctggtggggaaaatcaatcgttccttggctagcaaggatgttgaaagtccctcatggcgtagcaccacagtactcggcctgttagacatttatggctttgaagtgtttcagcataacagtttcgagcagttttgtatcaactactgcaacgaaaagcttcagcagctttttattgagctcaccctcaagtcggaacaggaggagtatgaagcagaggggattgcttgggaacccgtacagtattttaataacaaaatcatctgtgatcttgtcgaggaaaagtttaaagggatcatctctatattggacgaagagtgtttgcgtcccggtgaagcgacggaccttaccttcctagaaaagctggaggatacggttaaacaccatccccacttcctgactcacaagctcgccgatcagcggacccggaagagtttgggtagaggcgagtttcgcttgctccactacgccggcgaggttacatactctgtgaccggttttctggataagaacaacgatttactcttccggaatctgaaagagaccatgtgcagttctaagaatcctatcatgagccagtgtttcgaccggtcagaactgtcagacaaaaagaggcccgagaccgttgccactcagttcaagatgagcctactgcagctggtggaaatcctgcagagcaaagaaccggcctatgtccgctgtattaaaccaaacgatgctaaacagccaggcaggttcgatgaggttcttatccgacaccaggtgaagtacctgggactcctcgaaaatttgcgggtgagacgtgcaggttttgcttaccgaagaaagtacgaggcgtttttgcagaggtacaaatccttatgtcccgagacgtggcccacctgggccgggcggcctcaggacggagttgcagtgttggtacgccacctgggttataaacccgaagaatacaagatgggccggaccaaaattttcattcggtttccaaagactctgttcgccacagaggatgcgttggaggtcagacgccagtcattggctacgaagatccaggccgcctggaggggattccattggcggcagaagttcctacgcgtgaagcgctcagcaatatgcatccagagctggtggagagggactctgggccgtaggaaggccgctaagaggaagtgggctgcgcagaccatacgccgcctgatcaggggattcgtccttcgacatgccccccggtgccctgaaaatgctttttttttggatcacgtccggacaagttttctcttgaatcttagaagacagttaccccagaacgttttggatacatcctggccaacaccacctcccgctctccgcgaagcaagcgagctgttgagagagttatgtatcaaaaatatggtctggaagtattgccggtccattagcccggaatggaaacagcagttgcagcaaaaggcagtagccagtgaaatattcaaagggaaaaaagataattatccacaaagcgtgccacggctgtttatctctacacgcctgggcaccgatgaaatcagcccccgggtattacaggctttgggaagtgaacctatacagtatgccgtgccagtcgttaaatatgatcgaaagggatacaaacctcgatcacggcagctgcttctaacaccaaatgccgtggtgatagtggaagacgccaaggtcaaacagcgcattgactatgcaaatctgacagggatatccgtgtccagcttgagtgactccctgtttgtactccacgttcagagggcggacaacaaacagaagggggatgtggtcctgcagtcggaccacgttatagagaccctcactaagacagctctgagcgctaatagggtcaatagtatcaacatcaatcagggctctattacatttgccgggggaccagggagggacgggaccatcgatttcacacctggttctgagctgctaattacaaaggccaaaaatggacatctggctgttgtggccccacggctgaactcacggtag

SEQ ID NO: 196185 - DNA, 3135 bp, synthetic construct
  misc_feature 1..3135: note = Description of Artificial Sequence: Synthetic coding sequence
  source 1..3135: mol_type = other DNA
atgcggtaccgggccagcgccctgggcagcgacggcgtgcgggtgactatggagagtgctttgacagccagggacagggtaggggtccaagacttcgtgctactcgaaaatttcacgagcgaagcggccttcatcgagaacctccgaaggcggttcagagagaatcttatttacacatatattggtcctgtgctcgtgagtgtaaatccatatagggatctgcagatctatagtcgccagcacatggaacgatatagaggggtttcattctatgaggtgccacctcatctcttcgccgttgccgacactgtgtaccgcgccctgcgcaccgaacgacgggaccaggcagtaatgattagtggagaaagcggggccgggaaaacagaggctacaaaacgcctcttacagttttacgctgagacgtgtcctgctcccgaaaggggcggagcggttagagatagacttcttcagtcgaatcccgtgcttgaagccttcggcaacgccaagacattaagaaatgataactcatctagattcggcaaatatatggatgttcagtttgacttcaagggcgccccagtgggcgggcatatcctgagttacctgctggagaagagcagggtcgtgcatcaaaaccacggggagagaaactttcacatcttctatcagcttctggaagggggcgaggaggaaacactcaggaggctggggttggagcggaacccacagagttacctctacctagtaaaaggccagtgtgctaaggttagctctatcaacgataaatccgactggaaggtggtaagaaaagcgctcaccgtcatagactttacagaggacgaggtagaggatctgctgtccatagtagcctccgtccttcatctcggcaacatacactttgccgctaacgaggaatcaaatgcacaggtgacaactgaaaaccagctgaagtacctgacacgactgctgtctgtcgaaggaagcaccctgagggaagctttaactcatcgcaaaataatcgccaagggtgaggaactcctctctcctttgaatctggagcaagccgcctatgcccgagacgcgctggccaaggctgtctactctcgaacttttacttggctcgtgggcaaaattaacagaagcttagctagcaaggacgtggagtccccttcttggaggtcaaccactgttttggggctgctcgacatttatggtttcgaggtgtttcagcacaatagcttcgaacaattttgcatcaattattgtaatgaaaaactgcagcagctgttcatcgagttaacccttaaatctgaacaagaggagtatgaggctgaggggattgcttgggaacccgtgcagtacttcaacaacaaaattatttgtgatctcgtggaagagaagtttaagggcatcatcagcatattggatgaggagtgtctaaggcccggggaagccaccgatctcacattcctggagaagctggaagatacggtgaaacaccatcctcacttccttacacataaactggcagaccagcgaaccagaaagtctttgggacgtggagagttccggctgcttcactatgctggcgaggtaacatactccgtaacaggatttcttgacaaaaataacgatctgctgttccgaaatctcaaggaaaccatgtgtagctcgaagaacccaatcatgtcacagtgttttgaccgaagtgaactgagcgacaaaaagaggcccgagactgttgcaactcagtttaagatgtctttgctccagctggtggaaatcctgcagtctaaagaacccgcctacgtgcgctgtattaagcccaacgatgcgaaacaacccggcaggtttgacgaagtactgatccggcatcaggtgaaatacctagggctgttggaaaatttaagggtgcgacgcgcagggtttgcataccggcggaaatatgaggccttcctgcagcgttacaaatctctgtgtcctgaaacttggcccacatgggcagggcgaccccaggacggtgtggctgtccttgttagacacctggggtataagcctgaagaatacaaaatgggcaggaccaaaatcttcatccggttcccaaaaacactgttcgccactgaagatgccctcgaggtgcggagacagtcactggccaccaagatccaggctgcctggcgcggattccactggcgacagaagtttttaagggtaaaacggtctgcaatctgcattcaatcttggtggagaggtacattggggcgcaggaaggctgctaagaggaagtgggcagcccagacaatccgaagactgattcgaggattcgtcttgaggcacgcaccccggtgtcctgagaacgctttcttcttagaccatgttcggacctcattcttgctcaatttaagaagacagctgccacagaatgttctcgatacaagctggccaactccaccccccgccctgagagaagcgtctgaattgctgcgcgaactgtgcattaaaaacatggtgtggaaatactgcaggtccattagtcctgagtggaaacaacaattgcaacagaaagcagtggcgagcgagattttcaagggaaagaaagacaactacccccagtccgttcccaggctcttcatcagcactagactgggcacagacgaaattagcccacgtgtcctccaggccctggggagtgaacctatccagtacgcagtgcccgttgtcaagtacgatcggaaaggatataagccgcgctcccggcagcttcttctgacccccaatgcggtggtgatcgtggaggatgcgaaggtcaagcaaagaattgactacgcaaatttgactggcatatcggtctctagtctcagcgacagcctgttcgtgctgcacgtacaacgcgctgacaataagcagaagggtgatgtagttctgcagtcagaccacgtgattgagactctgactaagactgcgctgagcgctaacagggtaaattccatcaacattaaccagggtagcatcacgttcgcgggcgggccaggccgagatggtactatagatttcacgcctggaagtgagctgctaattaccaaagccaagaatggccacctggctgtggtcgcccccagacttaattctcggtag

SEQ ID NO: 196186 - DNA, 2418 bp, synthetic construct
  misc_feature 1..2418: note = Description of Artificial Sequence: Synthetic coding sequence
  source 1..2418: mol_type = other DNA
atggagagcgccctgaccgcccgggaccgggtgggcgtgcaggactttgttcttcttgagaattttactagcgaagccgccttcatcgagaatttgagacgtcgctttcgggagaacctaatctacacttacatcggacccgttctggtctcagtcaatccctatcgagatctgcagatctatagtcgacagcacatggagcgatacaggggcgtcagcttttacgaagtcccaccccacctgttcgctgtggcggacaccgtctatcgcgcactaagaacagaacgaagggatcaggccgtgatgatttcgggggagagcggtgctggcaaaacagaagcaacaaagcgtctcctgcagttttatgccgagacgtgccctgcgccggagagaggcggggctgtacgggaccggctgttgcagagtaaccccgtgttggaggccttcggcaacgccaagacccttcgtaatgataattcatcaagatttggcaaatacatggacgtgcagtttgactttaaaggcgctcctgtcggaggccacatcttgtcgtatctgctggagaaatcgcgggtggtccatcagaaccacggagagcgcaattttcacattttttaccagctattggagggtggagaggaggagacactgcggaggctgggtctcgaaaggaacccccagagttatctgtacctcgtcaaaggccagtgcgctaaagtgtcttcgataaacgataaaagcgactggaaggttgtgcgaaaggccttgaccgtcattgatttcaccgaggacgaggtcgaggatctcctcagtattgtggcatccgtgttgcacttgggaaacatacattttgccgccaatgaagaatccaatgctcaggtcacaactgaaaaccagttgaaatatctcaccaggctgttatctgtggagggatctacattacgcgaggccctgacccatcgcaaaataatcgccaagggagaggaattactctcccctctgaacctggagcaggctgcttacgcccgcgacgccctggcaaaagccgtgtattcaaggacttttacctggctggtgggcaagatcaataggtctctggccagtaaagacgttgaatctccatcttggcgctctacaacagtcctcggcctgcttgacatctatggcttcgaggtctttcagcataacagctttgaacagttctgcataaactattgtaacgagaagctccagcaactgtttatcgagctgacactgaagagcgagcaagaagaatacgaggccgaaggaatcgcgtgggagcctgttcaatatttcaataataaaattatttgcgaccttgtggaagagaaattcaagggcatcatctccatcttggacgaagagtgcttgaggcctggcgaggcaacggatctgaccttccttgaaaagttggaggatactgtaaagcaccatccccacttccttacacacaagctagctgatcaacgtaccagaaaaagcctcggacggggagagtttcgcctgctgcactatgccggggaggttacctactctgtgacggggtttcttgacaaaaacaacgatctcctgtttaggaacctgaaggaaacaatgtgttcctcaaagaatccgatcatgagccagtgcttcgaccggtcagaacttagcgacaagaagcgaccagaaaccgtggcaactcagttcaagatgagccttctgcaattggtcgaaatcctgcagtccaaagagccggcctatgtgagatgtattaaacccaacgatgctaaacagcctggaaggttcgacgaagtcctgattcgccatcaggtgaagtatctcggtcttctcgaaaacctgcgagtgaggcgtgcgggtttcgcctacaggaggaagtacgaggcatttctacagagatacaaatcgctctgtcctgaaacatggcccacttgggcaggtagaccccaagatggcgtggccgtgctcgtcagacatctggggtataaaccagaggaatataagatgggaagaacgaaaattttcattagatttcccaagacgttatttgccaccgaagacgccttggaggtgcgcagacagtccttggctacgaagatccaggccgcgtggaggggatttcattggcgccagaaatttctgagggtgaaacgctccgccatctgtatccagtcatggtggagaggcacactgggcagaaggaaagccgccaaggaagtgggtgggacagaccatcccgcggcccaccctcggctccgccctgcccctcggccaccattgcccagggaacggttgctgcccgggccatgtgcccacctgttcttcgccaaacctgaggccgccgccgcacccgaatgccctgggcaccttgttgcccacgcccccacctgccctgcctag

SEQ ID NO: 196187 - DNA, 3135 bp, synthetic construct
  misc_feature 1..3135: note = Description of Artificial Sequence: Synthetic coding sequence
  source 1..3135: mol_type = other DNA
atgcggggccgggccagcgccctgggcagcgacggcgtgcgggtgacaatggagtcagcgctgactgcccgggaccgtgtcggcgtccaggattttgtgctacttgagaacttcacttcagaagccgcctttatcgagaatttgcgtcggcggttcagagaaaatctcatttatacctacatcggccctgtgctggtctcggtcaacccatatcgtgatctacagatatatagccggcagcacatggagcggtacaggggtgtttcattttacgaggtgcctccacacttgttcgcagtcgcggacacagtttatcgcgcactccggaccgagaggcgcgaccaggctgtgatgatatccggagagagcggggccgggaaaaccgaagcaactaagcgccttctccagttctacgcagagacgtgccccgcgccagagcggggcggagcagtgcgggaccgcctcctgcaatcaaatcccgtgctcgaggctttcgggaacgccaagaccctcagaaacgacaattcaagcaggttcggcaaatatatggatgtccagtttgactttaagggtgcccccgttggggggcacattctttcgtatctgctggaaaaatcccgagtggttcatcaaaaccacggcgagagaaactttcacatattttatcagttgctggagggcggagaagaagagaccctaaggagactgggacttgaaaggaatccgcagtcctatctctatttggtcaaaggccagtgtgccaaggtgagctccatcaacgataaaagcgactggaaggtggtgcgcaaagcacttaccgtcattgatttcacagaagacgaggtggaggacttgttgtccatagtagcctcagttctgcaccttggcaatatccatttcgcagctaatgaagagtccaatgcccaagtgacaacagagaaccagcttaagtacctgactaggttacttagtgtcgaaggctcaaccctgagagaagcactgacacacagaaaaattatcgctaagggcgaggagcttctctctccactaaacctcgaacaggccgcctacgcacgggatgccctggccaaagcagtttacagcaggacttttacatggctggtgggaaagattaatagaagcctagcaagcaaagacgtggagagcccttcctggaggagcacaaccgttctggggttgcttgatatttacggcttcgaagtcttccagcataatagcttcgaacaattctgcatcaattattgtaatgaaaaactgcagcagctctttatagaattaacgctaaagagcgaacaggaggagtatgaggctgaaggcattgcctgggagcctgtgcagtatttcaataacaagatcatttgcgatctagtggaagagaagttcaagggcatcatttcaatactcgacgaggagtgtctgcgccccggcgaggctacagatctgacttttctggaaaagttagaggacacagttaagcaccatccacactttctcacccacaaactggctgaccagcgaactagaaaatccttagggcggggcgaattcaggctgttacattatgccggggaggtgacctactccgtgaccggatttttggacaaaaacaatgatctcctgtttcggaacctgaaggagactatgtgctccagcaagaatcccatcatgtcacagtgtttcgacaggagcgaactcagtgataagaagagaccagaaacagtggccacacagttcaagatgagtttgttgcagttagtggagatccttcagagcaaggagcctgcatatgttcggtgcatcaaacccaacgacgccaagcagcccgggcgtttcgatgaggtcctgatcagacaccaggttaaatatcttgggctgttggagaacttgagagtccggcgcgccgggtttgcctacaggaggaagtatgaagccttcttgcagcgctacaaaagcctgtgccctgaaacttggccaacttgggccggaaggccccaggacggcgtcgcggtcttggtgaggcatctaggatataaacccgaagagtacaaaatgggcagaactaagatattcatccggttccccaaaacattatttgccacggaggatgccctcgaggtccgacgacagtctctggcaactaaaatccaggctgcttggcgaggcttccactggcggcaaaaattccttagagtgaagcgatctgcaatttgcatccagtcatggtggcgtggaaccctcggacgccgaaaggctgccaaaagaaagtgggcagcacagacgattcggcgccttatcagaggtttcgtgctgcgccatgctcctagatgtccagagaatgccttcttcctcgaccatgttagaacttcctttttgctcaacctgcgacggcagcttcctcagaatgtcctcgatacttcatggcctactcccccacctgctctgcgggaagcttcagaactgctccgagaactgtgtataaaaaacatggtgtggaagtactgccggtcaatctcaccagaatggaagcagcagctccagcagaaagctgtcgccagcgaaatcttcaaggggaaaaaagacaactaccctcagagtgtaccacgactcttcataagcacacggctgggtacggacgagatttctccacgggtccttcaggccttgggcagcgagccgattcagtatgctgtgcctgtggtcaagtacgaccggaaaggttataagcctcgttctaggcagctgttactgacgcccaacgccgtcgtaatcgtcgaagatgcgaaagttaaacagagaattgattatgccaacttaaccggcatctctgtcagcagcctcagtgatagcttatttgttctccacgtacagcgggccgacaacaaacaaaagggcgacgtcgtcttgcaaagcgaccacgtcattgagactttgaccaagactgctctgtcagctaatagagtgaattctataaacatcaaccagggcagcattacattcgctggaggccctggcagagacggcaccatagacttcacccccgggtctgagctccttatcactaaagcaaaaaatggtcacctggcagttgtggcccctagactgaacagtagatag

SEQ ID NO: 196188 - DNA, 3120 bp, synthetic construct
  misc_feature 1..3120: note = Description of Artificial Sequence: Synthetic coding sequence
  source 1..3120: mol_type = other DNA
atggccctgggcagcgacggcgtgcgggtgaccatggagagcgccctgacagcccgggacagagtgggagtccaggactttgtgctccttgagaattttacgtcagaggcagcctttatcgaaaacctgagaagaagattcagagaaaatcttatctacacctacataggccctgtcctcgtttccgtaaatccctaccgtgatttgcagatttatagcagacagcacatggagaggtatcgcggcgtctccttctatgaggtgccaccacatctgttcgctgtggctgacacagtgtaccgggctctgagaaccgagagacgggaccaagcagtgatgatatccggtgagagcggggccggaaagacagaggcaacaaaaaggcttctccagttctacgctgagacatgtcccgctcctgagcggggcggggccgtacgcgatcgactgctgcaatctaatcccgtgttggaggcatttggaaatgctaagactctgagaaatgataattcctcacgctttggcaaatacatggatgttcagttcgatttcaaaggcgctccggtgggcgggcacatactgagctacttgttggaaaagtcacgggtggtccatcagaaccatggggaacggaatttccacattttctatcagctgcttgagggaggggaggaggaaacactgcggcgtctagggctggagcggaatcctcaaagttacctgtatttagtaaagggccagtgcgctaaggtgagcagcatcaatgacaagagcgattggaaggtggtgcggaaagccttgacagttattgattttacagaggatgaggttgaagacctactttctatcgtcgcctcggttctgcacttgggaaacatacatttcgcggccaacgaggaatctaacgctcaggtgacgaccgagaatcaacttaaataccttaccaggctcctgtcagtggaagggtccactctgcgcgaagccctaactcatagaaaaattatcgccaaaggagaagaacttttatccccactgaacctagaacaggccgcgtatgctcgtgatgccctggctaaggccgtgtacagtcgcacttttacttggctcgtgggtaagataaatcggagtctggcctctaaggatgtggaatctcctagttggagaagcacaacagtgttgggcctgctggacatttacggcttcgaggtctttcagcacaactccttcgagcaattctgtatcaattattgtaatgaaaaactacaacagctttttattgagcttactcttaaaagtgagcaggaagaatacgaggcagagggaattgcctgggagccagtccagtatttcaacaacaagattatctgtgacctcgttgaagaaaagttcaaagggattatctctatcctcgatgaagagtgcctgagacccggcgaggccactgacctgaccttccttgagaagctggaggacacagtgaagcatcatccccacttccttactcacaagctcgctgatcagcgaactaggaaaagtctcgggagaggggaattccgactactgcactatgccggagaagtgacttattccgtcactggtttcctggataagaataacgacctacttttcaggaatttgaaggagactatgtgcagcagtaaaaacccaatcatgtcacagtgttttgatcggtccgagctgagtgataagaaacgccccgaaaccgtggcaacccagtttaagatgtccctactgcagctggtcgaaatcctgcagtcaaaagagcctgcctacgtccggtgcattaagcctaacgatgcaaagcagcccggccgcttcgatgaggtcctgattagacaccaggtcaagtacctgggcttgcttgagaacctcagggtgcggagggcagggttcgcatacaggaggaagtatgaggccttcctccagaggtataaaagtttgtgccccgagacgtggcccacatgggctggtaggcctcaggacggcgtagccgtgctcgtgagacacctcggatataaacccgaggaatataagatgggaagaacgaagatctttatcaggttccctaaaactctattcgctactgaggacgctctggaggtcagaagacagtctctggcaactaaaattcaggccgcttggcgggggttccactggcggcaaaagttcctcagagtcaaacgctccgcgatttgcatacaaagttggtggagaggcaccctgggaagacggaaagcagccaagagaaaatgggctgcacaaacaatccggcggctgattagaggcttcgtgctgagacatgcgcctcgatgtcccgagaacgcgtttttccttgatcacgtccgcacatcttttctcttaaacttaaggcgccagctaccccaaaacgtcttggacacttcctggccgactccgccgccagcattaagagaagcctccgagttgcttcgggaactctgcattaagaacatggtttggaagtactgccgctccatcagtccagaatggaaacaacagctgcagcagaaggctgttgcttcagagattttcaagggcaagaaagacaactatccacagtccgttccacggctgtttatatctacccggctaggcaccgatgaaatatctccccgagtgctgcaggctctgggaagcgagcccattcagtatgccgttcccgtggtgaagtacgataggaaggggtataaaccgcgctccaggcagctgctgcttactcccaacgcggtggtaatcgtggaagacgcaaaagttaaacagcgcatcgactatgccaacctgacaggcatcagcgtctcctccctgtctgattcactatttgtccttcacgttcagcgcgccgacaataaacagaagggagatgtggtgctgcaaagcgatcacgtgattgaaaccctgacaaagacagctttgagtgcaaacagggtcaactccataaacattaaccaagggtctatcacctttgccggaggcccggggcgtgacggaaccatcgactttacccccggaagcgaactcctgattaccaaagcaaagaatggccacctggccgttgttgctccacgcctgaattcccgttag

SEQ ID NO: 196189 - DNA, 3021 bp, synthetic construct
  misc_feature 1..3021: note = Description of Artificial Sequence: Synthetic coding sequence
  source 1..3021: mol_type = other DNA
atggccgagcaggagagcctggagttcggcaaggccgacttcgtgctcatggataccgttagcatgccagagttcatggctaacttacggttgaggttcgaaaagggtcgcatttacacatttataggagaggttgtggtatctgtcaacccctacaaactgctgaacatctacgggagggacactatcgagcaatataaaggccgtgaactttacgaacggcccccccatcttttcgccatcgccgacgccgcatacaaggcaatgaagcggagaagcaaagatacttgtattgtgattagcggcgaatctggggccggtaagacagaagcaagtaagtatatcatgcaatacatcgctgctatcacgaatccctcccaaagggcagaggtagagagagtgaagaatatgctcctgaaatcgaattgtgtactcgaggcattcgggaacgcgaagacgaatcgcaatgacaactcgtctcggtttggcaaatacatggacatcaatttcgactttaagggagaccccattgggggacacatcaataattatctgctggagaaaagccgcgttatcgtgcagcagccaggcgaacgatcctttcatagtttttaccagcttctgcaggggggaagcgagcagatgctgcgctcgctgcacttacagaagagcctgtcatcttataactatatccatgtcggagcacaactgaagtcctctattaatgatgccgctgaatttagggttgtggctgatgctatgaaggtcatcgggttcaagcccgaggaaatccaaaccgtatacaagatactggcagctatcctccacctgggaaacttgaaattcgtagtcgacggcgacactccactgattgaaaatggaaaagtggtctccatcatcgccgaactcctgtctactaagaccgacatggttgagaaagctctgctgtatagaacagtagctaccgggagagacatcattgacaagcagcatactgaacaggaagcgagctacggacgagatgcattcgctaaagccatatacgagaggctgttctgttggatcgtgacaagaattaacgacataatcgaggtgaagaactacgacacaacaattcacgggaaaaacaccgtgatcggtgtcctggatatttatgggtttgagatctttgacaataatagcttcgagcagttttgcataaattattgcaatgagaagctgcaacaactgtttattcagcttgtgttgaagcaggaacaggaggagtaccaaagggaaggtatcccctggaagcatatcgattatttcaacaatcaaatcattgtcgatcttgtcgagcagcagcacaaagggattatcgccatcctagatgacgcatgtatgaacgtcggcaaggtcacagatgagatgtttttggaggccttgaactctaaactcggcaagcatgctcacttctcctccaggaaactatgtgctagcgacaaaatcctggaatttgaccgcgacttccgtatccgtcactacgctggagacgtagtctattctgtgatcggcttcattgataaaaacaaggacaccctgtttcaggactttaaacgtctgatgtacaactccagcaacccagtcctaaaaaatatgtggcctgagggcaaactcagcatcacagaagtgaccaaaagaccactgaccgctgccacactctttaaaaactctatgattgctcttgtggataatctcgccagtaaagaaccatattacgtgagatgcatcaagcctaatgacaaaaaaagccctcaaatatttgatgacgagcggtgccggcatcaggtggaatacctggggcttctcgagaatgtaagggtgcgtagagctgggttcgcctttcgacagacctacgagaagtttctgcatagatacaagatgattagcgagttcacttggccgaaccacgacctgccctctgacaaagaggctgtaaaaaagctgatcgaacgatgcggattccaggatgacgttgcttacgggaagactaaaatcttcatcaggactccacgtacactctttactctggaagaacttcgcgctcagatgctgattaggattgtcctcttcctgcagaaggtgtggcgtgggaccttagcacgcatgcgctataagcgcacaaaagctgcacttacaattattcggtattaccggaggtacaaagtgaagtcgtatattcacgaggtggcccgccgcttccatggggtaaaaactatgcgagactacgggaagcacgtgaagtggccaagcccacctaaagtcctgagacgctttgaggaagccctgcaaaccatatttaacagatggcgcgctagtcagctaatcaaatcaattcctgcaagtgacctgccccaagtcagggctaaggttgctgctgtggagatgctgaaaggccaacgagctgaccttggcctgcagagggcgtgggagggaaactatctcgcatcaaaacccgatacgccgcaaacatccgggaccttcgtgcccgttgctaacgaacttaagaggaaagacaagtatatgaacgtgctgtttagttgtcacgtccggaaagtaaaccggttctctaaagttgaagaccgcgcaatctttgtgacagaccgtcacctgtataaaatggacccaacaaaacaatacaaggtgatgaagaccatcccactctacaatctgaccggattgtcagtgtccaatggtaaggaccagctcgtcgtgtttcacaccaaggacaacaaggacctgattgtctgtttgttctccaaacagcctacccatgagtccagaattggcgaactggttggagtattggtgaaccatttcaaaagcgagaagaggcatctccaggttaatgtgactaatcctgtacagtgttctctccacggcaagaagtgtacagtctccgtggagaccaggctgaatcagccacagccggatttcaccaaaaatcgttctggcttcatcctgtccgtgcctgggaattag

SEQ ID NO: 196190 - DNA, 597 bp, synthetic construct
  misc_feature 1..597: note = Description of Artificial Sequence: Synthetic coding sequence
  source 1..597: mol_type = other DNA
atgctgaagggccagcgggccgacctgggcctgcagcgggcctgggaaggcaattatttagccagcaaacctgacacaccacagacttctggcactttcgtgcccgtggccaacgaactgaagcggaaggataagtatatgaatgtactcttctcctgtcacgttcggaaggtgaacagattttctaaagtagaggatcgcgctatattcgtgaccgatcgccatctctacaagatggatcctaccaaacagtacaaagtgatgaagacaatcccactatataacctgaccgggctgtcagtttccaacggtaaggatcagctggtggtgttccacaccaaggacaacaaagacctaatagtttgtctgttttccaagcaacccacacacgagagcagaatcggagagctggtgggggtgttggtgaatcatttcaagtctgagaagcgacaccttcaggtaaacgtgaccaatccagtgcagtgcagtttacatggcaagaagtgcacagtgtccgtcgaaacaaggctgaaccagcctcagccagatttcacaaaaaacaggagcggtttcatcctcagcgttcctggaaactag

SEQ ID NO: 196191 - DNA, 3327 bp, synthetic construct
  misc_feature 1..3327: note = Description of Artificial Sequence: Synthetic coding sequence
  source 1..3327: mol_type = other DNA
atgggcagcaagggcgtgtaccagtaccactggcagagccacaacgtgaaacactccggggtcgacgacatggtattactttctaagattacagagaactctatcgtggagaacctgaagaagagatacatggacgactatatctttacttatatcgggtcagtgctgatttccgtgaatcctttcaaacagatgccctatttcggggaaaaagagatcgaaatgtatcagggagccgcccagtatgagaaccctcctcacatctacgccctggcggacaacatgtataggaatatgattattgaccgcgaaaatcagtgcgtaattatctccggggagtctggtgccggcaagacggttgcagctaaatacatcatgagctacatctctcgggtatcaggcggtgggacaaaggtgcagcacgtcaaagacataattctgcaaagcaaccccttgcttgaagctttcggaaacgcaaaaaccgtgaggaacaataactccagtcggtttggtaaatattttgagatccagtttagtcccggaggcgagcccgatggcgggaaaatctcgaactttctgttagagaagagtagggtggtcatgcggaatcccggggagagatcgttccacatattttatcagttgatcgagggagcctcagctgagcagaagcattccctgggaatcactagcatggactactattactacctctcactctctgggagctacaaagtggacgacatcgacgaccggcgagagttccaggagaccctgcacgcaatgaacgtgatcgggatctttgcagaagaacagacgctggttctgcagatcgtagccggcatactgcacctgggaaacataagctttaaggaggttggtaactatgccgcagtggaatctgaggaatttctcgctttcccagcctatttattgggcatcaatcaggacagattaaaggagaaactgaccagtcggcagatggactctaagtggggcgggaaatctgagagtatccatgtgaccctgaacgtcgagcaggcctgctacacccgagatgctctggccaaagccttgcacgcacgcgtattcgattttctggtcgactccatcaataaggccatggagaaagatcacgaggagtacaatatcggagttttggatatatatggctttgaaatctttcaaaagaacggctttgagcaattttgtataaacttcgttaatgagaaattacaacagattttcatagaactgaccctcaaggctgaacaggaagaatacgttcaggagggcatcaggtggactccaatcgagtatttcaacaacaaaattgtatgtgacctgatcgagaacaaggttaatcccccgggcatcatgagcatacttgacgatgtctgtgccacgatgcacgcagtcggcgaaggagcagatcaaactttgcttcagaagctgcagatgcagattggaagtcacgagcacttcaactcttggaaccaaggcttcataatccaccactacgctggtaaggtgtcctacgacatggatggcttctgcgagcgcaatagggacgttctcttcatggatctgatcgaactgatgcagtcatcagaactgccctttatcaagtctctcttccctgagaacttgcaggccgataaaaaggggagaccaaccacagccggaagcaagattaaaaagcaggctaatgatctggtttctacgttaatgaagtgcacccctcattacatcagatgcatcaagcccaacgaaaccaagaagcccagggattgggaagagtctagggtgaagcatcaggttgaatatctggggctgaaagaaaacatcagagtgaggcgggccggttatgcctacagacgcattttccagaagttcctacaaagatacgccattttgacgaaggccacgtggccctcatggcaaggagaggaaaagcagggagtgctgcatctcctccaaagcgttaatatggattctgaccagtttcagctcggcaggtcaaaagtgtttattaaagctcccgaaagcctcttcctgcttgaagagatgagggagagaaaatacgacggctacgccagagttattcagaagagctggaggaaattcgttgccaggaaaaaatacgtccagatgcgagaagaggcctcggatttgctgcttaataaaaaagagcgcaggcgcaactcgataaacaggaacttcattggagactacattgggatggaagagcatccagaactccagcaattcgtcggaaagcgtgagaaaattgacttcgcagatactgtcacgaaatacgacaggcgatttaagggggtgaaaagggacttactcttgacccctaaatgcctttatcttatcggcagggaaaaagtgaaacaggggccggacaagggtctggtcaaggaagttctgaaaaggaaaatcgagatagagcgtatactctcggtctccctgagcacaatgcaggacgatatatttattctgcacgaacaggaatacgattcgctcctcgaatcggtgttcaagacggagtttttgagtctgttggccaaaaggtatgaggagaaaactcagaagcagctgcccttgaagttttccaacacattggagttgaagctaaaaaaggagaactggggcccatggtctgccgggggctctcggcaggtacaattccatcaaggttttggcgacctggccgtgctcaagcccagtaacaaagtgctacaggttagtatcggccctggcttgcctaagaactctaggccaacacgccggaatacaactcaaaacaccggatattcgtctggcactcagaatgcgaattaccccgtgcgcgcagcacccccacctcccgggtaccaccaaaatggcgtaattaggaaccagtacgtaccatatccacacgcccccggaagccagaggagcaatcaaaagtcactctatacttctatggctcgtcctcccctccccagacaacaaagtacttcgtccgaccgcgtgtcccaaactccagagtcactcgattttcttaaagtaccagaccagggggccgccggcgtgcggcgacagactacttccaggccaccacctgccggaggcagaccaaaaccacagcccaagcccaagcctcaagttccgcagtgtaaagccctctacgcttatgatgctcaggataccgacgaattatccttcaatgctaatgacatcatcgatatcattaaggaggacccttccgggtggtggacagggagattgagaggtaagcagggtctttttcctaacaattacgtgacaaaaatttag

SEQ ID NO: 196192 - DNA, 3312 bp, synthetic construct
  misc_feature 1..3312: note = Description of Artificial Sequence: Synthetic coding sequence
  source 1..3312: mol_type = other DNA
ggcaccaaggccggcagccccgtgaacggccagaagcagggccacgcccaggctaccccaaagattcctctaaacctgcacctccaccacgatcccttccgctctctccaagagcccaggcatcagccccctacaatgggctctaaggagcggttccactggcagagtcacaacgtcaaacagtcgggggtagacgacatggtcctgttgccccaaatcactgaggatgcgatcgctgcgaacctgaggaagcggttcatggacgactacatctttacctatatagggtcagtgctgattagcgtgaaccccttcaaacagatgccctactttactgacagggaaatcgatctctaccagggtgcagctcagtatgaaaacccgccccacatctacgcacttactgacaatatgtatcggaacatgctgatagattgcgaaaaccaatgtgtcattatctccggggagagcggcgctggaaagacagtggctgccaaatacatcatgggatacatcagcaaggtcagcggtggaggcgagaaagtccaacatgtgaaagatattatcctgcagtctaatcctctgcttgaagcctttgggaacgccaaaaccgtaagaaacaataactcttcccgctttggaaagtacttcgagattcaattcagtagggggggagaacctgatggtggtaaaatctctaatttcctcctagagaaaagcagggtggtgatgcagaatgaaaacgagcggaattttcacatctattaccagctgctggagggcgcaagccaggagcagcggcaaaacctggggctgatgacccctgattactactattacttgaatcagtccgacacctatcaagtcgacggaacagacgatcgtagtgacttcggagaaacacttagcgccatgcaagtgataggaatccccccatctatacagcagctggtgctgcagctcgtggctgggatcttgcatctagggaacatttcgttctgtgaggatggcaactatgcccgcgtggagtccgtggatctcctggcttttcctgcctacctattaggaattgactctggaaggctgcaggaaaagctgacatccaggaagatggactcaaggtggggtggccgcagtgaaagtatcaacgtgactctgaatgttgagcaagcagcctacacaagagatgctttggcaaaaggcctatatgccaggctttttgattttctggtggaggccatcaatcgtgcgatgcaaaaaccccaagaggagtattccatcggcgtcctcgacatctacggatttgagatcttccaaaagaacggtttcgagcaattctgtatcaactttgttaacgagaagctccagcagattttcattgagctgacccttaaagccgagcaggaggaatatgtccaagagggcatccgatggactcctatccaatattttaataacaaagtagtgtgtgacctgatagagaataagctgagtccccccgggattatgtccgtactggacgatgtatgcgctactatgcacgccaccgggggcggggctgaccaaacgctgctacaaaagttacaagcagccgttggaactcacgagcacttcaacagttggtcggcgggattcgtgatccatcattacgctggcaaagtgagttatgacgtctccggcttttgcgagaggaacagggatgtgctctttagcgatctaatcgaattgatgcagacctccgaacaagcctttttgcggatgctgttccccgaaaaactggatggagataaaaaaggaaggccatccaccgccggctctaagattaaaaagcaggccaacgacctggtggcgacgttgatgagatgcacgccccattatatccgttgcatcaaacctaatgagacaaaaaggcccagagattgggaggaaaacagggtaaagcatcaggtagagtacctggggttaaaggaaaatatacgtgtgagaagagcggggttcgcctaccggcggcaattcgccaagtttctgcagaggtatgccatcctgaccccagaaacttggcccaggtggcgtggagacgagaggcagggtgtgcagcacctgctccgggcagttaacatggaaccggaccaataccaaatgggaagtaccaaggtattcgtgaagaaccccgaaagcctatttttattggaagaagtgcgggagcgcaaattcgatggttttgcacgcaccatacaaaaagcatggcgccggcacgttgctgtaagaaaatatgaggaaatgagagaggaggcctccaatatcctcctgaataaaaaggaacgcaggcgcaacagtattaatcggaattttgtgggagattacttagggctcgaggagcggcccgagctgagacagttcctgggcaagcgggaacgggttgatttcgctgactcagtcaccaagtacgaccggcggttcaagccaattaaacgggacctgatcctgacccccaagtgtgtctacgtgatcggccgcgaaaaggttaagaaggggccagaaaagggccaggtgtgtgaggttctaaagaaaaaagtggatatccaggcgttgcgaggggtgtccttgagcacacggcaggacgacttctttattctccaggaagatgctgcagattctttcctggagtcagtgttcaaaactgagtttgtgagtctgctgtgcaagagattcgaagaggccactaggcgcccactccctttgaccttctcagatactctgcagttccgggtgaagaaggagggctggggcgggggcggaaccagatcggtgacattcagcaggggctttggtgatctcgctgtccttaaagtaggcggccggaccttgaccgtttccgtgggcgatggcctacctaaatcttccaagcccaccaggaaggggatggccaaaggaaagcctaggcgctcatctcaggcaccgacacgagcagcccccgctccaccgcgcggtatggaccgaaacggagtgcctcccagtgctaggggtggcccgctgcccggggaccatgtgtggcggggtcatccccaggcttcacctgggttacgaccccacccctgggaacccgcagatgaccctggacatgttcgacctcagtcaactacacagaattcctcgacttgtcttacacgggcatggcccgcgtgccgcggctccgctgcttggggcaacggtcaatgtctggtctgggccgatccaagcccttctttgggccacatggttcctggagccggtccgtatacatcaacttgggctaaaatgtggaccagctag

SEQ ID NO: 196193 - DNA, 3297 bp, synthetic construct
  misc_feature 1..3297: note = Description of Artificial Sequence: Synthetic coding sequence
  source 1..3297: mol_type = other DNA
atgggcagcaaggagcggttccactggcagagccacaacgtgaagcagagtggtgttgacgacatggttctcctgccacagattacagaagatgccatcgctgcaaacctgcgtaagcgtttcatggatgactatatattcacctacattgggtccgtcttaatctcagttaacccattcaaacagatgccgtactttactgatagggagattgatctctaccagggggccgcacaatatgagaaccctccccacatctatgcactgacggataatatgtaccggaatatgcttatcgactgcgagaaccagtgtgttattatcagcggggagtctggggctggaaaaacggtggccgccaaatacataatgggatatatcagcaaggtctccggcggaggagagaaggttcagcacgtcaaggacatcattctgcagtccaatccactccttgaagcttttggcaacgccaagaccgtaagaaacaacaactccagtaggtttggcaaatacttcgaaatccagttttcacgtggcggggaacccgacggcggaaaaatttctaacttccttctagagaagtcccgagttgtcatgcagaatgaaaatgagcgaaacttccatatttactatcagttgttagaaggggctagccaggaacagcgccagaacctaggcttaatgacccccgattactattattatctaaaccaatctgacacctatcaggttgatggcactgatgaccgctccgattttggtgagaccctcagcgcaatgcaagtcattggcattcccccgtctatccagcagttagtcttgcagttggtcgctggcatacttcatcttggtaatatctccttctgtgaggacgggaactacgcccgggtcgaatcggtcgatctcttagcgttccctgcttaccttctgggcattgattctggcaggctccaggaaaagctgacctcccggaagatggattcccggtggggagggaggtcagagtctattaatgtgactttgaacgtggaacaagctgcttatactagggacgcccttgcgaagggactctacgctagattattcgattttcttgtggaggccattaacagggccatgcagaaaccacaggaggagtactccattggcgtgctcgatatctacggcttcgagatttttcaaaagaatggctttgaacagttttgtataaactttgtgaacgagaaattgcaacagatcttcatcgagctcacattgaaggccgagcaagaggaatatgtccaagagggtatcagatggaccccgattcagtatttcaacaacaaggtcgtgtgtgacttgatcgagaacaaattatcacctccgggaatcatgagtgtccttgatgacgtgtgtgctacaatgcacgccaccgggggtggggcagaccaaactcttctgcaaaaactccaagccgccgtcggtacccatgaacacttcaatagctggagtgccggctttgtaatacaccactatgcgggcaaggtgtcatacgatgtgtctggattctgcgagcgtaaccgcgatgtactcttcagcgatctcatcgaactcatgcaaactagcgaacaggcctttcttagaatgctttttccagaaaaattagatggggataaaaagggccgccccagcactgcaggctcaaaaattaaaaagcaagcaaacgatcttgttgctaccctgatgagatgcaccccccactatatacgctgtatcaaacccaatgaaaccaaacggccgcgggactgggaggagaatagagtgaagcaccaggtagaatatcttggactcaaggagaacataagggtgcgtcgggccgggttcgcgtatagacgccagtttgcgaaatttctacaacgctacgcgatactgacaccagaaacttggccccgctggcgcggggatgaaaggcagggagtgcagcacctcctcagggccgtgaatatggagcccgaccaataccaaatgggatccaccaaagtattcgtgaaaaaccccgaatccctgtttttactggaggaggtgcgggagaggaagttcgacggctttgccaggacaattcagaaagcatggagacggcacgtcgccgtcagaaaatacgaggagatgcgcgaggaagccagtaacattctgcttaacaagaaggaaagacgccgcaactccatcaatcgcaacttcgtcggggattacctaggcttagaggagagacctgagcttagacaattcctgggtaagagggagcgcgttgactttgccgacagcgtcactaaatatgaccgacgctttaagccaatcaaaagggatctcattttgacgccaaaatgtgtgtatgtgattggcagagagaaggtgaaaaaggggccagagaaggggcaggtttgtgaagtgcttaagaaaaaagtggatatccaggccttaagaggcgtttccctcagcacacggcaggacgatttctttattctgcaagaagatgccgccgatagtttcttagagtccgtctttaaaaccgaatttgtctctctgctgtgcaaaaggttcgaagaagccacaaggcgcccgctacctctgacatttagcgacactctccagttccgtgttaagaaggaagggtgggggggtggtggcacccggtcagtcacattcagccgcggcttcggggaccttgcagtgctcaaagtgggaggacgtacactgaccgtgagcgtgggcgacgggttaccaaaatcttcaaagcccactcgtaaagggatggctaagggaaagccacgcagaagctctcaagctcctactagggccgcgccagctcctcctaggggcatggatcggaacggagtacctccatctgcgagaggtggcccgctgcctctcgaaataatgtccggtggtgggacacaccgccctcctagaggaccgccctctacctccctgggagcctctagacggccaagagcccgcccaccgagtgagcataataccgagtttctgaacgttcccgatcagggcatggctggtatgcagcgcaaacgaagtgttggacagcgtcctgtcccgggcgttggccgacccaagccccaacctcggacccacggcccacgatgcagggcgctgtaccagtatgttggacaagacgtagacgaactgagttttaatgtcaacgaagtgatcgagatcctgatggaagatccctctggatggtggaaggggcgcctgcatggacaggaaggccttttcccgggcaattacgtggagaagatctag

SEQ ID NO: 196194 - DNA, 3057 bp, synthetic construct
  misc_feature 1..3057: note = Description of Artificial Sequence: Synthetic coding sequence
  source 1..3057: mol_type = other DNA
atggaggacgaggagggccccgagtacggcaagcccgacttcgtgcttctggatcaggtgactatggaggattttatgcgaaacttgcagctgcgcttcgagaaagggcgaatatacacctacatcggcgaggtgctcgtcagcgtgaacccctatcaagaactgccactgtatgggccggaggcaatcgctaggtatcagggcagggagttgtacgaaagacctccccacctctacgcagtcgccaatgctgcctacaaggcaatgaagcaccggtctcgggacacatgcattgtgatttcaggggagtctggcgctggcaaaacagaagccagcaaacatattatgcagtatatcgccgccgtgaccaatcctagccagagagctgaggttgaacgagtgaaagacgtgctcttgaagtccacttgtgtcctcgaagcctttggcaatgctaggaccaatcggaaccacaactccagccgattcggaaagtacatggatatcaacttcgactttaaaggtgaccctatcggggggcacattcactcctatctgctggaaaaatctcgagtgttaaagcagcacgtgggtgagcggaattttcacgctttctatcaactccttaggggctctgaggataaacagctccatgaactccacttggaaaggaatcctgcggtgtataatttcacacaccagggagccggccttaacatgaccgtccattctgctctcgactctgatgagcagtcacaccaagctgtcaccgaagctatgagagtcataggattctcccccgaagaggttgagtcagttcaccgaatcctggctgcaatcctccatcttgggaacatagagtttgtggagactgaggagggcggattgcagaaggaagggctggccgtcgcagaagaggcactcgttgaccacgtggcggagttgaccgccactcccagggacttagttttgaggagcctgctggcccgcacggtggcaagcggaggcagagaacttattgagaaggggcacactgctgccgaagctagctacgcacgagatgcctgcgccaaggccgtgtaccaacgcttgttcgagtgggtggtgaaccgcataaattccgtgatggagccccgtggtcgtgacccgaggcgcgacggcaaagacaccgttataggtgtgctggacatctatggattcgaggtgttcccggtgaactcatttgaacagttctgtattaactattgcaacgagaaactgcagcagttgttcattcagctgattctgaaacaagaacaggaagagtacgaaagggaaggcattacatggcaatcagtggaatactttaataatgccacaattgtggacctggtggaacgaccccatcggggaatccttgctgtcttggatgaggcatgttcgtctgccggcactataacagacagaatcttcctgcaaacactggacatgcaccaccgtcaccacttgcactatacttcccgacaactctgtcccaccgacaagactatggagtttggaagagactttagaattaaacattacgccggagacgttacctactccgtggagggcttcatagacaagaatagggacttcctgtttcaggactttaaacggttgctctacaactccacagatccgaccttgcgagcaatgtggcctgatggccagcaggacataactgaagtgacaaaacgccccctaaccgccggcaccctgtttaagaatagcatggtcgccctcgtcgagaacctggcctccaaagagcccttctacgtgcggtgcattaaacccaatgaggacaaggtggccggcaagcttgatgagaatcactgcagacaccaggtggcttacctagggttgctggagaacgttcgcgtgcgtagggcaggatttgcaagccggcaaccctatagtaggttcctgctccggtataagatgacttgtgaatacacctggccaaatcatctgttgggctccgacaaggccgctgtcagcgctctcttggagcagcatggtcttcagggcgacgttgcctttggacacagcaagctgttcatacggagtccgagaactctggtgacgttggagcagtctagagccagacttattcccattatagtacttctgcttcagaaagcatggcggggtacactggctaggtggagatgtcggaggctgagggccatctatacgattatgcgttggtttcgccgtcataaggtgcgcgctcacttggctgaactccagcggcgttttcaggccgcccggcagccaccactgtacggcagggatctggtgtggccattgcccccggcggtcctacaaccatttcaagacacatgccacgccctgttttgcaggtggagagctaggcaactagtgaaaaacatccccccctccgatatgccacagatcaaagctaaagtagccgccatgggggcacttcaaggattgcggcaggactggggttgtcgccgggcttgggctagagactatctctcgtctgccacagataatcctaccgcatccagcctcttcgcccaaagattgaagacactccaagataaggacgggtttggcgcagttctcttctcttcccatgtgcgaaaggtgaaccgttttcataagatacgaaaccgggctctcctcctaaccgatcagcacctgtataagcttgatcccgacagacagtacagagtcatgcgggcagtcccactggaagcagtcactggactgtctgtaactagcggcggagaccagctcgtggttttacacgctcggggccaggatgatctcgtggtgtgtcttcatcgctctagaccgcccctcgataatagggttggcgagcttgttggagtgctcgcagcccactgccagggggagggcagaacactggaggtgcgggtatcagactgcatccctttatcacatagaggtgtgagaagattgatttcagtcgaaccacgcccagagcagcccgagcccgattttaggtgtgccagagggtcttttactctattatggccaagcagatag

SEQ ID NO: 196195 - DNA, 4851 bp, synthetic construct
  misc_feature 1..4851: note = Description of Artificial Sequence: Synthetic coding sequence
  source 1..4851: mol_type = other DNA
atgttccccctgatcggcaagaccatcatcttcgacaacttccccgacccaagtgacacttgggaaattactgaaacaattgggaaagggacctatggcaaagtattcaaagtgttgaataaaaagaacgggcagaaggctgccgtgaaaatcctcgatcctatccacgacatagatgaggaaatcgaagcagaatacaatattctcaaggcactgtctgatcaccctaacgttgtccggttttacggaatttacttcaagaaggacaaggttaacggtgacaagttgtggttagtgctggagctctgctcaggcggttctgtgacagatttggttaagggcttcctgaaaaggggcgaacgcatgagtgaaccgttaatcgcttatatcctgcacgaagccctgatgggtttgcagcatcttcacaacaacaagacaatccatcgagatgtcaagggcaacaacattctcttaactacagagggaggcgtcaagctcgtggacttcggcgtctccgcccagctgactagcacacgtcaccgcagaaacacgtctgtgggtacccctttctggatggccccagaggtgatcgcctgtgagcagcaactagacaccacttatgacgctcggtgcgatacgtggtccttaggaatcactgccattgaactgggcgacggcgacccacctctggccgacctgcaccccatgcgggccctatttaagattccaaggaatccacctccaaagctgcgacaaccagaactatggagtgcagagttcaatgatttcatcagcaaatgcctcaccaaagattatgaaaaacgaccgacggtaagcgagctgctgcagcataaattcataacacagattgagggcaaagatgtcatgcttcagaaacagttgacagagttcatcggcatccaccagtgcatgggtgggacggagaaggcacgacgggaacgtatccatacaaaaaagggaaatttcaacagacccttgatttctaacctgaaggacgtggatgaccttgctacgctggaaatcttggacgaaaatactgtgtctgagcagttggaaaagtgctattctcgagaccaaatctacgtgtatgtgggggatattctgatcgctctaaacccgtttcagtctctcgggttatactccacgaagcactcaaaactgtacattggctctaagcgcactgcctcccccccccatatttttgctatggctgacctcggataccagtccatgattacatacaatagtgatcaatgtatcgttatcagcggggagtctggagccggaaagacggagaacgcccacttgttggtgcaacagcttaccgtgctgggcaaggccaataataggacgcttcaggagaagatcctgcaggttaacaacctcgtggaagcttttgggaacgcctgcacgatcatcaacgacaactcttccaggttcggaaagtatctcgagatgaaattcactagctccggcgctgtggtcggagcacaaatctctgagtacctgctagaaaaatcgcgcgtcatccaccaagccatcggggaaaaaaacttccatatattttactatatatacgccgggctggcagagaagaagaaattggctcattataaactcccagaaaataagcccccaagatatcttcaaaatgatcatctgcgcacagtgcaggacattatgaacaacagcttctataagtctcagtacgagctgatcgaacagtgctttaaagtcattggcttcaccatggagcagttaggctctatttattcgattctcgctgccattctgaatgttggaaacatcgagttctcttccgtagcaacagagcatcagattgataagtctcacatctcaaatcacacagcattagagaattgtgctagtctgttatgcattagggcagacgagcttcaggaggcccttaccagtcactgtgtagtgacccgcggtgagaccattattcgcccaaacactgtagagaaagccactgatgtgagggatgccatggccaaaacactgtatggaaggctgttcagctggattgtaaactgtattaactccctcctgaagcacgacagtagtccctctgggaatggcgatgaattgtccatcggcatactggacattttcggcttcgaaaacttcaaaaagaactctttcgaacaactgtgcattaatattgccaatgaacaaatccagtattactacaaccaacatgttttcgcctgggaacagaatgaatatctgaatgaggatgtggacgcgcgagttatagaatatgaagacaactggccattgttggatatgttcctgcagaagcccatgggcttacttagtttacttgatgaagaatcgaggtttccaaaggctacagaccagactctggtcgagaaatttgaaggcaatctgaagagccagtacttctggagacccaagagaatggagctgtcatttggcattcaccattacgcgggtaaggtgctgtataacgcctccggtttcctcgccaagaacagggacaccttaccaacagacattgtattactgctcagaagttccgacaattcagttatcaggcagctggtgaatcacccactgacaaagactggcaaccttccacattcaaaaactaaaaacgtgattaactaccaaatgcgcacctctgaaaaactgataaaccttgcaaaaggcgatactggagaagccacaaggcatgcaagggagaccaccaatatgaaaacccagaccgttgctagctactttagatatagcctcatggacctgctgtcaaaaatggtggtggggcagccccactttgtacgctgcatcaagcctaacagcgaaagacaggcgaggaagtatgataaggagaaggtgttgctccagctgagatatacagggattttggaaacggccaggattcgacggttaggattttctcatagaatcctttttgccaatttcattaaacggtactatctgctttgctataagagctccgaggaacctagaatgtcccccgatacctgcgccaccatacttgaaaaagccggactggataattgggcccttggaaaaaccaaagtattcctaaaatactaccacgttgagcaactgaatttgatgcgaaaggaggccatcgataagttaatacttattcaggcatgcgtgcgcgctttcctctgtagtcgtcgctaccaaaaaattcaggaaaagcgaaaggaatcagcaatcattattcagagcgcagccaggggccacctcgtgagaaaacagcggaaggagatcgttgatatgaaaaacacagctgtaactacaattcagaccagcgatcaggagttcgactacaaaaagaatttcgagaacacaagggaatcattcgtcaaaaagcaggcggagaacgcaatatctgctaacgagaggttcatatccgcccctaataataagggcagcgtgtccgtagtgaagacctcaacattcaagccagaagaggagaccaccaatgcagtcgaatccaataatagagtgtatcagacacctaagaaaatgaataatgtgtatgaggaggaagtaaagcaggagttctatctggtggggcctgaggtgagccccaaacaaaagtcagtaaaagatctggaggagaacagcaaccttcgcaaagtcgaaaaggaagaggccatgatccagtcttactatcagcgttatacggaggagcgaaactgtgaggagagcaaggccgcctatctggaacggaaggcaatcagcgaacgcccatcctacccagtaccctggctggcggagaacgaaaccagctttaagaagacactggagcccaccctgtctcagaggagcatttaccaaaatgccaattcaatggagaaagagaagaagacgtccgtggtgacgcaaagggcccctatctgttcccaagaagaaggaagaggccggctgagacacgaaacagttaaggaaaggcaggttgagcccgtcacacaggctcaagaggaagaagataaggcggctgtatttatccagtcaaagtataggggctataagagaagacagcaacttcggaaggacaagatgagttcttttaaacatcagcggatcgtgactactcctaccgaagtcgctaggaatactcataacttatactcctacccgactaaacacgaggaaataaacaatatcaagaaaaaagacaataaggactccaaggccacttctgaaagggaagcctgcggcctggcaattttttccaaacaaattagtaagcttagcgaggaatacttcatcctgcaaaagaaactgaatgagatgatcttatcgcagcagctgaaatccctttatctgggggtgagccaccataaaccgattaacagacgtgtatcgagccagcagtgcttgagcggggtgtgtaagggcgaggaaccaaaaatcctgcgccctccccgtaggccacgaaaacccaagacacttaacaatcccgaagactcaacatattactacttgttgcacaagtcaatccaggaagagaagaggcgccctcgtaaggatagccagggaaagctcttggacctggaagacttctactataaagaattcctcccttcaaggtcaggccctaaagaacactctccatctctgcgggagaggaggccccagcaggagctccaaaaccaatgcatcaaggcgaacgaacggtgttgggctgccgagagccccgaaaaagaggaggaaagggaacctgcggcgaacccttacgactttcggagactgctgcgtaaaactagtcagcgcagaagattggtgcagcaatcttag

SEQ ID NO: 196196 - DNA, 594 bp, synthetic construct
  misc_feature 1..594: note = Description of Artificial Sequence: Synthetic coding sequence
  source 1..594: mol_type = other DNA
atgttccccctgatcggcaagaccatcatcttcgacaacttccccgatcctagcgacacgtgggagataacagagacgattgggaaaggtacttacggcaaggtttttaaggttctgaacaaaaaaaatgggcagaaggccgctgtgaagattctcgatccaatacatgacattgacgaagaaatcgaggccgagtacaatatactgaaagctttgagtgatcaccccaacgtcgtgagattttacggaatctacttcaaaaaggacaaggtgaatggtgacaaactttggcttgtccttgaactctgctcaggtggctcagtgacagatctcgtgaagggttttctgaagaggggcgagagaatgagtgagcctcttatcgcatatatcctgcacgaagccttgatgggcttgcaacatctgcataacaacaagactatacaccgcgatgtcaagggcaacaatatcttactaaccacagaaggaggcgtcaagctagtggacttcggagtcagcgctcagctgacctccacaagacatagacgtaacacttctgtggggacacctttctggatggctcctgaggttaggtag

SEQ ID NO: 196197 - DNA, 744 bp, synthetic construct
  misc_feature 1..744: note = Description of Artificial Sequence: Synthetic coding sequence
  source 1..744: mol_type = other DNA
atgttccccctgatcggcaagaccatcatcttcgacaacttccccgacccatcagatacctgggaaatcaccgagacaattggcaagggcacctatggaaaagtcttcaaagtgctcaataagaaaaacggccagaaggctgcagtgaaaattctggaccccatccatgatatcgacgaggagattgaagctgaatataacattctgaaagcacttagcgatcaccctaatgttgtgcggttctatggaatatattttaaaaaagataaggtgaatggtgataaactttggctggttctggaactgtgctctgggggcagcgtgacagaccttgtgaaggggttcttgaagcggggagaacgaatgtcagagccacttatcgcatatatactgcatgaggcacttatgggtttacagcacctacacaataacaagaccattcacagagacgtcaagggcaacaacattctattgacgacagagggaggtgtaaaattagtggattttggtgtatctgctcagctgactagtacacgacaccgccgtaacacatctgtaggcactccattttggatggccccagaggttatagcttgtgaacagcagttagatacaacatacgacgccagatgcgatacttggtcacttggcatcacggcaattgaattaggtgatggagacccaccactggcagaccttcaccctatgcgcgctttgttcaaaattccacgctctgacgattag

SEQ ID NO: 196198 - DNA, 1995 bp, synthetic construct
  misc_feature 1..1995: note = Description of Artificial Sequence: Synthetic coding sequence
  source 1..1995: mol_type = other DNA
atgttccccctgatcggcaagaccatcatcttcgacaacttccccgatccgtctgacacctgggaaatcactgagaccataggcaaagggacttatgggaaggtgtttaaagtcctgaacaagaaaaatggacaaaaggccgcagtcaaaattctggatcccatccatgatatcgatgaggaaatcgaagctgagtataatattctgaaagcgctatctgatcacccgaatgtggtccgattctacgggatctacttcaagaaagataaggtgaatggagacaagctgtggctcgtgttagagctttgttcaggaggcagtgtaaccgacctggttaagggttttttgaagagaggggagcgcatgtctgaaccccttatagcatacattttgcacgaggccttgatggggctgcagcatctgcacaacaacaagacaattcaccgtgacgttaagggaaacaacatcttgcttacaacagaggggggagttaagctggtggacttcggcgttagcgctcagctgacgagtactcgccaccgacgcaacacatccgtgggtacccctttctggatggcaccagaagtcatcgcgtgcgagcagcagttggataccacatatgacgccaggtgcgatacatggtcccttggtattacggctatagaactgggagatggagatccaccgctggcggacctgcaccccatgagagcactttttaaaatccctcggaatccgcctcctaagctcaggcagcctgagctgtggtctgccgaattcaatgacttcatctcaaagtgcttaaccaaagactacgaaaagcgcccaaccgtttcggaactactgcagcataagtttatcacacaaattgaaggtaaggatgtcatgctgcagaaacagctcacagaattcattggaattcaccagtgcatgggaggaacagagaaagcaaggagggagcggatccatacaaagaagggaaacttcaatcggccattgatctcaaatctcaaggatgtggatgacctggccacacttgaaattctggatgaaaacacagtcagtgagcagcttgaaaagtgctactctcgggatcagatatacgtgtatgtgggcgacatcctcattgctctgaacccctttcagtccctaggcttatactcaaccaagcactctaagctttacattggctccaagaggactgcgagccccccacacatttttgccatggccgatctaggataccagagcatgattacctacaatagcgatcaatgtattgtcattagtggcgaaagtggcgccggaaagacagagaatgcacatttattagtgcaacaacttacagttcttggaaaggcaaacaaccggacgcttcaggaaaagatattgcaagtcaacaatctggtggaagcctttgggaacgcatgcactatcataaacgataattcttctcgctttggaaagtaccttgagatgaagtttactagctcaggagccgttgtgggtgcgcagatatctgagtatctgctcgagaaaagtagggtgatacaccaggcaataggggagaaaaactttcacattttttattatatatacgcaggactggcagaaaagaagaaactggcccactataagctgccagaaaacaagcctccaaggtacttgcagaacgatcatctgcgaaccgtgcaggatatcatgaataacagcttttacaagtcccaatatgaactcattgagcaatgtttcaaagtcatcggcttcaccatggaagtcctcggcggaggggagcctagggagggaggaggagaacgggctagctcccagcctctgcggctccaggaggcccctgctcagaacctgccggctccagcacccaggcccgccgtgctcacggtgcagcggggttcacataggcgtcgcaaagcacttgagccagcaggccagcagggcccgtctagacatagcggcgcaggaaccagccggcactag

SEQ ID NO: 196199 - DNA, 3834 bp, synthetic construct
  misc_feature 1..3834: note = Description of Artificial Sequence: Synthetic coding sequence
  source 1..3834: mol_type = other DNA
aagcacctgtacggcctgttccactacaaccccatgatgctgggcttagaatccctgcccgatccaacagatacatgggagattatcgagactatcgggaaagggacttatggtaaggtgtacaaggtgacgaacaaaagagacggatccctcgcggcggtgaaaattctagatccagtgagcgacatggacgaggaaattgaggctgaatacaatatcttacagtttctacctaaccaccctaacgttgtaaagttttatgggatgttctacaaagcggaccactgtgttggcggtcagctgtggctcgttctggaattgtgtaacggtggctccgttacagagttggtgaagggactgcttcgctgcggtcagagactcgatgaagcgatgatttcatacatcctgtacggagcactgctcggcttgcagcatctgcataataataggattatccaccgggatgtgaaaggaaacaatattctcctgaccacagagggcggcgttaaactggtggactttggcgtgtccgcgcaactcactagcactagactccgtcgtaatacaagcgtcggcactcctttctggatggcacctgaggtgatcgcctgcgagcagcagtacgactcaagctacgacgcccgatgcgacgtttggtctctcggaatcacagccattgaactgggggacggagatccccccctgtttgatatgcaccccgtcaagaccttattcaagatcccccggaaccccccgcctaccctgctccacccagaaaagtggtgtgaggagttcaaccacttcatctctcagtgcctcatcaaggactttgagaggcggccttctgtgacccacttgttggaccatccgtttatcaagggcgttcacgggaaagtactcttcctgcaaaaacagctcgctaaagtgctacaagatcagaagcaccagaatcctgtggcgaagacacggcacgaaagaatgcatactagacggccataccacgtcgaggatgctgaaaagtactgcctcgaggacgacttagtgaacctggaggtcctcgatgaggatactatcattcatcaacttcagaagaggtacgcggacctcctgatttatacgtacgtgggtgacatcctgatcgcactgaacccctttcaaaacttgagtatttactctccgcaattcagcagactgtatcacggagtcaaacgcgcctctaacccaccacatatctttgcctccgccgatgcagcctaccagtgtatggtcacccttagtaaggatcagtgcatcgtgatctctggagagtcgggcagcggcaaaaccgaaagcgcccatctgattgtgcagcatttgacttttctcggtaaagcaaataatcaaacattacgggaaaagattctccaagtgaacagcttggttgaggcgttcggaaactcctgcaccgccatcaacgataattcttcccggtttggcaagtacctagagatgatgttcacacctactggggtggtcatgggggctaggatttctgagtaccttctcgagaaatctagggtgatcaaacaggcggccagagagaagaacttccacatcttttattatatatacgccgggctgcatcaccaaaaaaaattatctgattttcgactccctgaggagaaaccaccacggtacatcgccgacgaaacaggtcgggtcatgcacgacataaccagcaaggagtcttaccgtcgacagtttgaggctatccagcactgttttaggatcattgggttcaccgacaaggaggttcactctgtttacaggatcctggccggaattctcaacatcggaaacattgagttcgccgccatatcttcccaacaccagaccgacaagagcgaagtgcctaacgccgaggctttgcagaacgcagccagcgtcctgtgcatttcacccgaggagttgcaggaagccctgacctctcactgtgtggttacacgtggagaaactatcatccgagctaacactgtcgatcgcgctgccgatgtgagagatgccatgtctaaagctctgtacggtaggctgttcagctggatcgtgaacaggataaataccctccttcagcctgatgaaaacatctgctccgctggggggggtatgaatgtgggaatcctggacattttcgggtttgagaactttcagaggaatagctttgagcaactctgcattaacattgccaatgaacagatccagtattactttaaccagcatgttttcgccctcgagcagatggagtaccagaatgagggcattgacgcagttcctgtagagtacgaggataatcgaccccttctggatatgttcctgcagaagccactgggactgttagccctgctggacgaggaatcacgctttccgcaggccacagatcagacattagtggataagtttgaagataatctgcgatgcaagtacttctggcgcccaaagggagtcgagctttgctttggcattcagcattacgctgggaaggtgctatatgacgcttcaggagtcctggagaaaaatagagacacccttcccgccgatgtggtagtggtgctgcggacaagcgaaaataagcttctgcagcaactgttcagtatacctctgacaaagacagggaatctggcccagacgcgggcccggattaccgtggcctcatcgtccctgccaccccacttcagtgccggcaaagccaaggtagacactctggaagttattcgccaccctgaggagacaactaacatgaagcggcagactgtggctagttattttcgttattccctgatggacctactgagtaagatggtggtcgggcaaccacactttgtccgatgtataaaacccaatgatgaccgtgaggccctccagttcagcagagaaagggtgctggcacagctccggtctacagggattctggagactgtctcgatccgtcgccaaggctacagccatcgaatcctgtttgaggaatttgtcaaacgttactactacctggcatttacagcacaccagaccccacttgcttcaaaagaatcttgcgtagccatcctggaaaagagccgccttgatcactgggtcctgggtaagacgaaggtttttctgaagtactaccacgtagagcagctcaatctgctcctccgagaggtgattggcagagtagtggtactccaagcgtacactaaaggatggctgggtgctcgacgctacaagagagtgagagaaaagcgcgagaagggagcaattgccatccaatccgcttggagggggtacgatgcgagacgcaagtttaaaaaaatcagtaatcgcaggaatgaaagcgccgcgcataatcaggcgggcgacacatctaatcaatccagcggcccccacagcccagtcgctgccggcacaagggggagtgccgaagtgcaggattgtagtgaacccggggatcataaggtgttgagaggttctgtgcacagaaggtcccattctcaagccgaatccaataatgggcgcacccaaaccagctccaactcccctgccgtgaccgaaaagaacggacattcacaggcccagagttctccaaagggctgtgatatcttcgcaggacacgccaataagcatagtgtctcaggcacggatttattgagctcaaggatctgtcatcccgcacctgatcagcagggactgagcctgtggggagcaccacagaaacccgcctttccacattacggctgtaacttttatggatttaggaagtggtcctgtaccgaggctagcaacaccagcccaacaatgtcagcagctcagaatgcagaatag

SEQ ID NO: 196200 - DNA, 4053 bp, synthetic construct
  misc_feature 1..4053: note = Description of Artificial Sequence: Synthetic coding sequence
  source 1..4053: mol_type = other DNA
atgctgcagagcgccctgctgagcacccggaagcacctgtacggcctgttccattacaatccaatgatgctgggcctggagtctctcccagatcctaccgacacttgggaaatcattgagactattgggaagggaacatatggaaaagtttataaggtgacaaataaaagagatggtagcctcgccgctgtcaagatcttggaccctgtgtcagatatggatgaagagatagaagctgagtataacatcctgcagttcttacccaatcatcccaatgtggtgaagttctatggcatgttctacaaggccgaccattgtgtcggaggccagttgtggctcgtactggagctgtgtaatggcggctctgttaccgagctggtcaagggtttactgcggtgcggccagcgcctcgacgaagccatgatatcttacattctctatggagcacttttgggcctgcaacatctgcacaacaacaggatcattcaccgagacgtgaaggggaacaacatccttctgactaccgaggggggtgtcaagctcgtggatttcggcgtgtcagctcagctcacttccacccggctaaggcgcaacacttccgtggggacccccttctggatggctccagaggtgatcgcctgtgaacagcagtatgacagtagctatgatgctagatgtgacgtgtggtccctggggatcacagccattgagctgggggatggggatccccctctttttgacatgcaccccgtcaaaacgttgtttaagatccctcggaatccccctcccactctcctgcatcccgagaaatggtgcgaggagttcaaccactttatcagccaatgtctcatcaaggattttgagcgacgcccaagcgttactcatctcctcgatcatcctttcatcaaaggagtgcacggcaaagtactgttcttgcagaagcagctcgctaaagtcctgcaggaccaaaaacatcagaaccccgtcgccaagactagacatgaacggatgcacacgagaaggccataccatgtggaagacgcggagaaatactgcctcgaggacgatctggtgaatctggaggtgctggatgaagataccattatccatcagctgcagaagcggtacgctgatcttctaatatacacatacgtcggggacattttaatagccctgaacccattccagaatctgtctatttacagtccgcagttttctaggctgtaccatggtgtaaaacgagctagcaaccctcctcacatcttcgcaagcgctgacgccgcttaccagtgtatggtgacattgtcaaaggatcaatgcattgtcatctcaggagagtcaggctccggaaaaacagagtccgcgcacctcatcgtgcaacacctgacatttcttgggaaagcgaacaaccagacgttgagagagaagattctgcaggtgaacagcctagtcgaggcgtttggcaactcttgcaccgctattaacgacaacagttcaagattcgggaaatacctggagatgatgtttacgcctacaggagtagttatgggagcccggatctctgagtatttgctcgagaaaagccgtgtgatcaagcaggctgctcgggagaagaattttcatatcttctattatatctacgccggcctgcaccatcagaagaaactatcagatttcaggcttccagaggagaaacctccacgctacattgccgacgaaactgggagagttatgcacgacatcacctctaaggagtcctaccggaggcagtttgaggctattcagcactgcttcagaattattggatttacagataaggaagtgcattccgtgtacagaattcttgccggcatccttaatatagggaacatcgagttcgcagccattagctcccaacaccagaccgataaatctgaggttccaaacgctgaggcgcttcagaacgctgcttctgtgctatgtatatcacccgaggagttacaggaggccctgacaagccactgtgtagtgacgcgtggggaaactattattcgggccaacactgtcgaccgggccgccgatgtcagggatgccatgtctaaagcactttatggcagactcttcagctggatcgtgaaccgtatcaatacgctgctccagccagacgagaacatttgctctgctggggggggaatgaatgtggggatactggatatcttcggttttgagaatttccagcgcaacagcttcgagcaactttgcatcaatattgcgaacgaacagatccagtattatttcaatcagcacgtgtttgctcttgagcagatggagtatcagaacgagggcatcgatgcggtaccggtagagtacgaagacaaccgacctctgctcgatatgtttcttcagaaaccactcgggctgctggccctgctggatgaagaatcccggtttcctcaggctaccgaccagacactcgtggacaagttcgaagacaatttaaggtgcaagtacttttggcgccccaaaggggttgaactatgctttggcatccagcactatgccggcaaggtgttgtacgatgcgtcgggtgtgctggagaagaaccgcgacaccttgcccgccgacgtggtggtggtgctgcgcacttcagaaaataaactcctgcagcagctcttctcgattcctctgacaaagaccgggaatctggctcagacccgcgcgagaatcaccgtcgcaagcagcagccttccaccacacttcagcgcggggaaggctaaggtggatactcttgaagtcattagacatcccgaggagaccaccaatatgaaacgccagacggtggctagttattttcggtactctctgatggatctcctgagtaaaatggtagtgggacagccacacttcgtgcgttgtattaaacccaatgatgacagggaagccctccaattctcacgggagcgggtgctagctcaattgcgatcgactggcattttggagaccgtgtccatcaggcgacagggctactcgcatcggatcctgttcgaagagttcgtcaagagatattactatcttgcctttaccgcacatcagacccccctggcgagtaaggagtcttgcgtagcgattctggaaaaatcccggctggatcattgggtcctaggaaagacgaaggtattcctgaaatactatcacgtggagcagcttaatttgctgctccgggaagtgatcgggcgggtggttgtactgcaggcctatactaagggatggctgggagcaaggagatacaagcgtgtgagagagaagagggaaaaaggggccatcgctatccaatcagcgtggagaggctatgacgcacgaagaaagtttaaaaagattagtaacagacggaatgagagtgctgctcacaatcaggcaggcgacacttccaaccagtcttctggcccccacagccccgtcgcagctggaacacgggggtccgccgaggtgcaggactgttccgagccaggcgatcacaaagttctcagggggagcgtacacaggagaagtcacagtcaggcggagagtaataacggccgcactcaaactagttccaactctcccgcagtgaccgagaagaatggacattcccaggcccagagtagcccaaaggggtgtgacattttcgcggggcacgcaaacaagcatagtgttagcggaacagatttactgtcctctagaatctgccaccctgctcctgaccaacaaggactttcactgtggggtgctccgcagaagcctggatccgaaaacggtctcgcacaaaaacaccggacaccccggcgtaggtgtcagcaacccaagatgctgagctccccagaagatacaatgtactataaccagctgaatggaaccctggagtatcaggggtccaagagaaagccaagaaagctgggtcagataaaagtgttagacggggaggacgagtactataaatccctgtcacccgttgactgcatcccagaggagaacaactcagcacacccgtcttttttcagctcttcctccaagggggattcgtttgctcaacattag

SEQ ID NO: 196201 - DNA, 4026 bp, synthetic construct
  misc_feature 1..4026: note = Description of Artificial Sequence: Synthetic coding sequence
  source 1..4026: mol_type = other DNA
atgaagcacctgtacggcctgttccactacaaccccatgatgctggggttggagagtctgccggaccctactgatacatgggagataattgagacaattggcaaggggacctacggaaaagtctataaggtaacaaacaaacgtgatggctcactggctgcagtcaagatcttggatcctgtgtctgatatggatgaagaaatcgaggcggagtataacattcttcaattcctgccaaaccacccgaatgtcgtgaagttctacggtatgttctacaaagccgaccactgtgtcggggggcagttgtggcttgttctggagttatgcaatggtggaagcgttaccgaactggtgaaagggctcctgagatgtgggcagagacttgacgaggccatgatttcatacatactgtacggagccctgctcggattgcagcatctgcacaataacagaataattcaccgcgacgtgaaggggaataacattctactcacaaccgagggtggagtcaagctggtggattttggtgttagtgcccagctaacaagtacacgattgcggcggaacacaagtgttgggacccctttttggatggcccctgaggttattgcatgcgagcagcagtatgatagctcttacgacgcaagatgtgatgtgtggtctctggggatcactgcgattgaactgggggatggtgatcccccgttatttgacatgcaccccgtcaaaactctgttcaaaattccgcggaacccaccacccaccctgctgcaccctgagaagtggtgcgaggagtttaaccatttcattagtcagtgtctgatcaaagactttgagaggcgcccttccgtaacacacctattagaccatcctttcattaaaggagttcatggaaaggtcctgttcctccagaaacaactcgccaaggtcttgcaggaccagaaacaccagaacccagtcgccaaaaccaggcacgagcggatgcacactagaagaccgtatcacgtagaggatgctgagaagtattgtcttgaggacgacttggtgaacctcgaggttttggacgaggataccataatccatcagctccaaaaacggtacgccgacctccttatctatacgtatgtgggcgacatccttatagccctgaacccctttcaaaatctgtctatctactcaccccaattctcccgactgtaccacggggtcaagcgcgcctcaaacccgccacacattttcgccagtgctgacgctgcctatcagtgcatggtgacgctgtccaaggatcaatgcattgtgatttccggagaatccgggtcgggcaagactgagtccgcccacttaatcgtgcagcacctgacttttctgggaaaagctaacaatcaaaccctcagagaaaagattctgcaagttaactctctggtggaagcattcggtaacagttgtactgccataaacgacaacagttctaggttcggtaagtacttggaaatgatgttcactcccaccggggttgtcatgggggccaggatcagtgaatatctgttggagaaatcgagggtgattaaacaagccgcccgagaaaagaacttccacatcttttactatatctacgccggattgcaccatcagaagaaattgtcggatttcagactgcctgaagagaagcccccgagatacatcgccgacgagacaggccgcgtcatgcacgacatcacatctaaggaaagctaccggcgacagttcgaagcaatccagcattgtttccgaattatcggattcaccgacaaagaggtgcattctgtctatagaatcctggcagggatcctgaatatcggaaacattgaatttgcggccattagtagtcagcaccagacagacaaatcggaggtacccaatgctgaagccctgcagaatgcagcgagtgtcctgtgtattagtcccgaagaactgcaagaagccctcacttcccattgcgtggttactcggggtgagaccattatcagagcaaacaccgtagatagagcagcagatgtgagggacgcgatgagcaaagctctatacggcagacttttctcatggatagtgaataggatcaacactctgctccaaccagacgagaacatttgtagcgcggggggcgggatgaatgtggggatcttagacatattcgggtttgagaattttcagcggaactccttcgaacaactctgcatcaatattgccaacgagcagatccagtactactttaaccagcatgtcttcgctctggaacagatggaataccaaaacgaagggattgatgcagtgcccgtcgaatatgaagacaaccgccctctgctagacatgttcctgcagaagccacttgggctgctggccctacttgacgaagagtcacgtttcccccaggcaaccgaccaaacattggtggacaaatttgaggacaacctgcgctgcaaatatttttggagacccaaaggcgtggagctgtgtttcggtatccagcattatgcaggaaaagtgctgtatgacgcaagcggagtcctggaaaagaatagggatacactgccagccgatgtggtggtggtgttgcggacctccgaaaacaaactgctgcaacaattgtttagcatccccctgaccaagacaggcaatctggcccaaacccgcgccaggatcaccgtggcttccagctcgttgccaccacatttcagtgctgggaaagcgaaagtggacactttggaagtgatacggcacccagaggagacaactaatatgaagagacagacagtggcatcgtactttcggtacagcctgatggacttgctgtccaagatggtagtgggacagcctcatttcgtgcgctgcattaagccgaatgacgatcgggaagcattacagttctcccgagagagagtgttggcccagctaagatccactggtatcttagaaacagtcagcatccgccgacagggatactcccatagaatcctgttcgaggagtttgtgaagcgttattactacctggcctttactgcacaccagacacctctcgcatctaaggaatcgtgtgttgctatcctcgaaaagtctcggttggaccattgggtgctgggaaaaactaaggtttttctcaaatactaccatgtcgaacagttaaatctgctgctgagggaggtaataggcagggtggtcgtgctccaagcgtatacaaagggatggctcggagctaggcgttacaagcgcgtgcgggaaaagcgtgagaaaggggctatcgccattcaatcagcgtggaggggatacgacgctcggcggaaatttaagaagatctccaatcggcggaacgagtcagctgctcataatcaagccggggatacttctaaccagtcttccggacctcactcacccgtcgccgccgggacccggggcagcgccgaagtgcaggattgtagcgagccaggtgaccacaaggtgcttcgaggatcggtccatcgccgctcacacagtcaagctgaatcgaacaatggcagaacgcagaccagttctaattcacccgcagtgaccgaaaagaacggccactctcaagcacaatcctccccaaaaggttgtgatattttcgccggccatgctaacaaacacagtgtgagcggtacagacttactaagcagccgtatctgtcaccctgcccccgaccagcaggggttgtctctttggggggcgcctcaaaagccagggtccgaaaatgggctcgcccaaaaacacagaaccccaagacgacggtgccaacagcccaaaatgctatcttctcccgaggacactatgtactataaccagctaaacggcactctcgagtatcagggcagtaagcggaagccgcgaaagctggggcagattaaggtgcttgacggcgaagatgagtattacaaatccctgtctcccgtagactgtattccagaagagaacaattccgcccaccctagttttttctcctccagctcaaaaggcgattctttcgctcagcactag

SEQ ID NO: 196202 - DNA, 3945 bp, synthetic construct
  misc_feature 1..3945: note = Description of Artificial Sequence: Synthetic coding sequence
  source 1..3945: mol_type = other DNA
atgaagcacctgtacggcctgttccactacaaccccatgatgctgggcctggagtccctgcctgacccaactgatacttgggagatcatcgagacaataggtaaaggtacatatgggaaagtttacaaagtcacaaataaacgggacggtagcctggcagccgtcaagatcctggatccagtgtcagacatggatgaagagatcgaggcagagtacaatattcttcagttcctgcctaatcacccgaatgtggttaagttttacggtatgttttacaaagccgaccattgcgtcggaggccaactttggcttgtgttggagttgtgtaatggcggatcagtcaccgagctcgtcaagggactgctcaggtgcggccagaggctggacgaagcgatgatttcttatatcctgtacggagcacttctgggactgcaacacctccataacaatcgtataattcatagagacgtgaaggggaacaacatcctgctgactactgagggtggagtgaaactagtggacttcggggtttccgcgcagcttacatcaacacgcctgcggcgaaatacctcggttggcacacctttctggatggcccctgaagtgatcgcctgcgaacaacagtacgattcttcctacgatgcacgatgtgatgtttggtcattaggaattacggccattgagctaggggacggtgatccccctctgttcgatatgcatcccgtaaagacgttgtttaaaatcccccgtaacccaccccccactcttctgcatcccgagaagtggtgcgaggaattcaatcacttcatttcccagtgcctaatcaaggatttcgaaagacggccgtccgttacacacctccttgatcacccatttataaaaggtgtgcatggtaaagtattattcctgcagaagcaacttgccaaggtgttacaggaccaaaaacaccagaatcctgttgccaaaacaagacacgagaggatgcacacaagaaggccctaccacgtcgaagacgccgagaagtattgtctggaggatgatttagtgaatctcgaagttctagacgaagataccataattcaccaattgcaaaaaagatatgcagacttgctgatctatacttacgtcggtgatatcctcatcgcgttaaatccgttccaaaacctctctatttactcccctcaattttcacgcctgtatcatggcgtgaagcgcgctagcaaccccccacacatcttcgcctcagccgacgctgcataccagtgtatggtcacgctctcgaaggaccagtgcattgttattagcggggaaagtgggtccgggaagacggagagtgcccaccttatcgtgcagcacctgaccttcctgggtaaagcaaataatcagaccctgcgagaaaagattctccaggtaaactctctggttgaagccttcggaaatagctgcactgcaattaatgataacagtagcagattcggcaagtacctggagatgatgttcactccgacgggcgtggttatgggggccaggatctctgaatatctgctcgaaaaatctcgagtgatcaagcaagctgcaagagagaagaactttcatattttttattatatctacgcgggcctgcaccatcaaaagaaactgtctgactttcgtctacctgaggaaaagcccccaaggtacatcgcagacgagacgggcagggtgatgcacgatattacttccaaggagtcataccgacggcagtttgaagcaatccagcattgtttcaggattattggatttacagacaaagaggtacactctgtgtaccgtatcctggcagggattcttaatataggtaacattgaatttgcagcgatcagttctcaacaccaaacggataagtctgaggtacctaacgctgaagcactacagaacgccgccagcgtcctctgtattagccctgaagaactgcaagaggctctgacttcccactgtgtggtcacgcgcggagagaccattatccgcgccaacaccgtggaccgagcagctgatgtaagagacgccatgtcaaaggcactgtatggaaggctgttctcatggatcgtaaatagaattaacactttgctgcaaccagatgaaaatatttgttcagccggaggcgggatgaacgtcgggatcctcgacatctttgggttcgaaaatttccagagaaacagttttgagcaattatgcattaatatcgccaatgaacagattcaatattattttaatcagcacgttttcgctttggagcaaatggagtatcagaatgaggggatcgacgccgtgccagtggagtatgaggataatcggccgctactggacatgtttcttcagaaaccattaggcctcctggccctgcttgacgaagagagccggtttccgcaggccaccgaccaaacactggttgacaaatttgaggacaacctgagatgtaaatatttttggaggcccaaaggggtagaattatgctttggtatccagcactacgccggcaaggtgttatatgacgcaagcggtgtgttagagaagaatcgagacactttacccgctgacgtagtagtcgtcttgcgtaccagcgaaaacaagttactccagcaacttttcagtatacctcttacaaagactgggaatctggcccagaccagggccaggatcacagtcgctagctcttccctgcctccacatttcagcgcaggaaaggctaaggttgatacattggaggtcatacgccaccccgaagaaaccacaaacatgaagcggcagacagtggcgagctatttcaggtacagtctcatggatcttctgagcaaaatggtggtcgggcagccgcactttgtccgctgtattaaaccaaatgatgatagggaggcgctgcagttcagtcgggagcgcgtattggcccagttgcggagtaccgggattctcgaaaccgtctctattcgaaggcagggctatagccacaggatcttattcgaggaattcgtgaaaagatattattatctggcatttacggcccaccagactcccctcgccagtaaggagtcttgtgtggccatccttgagaagtcccgattggaccattgggtgctggggaagaccaaagtctttcttaaatattaccacgtcgagcaactgaatctcctgttgagggaagttatagggagggtggtggtgctgcaggcttacacaaaagggtggctaggggcaaggcgatataagcgggtgagggaaaagcgagagaaaggggcaattgcaattcaaagtggcgacacatcaaaccagagctctggtccacattcccctgtggcagctggcactaggggctccgcagaggtccaggactgcagtgagccaggtgaccacaaggtgctcagggggtctgttcacagaagatcccactcacaggctgaaagcaataatggaaggacccagaccagctctaactctcctgccgtgactgaaaagaacgggcacagccaagctcagtctagccccaagggatgcgacattttcgccgggcacgccaataagcacagcgtatccggtacagatctgctgagctctcgaatctgccatccggccccagaccagcaaggtctgagcttatggggcgcccctcaaaagcccggctccgagaacggcctcgcacaaaaacaccggacacctagaaggcgctgtcagcagcccaagatgcttagtagcccagaggatactatgtattacaatcagttgaacggcaccctagagtaccagggaagcaagcgcaaaccaagaaagctcggccagattaaggttctggatggcgaggacgagtactataagagcctcagcccagtggactgtattcctgaggaaaataatagcgctcacccctcctttttctccagttcatctaagggggacagcttcgcccagcattag

SEQ ID NO: 196203 - DNA, 3390 bp, synthetic construct
  misc_feature 1..3390: note = Description of Artificial Sequence: Synthetic coding sequence
  source 1..3390: mol_type = other DNA
atgaacatcaacgacggcggccggcggcggttcgaggacaacgagcatacactccgcatctacccaggcgctattagtgagggcaccatctattgccctattccagcacggaagaattcgactgctgccgaagtcattgaaagcctgataaataagttgcacctggataagactaagtgttatgtgttagcggaagtgaaagaatttgggggagaagagtggatactgaaccccacagattgccccgtgcagagaatgatgctgtggccccgcatggcactggagaatcggctctcaggcgaggattatcgcttcctattacgcgaaaagaacctggacggaagcatacattacgggagtctgcagagctggctgagggtcactgaagagcggcggaggatgatggaacgagggtttctgccccagcctcaacagaaggattttgatgatttgtgttcacttcctgacttgaatgagaaaacgcttttggaaaacttgagaaatagatttaaacacgaaaagatctacacttacgtgggctccatccttatcgtgatcaacccattcaagtttctgccaatatataatccaaaatacgtgaagatgtacgataaccaccagctggggaaactagaaccacatatctacgctgttgccgatgtggcttaccatgcaatgctgcaacgcaagaagaatcagtgtattgttatctcaggagagtccggaagcggtaaaactcagagcaccaattttcttattcatcaccttaccgccctctcacagaaaggattcgcctccggcgtcgagcagatcatactcggtgctggccccgtgctggaggcctttgggaatgcaaagaccgcccataataataactcttcacgattcgggaaattcattcaggttaattaccaagagacaggcaccgtgctgggggcctatgtggaaaagtatcttctcgagaaatctcggctcgtgtatcaggaacacaacgagaggaattaccacgtgttttactacctactagctggtgccagtgaagatgagcggtcagcatttcatctaaaacaaccagaagagtatcattatctaaatcaagattgctttaccgttgagggagaggacctgcgacacgatttcgagcgcctgcagctggcgatggagatggtggggtttttgcctaagactcgcagacagatttttagcctcctttccgccatcctgcacctggggaacatctgctacaaaaagaagacctaccgtgatgatagcatcgacatatgcaaccctgaggttctcccaattgtgagtgaactgctcgaggtaaaagaggagatgctgttcgaggccttggtaacacggaagaccgttactgtgggagagaagctgatcttgccgtataaattagccgaagcagtaaccgtgcgaaattcgatggcaaagtctctctactctgctctcttcgattggatagtgttccggattaatcatgcactgctcaactccaaagacttggaacataacaccaaaacactgtccattggtgtgctggacatcttcggcttcgaggactacgaaaacaactcatttgaacagttttgtatcaattttgctaacgaacgtttacagcattatttcaatcaacacatcttcaaactggaacaggaggagtatcggacggaaggtattagttggcataacatcgattacattgacaacacctgttgcataaaccttatctccaaaaagcctactgggctgctccatttgctggatgaggagagtaattttccgcaagctactaaccaaacgttactggataagttcaagcatcagcacgaggataatagttatatcgagttcccagcagtgatggagccagcattcattattaagcattacgccggaaaagtgaaatacggcgtgaaggactttcgcgaaaagaataccgaccatatgcgccctgatattgtggctctgttacgatctagcaagaacgcattcatttcaggcatgattgggatcgacccggtggccgtttttagatgggctatcctgagagctttttttcgtgccatggtagcattccgggaggcggggaagcgaaacatccatcgcaaaactggccacgatgatacggctccttgcgctatattgaagtccatggactcattttcatttctacagcatcctgtgcatcagcgctcattagaaattctacaaaggtgcaaagaagaaaagtactccattactcgcaagaatccacgtacccccctgtccgacctacagggaatgaacgccctaaacgagaaaaatcagcatgatactttcgacatcgcttggaatggacgcaccggcattaggcagtcacgcctgagttctgggacttccctgcttgacaaggacgggatttttgccaactccacttcgtccaaacttttggaaagggcacatggcattcttacccgtaataagaactttaaatcaaagcctgcgttacccaaacaccttctggaggtcaactcactgaagcacctaacccgtttgactctccaggaccggattaccaagtcactgctccacttacataaaaaaaagaagcctccgagtattagcgcccagtttcaggcctccttgagtaagctgatggagactctaggacaggctgagccttacttcgtgaagtgtatccggagcaatgccgaaaaattacctctgcgcttctcagatgtcttagttctgcgtcagctacgctacactggcatgctggaaacagtaagaattagacagagcggttattctagcaagtattcattccaggacttcgtttctcattttcatgtattgctaccgcgaaacattattcccagcaaattcaacatacaggatttctttcgaaagatcaacttgaatcctgacaactaccaggtgggaaagactatggtgttccttaaggaacaggagcgacagcacctgcaggatctgctccaccaagaggtacttcggcgcataatactattgcagcggtggttccgtgtgttgttatgtaggcagcactttctccacctccgtcaggccagcgtgattatccagagattttggcgcaactatctgaatcagaagcaagtacgagatgctgcagtacaaaaggatgcctttgttatggcctccgcagcagcccttctccaggcgagctggagagcacacctggagcggcaaagatatctggaattacgcgccgccgccattgtgatacagcagaagtggcgcgattattataggagacggcacatggccgccatctgcatccaggctagatggaaggcgtacagagagtctaaacggtatcaggaacaaaggaagaactaccccttcgccatcaatatgtag

SEQ ID NO: 196204 - DNA, 7647 bp, synthetic construct
  misc_feature 1..7647: note = Description of Artificial Sequence: Synthetic coding sequence
  source 1..7647: mol_type = other DNA
atgaacatcaacgacggcggccggcggcggttcgaggacaacgagcatactttacgtatttatccaggagctatcagtgaaggcacgatctattgcccaatcccggcccgcaagaatagcaccgccgctgaggttatcgaaagcttaatcaacaaacttcatctggataaaaccaaatgttacgtacttgcagaggtgaaagaatttggcggcgaggaatggattctgaaccctacagattgtcctgtgcaacgtatgatgttatggcccagaatggccctggaaaacagactgagtggcgaagattatagatttcttctccgggaaaaaaacctagatggctctatccactacggcagcctccaatcgtggttgagggtgaccgaggagcgacgtagaatgatggagaggggatttttgccccagcctcagcagaaggactttgacgacctttgttcactgcccgatctgaacgagaaaaccctgttggagaatcttagaaatagatttaagcatgaaaagatctatacttacgtgggatccattctgatcgtgataaaccctttcaagttccttccaatctacaatcctaaatacgtgaaaatgtacgataatcatcagctaggcaagctcgagccccatatctacgccgtcgcagatgtcgcctatcatgcaatgctgcagcgcaagaaaaaccagtgcatagttatttccggcgaaagtggatcagggaagacacagtcaactaacttcttgattcaccatcttacagcactgtcccagaaggggttcgcctctggtgtcgaacaaatcatcctgggtgcagggcctgtcctagaagctttcggcaatgctaaaaccgcccacaataataattcaagccgtttcggaaaatttattcaagtgaattatcaggaaacaggaacggtgttgggcgcatacgtcgaaaaatacttgctggaaaaatcacgattggtttatcaggaacacaatgaaaggaactaccatgtattttactatctcctggccggggcgagcgaggacgagcgctcagccttccatctgaaacagcctgaagagtatcattacctgaaccagataacaaagaagcccctgaggcaatcatgggacgactactgttacgatagtgaacccgattgtttcaccgtggaaggggaggacctgagacatgattttgagagacttcagctcgccatggagatggttgggttcctgcccaaaacgcggaggcagattttctccctgctgagtgccatacttcatctgggtaacatctgttataagaaaaagacgtatagggacgatagcatcgatatatgcaaccctgaagttctgcccattgtgagcgagctattggaggtcaaggaagaaatgctgtttgaagccctggttactcgaaagacagtgaccgtaggggagaaactgatcctgccctacaaactggccgaagccgtgaccgtgaggaacagcatggctaagagcctgtacagtgcgttgttcgattggattgtctttcggatcaaccacgctctcctgaattctaaggacctggagcacaacaccaagacgctcagtatcggagtgcttgacatcttcgggttcgaggactatgaaaacaacagctttgagcagttctgcataaattttgctaatgaacggctccagcattactttaaccaacacattttcaaacttgaacaggaggagtatcggactgagggtatcagctggcacaatatcgactacatcgacaatacttgctgtatcaacttaatcagcaaaaagccaaccgggctattacatctcctggatgaggaatcaaacttcccacaggctacgaaccagactcttctcgataaattcaagcatcagcacgaagacaattcttacatcgagttcccagccgtcatggagcccgctttcatcatcaaacactacgcaggaaaggtgaaatatggtgtaaaagactttcgcgagaagaacaccgaccatatgcgtcccgacatcgtggcccttctgaggtcatctaagaatgccttcatcagcgggatgataggcatagaccctgtagctgttttccgatgggccattcttcgggcttttttccgggctatggtggccttccgtgaagcgggaaagcgtaatatacacaggaagaccggccacgacgataccgccccgtgcgctattcttaaaagtatggatagctttagctttttacaacaccccgttcatcagcgcagtcttgagattctgcaaagatgcaaggaagaaaagtattctataactaggaagaaccctaggactccactctccgacctccagggtatgaacgccctgaatgaaaaaaaccaacatgatacgttcgacattgcctggaatgggcggacagggatcagacagtctcggctgtcttccggtaccagtctcctcgacaaggacggcatttttgctaactcaacatctagcaaactcctcgaaagggcccacggtatactgacacgaaataaaaattttaaaagtaagccagcattaccaaaacacttgcttgaagtgaattccctgaagcatcttacgagactgacactgcaggacaggatcactaaatcgttgttacatctgcataaaaaaaaaaagcctccttccatctcggctcagttccaggcttcactatcaaagctaatggagacgctggggcaggcagagccttacttcgttaagtgcataaggtccaatgctgagaaactaccgttgaggttctccgatgtgctggttctgaggcagcttaggtacaccggaatgttggagaccgtccggatacgccagtcagggtattcatccaagtattcctttcaggacttcgtaagtcatttccacgttctcctcccaaggaacatcatcccgagtaaatttaacattcaggacttcttccgtaaaatcaatttgaatcccgataattaccaggtgggtaaaacaatggtttttttaaaagagcaagaacgacaacatctccaggaccttttgcaccaggaagttctgaggcgtatcatcctgttacagagatggtttcgcgtcctgctatgtcggcagcactttctgcacctgcgacaggcctccgtgatcatccagcgattctggcgaaattacctgaatcagaagcaagtgagagatgcagctgttcagaaagacgccttcgtgatggcttctgccgctgcgcttcttcaagctagttggcgtgcccatctggaaaggcaacggtatctggaactgcgagctgcagcgatcgtcatccagcagaagtggcgcgattattataggagacgacacatggcagcaatctgcatccaggcccgatggaaagcttaccgtgaaagcaagagataccaggagcagcgtaaaaagattattctactacagagtacctgtcggggattccgcgcgagacagcggttcaaggccctcaaggaacagagactgcgcgagaccaaaccagaagtgggcctggtgaacatcaaaggctacggcagcttagagatccaagggtcagatccttctgggtgggaagattgttcctttgataaccggatcaaagcgatcgaagagtgtaagtctgtcatcgagtcaaaccgcatctctagagaaagtagtgtggactgcctcaaggagtcacccaacaaacaacaggagagggctcaaagccagagcggagtcgacctacaggaggatgtgctggtgagagagcgcccgaggagcttagaggacctgcaccagaaaaaggttggccgcgccaaacgtgaaagccgaaggatgcgggagctggagcaggccatcttctcattagaactattaaaggtgagatccctagggggcatcagccccagcgaagataggcgatggtcgacagagctggtccccgaagggctgcagtcacctcggggcactcccgatagtgagagcagccaagggagcctggagttgctgtcttatgaggaaagtcagaaaagtaaactcgaaagcgtcatttctgacgaaggagacctgcagtttccttctcctaaaatctcctcatcaccaaagtttgatagccgcgacaatgctctgtccgcctccaacgagactagctccgcggaacacctgaaggacggaaccatgaaggagatggttgtgtgtagttctgagtccattacttgtaagcctcaactcaaagacagctttatttcaaactcactgcccacatttttttacattccacagcaagatcctcttaagaccaactcccagttagatacttcgatccagagaaacaagctcctggagaatgaagacaccgcgggggaggcactgaccctggacatcaacagggagactagaaggtatcactgcagcggaaaagatcagatagtaccctcgttaaacaccgaatcttctaatcctgtcctgaaaaagttggaaaagcttaacactgaaaaggaggaaagacaaaagcagctgcagcagcagaacgaaaaggaaatgatggaacagattagacaacaaacagacattctggagaaggagaggaaggcttttaagaccatcgagaagcccaggattggcgagtgcctggttgcaccctcatcctaccagtctaagcaaagggtagagagacctagttctctcctgagcctgaacacatccaacaaaggcgaactcaacgtgcttgggagtctgagtctgaaggacgcggctctggctcaaaaagacagttcctcagctcacctcccgccgaaagatcgaccagtgaccgttttcttcgaaaggaaaggctctccctgccagtctagtactgtcaaagagctgtctaaaactgataggatgggcacacagctgaatgttgcatgcaagttgtctaacaatcgaatttccaagcgagagcactttagacctacccagtcttactcccataacagcgatgacttgtctcgggaagggaatgcccgccctattttctttacacctaaggacaacatgtctataccactggtgagcaaggaagccttgaactctaaaaacccccagctgcacaaggaggacgaacccgcctggaaaccagtgaaactagcgggcccagggcagagagagacgagccagcgctttagtagtgtggacgagcaggcgaaactccataaaacaatgtctcagggtgaaattaccaagctggccgtgcgccagaaagccagtgactcagacatcaggccccagcgtgcaaaaatgcgattttgggctaagggcaaacagggagaaaagaaaacaacccgggtcaagcctaccacgcagtcagaggtatctccactgttcgccgggacggacgtgatacccgcccaccaatttcccgatgaattagcggcatatcacccaacacctcccttgtccccggaacttccaggaagctgcagaaaggagtttaaggagaataaagagccctctcctaaggccaagcgcaagcgatcagtcaagatctctaatgtcgctctagattccatgcattggcagaacgactccgtgcagattattgctagcgtatctgatctgaaaagcatggacgaattcttgctgaagaaagtgaacgacttggataacgaagacagcaaaaaagatacattagttgacgtagtctttaagaaagcgctcaaggaatttcgacaaaacatattcagcttttatagttcagctttggctatggacgacggtaaaagcataagatacaaggacctctacgctctgttcgaacagatcctggagaagaccatgagactggagcagagggattccctaggcgaatccccagtgagagtgtgggtgaatacttttaaagtgttcttagatgaatacatgaacgaatttaagacatccgactgcaccgcaacaaaggtacccaaaactgaaaggaaaaaaaggagaaagaaggagaccgatctagttgaagaacataacggccacatcttcaaggctacccagtactccatcccaacatactgcgagtattgttccagcttgatttggattatggatcgtgccagtgtctgtaaactgtgtaaatacgcctgtcacaagaagtgttgcctcaagacgactgcgaagtgttctaaaaaatacgaccccgaattgtcctcacggcagtttggcgttgagctcagtcggctgacctctgaggacagaactgttcctctcgtggtggagaaacttattaattacatcgagatgcatggactgtatacagagggcatttaccgcaaatctggcagtaccaataagatcaaagagctgcgtcaggggctagacaccgatgctgagagcgtgaatctggacgactataacatccatgtgattgcgagcgtcttcaagcagtggctgcgtgatctcccaaaccctcttatgaccttcgagttgtacgaagaattcttacgagccatggggctgcaagagcgcaaggagaccattagaggagtgtatagtgtcatcgatcagctgtcaaggacccatctgaacactttagaacgacttatttttcatctggtccgcatcgctctacaagaggataccaatagaatgtcagccaacgccctggccattgtattcgctccctgcatcctgaggtgtcccgacacaaccgaccctcttcagtcagttcaggacatctcaaagactacaacctgtgtcgaactaatagtggtggaacaaatgaacaaatacaaggcgcgcctcaaagatatcagttcattggagtttgccgaaaacaaagccaagactcggttgtcactgattcgtagaagtatggggaaaggcaggattagaagaggaaactatccaggtccctctagccccgtggtagttagattacccagcgtgagcgatgtatccgaggaaacactcacttcggaagccgccatggagaccgacatcacagaacagcagcaagccgctatgcagcaggaagagagagtcctaactgaacagatcgagaatctccaaaaagaaaaggaggagctgacctttgagatgctagtactcgagccacgtgcttccgacgacgagaccctggaaagcgaggcatccatcggaacggccgattccagcgagaacctcaacatggagagcgagtatgctatctctgaaaagtctgaaaggagcctggctctctcatctctgaagacagccggcaagagcgagccaagcagcaaactgcgcaagcagctgaagaaacaacaggacagcctggatgtggttgactcctcagttagtagtctttgcctgagcaataccgccagcagtcacggcacacgcaaactgtttcagatatactctaagagccctttttatagggcggcctccggaaacgaggccttgggcatggaggggccactcggccagaccaaattcctagaagataagccccagtttatctctcgtgggacttttaacccagagaaaggaaaacagaagctgaaaaacgttaagaactccccccaaaagactaaagaaaccccagagggcactgtgatgtctggtcgacgcaaaacggtggatccggactgtactagcaatcagcagcttgcgctgttcggcaacaacgaattcatggtgtag

SEQ ID NO: 196205 - DNA, 7860 bp, synthetic construct
  misc_feature 1..7860: note = Description of Artificial Sequence: Synthetic coding sequence
  source 1..7860: mol_type = other DNA
atgaacatcaacgacggcggccggcggcggttcgaggacaacgagcacactctcagaatctatccaggagctattagcgagggtacgatttattgcccaattcctgcaaggaagaattccactgctgccgaagtcatcgaatccctgattaacaaactgcatctggacaagacgaaatgctatgtcctcgccgaagtgaaggagtttggcggggaagagtggattctgaaccctaccgattgtccagtacagaggatgatgctgtggccccggatggcacttgagaacagattgtcaggggaggattaccggtttttactgagagagaagaacctagacggcagtattcattacggatcgcttcaatcatggctgcgcgtgacagaagagcgaagaagaatgatggaaagaggttttctgcctcagccgcagcaaaaggattttgacgacttgtgctcactgccggatttaaacgagaagaccctccttgaaaatctgcgaaaccgctttaagcatgagaagatctacacctatgtgggtagcatactgatcgtcataaaccctttcaagtttctacctatctataatcccaagtatgtaaagatgtatgataatcaccagttaggcaagctggagccgcacatctatgccgtggccgatgtggcctaccacgctatgctgcagcggaagaaaaatcagtgtatcgtgatttcaggggagagcgggagtggcaagacccagagtacgaacttcctcatccatcatttgaccgcgcttagtcaaaagggcttcgctagcggcgtggaacagattatcctgggtgcgggtcccgttctagaagcctttggcaatgctaagaccgcccataataacaacagtagccgtttcgggaagttcattcaggtgaattaccaagagaccggtacagtgctcggagcctatgttgagaaatatcttcttgaaaaaagccgcctcgtctatcaggagcataacgagagaaattatcacgtgttttattatctcttagcaggtgcttcagaggacgaacgcagcgcttttcacctcaaacagcctgaggaataccactatctgaaccaaattaccaagaaacctttgcgtcaatcctgggacgattattgttacgacagcgaacctgactgttttaccgtagagggcgaggatctcaggcacgatttcgagcggctacaacttgctatggagatggtcggctttctgccaaagacccgacgccagatcttttctctgcttagtgccattctccatcttggaaacatttgctacaagaaaaaaacgtaccgcgacgatagtattgacatctgtaaccctgaagtcctgcccatagtaagcgaactgctggaggtgaaagaagaaatgctgtttgaggccctggtcactagaaagacagtgaccgtgggagagaagttgatcctaccctataagctcgctgaggcagttaccgtaagaaatagcatggccaagtcactctactccgctctgtttgactggatcgtgttccgaattaaccacgcactgttgaacagtaaggatctggaacataacacgaaaacccttagcattggcgtgttggatatctttgggttcgaagattacgaaaataactccttcgagcaattttgcatcaatttcgcaaacgaaaggcttcagcactacttcaatcagcatatcttcaaattagagcaggaagagtaccggactgaagggatttcctggcacaacatcgattatattgacaacacctgttgcatcaatttaatcagtaagaagcccactgggctattgcatttgttagacgaggagtctaacttcccgcaggccacaaaccagaccctgctcgataaattcaagcaccagcacgaggacaactcctacatcgaatttccagccgtcatggaacctgcgttcataattaagcactacgctggcaaggttaaatacggcgttaaggatttccgggagaagaatacagatcacatgcgcccagacatagtagccctgctgcgatcctccaaaaacgcatttattagtgggatgatcggcatcgatccagtggctgtttttcggtgggctattttgcgggctttttttagagcgatggtggctttcagagaagcagggaaaagaaacattcaccgcaaaacggggcatgatgacacagccccatgcgccattctgaagagcatggactcgttttcgttcctgcagcatccagtccaccagcgctctctggagattctgcagcgatgcaaagaagagaagtactctattacccgcaagaacccaagaactccactctccgacttacaaggtatgaatgcactcaacgaaaaaaaccaacatgacacttttgacatagcatggaatggcaggacggggattaggcagtccaggttaagctcagggacttcccttcttgataaggacggtatttttgcaaacagcactagctccaaacttttggagagggcccacggcatcctaaccagaaacaaaaactttaaatcaaagcccgccttgcctaagcacctgctggaagtgaattcgcttaagcatttgaccaggcttaccctccaagataggatcaccaagagtttactgcacctgcacaaaaaaaagaagcccccctctatttcagcccaattccaggcgtctctatcaaagctcatggaaaccctcgggcaagccgaaccttatttcgtaaagtgtatacggtcaaacgcggagaagctgcccctgcggtttagtgacgtgctcgtgttaagacagctacgatacactgggatgctggaaaccgttcggatccgtcaatccggctattctagcaagtattcatttcaggacttcgtcagccatttccatgttctacttccacgtaacattatcccttcaaagtttaatatccaggactttttccggaaaataaaccttaatccagacaactaccaggtgggaaagaccatggtttttctgaaggaacaggagagacagcacctccaggatttgctacaccaggaggtgcttagaagaatcatactactgcaacgctggttcagagtgctactgtgccggcagcattttctacatctgagacaggcctcagtcatcatccagcggttttggcggaactacctgaatcagaagcaggtgcgagatgcagcagtgcaaaaggatgccttcgtaatggcatctgcagctgcactgctgcaggcgagctggcgcgcgcatctggaacgccagcgctacctggaactccgcgctgctgccatagtgatccagcaaaagtggagagattactaccggagaagacacatggctgcgatctgtattcaggcccgatggaaagcctatagggaatccaaacggtaccaagagcagagaaaaaagataatcctactgcagagtacctgcagaggtttccgggccagacagcgcttcaaagcactcaaggagcagcgattgcgtgagacgaagcccgaagtcgggctagtcaatatcaagggctatggtagtctggagatccagggctccgatccttccgggtgggaagattgcagctttgacaacaggattaaagcaattgaagagtgcaaatccgtcatcgagtccaaccggatctctcgggaatcttctgtggactgcttaaaagagtcaccgaacaagcagcaggagagggcccagagtcagtcaggcgtggatttacaggaggatgtgctcgttagagaacggcctagatccctcgaggacctgcaccagaagaaggtgggtagggctaagcgtgaatcccgcaggatgcgagagcttgaacaagccattttctctctcgagttactaaaagtgaggtccttgggcgggatttccccaagcgaagatcggcggtggagtaccgagctagtccctgaaggtctgcagtccccaagaggaacgcctgatagtgaatcttcccagggtagccttgagctgctgagttacgaggaatctcaaaaatcaaagttagaaagcgtgatctccgacgaaggcgacttgcagttccctagtcccaagatatcttcaagccctaagtttgactccagagacaacgctctgagcgcaagcaacgagacctcaagcgcagagcacctcaaggatggcactatgaaggaaatggtcgtatgctcgagcgagagcatcacttgcaagccccagctgaaagatagctttatatcaaactcccttcctacattcttttacataccgcaacaggaccctctcaaaacaaactcccagttggatacttctatacagcggaataaactgttggaaaacgaggataccgctggagaggccctcacacttgacatcaacagagaaaccagacgctaccactgttccgggaaggatcagattgtgccaagcctcaatactgaatcctccaatcctgtgctaaagaaactggaaaaactgaacaccgagaaagaagagcgccagaagcagctgcagcagcaaaatgaaaaagagatgatggaacagataagacagcaaactgacatactggagaaagaacgtaaagcatttaaaaccattgagaagccaaggatcggcgagtgtcttgtcgccccgtcttcctaccagagtaaacaacgtgtcgagaggccatcatccctgctgtcactgaatacttcaaacaaaggagaactcaacgtcctggggtccctgagtcttaaagatgcggcactcgcacagaaggactcctcgagcgcgcacctgcctcccaaagaccggcccgtgactgtcttttttgagagaaaaggaagcccatgtcaatcttcaaccgtgaaggagctgtccaagaccgaccgcatgggaactcaactaaacgttgcctgcaaactcagcaataaccggattagcaaaagagagcatttccggcccacccagtcctacagccataactccgacgatctctccagagaaggtaacgcccggccaatcttctttacacctaaagataatatgagcattcccctggtatccaaagaggcgttgaatagtaaaaatccccaactacataaagaagatgagccagcgtggaagccagtgaaactggccggccccggccagagggaagtggctcgtcccgctcacaaaaagaaggctaggatggctaggacccgaagcgactttctcacccgaggcacctttgcagacggagaaggcgacacagaagaagatgactatgacgatatcatcgaaccgctcttgagcctggatcaggcttctcactgtgaactgggacccgccccatccctgggccaggcctctcactctgatagtgaaatgacaagccaaaggttcagcagcgtggatgaacaagccaagctgcacaagacgatgagccaaggtgaaattaccaagctggcagtccgacagaaggcttcagattcagatatcaggccacagagggccaaaatgcggttctgggctaagggcaagcagggcgagaagaagactacccgcgtgaagcctactactcagtccgaagtttctcccctattcgccggaacggacgtcattcccgctcaccagttccctgacgagcttgctgcctaccatcccaccccccctctgtcccctgagctaccaggatcctgccgtaaggagtttaaggagaataaggagccttccccgaaggcaaagcggaagcgttccgttaagatttccaacgtcgcccttgattcaatgcactggcagaacgacagtgtgcaaatcatcgcctctgtaagcgatttgaagtctatggatgagttcctccttaagaaggttaacgatctggataatgaggactcaaaaaaagacacattagtagacgtcgtgttcaagaaggcattaaaggaattcagacagaacatcttctccttctacagttccgcactggctatggacgatggcaaaagcatacgctacaaggatctctatgccttatttgagcaaatattagagaagaccatgaggctggagcagagagattcactgggcgaatcacccgtgcgtgtgtgggtgaatactttcaaggtgttcctggatgagtatatgaacgagttcaagacatcagattgtaccgccacaaaggtgccaaaaaccgagcgtaaaaaacgtcggaaaaaagaaactgaccttgtcgaggagcataatggccatatatttaaagcaactcagtactctatacctacgtactgcgagtactgtagcagtctcatatggatcatggatcgagccagcgtgtgtaaactctgtaagtacgcctgtcacaagaagtgctgcctgaaaaccactgctaaatgttcaaaaaagtatgaccctgagctgagttcgcgacagtttggggtggaattgtctcggctgacctctgaggatcgtaccgtccctctcgtggtcgaaaagttgataaactacattgagatgcacggcctgtataccgaggggatatatcgaaagtctggatccacaaataagataaaggagctgcgtcagggtctggacacagacgcggagtcagtgaacctcgatgactacaacatacacgtgatcgcgagtgtattcaagcagtggctgcgggacctgcctaatcctctcatgaccttcgagctctatgaagagttcctccgagccatgggtctacaggaacgtaaagaaacaataaggggggtgtacagcgtgatcgaccagctcagtagaacccatctgaacactctcgagagactcatatttcacctcgtccgcatagcactgcaggaggatacgaataggatgagtgctaatgcactagcgattgtattcgcaccctgtatactgcgttgtccagataccaccgaccctttacagtcggtgcaggatatatcaaagaccaccacatgtgttgagctaatcgtagttgagcagatgaataagtacaaagcaaggctaaaagatatatctagcttggagtttgcagagaacaaagcaaagacacggctgagcctcatccgtcggtcaatgggcaaggggcgtatccggaggggtaactatccaggtccctcttccccagtggtcgtgaggctgccctccgttagtgatgtgagtgaggagactctcaccagcgaggcagccatggaaacagacataactgaacagcagcaagccgccatgcagcaggaagaacgggtcctgaccgagcagattgaaaacctccaaaaggagaaggaggaactgactttcgagatgctggttttggagcctcgagcctccgatgacgaaaccttggagagcgaggcaagcatcggaacagctgatagcagcgagaatctcaacatggagtctgagtatgccattagcgagaagtctgagcggtccctcgccctgtcctccttgaagactgctggaaagagcgagcctagcagtaagcttcgaaaacagctgaagaagcagcaggactcactggatgtggtggatagctccgtctcgagtttgtgcctcagcaataccgccagcagtcacggaaccagaaagctgttccaaatttacagcaagtctcccttctatagggcagcatctggcaacgaggccctgggcatggaggggcccctgggacagaccaaattcttagaggataaaccgcagtttattagccggggcacattcaaccctgaaaaggggaaacagaaactcaagaatgtcaagaacagcccacagaagacaaaggaaacaccggagggaaccgtaatgtcaggtaggcgcaaaaccgtggaccccgattgcaccagtaaccagcagctggctttgtttggcaataatgaattcatggtgtag

SEQ ID NO: 196206 - DNA, 7590 bp, synthetic construct
  misc_feature 1..7590: note = Description of Artificial Sequence: Synthetic coding sequence
  source 1..7590: mol_type = other DNA
atgaacatcaacgacggcggccggcggcggttcgaggacaacgagcatactctccggatatacccaggagccatttctgaggggaccatttattgtcccattccggcccgtaaaaattccacagcggcagaagttatcgaaagtcttatcaataaattgcatctcgataagacaaagtgctatgttctggccgaagtgaaggagtttggaggagaagagtggattttaaatccaacagattgtcccgtgcagcgaatgatgctgtggcctcggatggccctcgaaaaccgcctttccggagaggactaccggtttcttctgcgcgagaagaacttggatgggagcatccattatggaagcctccagagctggttacgagtgacagaagaacgcaggaggatgatggagcggggtttccttcctcaaccccaacagaaagactttgacgacctgtgctcactgcccgacttgaacgaaaagacactgttagaaaacttgcggaacaggttcaaacatgagaagatttacacatacgtggggtctatactcatcgtgattaatccgttcaagttcctgcctatttataaccctaagtacgttaaaatgtatgataatcatcagctgggcaagctggagccgcatatctatgcagtcgccgacgtggcttatcacgcgatgctgcaacgaaaaaaaaaccagtgcatcgtgatcagtggtgagtctggctcgggaaagacccaatccacaaatttcctaattcaccatctgactgcattgtcacagaagggctttgccagtggcgtagagcagatcatcctcggtgctggaccagtccttgaggcttttggtaatgccaaaacagctcacaacaacaatagctcccggttcggtaagttcatccaggtgaactatcaggagaccgggacagtgctcggcgcatacgtggagaagtatctgctcgaaaagagtcgcctcgtgtaccaggagcataatgaacgcaactatcatgtgttttactatcttctggcgggtgcctctgaagatgagaggagcgccttccatctcaagcagccggaagagtatcactacctaaaccaggattgcttcactgtggagggagaggacctgcggcacgattttgagagattgcagttggcaatggagatggtgggattcctgcctaagacacggcgtcaaattttctctctgctttcagccatcctgcacctgggcaacatctgctacaaaaaaaagacgtaccgtgacgattccatagacatctgtaatcccgaagtgctccctatcgtgtctgaactgctggaagtaaaggaagagatgttgttcgaggcattagtgaccagaaaaactgtgacagtgggcgaaaagcttatactcccctacaaactggcagaggctgtgaccgtcaggaacagcatggccaagtccctgtactcagccctgttcgactggattgtcttcagaataaaccacgctctgctaaactccaaggacttagagcataatacaaaaaccctgagtattggagtcctagatattttcggattcgaagactatgaaaacaacagttttgaacagttctgcattaattttgctaatgaacgtctgcagcattacttcaatcaacacattttcaaactggaacaagaagagtaccggacagagggaatcagctggcacaacatcgactatatagataatacatgctgtattaacctaatcagcaagaagccgactggactgcttcatctcctggacgaagagtctaatttcccccaagctacaaatcagactctgctggataaattcaagcatcagcacgaagacaactcttacatcgaatttcccgccgtgatggagcccgctttcattatcaagcactatgcaggcaaggtcaaatacggggtgaaagacttccgggagaaaaacacggatcacatgaggccggacatcgtagctctcttaagatctagtaaaaacgctttcattagtgggatgataggcatcgatccggtggctgtttttcgttgggccattctccgtgccttcttcagagccatggtagcttttagagaggctggaaagcgcaacatccataggaaaaccgggcatgacgacacagccccatgtgctatcctcaaatccatggattccttttcctttctgcaacatcccgtgcaccagagatccctcgaaattctgcagcggtgcaaggaggaaaaatacagcatcacaagaaaaaatcccaggactcctctatctgatctgcaggggatgaacgccctcaatgagaagaatcaacacgacactttcgatatcgcgtggaacggccgcacaggaattcgccagagtaggctgtcatccggcacttctctgttagacaaagatggcatttttgctaattcaacttctagcaagctgctcgagcgcgctcatggcatacttacccgcaataagaactttaagtctaaaccggccctgccaaagcatcttctagaggtcaactccttaaagcatctcacaagattgaccctgcaggaccggatcaccaagtcactccttcacctccacaagaagaaaaaaccgccgtccatcagtgcccagttccaggccagtctatcaaaactgatggagaccctgggccaggcagaaccttatttcgttaaatgcatccgcagcaacgccgagaagctccctctgaggttctcagatgttctcgtgctacggcagttgcggtatactggcatgttggagacggtccgtattcggcagtcaggctactcgagcaagtactcctttcaggacttcgtgtcccattttcatgtgttgctacctcggaacatcataccatctaagtttaatattcaggacttctttcggaagatcaatctgaaccccgacaactaccaagttgggaaaacaatggtatttctcaaagaacaagagcggcagcacttacaggacctacttcatcaagaagtgttaaggcggattatcctcctgcagaggtggttcagagtgctcctgtgtaggcagcattttctgcaccttcgacaggcctccgtcatcatccaaaggttctggaggaactacctaaaccagaagcaggtgcgagatgcagcggtgcaaaaggacgccttcgtgatggcgtcggcagcagcgcttctccaggctagctggcgtgctcacctggaacgacaacgctatctcgaattgcgggccgcagccattgttatccaacaaaaatggagggactactatcggcgccgacacatggccgcgatctgcatccaggcacgatggaaggcttaccgagagagcaagagatatcaagaacagaggaagaaaattattctgctccagtcaacatgtaggggatttagagccagacagagattcaaagctctgaaggagcaacgcctacgggagaccaagcccgaagtgggcctcgttaacatcaagggctatggctctttggaaatacaggggtcagatccctctgggtgggaagactgctctttcgacaacaggattaaagctatcgaggaatgcaagtctgttattgaatccaatagaatctcccgggagagcagcgtggactgcctgaaggaatcacctaacaagcagcaggaacgggcccagtcacaaagtggggtcgacttgcaggaagacgtcttggtccgcgaacgtccacgttcactggaggaccttcaccagaaaaaggtcggcagagctaaacgggaatccaggagaatgcgcgagttagaacaggccattttcagcctagagctcttgaaggtgaggtccctgggcggtatttcaccctctgaggataggcggtggtccactgaactggttccagagggcctgcagtcccctcggggcactcccgactctgaaagctcccagggatcactggagcttctctcttatgaagagtctcagaagtcaaagctagaaagcgtgatttctgacgaaggagatctacaatttcctagtcccaagatttcatcatcccctaagttcgacagccgcgataacgccctaagtgcttctaacgaaacatcctcagctgagcacctcaaagacggcactatgaaagagatggtcgtctgcagttcagagtccatcacttgtaaaccccagctgaaagactcctttatttctaacagcctcccaacctttttctatatacctcaacaagacccactgaaaacaaactcccaacttgacacgtcaatacaaaggaacaaacttcttgaaaatgaagacaccgcaggtgaagcactcacactggatatcaaccgggagactaggcggtatcattgttcaggaaaagaccaaatcgtgccctcactgaacactgaaagttccaaccccgttctaaaaaaattggagaaattgaatacagagaaagaggagcgacagaaacagttgcaacaacagaacgagaaggagatgatggagcagattcggcagcagaccgacatcctggagaaggaaagaaaagcgtttaagaccatcgagaaaccaagaataggtgagtgtctcgtagcgccatcatcctatcagtcaaaacagagggtcgagcggcctagctctttactctctttaaatactagtaataagggggaactcaatgtgctgggaagcctcagcttgaaggacgcagcgctggcccagaaagactccagcagtgctcacttacctcccaaggacagaccagtgaccgtgttttttgagcgcaagggtagcccctgccagtcttccaccgtcaaggaactttctaaaacggaccggatggggacacagctaaacgtagcgtgtaaactgagcaacaataggattagtaaacgcgagcattttcggccaacccaaagttattcccacaatagcgacgaccttagtcgggaagggaacgctcggccgatctttttcacacctaaagataatatgagcataccactggtaagtaaagaagccttgaacagtaaaaatccccagttacataaggaggatgaacctgcctggaaacctgtaaaactggccggccccggccaacgagagacttcccagcgattcagctccgtagacgaacaggcaaaattgcacaagactatgtctcagggggaaataacaaagttagcagttcgtcaaaaggcctcagacagcgatattagaccacaaagagcaaagatgcgattctgggctaaggggaagcaaggcgagaagaagaccactagggtgaagcccactacccagtccgaggtctctcccttgttcgccggaacagacgtgatcccggcacatcagttcccagacgagctggcagcgtaccatccaaccccgcccctttcacccgagctcccaggttcatgcagaaaagaattcaaggagaacaaagagccctcacccaaagccaaacggaaacgctcagtcaaaatctcgaacgtcgccctggactctatgcactggcagaatgatagcgtccagatcattgcttctgtgagtgacttgaagagcatggacgagtttcttctcaaaaaagtcaacgacttggacaatgaggactccaagaaagacactttagtcgatgtggttttcaaaaaagccctgaaagagttccgccagaacatcttcagtttctattcttcagcattggccatggatgacggaaaaagtatcaggtacaaagacctctatgccctgtttgaacagatactcgaaaagacgatgagattagaacagcgagattcgttaggggagagtccagtgagagtctgggtgaatacctttaaggtgtttctagacgagtacatgaatgaattcaagacctccgattgtacagctaccaaggtcccaaagactgaaagaaagaaacgccgtaaaaaagagacagatctggtagaggagcacaatggtcatatctttaaagcaacacagtacagcatccctacttattgtgagtactgctccagtttgatttggattatggacagggcgagcgtatgtaaactttgtaaatacgcatgccataagaagtgctgtctcaaaacaaccgccaagtgtagcaaaaagtacgatcctgaactgtcttcaaggcagtttggcgtggagctgagtagactgacttctgaggatcgcacggtgcccctggtggtagaaaagctgatcaactatatcgagatgcatgggctgtatactgaaggcatataccggaagtctggtagcaccaacaagatcaaagaactccgccagggcctggatacagatgcagagtctgtcaacctcgatgattataatattcatgtgatcgcgagcgtgtttaagcagtggctgagagaccttcccaaccccctaatgactttcgaactgtacgaagaattcttaagagctatggggctccaggagagaaaagagacaatccggggggtctacagtgtgatcgatcagttatcgagaacgcatttgaacacgttggaaaggcttatctttcacctagtacgcatcgctcttcaagaggacacaaaccggatgtctgcgaatgccctggccatcgtgtttgcaccctgtatccttcgctgtcctgatacaactgatcctctccaaagcgtgcaggatattagcaagacgactacttgcgtcgagctgatcgtggtcgaacaaatgaacaaatacaaggcccgtttaaaggacatttcttccctggaattcgccgagaataaggcaaaaactagattatcactcattcgccggagcatggggaaaggccggattcgccgggggaattaccccgggccctcatccccagtggtcgtgagactgccttcagtttcggacgtgagtgaagaaacacttacctctgaagctgcaatggagaccgatatcacagaacagcagcaggctgctatgcagcaggaggaaagggtccttaccgagcagattgaaaacctccagaaggagaaagaggagttaacgtttgagatgttggtgctcgaacccagagccagcgatgacgagaccttggagagcgaggccagcatcggcaccgcggacagtagtgaaaacttgaatatggagtcagaatatgccatcagcgaaaaatcggaacggtctctcgcactgagcagtctcaagacggctgggaagtccgaaccatccagcaagttgcgtaaacagctcaaaaagcagcaggactccctagatgtggttgattcatccgtttcaagcctatgcctgtcaaatacagcgagttcccacggtacccggaaactgttccagatctactccaagtcacctttctatcgtgcagcgtcaggaaacgaggcactgggtatggaaggccccttgggtcagacaaagttcctggaagacaagccacagtttatcagtcgtggaacgttcaatccagagaagggaaaacagaaattaaagaacgtcaagaactcacctcagaaaaccaaagaaaccccagaaggcacagtgatgtcaggccggaggaaaacggtcgatccagactgtaccagcaaccagcaactggctttgtttggtaacaatgaatttatggtctag

SEQ ID NO: 196207 - DNA, 2190 bp, synthetic construct
  misc_feature 1..2190: note = Description of Artificial Sequence: Synthetic coding sequence
  source 1..2190: mol_type = other DNA
atgaacatcaacgacggcggccggcggcggttcgaggacaacgagcataccctccgtatttatcccggcgccatctcagagggaaccatctactgccccataccagcccgaaagaactccactgcagccgaagtaatcgaatccctcatcaacaagctgcacctggataaaacgaagtgctacgtactagccgaggttaaggagtttggcggagaagaatggatcctcaaccctactgactgcccagtgcagcggatgatgctttggcctcggatggcactggaaaatcgcctgagcggtgaagactaccggttcttgctgagagagaagaatcttgatggatctatccactatggttcgctacagagctggctgcgtgtgacggaggagaggaggaggatgatggagagggggttcttgccacagcctcagcaaaaagactttgatgatctgtgctctctgcccgatttgaacgaaaaaacactgttagagaacctcagaaatcgcttcaaacatgagaaaatttacacatacgtgggctcgattctgattgtgattaatcccttcaaatttttacccatctataaccccaaatatgttaagatgtatgacaatcaccagctcggcaaattggaacctcatatctacgcggtggccgatgtggcttaccatgccatgctgcaacgcaagaaaaaccaatgtatcgtaatctctggggaatccggttccgggaagacccagagcactaatttcctcatccatcatcttaccgcgctgtcccagaaagggttcgcctccggggtagaacagattatcttgggagccggaccagtgttggaggccttcggcaacgctaaaacagcccataataacaattctagtcggttcgggaaatttatccaggtaaactaccaggagacagggaccgtgctgggagcttatgtggagaaatatctgctggagaagagcagacttgtttatcaggagcataatgaacgaaactaccatgtgttctactacctcctggccggtgcaagtgaggacgagaggtctgccttccacctgaaacagcccgaggaatatcactacctcaaccagattacgaaaaaacctttgcgccaatcttgggacgactattgctatgattctgaacctgattgttttacagttgaaggggaggatctccggcacgacttcgagaggctgcagttggccatggaaatggttggatttttgccaaagaccaggcgccagattttttccttgctcagtgctatattgcacctggggaacatctgctataagaagaagacttatcgggatgattccatcgatatctgcaatcccgaagtgttgccaatagtgtccgaattgctggaagtgaaggaggagatgctgttcgaagccctggtcaccagaaaaactgtcaccgtgggggaaaagctgatcctgccgtataaactcgcagaagccgtcacagttcgtaacagcatggccaagtccctgtattctgcactgtttgactggatcgtgtttcggatcaaccacgccctcctgaacagtaaagatctcgaacacaacactaagactctgtctatcggcgtgctggacatattcggttttgaggactatgagaacaatagtttcgaacagttctgcattaactttgctaacgagagattacagcattatttcaaccaacacattttcaagctcgagcaggaagagtaccggactgagggaatttcttggcataatattgattatattgacaatacctgttgcattaatctgatctctaagaaacctacgggcctccttcatctgctcgacgaagagagcaattttccccaggccactaaccagacactgctggataagtttaagcatcagcacgaagataatagttacatcgagtttcccgcagtgatggaacccgccttcatcataaagcactatgcagggaaggtgaagtatggcgttaaggattttcgagaaaaaaacaccgaccacatgagaccggatatcgttgcgctcttgagatcttcaaaaaatgcgttcattagcggaatgattggaatagaccctgtggccgtcttccgctgggctattttacgcgctttctttagggctatggttgctttcagggaggctggcaaacgcaatatccataggaagacaggtaagtag

SEQ ID NO: 196208 - DNA, 1509 bp, synthetic construct
  misc_feature 1..1509: note = Description of Artificial Sequence: Synthetic coding sequence
  source 1..1509: mol_type = other DNA
atggacaaggccctgctgtgcagcgtgtgcaagatgacctgccacaaaaaatgtgtgcacaaaattcaatcacactgttcatacacctacggcagaaaaggcgaaccaggcgtggagcccggacactttggtgtgtgcgtggactccctcactagcgacaaggcatcagtacctatcgtgcttgagaaactgctcgagcatgtagaaatgcatggcctgtatacagaagggctgtacagaaagagcggcgccgcaaataggactagagagttgagacaggccctacagactgatccagctgccgtaaaactggaaaattttcctatacatgcaattacaggtgtgctgaaacaatggctgcgcgagctcccagagcctctgatgacatttgcccagtacggcgatttcctgcgcgccgtagagctgcccgagaagcaggagcagctggccgccatttatgctgtcctagagcaccttcccgaggctaatcacaatagcctcgaacgtctgatattccatctactagctgtagctctgctggaggacgtgaatagaatgtctcctggggcccttgctattatcttcgctccctgcctactaagatgcccggacaactccgacccgttgacttcgatgaaggatgtactcaagattacaacgtgtgtggagatgttgataaaagagcagatgcgaaagtataaggtgaaaatggaagaaataagtcagctcgaggctgctgagtccattgcttttcggcggttgagcctattgcgacagaacgccccatggcctctcaagctggggttttcaagtccttatgaaggcgtcctcaataagagtcccaagacccgcgacatccaagaggaggaacttgaggtcttgttggaagaggaagctgccggcggggacgaagacagagaaaaggagattctgattgagcggatccagtcaatcaaggaagaaaagcaagacatcacctataggctgccggaactggatcctagaggcagcgatgaagagaacctcgactccgaaacctcggcctccactgaaagtctgctcgaagaaagagcgggacgcggcgcttccgagggaccccctgcaccggccctgccttgcccaggagcaccgacacctagccccctgcctactgtcgcggctccccctcgtcgccgaccaagttccttcgtgaccgtccgtgtgaagacacctcggcgcactcccattatgcccacggcgaacatcaaactccctccaggtctccccagccacctacctcgctgggccccaggcgcccgagaggctgctgcaccggtgagaaggagagagcccccagcaaggcgcccagatcaaatccatagcgtttacataaccccgggagctgaccttccggtgcaaggagccttagagccactggaggaagacggacaaccacccggggcaaagcgcagatactccgatccccctacctactgtcttcccccagcatcagggcagaccaacggttag

SEQ ID NO: 196209 - DNA, 6069 bp, synthetic construct
  misc_feature 1..6069: note = Description of Artificial Sequence: Synthetic coding sequence
  source 1..6069: mol_type = other DNA
atgagcgtgaaggaggccggcagcagcggccggcgggagcaggccgcttatcatctgcatatttacccgcagctgtccactactgaaagccaggcaagctgccgggttacggccacgaaggactccactacctccgatgttataaaagacgccatcgccagtctccgactggacgggactaagtgctacgtgttggttgaagtaaaggagtctggcggtgaagagtgggtgctggacgcaaacgattcccccgtgcacagggtgcttctttggccgcgaagagcacaagatgagcatcctcaggaagatggatattacttcctcctacaggagagaaacgccgacggaacgattaagtatgtgcatatgcaattggtcgcccaagctacagccacacgccgcctcgtcgagcgcggactgctcccgagacaacaggcagacttcgacgacctctgcaacctcccagagctgacggagggaaacctcttaaagaatttgaagcatagatttcttcagcagaaaatctacacatacgcaggcagtatcctggttgctataaatccctttaagtttctgccaatctataaccctaaatacgtaaaaatgtacgaaaatcagcagctggggaagctcgaaccccacgtctttgctcttgcagatgtcgcctattacacaatgctgaggaaacgtgtcaaccagtgtatcgtgatcagcggagaatctggatccgggaagacccagtcgactaactttcttattcactgcctcaccgcactctctcaaaaaggctacgcttccggtgtcgagcgaacgatcctcggggccggccctgtgctggaggcctttggaaacgcaaaaactgcacacaacaacaacagctctcgttttggcaagttcatccaggtgtcataccttgaaagtgggatcgtgaggggggccgtggtggaaaagtacctgttagaaaaaagtaggctggtgtctcaggaaaaggatgagcggaactatcacgttttctattacctgttgttgggggtgtcagaggaggagcgtcaggaattccagctgaaacagcccgaggactatttctatctaaaccagcataacctgaagattgaggatggggaagacctcaaacatgatttcgaacggctgaagcaagccatggaaatggttggtttccttcccgcaactaaaaagcagatctttgcagtcttgtctgccatattatatttgggcaacgtgacctataagaaaagggctacaggcagagaggagggactggaagtgggacctcccgaggtgctcgatactttgtctcagttactgaaagtaaagagagaaatcctggtcgaagtgctgacaaaacggaagactgtgaccgtgaacgacaagctgattctgccttactctctgtcagaagctattaccgctcgggacagtatggctaagtcactgtactccgcactgtttgactggatcgtactcagaattaatcacgctcttctcaacaagaaggatgtagaggaggctgtgagttgcctctccatcggcgtgctcgacatctttggttttgaagattttgagcgcaactcttttgaacaattttgcatcaattacgccaatgagcaactacagtattactttaatcaacacatctttaaactggagcaggaagagtatcagggagaggggatcacatggcacaatatcggctacacagacaatgttggctgcatccacctaatttccaagaaaccaaccggtcttttttacctcctggacgaagaatcaaacttcccacatgccacatcccagacactgctggcaaagttcaagcagcagcatgaggataataagtacttcctgggtacacctgttatggaaccagcttttataatccagcacttcgccggcaaggtcaagtaccagatcaaagacttccgtgagaaaaatatggactatatgcgtcctgacattgtggcccttctcagaggctcggactcgtcatatgtgcgggaattgatcggaatggacccggtggcggtatttcggtgggctgtcctgcgggctgctatacgcgccatggccgtcctcagggaggccggacggctgcgcgccgaacgtgccgaaaaggcggccgggatgtcctcccccggggcccaatcacaccccgaagagttgcctcgcggtgcatcaactccaagtgaaaaactgtacagagacctccataatcagatgataaagagcatcaaagggttgccatggcagggagaggacccccggtccctcctgcagtcactgagtcgactgcagaaaccacgggcgttcatattgaaaagtaaaggaattaaacagaaacagatcatccctaagaatctgttggactctaaatcactaaagctgatcatctctatgacactgcatgaccgaacaacaaagtcactgctgcacctgcataagaagaagaaaccccctagtatcagcgctcagttccagacaagcttgaataagctgctcgaagctctgggtaaggctgagcctttttttattcgctgcatccggagcaacgccgagaagaaggaactctgctttgatgacgaacttgtgctgcagcagctacggtatactgggatgcttgaaactgtgcgcattcggcgcagcggatactccgctaagtacaccttccaggacttcactgagcaattccaagtattgctgcccaaggatgctcagccttgcagggaggtgatttccactcttctggagaagatgaaaatcgacaaacgaaattaccagattggtaagactaaggtcttcctgaaggagactgagcggcaagccctgcaggagactcttcatagagaggtggtgcgcaagatcctcttgttacagtcttggttccggatggtgcttgagcgcaggcacttcctgcaaatgaaacgggccgccgtgacgattcaagcctgctggagatcttatagggtcaggagggctctcgaacggacccaagcggccgtatatctgcaggcatcctggaggggatactggcagcgcaagttgtaccggcatcagaagcagtccatcatccggcttcagagcctttgtcgcggccacctgcaacgtaagtccttctcccaaatgatctctgagaagcagaaggcagaggagaaagagagagaagccttagaggccgcacgagccggggccgaggaaggcggccaaggccaagctgccggggggcagcaggttgctgagcaggggcccgagccggcagaagatggtggacacctggccagtgagccagaagtgcagccaagtgacagaagcccactggagcattctagtcccgagaaggaagcgccttcccctgaaaagacgctgccacctcagaaaaccgtcgctgcagagtcccacgagaaggtcccttcttctagggaaaagagagagagtcgtaggcaacgcggactcgaacacgtgaaattccagaacaagcacatacagtcttgcaaggaggaaagtgcactacgcgagccctctcgccgggtgacacaggaacagggcgtttccctgttggaggacaagaaggagtcccgggaggacgagaccctgctagtggtggagactgaggccgagaacacaagtcagaagcagccaacggagcaacctcaggcgatggccgtgggcaaggtttcagaggagacagagaagactctgccttccgggagcccacgacccgggcagttggagcggccaacaagcctcgccctcgattccagggtctctcccccggccccaggatctgcccccgaaacaccggaggacaagtcaaaaccttgtggttctcccagggtccaagagaaacccgatagccccggcggaagcacacagatacaacgctatctggatgctgaaagactggccagtgcagtcgagctctggcgcggtaaaaaattagtggccgcagcatcaccttctgcaatgctctcgcagagcttggacctgagtgacagacaccgggccactggcgccgctctgactccaacagaggagagacgcacttctttctcgacttccgatgtgtccaaactcctgccttccctggctaaggctcagcctgctgcggaaaccaccgatggagagaggagtgcaaaaaaacctgctgttcaaaagaagaaaccaggtgacgcctcctctctccctgatgccggcttgagtccagggagccaagtggatagtaagagcaccttcaagagactctttctgcataagacaaaagataaaaagtacagtctcgagggggccgaagaactagaaaatgccgtctcagggcacgttgtgttggaagctaccaccatgaaaaagggtctggaggctccttcagggcagcagcatagacacgccgccggggagaagcggactaaagagccaggcggaaaaggtaaaaaaaaccggaacgtcaaaataggcaagataacagtgtcagaaaaatggcgtgaaagcgtgttccgacaaattactaacgccaacgaactcaagtacttggatgagttcctgctgaataagatcaacgacctgagatcacagaagacccccatcgagagtttgtttatcgaggccacagagaaattccgcagtaatattaagacaatgtacagcgtccccaacggcaaaattcacgtgggatacaaggaccttatggagaactaccagattgttgtgtccaacctggccaccgaacgggggcagaaggataccaacctggtgctgaatttgttccagtccctgctggacgagtttactcggggatacacaaagaacgattttgaaccagttaagcaaagtaaggcacagaagaaaaaacggaagcaggaaagagcagtccaggagcacaatgggcacgtttttgcctcttatcaggttagtatcccacaatcatgcgaacagtgtcttagctatatctggctcatggacaaggccctcctatgctcagtctgcaagatgacatgccataaaaagtgtgtgcacaagatccagtcccattgcagctacacatacggacgcaaaggtgaaccaggagtcgagcccgggcattttggggtctgtgtagacagtctcacaagcgacaaggcctctgtgcccattgttctcgagaagttacttgaacacgtcgaaatgcacggcctatacaccgaagggctgtatcgtaagtcaggcgcagcaaacaggaccagggaacttaggcaggccctgcagactgaccccgccgccgtaaaattggagaattttcctattcacgctatcaccggggtcctgaagcaatggctgcgcgaacttccagagccactcatgacgtttgctcagtatggggacttcctgcgggccgtggagctgcccgagaaacaagaacagttggcagccatctacgcggtgctggagcatttgcctgaggccaaccacaacagtctggagcggttgatcttccacctggtgaaggtagcccttctcgaggacgtgaacagaatgagccctggggccttggctatcatcttcgctccttgcctgttgcgctgtccagacaactctgacccactgacctccatgaaggatgtgctcaaaattacgacttgtgtcgagatgctcatcaaagagcaaatgaggaaatataaagttaaaatggaggaaatcagccagctggaggcggcggaatccatcgccttcagacggctttccctactgcggcagaacgcaccttggcccctaaagctcggcttctcttcaccctatgaaggagtacttaacaaaagccctaaaactcgcgacatccaggaggaggagcttgaagtgttgctcgaagaggaggcagccgggggggatgaggatagagagaaagagatccttatagagcggatccagtctataaaggaagagaaggaagatatcacctaccgactgcccgagctcgacccacggggctcggacgaggagaacctcgatagcgagacttccgctagcaccgagtccctgctggaggagcgcgccggccggggcgcgagtgagggccagtattag

SEQ ID NO: 196210 - DNA, 6069 bp, synthetic construct
  misc_feature 1..6069: note = Description of Artificial Sequence: Synthetic coding sequence
  source 1..6069: mol_type = other DNA
atgagcgtgaaggaggccggcagcagcggccggcgggagcaggccgcgtaccacctccatatttaccctcagcttagcactacagagtcacaggctagctgccgagtgacagccaccaaggactccaccacttccgacgtaataaaagatgcaatagcaagtttacgacttgacggcaccaaatgctatgtgttagttgaggttaaagaatcaggcggcgaggagtgggtgctggatgcaaacgactcccccgtgcatcgggtgttactgtggcctcggcgggcacaagacgaacatcctcaggaggatggatattatttcctgctgcaggaacggaatgccgacgggactatcaaatacgtgcatatgcaactggtggcccaggccaccgccaccagacgcttagttgaaagaggtttactcccgagacagcaggctgatttcgacgatctatgcaatttgcccgagcttactgaagggaacctgctgaagaacctaaagcaccgattcctccaacagaagatatacacatacgccgggtctattctggtcgccatcaatccattcaagtttctgcccatttataatccaaaatatgttaagatgtatgaaaaccagcagctgggaaagctggagcctcacgtcttcgctctggcagatgtcgcttactatacaatgcttcgtaaaagagttaaccaatgcattgtcatctccggagagtccgggtccggaaagacccagtcaaccaacttcttaattcactgtttgacggcgctgtcgcaaaaaggctacgcatccggggtcgagaggactattcttggggccggtccagtgttagaggctttcgggaacgccaagactgcacacaacaacaattctagccgcttcggaaagtttattcaggtgagttatctggagtcgggaatagttcgtggcgcggtagttgaaaagtatctgcttgagaagagtaggcttgtgagtcaagagaaagatgaaaggaactatcacgtgttttactacttgctgttaggagttagcgaggaggagcgccaggagtttcaattaaaacagccggaagactatttttacctaaaccagcacaacttgaaaattgaggacggcgaagacttgaagcatgattttgaaaggctcaaacaggccatggagatggttgggtttctccccgccacaaaaaaacagatctttgccgtgctttctgcgatcctttacctggggaatgtgacttacaaaaaaagggcaacagggagagaagaagggttggaggtgggccccccggaggtcctagacaccttgagccagctcctcaaggtcaaaagagagatcctggtggaggttctgacaaagcgaaaaaccgtgaccgtaaatgacaaactaatcttgccctacagcttatccgaggcgatcacagccagagactctatggcgaaatctttgtactctgcactgttcgactggattgtactcagaataaaccacgcgctgctaaataaaaaggatgtggaagaggctgtgtcatgtctctccattggggtcttggatatttttggcttcgaggattttgagaggaatagttttgaacaattctgtatcaactacgccaatgagcaactccagtattacttcaatcaacatatttttaagctggaacaagaagagtatcagggggaaggtatcacatggcacaacatcggctacaccgacaacgtcgggtgtatccacctgatcagcaagaaaccaacagggttgttttatctgttggacgaggagtctaacttcccacatgctacttctcagaccctgttagccaaattcaaacaacaacacgaagataacaaatactttctgggtacccccgtgatggagccagcttttattattcaacacttcgccgggaaggtcaaatatcagattaaagacttcagagagaaaaatatggactatatgcgtcctgatatcgtagcgttactgcgcgggagcgacagcagctatgtgagagaactgatcggaatggatcctgtcgccgtcttcagatgggccgttctgcgagcagccatccgagcgatggctgttctgagagaggccggccgcctgagagctgaaagggccgagaaggccgctggtatgagttcccctggggcacaatcccacccggaggaacttccaagaggtgctagcacaccttcagagaagttatatagagacctgcacaatcaaatgatcaagagcatcaagggcttgccctggcaaggtgaagacccccgatctctcctccaatccctgagccgcctgcagaagcctagagccttcattctgaagtctaagggcatcaaacagaaacaaattatacccaaaaatctccttgatagcaagagccttaagttgatcatctctatgacacttcacgataggactactaagtccctgctgcacctgcataaaaagaagaagccacctagtatctctgctcagttccagactagcctgaataaactgctcgaagctctgggtaaggcggagccttttttcattagatgcattagatccaacgctgaaaaaaaggagctgtgctttgacgatgagcttgtgttacagcagttgaggtacaccgggatgctggagaccgtgagaatacggagatccggctattcggcaaaatacacattccaggacttcaccgagcagtttcaggtcctgctgcccaaggatgcccagccctgccgtgaggtgatatcaaccctgctcgaaaagatgaagatcgataagcgaaactaccagatcggaaagactaaagtgtttctgaaggagaccgagagacaggccctgcaggagaccctacacagggaagtggtgagaaagattctacttctccagagctggttccgcatggtgctcgaacggaggcatttcctgcagatgaagagggcggccgtgacaatccaggcgtgttggcgctcatatagagttaggagggctctggagaggacgcaggctgcagtgtaccttcaagcttcctggagagggtactggcagcgcaagctataccgtcaccagaaacagagtattattcggctgcagagcctctgcaggggccatttgcagaggaaaagttttagccaaatgattagcgagaagcaaaaagccgaggagaaagagcgggaagcgctggaagcagcccgcgccggggcagaggagggaggtcaaggacaggcagccgggggccagcaggtggcagagcagggtcccgaacccgccgaagacggcgggcatctagcatcagaacctgaggttcagccatcggacaggtctccactcgagcactcctcacctgaaaaggaagcaccctctccggaaaagacactgcccccccaaaagaccgtagcggcagaatcccacgaaaaagttccttcctctcgagagaaaagagaaagcagacgccagagaggtttggaacacgtaaaattccagaacaagcatattcagtcttgcaaagaggagtccgctctgagggagccatcccggcgggtgacacaggagcagggcgttagcctcttggaagacaaaaaagagtctcgggaagatgagactctgctggtcgtggagactgaggccgagaacactagccagaagcaacccacagagcagccccaagcgatggccgtggggaaagtctctgaagaaacggaaaagacactcccttcgggctctcccagacctggacagctggaacgtccgacctccctcgctctggacagccgggtttctccgcccgctcccggaagtgccccggagacacccgaggacaaaagcaagccatgcgggtcaccacgcgttcaggaaaagcccgatagccccggcggatcgacccagatccaacgttacctggacgcggaacggctggccagtgcagtggagctctggcgtgggaagaaactggtggccgcagctagcccgagcgcgatgctgagccaaagcttagatctgagcgaccggcaccgcgcaacaggcgcggcccttactcccaccgaagaacgtagaactagcttcagtacatctgacgtgagcaaactgctgccatcgctggccaaagcccagcccgcagctgagacaacagacggggagcggtcagccaagaagccagccgtgcagaagaagaagcccggcgatgctagcagtctgcctgacgctggcctctccccaggcagtcaggtggactccaagagcaccttcaaacggctctttctgcataaaacaaaggacaagaagtacagcctcgagggggcagaagagctagagaacgctgttagcgggcacgtcgtactggaagccaccaccatgaaaaagggcctcgaggccccaagcggccagcagcacaggcacgcagccggtgaaaagcgaactaaagaacccggcgggaagggtaagaagaatcgtaatgtgaaaattggcaaaatcacggtgtccgagaaatggagggagtctgtcttcagacagattactaacgcgaatgaactgaaatatctcgacgagttcttgttgaacaaaataaatgatctgcggagtcagaagactccaatcgagtctctgtttatcgaagctactgagaagtttaggagtaatatcaaaacaatgtatagcgtacccaatgggaaaatccacgttgggtacaaggacctcatggagaactatcagattgttgtaagcaatcttgctacagagcgcgggcagaaagacacgaatctcgtactgaaccttttccagtcactcctagacgaattcactagggggtacactaaaaatgacttcgaacccgttaaacagtcgaaagcgcaaaagaagaagagaaagcaagagcgggccgtacaggagcataatggccacgtcttcgcctcctatcaggttagcattccacaaagctgtgagcaatgcctgagttacatctggttaatggacaaagccctcctgtgttctgtttgcaagatgacgtgtcacaaaaaatgcgtccacaagatacagagccattgttcttatacctacggtcggaagggcgaacctggagtcgagccaggccactttggcgtctgcgttgatagcctgacgagcgacaaggcctccgtacccatcgtcctcgagaaactcctggaacatgtcgaaatgcatggtctgtatactgaaggcctgtatcggaaatccggcgctgctaatcgtactcgtgaacttcggcaagcactgcagactgatcccgcggctgttaaattggagaactttccgatccacgcaattacaggcgtgctgaaacaatggcttcgtgagttacctgaacctctgatgacatttgcccagtatggtgacttcctacgagcagtggagctccccgagaagcaggagcaactggctgccatctacgcagttcttgagcaccttcctgaggcaaatcataattctttggaaagactaattttccaccttgtcaaggtagcattactggaggatgttaacagaatgtccccaggcgctctcgcaattatttttgctccttgcctgctgaggtgccctgataatagcgaccctctcacctccatgaaagacgtcctgaaaatcacaacctgtgtggaaatgctgattaaagagcagatgcgaaaatacaaagtgaagatggaggagatatcacagttggaggccgctgaaagtatcgcgtttcggcgcttgagcctgctccgccagaacgcaccctggcctctgaagctgggattctcatccccctacgagggcgttctcaacaagtccccgaagactcgcgacatacaggaggaagagttggaggtgctcctagaagaggaggctgcaggtggtgacgaagaccgagagaaggaaattctgattgagcgcatacaatcaattaaagaagagaaagaagatatcacatatagactgccagaattagaccctcgtggctctgacgaggaaaacttagactcggagacatcagcaagcaccgaaagcctattggaagagcgggctggtaggggggcatcggaaggccagtactag

SEQ ID NO: 196211 - DNA, 519 bp, synthetic construct
  misc_feature 1..519: note = Description of Artificial Sequence: Synthetic coding sequence
  source 1..519: mol_type = other DNA
atgagcagcaagaaggccaagaccaagaccaccaagaagcggccccaaagggcaaccagtaacgtcttcgctatgttcgatcagtctcaaatacaagagttcaaggaggctttcaatatgatcgaccagaaccgggatgggttcattgacaaggaagatctgcatgatatgctggcgtcactcggcaagaacccaactgacgcatatctcgatgctatgatgaatgaggcccccggccccattaactttactatgtttctcactatgttcggtgaaaagcttaacgggactgaccctgaagacgttatccgaaacgccttcgcatgttttgatgaagaggctacagggaccatacaggaagactatctcagggagctgttaaccacgatgggggaccgcttcactgacgaggaggttgacgaactatatcgagaagccccgatcgataagaagggcaattttaactatatagaatttacgagaatcctgaagcatggagctaaggacaaagacgattag

SEQ ID NO: 196212 - DNA, 1791 bp, synthetic construct
  misc_feature 1..1791: note = Description of Artificial Sequence: Synthetic coding sequence
  source 1..1791: mol_type = other DNA
atggccaccgagaacggcgccgtggagctgggcatccagaacccctctacagacaaggccccgaagggtcctacgggggagcggccacttgcagctgggaaggatcctggaccccctgacccaaaaaaggcacctgacccgcccacactgaagaaggacgccaaggcacctgcctcggagaagggcgacgggactctcgcccagccttctactagcagtcagggacctaagggcgagggggatcggggcgggggtccagccgagggctcagccggcccccctgctgctctgccccagcagacggctactcccgagacatctgtgaaaaaacccaaggctgaacagggtgcctcaggaagccaggatcccgggaaaccacgtgtgggcaagaaggccgctgagggtcaagccgccgcccgccgcgggagccctgcatttctgcacagcccaagttgcccagcaattatctcttcctctgaaaagctgctggcaaaaaaacctcctagcgaggccagcgaactcaccttcgagggggtgccgatgacccactcccccacagacccgagaccagctaaggccgaagaaggtaagaatatactggcagagtcccagaaggaggtaggcgagaaaacccccgggcaggccgggcaggcaaagatgcagggtgacacatcacgggggatcgaatttcaagcagtccctagcgagaagtctgaagtgggccaggctttgtgcctaacagcccgggaagaggattgctttcagattttagacgactgtccacctccccctgccccatttccccaccgcatggtcgagttacggactggcaatgtcagttctgaatttagcatgaatagtaaggaagccctgggcgggggaaagttcggcgccgtgtgcacttgtatggaaaaggcaaccggcctgaagctggcggctaaagtaatcaagaaacagactcccaaggacaaggaaatggtgctcttggaaattgaggtcatgaaccaactaaatcaccggaatctgatacagctatatgctgcaattgagacaccacatgaaatcgtcctttttatggagtatattgagggaggagagctcttcgaacgtatcgtggatgaagattatcacctgacagaagttgacacaatggtgttcgtcaggcaaatctgcgacgggatcctattcatgcacaagatgcgggtgttgcacctcgacctgaaaccagaaaacattctgtgtgtgaacacaactggtcacttggtgaagatcatagacttcggcctggctcgccgatacaacccgaatgaaaaactaaaagtgaactttggtaccccggaatttcttagtcccgaggtggtcaactacgatcagatctcagataaaacggatatgtggtcaatgggagtaatcacttacatgctactttctggcctgagcccattccttggcgacgatgacacagagaccctgaacaatgttctgtccggcaattggtattttgacgaagaaacattcgaggctgttagcgacgaggccaaagacttcgtgtccaacttaatcgtgaaagatcaacgcgctcggatgaacgccgcacagtgcctggcccacccctggctgaacaacttagccgaaaaagccaagcggtgcaatcggaggctgaagtcccagatcctccttaagaagtacctgatgaagagaaggtggaagaagaactttatagcggtatcagccgcaaatcggttcaagaagattagttcttctggtgccttgatggccctgggtgtatag

SEQ ID NO: 196213 - DNA, 1791 bp, synthetic construct
  misc_feature 1..1791: note = Description of Artificial Sequence: Synthetic coding sequence
  source 1..1791: mol_type = other DNA
atggccaccgagaacggcgccgtggagctgggcatccagaacccctctactgacaaagcacccaaggggcccactggggaacgtcccctagcagcaggaaaggatccaggacctcctgatccaaaaaaagcaccagatccgcctacactgaaaaaagacgccaaggccccagccagtgagaaaggagatggcaccttggctcagccgagcaccagttctcagggacccaaaggggaaggggaccgcggcggcggtcccgctgaggggagcgctggaccacctgcagctctgccccagcaaaccgcaaccccagagacgtccgtcaagaagcccaaagccgagcagggggccagtggatcccaggaccccggaaagccacgagtggggaagaaggccgccgaaggacaggctgccgcaagacgcggatcaccagcattccttcacagtccaagctgtcctgccatcatatcttcctcggagaaactgctggccaaaaagccccccagtgaggccagtgagcttactttcgagggggttcccatgactcattcccccacggatcccagaccagcaaaagccgaagaaggcaagaatatcctggcagaaagccagaaggaagtgggggagaaaacacctggccaggcaggacaagcgaagatgcagggagacaccagccgagggatagaattccaggctgttccctcagaaaagagcgaagtgggccaggcgttatgcctgactgctcgggaagaggattgcttccagatccttgacgactgcccccctccgccagctcctttccctcaccggatggtggagcttcggacaggcaacgtgtcatccgagttctctatgaacagtaaagaggccctaggaggaggcaaattcggtgccgtctgtacctgcatggaaaaggcaaccgggctgaagttggccgcaaaggtcatcaagaagcagaccccgaaagataaggaaatggtgctgctggagatagaagtgatgaaccagctgaaccaccggaacctcatccagctgtacgctgcgatcgaaacaccccatgagatcgtcctgttcatggagtatatagaggggggtgaactatttgaacgtattgtagacgaggactaccacctaactgaggtggatacaatggtgtttgtccgtcagatctgtgatgggatactgtttatgcacaaaatgagagtactgcacctcgacctgaagccggagaacattctgtgcgtgaacaccacagggcaccttgtgaagatcatcgacttcggtcttgctcgccgttacaatcctaacgaaaagttaaaagtgaattttggtacgccagagtttctgtcgccagaggtagtgaactacgatcagatctctgacaaaactgacatgtggtcaatgggcgtaatcacatatatgcttctcagcgggctcagccccttccttggcgacgacgatacagaaactctcaataatgttctctctggaaactggtatttcgatgaggaaacgttcgaggccgtatctgacgaagctaaggattttgttagcaacttaatcgtgaaggaccaacgcgcccggatgaacgccgctcaatgcctagcgcatccatggcttaataaccttgccgaaaaggccaagaggtgtaacagaaggctgaaatcccaaattcttctgaagaaatacctgatgaagaggagatggaagaaaaactttatcgccgtgtctgccgcaaaccggttcaagaagatttcgtcttcaggagcgctgatggctctgggcgtgtag

SEQ ID NO: 196214 - DNA, 2460 bp, synthetic construct
  misc_feature 1..2460: note = Description of Artificial Sequence: Synthetic coding sequence
  source 1..2460: mol_type = other DNA
atgagcggcaccagcaaggagagcctgggccacggcggcctgcccggtctggggaaaacttgcctcacaacaatggatactaaactaaacatgctgaatgaaaaagtcgaccaactacttcattttcaagaagacgtgacagaaaaactccagagcatgtgcagagacatgggacatttagagaggggcctgcaccggcttgaggcctcgagagcccctgggccaggaggggccgacggcgtcccccacattgacacccaagccggctggccagaagtgctcgaactggtgcgtgccatgcagcaggatgccgcgcaacacggcgcaagacttgaggcattgttccggatggtggccgcagtagaccgcgctatagccctcgtaggagccacattccagaagtctaaagtagccgatttcctgatgcaaggcagggtgccatggcgacgagggagtcccggcgactctcccgaggagaacaaggaaagagttgaggaagaagggggcaaaccaaagcacgtgctctccacttccggagtgcagtctgatgctagggaacccggggaggagtcacagaaggccgacgttcttgagggcaccgccgagcgtcttccacccatccgcgctagcggtctgggagctgaccctgcccaggctgtagtttctcctgggcaaggcgatggcgttccaggcccagcacaagccttccctgggcatctccccctgccaactaaagtggaggcaaaggctcccgaaacgccttcagagaacctgcgaacagggctcgagttggcccccgcacccggacgggtgaatgtcgtgtcgcccagtcttgaggtggcgcctggggctggtcagggggcaagttcttctcgacctgatccagaaccactggaagagggaactcgcttgactcctgggccaggaccacagtgccctggcccccccggcctgcccgcacaggctagagccacccactcggggggggagaccccaccaagaatttccattcacattcaggagatggatactcccggagaaatgttaatgaccggcaggggtagcctggggcctacactgacaactgaggctccagctgctgcccaaccgggcaaacaggggccccccggcactgggcgctgcctgcaggcacctggcaccgaaccaggtgagcagacacctgagggcgccagagagctgagtccactccaagagtctagctctcctggaggtgtcaaggcagaggaggaacaacgcgcaggggcggagccgggcacccggccatcactcgcccggagcgatgataatgaccatgaggttggggctctgggtctacagcaaggaaagagccctggagccggtaatcccgaacccgaacaggactgtgctgcgagggcacccgttcgggcagaagccgtgaggcggatgccacctggagcagaggccggcagtgttgtgctggacgatagtccagctccacctgccccctttgaacatcgcgtagtgtctgttaaggaaacaagtatttccgccggctacgaagtatgccagcatgaggtcctgggcggaggtcgatttggccaggtgcatcggtgtactgaaaagtctacaggtctccccctagctgctaagattataaaagttaagtctgctaaggatagagaagatgttaagaacgagattaacattatgaaccagttgtctcacgtaaatctgatccagttatatgatgcgtttgagagcaaacactcatgcacattggtcatggagtatgtggatggtggggagctatttgatcgtattacagacgagaagtaccacctaacggagctggatgtggtactgttcactaggcagatctgtgaaggcgttcactatttgcaccagcattacatactgcaccttgacctcaaaccagagaatattctgtgcgtaaaccagaccggacaccagatcaaaatcattgactttggcctagcacgccggtacaaacctagggagaaattgaaagttaactttggcaccccagaatttctcgctcctgaagttgtgaactatgagttcgtttccttccctacggatatgtggtcagtcggagtgataacctacatgcttctcagtggactctcgccatttctgggagagaccgacgctgaaaccatgaactttatcgtcaattgcagttgggatttcgatgccgacacgttcgaggggctgagcgaggaggccaaagatttcgtgtccagactgttggtgaaggagaaatcttgccggatgtccgcaactcagtgtctgaaacatgagtggctgaacaaccttcctgctaaggcatcaagatccaagacccgcctcaaatcccaacttctgctacaaaagtatatcgcacagagaaagtggaaaaagcacttctacgtggtaacagcagctaacaggctgcgcaaattcccaaccagcccctag

SEQ ID NO: 196215 - DNA, 1437 bp, synthetic construct
  misc_feature 1..1437: note = Description of Artificial Sequence: Synthetic coding sequence
  source 1..1437: mol_type = other DNA
atggacacccccggcgagatgctgatgaccggccggggcagcctgggcccgactctgacgaccgaggcaccggctgctgcccagccaggcaagcagggaccgccaggcacagggaggtgtctccaggcaccgggcacagaacctggggagcagaccccggagggagccagagaattgagccccctgcaagaatcgagctcacctggcggcgtgaaagcagaggaggaacagagagcaggtgccgaacctggtactagaccctctctggccagatcggatgacaacgaccacgaggtaggcgccctcggcctccagcaaggaaaatctccaggggccgggaacccagagcccgaacaggattgtgcggccagggctcctgtaagggccgaggctgtgagacgcatgccccctggcgcggaagccgggtccgtagtgcttgatgattcccccgcgcctcctgccccttttgaacacagagtggttagcgtgaaagagacaagcatcagtgccgggtatgaagtctgccagcatgaggtgttaggcggcggcagatttggccaggttcatcggtgcacagagaaatcgactggtctgccgctcgcagcaaagattataaaggtgaagtctgctaaggaccgcgaggatgtgaaaaacgagatcaatatcatgaatcagctcagccatgtgaaccttatccagctgtacgacgcttttgagtctaagcattcctgtaccttggttatggaatatgtcgatggcggggaactgtttgataggatcactgacgagaagtatcacctcaccgagttagacgtggtactttttactaggcagatttgcgaaggtgtgcactacctgcatcagcactatatcctgcatcttgaccttaaaccagagaacatcctgtgtgtcaatcagactggccaccaaatcaaaatcatcgattttggcctggcccgcagatacaaacccagagagaaattaaaggtcaacttcggaaccccagaattcttggcaccggaagtagtgaattacgagtttgtgtccttccccaccgacatgtggagcgtgggagtgataacatacatgctactttcagggctcagcccttttcttggggagactgatgcggaaactatgaactttattgtgaattgtagttgggactttgatgccgacacctttgagggtttaagcgaggaagccaaggatttcgtatccagattgctcgttaaagagaagagttgccgaatgtccgcgactcagtgcctaaaacacgagtggcttaacaatctccccgcgaaagctagtagatctaagacgaggctcaaatctcaactgttgctccagaagtacatcgcccagcgcaagtggaagaaacacttttacgtggtgaccgctgcaaacaggcttcggaaatttccaactagcccctag

SEQ ID NO: 196216 - DNA, 4212 bp, synthetic construct
  misc_feature 1..4212: note = Description of Artificial Sequence: Synthetic coding sequence
  source 1..4212: mol_type = other DNA
tgactgctgctggagagctgcgagaaggagaagcaggccctgctgcagaacttgaaagaggtggaggacaaggcttcagcgtacgaggatcagctgcaggggcaggcgcagcaagtagaaacgctgcagaaggagaaactaagcgcaacttttgaggggtcagaacaggtccaccagcttgaggaacagctggaagcccgggaagccagcgtcagaagattggcggaacacgtacagagtctctgcgacgagcgggatctgctcagacagcgttttcaggagctcaccgaaagggtcgcgactagcgacgaggacgtggccgagctgcgcgagaaactcagacggagagaggctgacaatcagtcattagaacattcttaccagcgtgtgtcatcacagctgcaatccatgcacacattattacgagagaaggaggaagaacttgaacggatcaaagaagcccacgagaaagtccttgaaaagaaggaacaggatctcaacgaagccctcgtgaaaatggtggccctgggttcatcactcgaggagacagaaatcaaactgcaggcgaaagaagaaattctccggaaattcgcctcagagtctccaaaggacatggaagaacctcggtcaacccctgaagaaaccgaacgggatgggacactcttgccggggcaacctgtccaggccacacgcgccccactcggcctgcctcacacacggcttgaggacgaagacgaagaccttggggcccctcctggcgaggaatatggagatggaagcccaagccgcgaagactctatggtgcccccaaagagcgtagaagtacttgatcgggaagggcatcaacagggaacagctaaactggaccagggggcacccggcgtcaagcggcagagaatacggttcagtacgatccaatgtcagcggtatatccaccccgaaggaagtgaaaaaacctggacttctagtacttcttcagatacatcccaagaccggtcaccatctgaagaaagtatgtcgtcagagcctgcccctagcgtcttgcccgccaccggagactccgacacttacctcagcatcattcattcccttgaaaccaaactgtacgtgaccgaggagaaattgaaggacgtgaccgttagactggaatctcagcaggggcaaagcagggaagccctgctggcattacaccaccagtgggcagggaccgaagcccagctacgcgagcagcttcgggcctccctcctgcaggtaggcgcgctagcgtcgcagcttgaacaggaacggcaggaacgggcacgcagagttgaagggcatgtgggagaactcggagacttccaggtaaagaatagtcaggccctgatgtgtctggaaaattgccgagagcagttgcgctcactccccagggcatcccaggaggacgagcaggacgctagggccgccagcctggcctccgtggagtctgccctggtgtccgccatccaggctctgcagcactggcccgcacctgctcacggcggagccagggcccaactggaaaccgggggaaccgaggaaaacggtaaacccgccagcctccagcagtgttcccagtccgaacttactgaacaggagcaggttcgactcctgagcgatcagatcgccctcgaagcgtccctgatttcccaaatcgcagattctctcaagaacaccacaagcgacgtctcccgcatgcttcatgaaatttcttggagtggtcagcccccaatggagagcgctggggcaccagtcgacacttgggcaagaaaggtcttggtcgacggggagttctggagccaggtcgaaagcttgcggaagcacctggggacgctcggaggagaagcagtgggcgcctcgggcgatggacaacagagcataccacagggcttagcccccattctggccaatgctacctgggtcagagcggagctttctttcgctactcaatctgttcgcgagagcttccataggcgcctacagtcgatacaagaaacactgcgaggcacacagacagcgcttagacagcacaaatgtttactcagagagatcctgggcgcgtaccagacacctgatttcgagcgcgtgatgcaacaggtactggaagctttaagactcccagctggacacgaggacggagtgcaactctcttgggacctctccccactcggcgaagtcctcgggagggactcagattccagccaggaacctttcgacgtgtctgatcaaagccccggcgcctttgtcgctatccaggaggagctcgcccagcaattgaaggagaaagcaagcttactggaagagatcgcagccgccctgccatctttaccccctgttgagtctctccgagactgccagaaattgctgcaggtttcccagtccctctcttataacacctgcctgggtggactgggtcagtatagcagccttctggtgcaggatgctattattcaggcacaggtgtgttatgcatcctgccgcatcagattagaatacgaaaaggagttacagctgtgcaaggagagttggcaaacaagggaaccctcttgttccgaacaggcccaggcagcgagagccctacgggaagagtatgaggaattgctacgtaagcaaaagtccgagtatctggatgtaatcgcgatcgtcgaacgggaaaatgcagagttgaaggcaaaagctgcccagctggatcaccagcagcaatgcctcgaggatgctgagtctaaacattccatgagcatgtttactctgaggggtagatacgaagaggagatccgctgtgtagtggagcagctgaccagaaccgagagcactctgcaggctgaacgaagtcgagtactttcacaactagatgctagtgtgcgtgatcgccaggacatggaaaggcaccacggggagcagatccagacgttagaagatcgctttcaattgaaagtgagggaactgcaaacaatccacgaagaagaactgcggacgctacaggagcattatagccaaagcctccgctgtctacaggataccctctgcctacaccaggggcctcatccaaaggctttgcctgctccggcacccaactggcaagcaacccagggtgaagcggactcaatgacggggctcagggagaggattcaagaactcgaggctcagatggacgtgatgagagaggaactgggccacaaggatctcgagggagatgctgccacactgagagagaagtaccagagagacctggagagcctgaaagcaacatgtgagagagggttcgcagccatggaggagacacaccagaaaaaaattgaggatctgcagcgccagcatcaacgggagcttgaaaagctacgcgaggaaaaggaccgcctcctggccgaggaaactgccgctacaatttccgccatagaggcgatgaagaacgcccatagggaagagatggagcgggagctggagaagtcacagaggtctcagatttctagcgtgaattctgacgttgaagcattaaggaggcaatacctcgaagagcttcagtctgtgcagagagaactggaagtacttagcgaacagtactcgcagaagtgtctcgaaaacgctcatctagcacaggcactagaggctgagagacaggcccttagacagtgccagagagagaaccaggagctgaatgcccataatcaggagctgaacaacaggttggctgcggagatcacaaggttacgcacattgcttaccggcgacggaggtggcgaagcaactggctctcctctggcccagggcaaggatgcctatgagttggaggtcctcctgcgagtcaaggaatcagaaatacagtatctaaaacaagagatcagctctttgaaagacgagcttcagacagcactccgggataaaaagtatgcctccgataagtataaggatatttacactgaactgagcattgccaaggccaaggccgactgcgacattagcagattgaaggagcagctgaaagctgctactgaagccctcggggaaaaatctccagatagcgctactgtgtccggctacgacataatgaagagtaagtccaaccccgactttctaaagaaggatcgatcctgtgtcaccagacagctccggaatatcagatcgaaaagcctgaaggagggattgacagttcaagagaggctgaagctgtttgagagcagagatctcaagaaggactag

SEQ ID NO: 196217 - DNA, 3078 bp, synthetic construct
  misc_feature 1..3078: note = Description of Artificial Sequence: Synthetic coding sequence
  source 1..3078: mol_type = other DNA
atgagcgccgccaaggagaacccctgccggaagttccaggccaacatctttaacaagtctaagtgccaaaattgcttcaaacccagagagtctcatttgcttaatgatgaggatcttacacaagccaaaccaatttacggcggatggctgctgctggctcccgacgggacggacttcgataaccctgtgcaccgttccagaaagtggcagcgccgattctttatcctgtatgaacacggcttactcagatatgccctggatgaaatgccaactacccttccgcaggggacaatcaacatgaaccagtgtactgacgtggtggatggggaaggtcgaacagggcagaagtttagcctctgcatactgacacccgaaaaggaacactttattcgcgccgagacgaaggaaattgtaagcgggtggctggagatgcttatggtctacccacgcacaaacaagcagaatcaaaaaaaaaaaaggaaggtcgagccccccacacctcaagagcccggccctgccaaagttgccgttacgtcctcaagctcctcatccagctcctcgagctcaatcccatccgcagaaaaggtgcctacaacaaagtctaccctttggcaggaggagatgcggacgaaagatcagcctgacggaagttcattgtcccctgcccaaagcccgtcccagagtcagccgcccgctgcctcaagccttcgggagcccgggctggaaagtaaggaggaggagtccgccatgtcatccgacagaatggactgtggacgaaaggtgcgagtggagagcggctacttctcactggagaaaacgaagcaggacctcaaagctgaggaacaacaactgcctccaccattatcacccccgtcaccttccactccaaaccacagacgatcccaggtaatagagaaattcgaagcattggatattgagaaagcagagcatatggagaccaatgcggtaggacccagcccaagttccgacaccagacagggccgctcagagaaacgggctttccccagaaagcgcgatttcactaatgaggcgccaccagcccctcttccggacgccagcgccagcccgctgagtcctcacagaagagcaaagtccctcgatcgtaggtccacagagccatctgtgacacctgacttacttaattttaaaaaaggatggttaactaagcagtatgaggatgggcagtggaaaaagcactggttcgtgcttgccgaccaatctctgcgatactatagggattccgttgccgaggaggcggcggacttggacggcgagattgatttatctgcatgttacgacgttaccgaatacccggttcaacggaactatggatttcagattcataccaaagagggagagtttacactgtcggctatgacctccggcatccgcaggaactggatccagaccattatgaagcacgttcacccaaccacggcacccgatgttacatcttccctgccggaagaaaagaataagagttcctgctccttcgaaacctgccctcggcctactgagaaacaggaggcagaactcggcgagcccgacccggaacagaagcgttcccgcgcacgagagcgtaggagagaggggaggtccaaaacattcgattgggcggaattcagaccaattcaacaggccttggctcaggagcgtgtgggcggtgttggacctgcggacacccacgagcctctgcgcccagaggcagaaccgggagagttagagcgggaacgggcacgccgtcgggaggaaagacgcaagcggttcgggatgctagacgccactgacggtccaggcacagaggacgctgccctacgaatggaagtggatcgatcccctgggctgcctatgagcgatttgaagactcacaatgtgcatgtggaaatcgagcagcgctggcaccaggtcgagacgacccccctccgggaggagaaacaggttccaatcgcacctgtccatctgagtagtgaggacggaggcgaccgtcttagcacgcacgaactgacatccctgctcgaaaaggagctcgaacagagccagaaggaggcaagtgatctcttagaacagaatcgcctcctgcaggaccagctgagggtagcgctggggagggaacagtccgcccgcgaggggtacgttctgcaggctacctgcgagcggggatttgctgcgatggaggagactcaccagaaaaagatagaagacctccaacgtcagcatcagcgtgaactggagaagttgcgggaagagaaggatcgactgctcgcggaggaaacagccgcaacgattagtgccatcgaggctatgaagaatgcacaccgagaggagatggaacgggaactcgagaagagtcagcgttcgcagatttccagtgtgaacagtgatgtggaagcactacgacgccagtatctggaggagttacagagcgttcaacgagagcttgaagtgttgtcagagcagtatagtcagaagtgtcttgagaacgcccacctcgcccaggccttggaagctgagaggcaggcactgcggcagtgccaaagagaaaaccaggagctgaatgcccacaaccaagagctgaataataggctggccgccgaaattacaagattaaggacactgcttaccggcgacggcgggggagaggccactggtagtcctctagcccagggcaaggacgcttatgagctcgaagtgttactgagggtgaaagagtcggaaattcagtacctgaaacaggaaatctcaagtctgaaagatgagctgcagactgccctacgggacaagaagtacgcgtccgacaagtataaggacatctataccgagctgagtatcgctaaagctaaggctgactgtgatatcagcagactgaaagagcagctcaaggccgccaccgaggctctgggggagaagtcccctgacagtgccaccgtgtccggctatgacatcatgaaaagcaaatcaaaccccgacttcctcaaaaaagaccgctcatgcgtgaccaggcaactcagaaacattcggtccaaaagtgtgatcgagcaggtgagttgggacacgtag

SEQ ID NO: 196218 - DNA, 3078 bp, synthetic construct
  misc_feature 1..3078: note = Description of Artificial Sequence: Synthetic coding sequence
  source 1..3078: mol_type = other DNA
atgagcgccgccaaggagaacccctgccggaagttccaggccaacatatttaacaaatctaagtgtcaaaattgctttaagccaagagagtcccatttattaaatgatgaagacctgactcaggcaaaaccaatctacggcggctggctactgctggctcctgatggcactgactttgacaacccagttcaccgctctcgaaagtggcagcgtcggttcttcattctgtacgaacatggacttctacgctatgccctagatgaaatgcctacaaccctgccacagggcaccatcaacatgaaccagtgcacagatgtagtggatggggagggaaggacaggacagaaattctctctgtgcatacttacacccgagaaagagcatttcatcagggccgagaccaaagagatcgtcagcggctggctggagatgctcatggtttatccgcggaccaacaaacagaaccaaaaaaaaaagcgcaaagtggaacctccaacccctcaggagccagggccagcaaaagtggccgtgacctcgagtagctcgagctctagctcctccagctccattcccagtgctgaaaaggttccaacaacgaagtcaaccctctggcaggaagagatgcgtaccaaagatcaacccgatggaagctcactgagccctgctcaatcacctagccagtctcaacccccagccgcgtcatctctgagggaaccaggactggaatccaaggaggaagagtccgccatgtcctccgacagaatggactgcgggcggaaggtacgcgttgagtccggctacttcagcctggagaaaaccaaacaggaccttaaagccgaagaacagcagcttcccccacctctctcacccccatcaccgtctacccccaaccaccggagaagccaggtaatcgagaagttcgaggcgcttgacattgagaaggctgagcacatggaaacgaacgccgttggtccctcacccagtagcgacacccgtcagggacgctctgaaaaacgggcttttcctaggaaaagagacttcaccaacgaggccccccccgccccgttaccagacgcctccgccagtccactgtctccacatagaagggcgaaaagcctggaccggcgatctaccgaaccctcggtgacacctgatcttctgaactttaagaagggctggttgaccaaacaatacgaagacggccagtggaagaagcattggttcgtgctggccgaccaaagtctaagatactatagggactcagtggccgaggaggccgcagatctcgatggagaaatcgacctgtccgcatgttacgatgttacagaatatcccgtgcagcggaattacggatttcaaattcacacaaaagaaggggagttcacactctcggctatgacaagcgggattcgtcgcaactggatccagaccatcatgaaacacgtgcatccaaccaccgctcctgatgtcacatccagtttgcccgaagaaaagaacaagagttcatgcagctttgagacgtgtcctaggcctaccgagaagcaggaggccgagctgggtgaacccgatccggaacagaagagatcccgcgccagggagagaagacgagagggacgcagcaaaacattcgactgggcagaattcaggcccatccagcaggcgttggcgcaagaacgggtgggcggagtggggcccgcagacactcacgagcccttacgccccgaagccgaaccaggggaactcgagagagagcgtgcccgtcgtagggaggagaggaggaaaaggttcggcatgctcgacgccacagacggccctggcacagaagatgccgccctacgaatggaagtggatcggagccctggcctgccgatgagcgacctgaaaacccacaatgtacacgttgagatcgaacagaggtggcaccaagtggagaccacccctctgcgtgaagagaagcaagtaccaattgcccctgtgcatctgtccagtgaggatggaggtgacaggctcagcactcacgaactgaccagtctactagagaaagagctggagcagtcgcaaaaagaagcctccgatcttctggagcagaaccgcctgctgcaggatcagcttagggttgcactaggcagggagcagagcgccagggaagggtatgtgttgcaggccacctgtgagcggggcttcgccgcaatggaagagacccaccagaagaaaatcgaggatctccagcggcagcatcagcgtgaactcgagaaattacgcgaagagaaggaccggctgctcgctgaagagaccgccgcaactatctcagccatagaggcgatgaaaaacgcacatcgtgaggagatggaacgcgaactggagaaaagccagcgatcccaaatcagctcagttaactccgatgtggaagctttgcgcaggcagtacttggaagaactccagagcgtgcagagagagctggaggtgctgagtgagcagtacagccaaaaatgtctggaaaacgcccatctggcccaggccctcgaggctgagcggcaggctctccgccaatgtcagagagaaaatcaggagctgaatgcccacaatcaggaattaaataaccggttagccgcagagattacacgattaagaacgctactgacgggagatggaggaggtgaagcaaccggcagccccctggctcaggggaaagacgcttacgaactggaagtacttttgcgcgtcaaggagtccgagatccagtacctcaagcaggagataagttccctgaaggatgaacttcagactgcactcagggacaaaaagtacgcttcagataagtataaagacatttacacagagctctcaatcgcaaaggccaaagctgactgcgatatcagtagactcaaagagcaactgaaggccgccactgaagctctgggcgaaaagtcacccgattccgctacagtcagtggttacgacatcatgaaatccaaaagcaacccagacttcttgaagaaggacagatcttgtgtgactcgccagctgaggaatattaggagcaagtccgtaatcgaacaggtgagctgggatacctag

SEQ ID NO: 196219 - DNA, 192 bp, synthetic construct
  misc_feature 1..192: note = Description of Artificial Sequence: Synthetic coding sequence
  source 1..192: mol_type = other DNA
atgagcgccgccaaggagaacccctgccggaagttccaggccaacatcttcaataaatctaaatgccagaattgctttaaaccacgggagagccacctactgaacgatgaagatctcactcagcaaaacacccaccctcttgaaatgaaacgcggggctcacatttacgatgctcggatgttttcctgctag

SEQ ID NO: 196220 - DNA, 282 bp, synthetic construct
  misc_feature 1..282: note = Description of Artificial Sequence: Synthetic coding sequence
  source 1..282: mol_type = other DNA
atgagcgccgccaaggagaacccctgccggaagttccaggccaacatcttcaacaaaagtaagtgccagaactgcttcaagcctagggagagccacctgctgaacgatgaggatttaacccaggcaaagcccatctatggcggttggctgctcctggcaccagacgggaccgatttcgacaaccccgtgcaccggtccagaaaatggcagcgacggttcttcattctgtacgaacatgggctactgcgctacgctctcgatgaaatgatgagctcgcagtag

SEQ ID NO: 196221 - DNA, 3117 bp, synthetic construct
  misc_feature 1..3117: note = Description of Artificial Sequence: Synthetic coding sequence
  source 1..3117: mol_type = other DNA
atgagcgccgccaaggagaacccctgccggaagttccaggccaacatcttcaataaaagtaaatgccagaactgcttcaagccgcgagagtctcaccttcttaacgatgaggaccttacacaggccaagccgatttatggcggatggctgttgttagcgcccgacggtactgacttcgataatcccgtccatcgttctcggaagtggcagcgaagatttttcattctgtacgagcatggcctattgaggtacgctctcgacgaaatgccaaccactctcccccagggtactattaatatgaaccagtgcaccgatgtcgtcgacggagaaggaaggaccggccaaaagttctcattgtgcattctgacaccagaaaaagagcattttattagggccgaaaccaaggagattgtctcgggctggctcgaaatgctgatggtgtatccgcgaacgaataaacagaaccaaaaaaaaaagcgcaaggtcgagcctccaacgccccaagagcccggtcctgccaaggttgcagttacaagcagctcctcaagttcgagctcaagctcatctattccctcagcagaaaaggtgccgactaccaagagtacgctctggcaggaggagatgagaacaaaagatcagcctgatggcagcagcttgtcacctgcacagagtcctagccagtcgcaacctcccgcagcttcgagcctcagggagcctggcctggagagcaaggaggaggagtccgctatgagtagtgatcgtatggactgcggaagaaaagtcagagtcgagagcggttattttagccttgaaaagactaaacaggacttgaaagcagaagagcagcagctcccccctcccctgagccctcctagtccctcaactccaaaccataggagatctcaggtcattgagaagtttgaagctctcgatattgaaaaagctgaacatatggagactaacgccgtcggtccctccccatcatccgataccagacagggacgttccgagaagcgggctttcccccgcaagcgtgatttcaccaatgaggcacccccagctcccctgccagatgcctctgcaagccccttgtcaccccacaggcgcgccaagtcactggaccgcagaagcaccgagcctagcgttaccccagacctgttgaattttaaaaagggatggctcacaaagcagtacgaagatggccagtggaaaaagcactggtttgtgctcgccgatcagtctcttaggtactacagggactccgtagctgaagaggccgccgacctggatggggaaatcgatctgtctgcctgttacgatgtcaccgagtatcccgtgcaaaggaattatggatttcaaatacacacaaaagagggagagtttactctcagcgctatgacatccggcatacgtagaaactggattcagaccattatgaaacatgtccacccaactacagcgcctgacgtaacaagttcgctacctgaagaaaagaacaaaagctcatgctcattcgaaacctgtccccgacctacagaaaaacaagaagcagaattgggagagcctgatcctgagcagaagaggtctagggcacgggagcgccggagggaaggaaggtcaaagaccttcgactgggcggaattcagacccatccagcaggccctggctcaggagagggtgggcggcgttggccccgctgatacccacgaaccgttgcgcccggaagccgagcctggggagcttgagcgggagcgggcaaggcgaagagaggaacgcaggaagagatttggaatgttggatgccactgacggacctggcaccgaggacgcggctttaagaatggaggttgaccggtctcccggactcccaatgtctgacctcaagactcacaacgtgcacgtggagatcgagcagagatggcatcaagtggagacaacaccccttcgggaagagaaacaggttccaatcgctccagtgcatctgtccagcgaagatggcggcgataggctgtccacgcatgagctgacatcactattggagaaagaactggagcagtcgcagaaagaggcttctgatttattagaacagaacagattactgcaggaccaactgcgtgtggccctgggtagagagcagtctgcccgcgaaggctatgtcctccaagcaacttgcgagcgaggctttgccgcgatggaggaaactcaccagaaaaagattgaagacctacagagacagcaccagcgcgaactggaaaaactgagggaagaaaaggatcggctactggccgaggagaccgccgctactatctcagcgatcgaggcaatgaaaaatgcacatagggaggaaatggagagggaactggagaagagtcagagatcccaaatttcgtcggtcaattcagacgtggaagcactccggcggcagtatctggaggaattgcagagcgttcagcgggagctggaggtcctgtctgaacagtactcccagaaatgtcttgagaatgctcatctcgcgcaggcactggaagcggagcggcaggctctcaggcagtgccaacgagagaatcaggagctgaatgcccataaccaagaattgaataacagactggccgccgagataacaagactgcgcacattgctgaccggcgatggaggtggtgaggccaccggttcacctcttgcacaaggcaaggacgcttatgaactggaggtcctgcttcgggtgaaggaaagtgaaatccagtacctcaaacaggagatatccagcctcaaagatgaactgcagactgcactcagggataaaaagtacgcttcggacaagtataaggatatctataccgagctgtctatcgccaaggccaaggctgattgtgatatctcgagactgaaggaacagcttaaagctgcaactgaggccctcggagaaaaatctcccgatagcgctactgtgagcggctacgacatcatgaagagcaagtcaaatcccgacttcctgaaaaaggataggagttgtgtaacacgccagctgagaaacattcggtctaaatctcttaaggaaggcctgacggtgcaagagcggcttaagctgttcgagagccgcgacctgaagaaggactag

SEQ ID NO: 196222 - DNA, 3276 bp, synthetic construct
  misc_feature 1..3276: note = Description of Artificial Sequence: Synthetic coding sequence
  source 1..3276: mol_type = other DNA
tgacggttcagcaccatccagtgccagcggtacatccaccccgagggctccgaaaagacctggacctcatccacgagcagtgacacgtcgcaagatagatcaccctccgaagagtctatgtcaagcgagcctgccccctccgtcctccctgccaccggggattctgacacgtacttgagcatcatacattctcttgaaacaaagctatatgtgacagaggagaagctaaaagacgtgacggtccggcttgaaagccagcaggggcagtcccgggaggcccttctggccctccaccaccagtgggccgggaccgaagcccagctgagggaacaactgagagccagcctactgcaggtgggagcactggcgagccagctggagcaggagcgtcaggaaagagcccgcagagtcgaaggccacgtgggagagttgggcgactttcaagttaaaaatagtcaggcactaatgtgtctggagaattgccgggaacagttgcggtcactgcctagggcctctcaggaagacgaacaagacgctcgagccgcgagcctggcgtcagttgaatcggccctagtgtccgctatacaggctctgcagcactggcctgctcccgcgcatgggggcgcccgagcacagctggagaccggtggcaccgaggaaaatggtaaaccagcaagcctccagcagtgctcacagagtgagcttacagagcaggaacaggttaggctcctctcagatcagatcgcccttgaggccagcctgatttctcaaattgctgactcactcaaaaataccacgtccgacgtgagtagaatgcttcacgagatctcctggtcgggccagccaccaatggagagtgcaggtgctccagtggatacgtgggctcggaaggtattggtagacggggagttctggagccaggtagagagtcttaggaagcaccttggcaccctgggaggggaggccgtcggggcgagtggagacggtcagcagtccatacctcaagggctggcccctatactcgcaaacgcaacatgggttagggctgagttgtccttcgctacccagagtgtcagggaatccttccaccggcggttgcagtctattcaggaaactctgcgagggactcaaacggcactgcggcagcataaatgtctgttgagggagattctcggagcatatcaaacaccagattttgagcgggtgatgcagcaggtactcgaggccctgagactgcccgcaggacatgaggacggcgtgcaactgagctgggacctgagccctcttggtgaggtgttaggacgggacagtgacagttcccaggaaccattcgatgtctctgaccagtctccaggcgcattcgtggctattcaggaggagctggctcagcaactgaaggaaaaagcatcacttcttgaagagattgccgcagccttgcctagcctgccacctgtggaatccctgcgcgattgccagaagcttctacaggtgtcgcagtctctgagctataacacttgcttgggcgggttgggccagtattcttccctgttggtacaggatgcgatcatacaggcccaggtgtgttacgcatcctgcagaattcgcctggaatacgagaaggaattacagctgtgtaaggagtcctggcagaccagggaacccagttgcagcgagcaggcccaggccgcacgtgccctccgtgaggagtacgaagagctgttgcgtaagcaaaagagtgaatacctggacgtgatcgctatcgtagagagggaaaatgcagagctgaaagccaaggccgctcaactggaccaccaacaacagtgcctcgaggatgccgagtctaaacactcaatgagcatgtttactctccggggacgatacgaagaagaaatccggtgcgttgtggagcagctgactcgcaccgaatcaacactgcaggctgagaggagccgggtgctgtctcagctggacgcctcagtgagggatcggcaggatatggaaaggcatcacggggagcagatccagacactggaggatcgctttcagcttaaagtgcgagagctgcaaaccatccatgaggaggaacttcgaaccctgcaggaacattatagccagtccttgcggtgcctacaggacacactttgtctccatcaaggtccccaccctaaggcacttcccgccccagcgccaaactggcaggccactcagggtgaagcagactctatgaccggcctcagagagcgaattcaggaacttgaggcccagatggatgtcatgagggaagagctggggcacaaggatctggagggagatgctgctactctgcgtgaaaagtatcagcgtgatctcgaaagcctgaaggctacctgcgagagggggtttgccgcgatggaggagacccaccagaaaaagatcgaagacttgcaaaggcagcaccaacgggagctggagaagctcagggaagaaaaggacagactgttagccgaagagactgccgctacaattagtgctatagaggctatgaagaacgcacacagagaagaaatggaacgggagctggagaaatctcagaggtcacagattagctccgttaattctgacgtagaagcccttcggaggcaatatcttgaggaattgcagtccgtgcagcgggagctagaggtgctctccgaacaatacagccagaagtgcctggaaaatgcacatctagcccaggctctggaagctgaacggcaggcccttcggcaatgtcagcgagaaaaccaggagctcaatgctcacaaccaggaactaaataatagattggccgcagaaattacaaggctgcgaacactgctcactggtgacggcggtggggaagcaactggatcacccctggctcagggcaaggacgcctacgaattggaggtgttgctgcgcgtgaaggagagcgagattcagtatctaaaacaggagatctctagcctcaaggatgagttgcagactgctctgagagacaaaaagtacgcgtccgacaagtataaagacatttataccgaattaagcatcgcaaaggctaaggctgattgcgatatctctaggctgaaagagcagctgaaggccgcaaccgaggcattgggcgagaagtcccctgactccgccacggtgagtggctacgacattatgaaatcaaagagtaacccagactttctgaaaaaggaccggtcatgcgtcacccgtcagctccggaacataagaagcaaaagtgttatcgaacaagttagttgggacacctag

SEQ ID NO: 196223 - DNA, 840 bp, synthetic construct
  misc_feature 1..840: note = Description of Artificial Sequence: Synthetic coding sequence
  source 1..840: mol_type = other DNA
tgacaggaggccgagctgggcgagcccgaccccgagcagaagcggtctcgagcgcgggagaggcggagggagggcagatctaagaccttcgattgggctgagtttcggccgatccaacaagccctcgcacaggagcgggtcggtggggtgggaccagctgacacacacgagcctctcagacccgaagcagagcccggcgagctggagcgcgaacgagcacggagacgcgaagaacggcgcaaaagattcggtatgctagatgcaactgacggacctggcactgaagatgcagcactgaggatggaagtggacaggagtcccgggttacccatgagcgacttgaaaacccataatgtgcacgtcgaaatcgaacaaaggtggcaccaagtggaaacgactcctctgagggaagagaagcaagtccccatcgctcctgtacacctctcttcagaagacggaggcgatcgactttctacccacgagctcacatccttgctggagaaagaattggagcagtcacagaaagaggctagcgaccttttggaacagaaccggcttctgcaggaccagttacgcgtggcgctgggcagagagcagagcgccagagaaggttatgtgcttcaaaccgaagtcgccgcgtctccgtctggggcttggcagcgcctgcatagagttaaccaagatctccagtctgagctggaagcccagtgtcagaggcaggagctgattacccaccagatccagactcttaagcgctcttacggcgaggctaaggatacaattcgacaccatgaagccgagatacgcagcttgcaggcccgcctcagcaacgccgcttag

SEQ ID NO: 196224 - DNA, 585 bp, synthetic construct
  misc_feature 1..585: note = Description of Artificial Sequence: Synthetic coding sequence
  source 1..585: mol_type = other DNA
ctgcggcagcagaccgtggaggagctgcagagcgtgcagcgggagctggaggtcctgtcggaacaatattctcagaagtgcctggagaacgcacatctggcccaagcactcgaagctgagcggcaggccctcaggcagtgccagcgtgaaaaccaggagctgaacgctcacaaccaagtattgcttcgtgtgaaggagagcgagatccagtacctcaaacaggaaatcagcagccttaaggatgaacttcagactgccttgcgggataagaaatacgcaagcgacaagtataaagacatctacaccgagctgagcatcgcgaaggcgaaagccgactgcgacatcagcagactgaaggaacaactgaaagcggcgacagaggcgttgggagaaaaatcccccgactccgcgacagtttccggctatgacattatgaagtccaagtcaaatcctgatttcctgaagaaagatcgctcctgtgtgaccaggcagttaagaaatataaggagtaagagcttaaaagagggtttaaccgtccaggagagactaaagctgtttgaatcccgtgacctgaaaaaggactag

SEQ ID NO: 196225 - DNA, 3003 bp, synthetic construct
  misc_feature 1..3003: note = Description of Artificial Sequence: Synthetic coding sequence
  source 1..3003: mol_type = other DNA
atgagcgccgccaaggagaacccctgccggaagttccaggccaacatttttaataaatccaagtgtcagaattgcttcaaaccacgagaatcgcatctgctcaacgacgaggacctgacccaggccaaaccaatctatggaggatggctgctgttagccccagacggaacagactttgataatcctgtgcaccgcagtaggaaatggcaacggagattttttatcctctacgaacatgggctgcttagatacgcgctggatgaaatgcctactaccctaccacagggtaccatcaacatgaaccagtgcacagatgtggtcgatggtgagggtaggacaggacaaaagttctccttgtgtattttaaccccggaaaaagagcatttcattagagcggagactaaagaaattgtgtcggggtggctcgagatgctgatggtgtatccgcgtacaaataaacagaatcaaaaaaaaaaaagaaaagtggagccgcctacccctcaggaacccgggccagctaaagttgctgttaccagttcttcaagctcctcttcatcgagcagctccattccaagtgccgaaaaagtgcccactactaaaagcacactctggcaggaggaaatgcgaactaaggatcaacccgacggttcctcactctcccccgctcagtccccaagccagagccagccacctgcagcaagctctctgagggaaccggggctcgagagcaaggaggaagaatctgcgatgtcgtccgatcgtatggattgtgggcgcaaagtacgggtcgagagtggctacttctccctggagaagactaagcaggatcttaaagccgaagaacaacagctgccccctcccctgtcaccaccatccccgtcaacgcctaatcaccggcggtctcaggtgatcgaaaagttcgaggctttagatattgagaaggcggaacatatggaaacgaacgccgttggacccagcccgtcgagcgacaccaggcagggacgatctgaaaagcgggcatttccacggaaacgcccggacctgctcaattttaaaaagggttggctcaccaagcagtacgaagatggtcagtggaaaaagcactggttcgttctggctgaccagagccttcggtactaccgcgattccgtagccgaggaggcagctgatttggatggagaaatagatttgagcgcatgttatgacgttaccgagtatccagtgcagaggaattacggcttccagatacacaccaaagagggtgagtttactctttccgcaatgacgtctggcatccgccgaaattggattcagactatcatgaagcatgtgcacccgacaacagccccagacgtcacttcctccctaccggaggaaaaaaataagagttcgtgttccttcgagacttgcccccgacccactgagaagcaagaggccgagctgggcgaacccgatcctgaacaaaagagatcgagggctcgcgagaggcgtagggaaggacgctcgaagacctttgactgggcagaatttcgcccgatccagcaagcactcgcgcaggagagggtcggcggagttgggcctgcagatacccacgaacccctgcgccccgaggctgaacccggcgaacttgagcgcgagcgcgcccgtcggagagaggaacgacgcaagcggttcggtatgctagatgccaccgacggacctggcactgaagacgccgctcttaggatggaagtggaccggtcgcctgggcttcctatgagcgatttaaaaacacacaacgtccatgtggagatcgaacagcgctggcaccaggtcgagactactcccctgagagaggaaaaacaggtccctattgctcccgttcacttatccagcgaggatggaggggaccgcctgtccacccacgaactgaccagcctgttggagaaagaactggaacagagccagaaggaggcatcagatctcctggagcagaacagactcctccaagatcagctaagagtggctctgggtagggagcagtccgcccgcgagggctacgtgctgcaggccacatgtgagcgcggctttgcagcaatggaggaaacccatcagaaaaagattgaagacctgcagaggcagcaccagagggaactggagaaattgagagaagaaaaagatcggctgctggcagaggagactgcggccacgatttccgctattgaagctatgaagaacgcgcaccgcgaggaaatggaaagagaactggagaaaagccaacggagtcaaataagcagtgtgaattccgatgttgaagctcttagacgccaataccttgaggagctccaatcagttcagcgtgagctcgaggtcctgagtgagcaatattctcagaagtgcctggagaatgcccaccttgctcaggctctggaagcagaaaggcaggctctccgccagtgtcaacgagaaaaccaggagctgaatgcccataaccaggagcttaataaccgcttggccgctgaaatcactcggcttcgcacgctgcttacgggagacggaggcggtgaagccacaggaagcccactggcacagggcaaggacgcgtacgaacttgaggtcttgcttcgagtgaaggaaagtgaaatccaatatctaaagcaagagatctccagtctgaaagacgaactgcagacagcacttcgggataagaagtacgctagcgataaatataaagatatttacactgaactgtcaattgccaaggctaaagccgattgcgatattagtcggttgaaggagcagctgaaggcagccacagaggctctcggtgagaagagtcctgactccgcaacagtgtcaggctacgatattatgaaatcaaagagtaatcccgacttcttaaagaaagacagatcttgcgtgacgcggcagttgcgtaatatacggagtaagagcctcaaagagggcttgactgtccaagaacggctgaagttgttcgaaagtagagacttgaaaaaggactag

SEQ ID NO: 196226 - DNA, 795 bp, synthetic construct
  misc_feature 1..795: note = Description of Artificial Sequence: Synthetic coding sequence
  source 1..795: mol_type = other DNA
atggagaactacggcatcgagtggcacagcgtgcgggacagcgagggtcagaagcttttaattggtgtcgggccggagggcatctcaatctgcaaggacgacttcagccctattaatcgaatagcataccccgtggtgcagatggctacacagtccggcaaaaacgtgtacctcaccgttacaaaggaatccggtaactctatagttcttctattcaagatgatctcgactcgggctgcaagtggactgtatagagctatcacggaaacgcatgccttctaccgctgtgacacagtcacaagtgctgtgatgatgcagtattcccgcgatttgaaagggcacttggccagccttttcttaaatgagaatatcaatttgggtaaaaagtacgttttcgacatcaaaagaactagtaaagaggtctatgatcacgccagaagggccctttataacgccggagtggtcgaccttgtcagcaggaacaatcaatcccccagccattcccctctgaaatcatcggaatcttccatgaactgcagttcctgtgaagggctgtcttgccagcagaccagagtcctgcaggagaagcttcggaagcttaaggaggccatgctgtgtatggtgtgttgcgaggaagagatcaattccactttttgcccgtgcggccacacagtctgttgtgagtcatgtgcagcccagcttcagagctgccctgtctgtaggtctcgcgtggagcatgtccagcacgtttatctccccacacacacctcattgctgaacctcaccgtcatttag

SEQ ID NO: 196227 - DNA, 1338 bp, synthetic construct
  misc_feature 1..1338: note = Description of Artificial Sequence: Synthetic coding sequence
  source 1..1338: mol_type = other DNA
atgctgtgctacgtgacccggcccgacgccgtgctgatggaggtggaagtagaagccaaggcaaacggtgaggactgcctgaaccaagtttgccgtcgccttgggatcatcgaggtggattactttggcctgcagtttacaggctctaagggggagtccctgtggctgaacttgaggaatcgtatttctcaacaaatggatgggctggcaccatataggctcaagttgcgagtaaagttttttgtcgaaccacacctaatccttcaggagcagacaaggcatatattcttcctgcacatcaaggaggctttgttggcaggccatctattgtgctccccagagcaggccgtcgagctctccgcgctcctcgcccagaccaaatttggagactataatcagaacacagcgaagtacaactatgaggaactctgcgctaaggagctgagcagcgcgactttaaattctatcgtggccaagcacaaggagttggagggaacctctcaagcatcagcggaataccaggtcctccaaatcgtttcagccatggaaaactatggaatagaatggcactccgtgcgtgactcagagggccaaaagctattgatcggcgtcgggccggaaggtatttccatttgcaaggatgatttttcccccattaaccggatagcttaccctgtcgtgcagatggcaactcagtctggcaagaatgtgtacctcaccgttacgaaagagagtggtaactccatcgtactgctgttcaagatgatcagcacacgcgccgcgtcggggttgtatcgggctattaccgagactcatgcgttctaccggtgcgacacagttacttctgccgtcatgatgcagtacagcagagatctaaagggccacctggcttctctgtttctcaatgagaatataaacctgggtaagaagtacgtctttgatatcaagcggacttctaaggaggtgtacgatcatgcccgtagagccctctacaacgcaggggtagtggaccttgtgagccgcaacaaccagtcccctagccattccccattaaagagctctgagtccagcatgaactgttcaagctgcgagggattatcttgccagcagacacgagttctccaagagaagctgcgaaagctcaaggaggcgatgctgtgtatggtttgctgtgaagaagaaattaactcgacattttgcccttgtggacacaccgtctgttgtgagagctgcgctgctcaattgcaatcttgtccagtttgccgctcgcgtgtcgagcacgttcagcacgtgtacttgccaacgcacactagccttctcaacctgaccgtgatctag

SEQ ID NO: 196228 - DNA, 5487 bp, synthetic construct
  misc_feature 1..5487: note = Description of Artificial Sequence: Synthetic coding sequence
  source 1..5487: mol_type = other DNA
atggccgccagcgagctgtacaccaagttcgcccgggtgtggatccccgaccccgaggaggtttggaagagcgcggagctcctgaaagactataaacccggggataaggtgcttttgctgcacctggaggaaggtaaggatttagaataccatttggatccaaagactaaggagctaccccatctaaggaaccctgacatactggtaggggagaatgatctgaccgccctcagctacctgcatgagcccgcggttctgcataacctgagagtcaggtttatcgattctaaactgatctatacctattgcggcatcgttttggtggccatcaatccttatgagcagctccccatttatggcgaagatataattaatgcttattcggggcagaacatgggggatatggatcctcatatcttcgcagtagcagaagaggcgtataaacagatggcaagggatgagcgaaaccagtctattattgtttccggagaaagtggggctggtaagaccgtcagcgctaagtatgctatgcggtactttgccactgtctccggaagtgcgagcgaagctaatgtcgaagaaaaggtcctcgcaagcaacccgatcatggaaagtataggcaatgccaagacaacacgcaacgataactcctcccgcttcggtaagtatattgagattggcttcgataaacgctatcgcattataggcgctaacatgcggacgtacctgctcgaaaaatcacgagtggtgtttcaggcagaggaagagcggaactatcacattttctaccagctctgcgcgagcgccaagctgcctgagtttaagatgctgcgtctggggaatgctgataactttaattacacgaaacagggaggatctcccgtgatagagggcgtggacgacgcaaaggaaatggcgcacacccgccaggcctgtacactcctgggaatatcagaaagtcaccagatgggcatttttcggatcctggcaggtatcctgcacttgggcaatgtagggttcacatctagagatgccgattcctgtacaattccacctaaacacgagccgctctgtattttctgtgagttgatgggggttgactacgaggaaatgtgccactggctatgccaccggaaactggccactgcaactgagacctacattaagccaatttctaagctacaggctaccaacgccagagacgctctggctaagcacatctatgccaagctgttcaattggatcgtggataacgtgaaccaggctctccattctgccgtgaagcaacattctttcatcggggtgttggacatatatgggtttgaaacatttgagattaatagttttgagcagttctgcataaattatgccaacgagaaactgcagcagcagtttaatatgcacgtgtttaagctggaacaggaggagtatatgaaagaacagatcccgtggactctgatagacttttacgacaatcagccgtgtatcaatctgatcgaatccaagctgggaattttggacctcttggatgaggagtgtaagatgcctaaggggacagacgacacctgggctcaaaaattgtacaacacacatttaaacaaatgcgccctcttcgagaaaccccgtctgtctaacaaggcattcataattcagcactttgcagataaagtcgaatatcagtgtgaggggtttctggaaaagaataaagacaccgtgtttgaggagcagatcaaagtactgaaaagttccaaatttaaaatgctgcctgaactcttccaagatgatgagaaggccatatcccctacgagcgctacatctagcggcaggacccctctcacccgcacccccgcgaaacccacaaaggggagacctggacagatggcgaaggagcataaaaagacagtgggccaccagttccgtaatagcctgcatctcttgatggagactctcaacgccaccacgccacattacgtcagatgcataaaacccaatgatttcaaattccctttcacatttgacgagaagcgagctgtacaacagctgagggcctgtggagtgttagagaccattcggatcagcgcggccggctttccctcaaggtggacttaccaggagtttttctcaaggtacagggtactcatgaaacaaaaggacgttttgtcggacagaaagcagacgtgtaagaacgtgttagagaaactcattttggacaaagacaaatatcaattcggtaagaccaaaatcttcttcagggccggccaagtggcttacctcgaaaagctacgcgccgacaaactacgcgctgcttgcattagaatccaaaagacgatacgcggttggctcctaagaaaaaaatacctgcggatgcggaaggctgcgatcacgatgcagcgatatgtccggggatatcaggctagatgctacgctaaatttctacggagaacaaaggcggcaactattatccaaaagtactggcgtatgtacgtggtccgacgacgatataagatccgccgcgccgccaccattgtgctgcagagctacctgagaggcttcctcgcgcgaaaccgctaccggaagattctgcgagaacataaagcagtgatcatccagaagcgcgtacggggatggctagcacgtacccattataaacggagtatgcatgccatcatctacctgcagtgttgcttccggcgcatgatggcaaagagagaattgaagaagctcaagatcgaggccagaagtgtggaaaggtataagaaactacacataggcatggaaaacaagatcatgcaactgcagaggaaggtagatgagcagaacaaggattataagtgtctcgtggaaaagttaactaacctagagggaatctacaacagtgaaacggagaagctgagaagcgacctagagcgtctccaattgtccgaagaggaggccaaggtcgcgacggggcgggtgctcagtctgcaggaagagatcgccaagctcaggaaagatctggagcagacaaggtccgagaagaagtgcatagaggagcatgccgacagatacaaacaagagacagaacaattggtgtccaacttgaaggaggagaacacacttctaaaacaggagaaggaggcccttaatcaccgaatcgttcagcaggccaaggagatgactgagactatggagaagaaactggtggaggagaccaagcagctcgagctcgacctcaacgatgaacgactgaggtaccaaaatctcctcaacgaattctcccggcttgaagaaagatatgacgacctcaaagaggaaatgactttaatggtgcacgtccccaaacctggtcacaaaagaacagacagcactcactcatctaatgagtcagaatatattttctcatccgaaattgccgagatggaggatattccatctcgtacggaagagccttccgagaaaaaagtgcccctcgacatgtcactgttcctaaaactgcagaaaagagtgaccgaactggagcaggagaagcaagtgatgcaagacgagctggataggaaggaagagcaagttctgagaagcaaggctaaggaggaggagcgtccccagatcagaggggcggaactggaatacgagtctctcaagcgacaggagctcgaaagcgagaacaagaaactcaaaaatgagcttaacgagctcaggaaggccctgtctgaaaagtctgcccccgaggtaaccgcaccgggcgcgcccgcttacagagtactaatggagcagctgactagcgtctcagaggaactggatgttagaaaggaagaagtgctgattttacgcagtcagttggtaagccagaaggaggcaatccagcctaaagacgataagaatactatgactgattccaccatcctgctggaggacgtgcagaagatgaaggataaaggagagatcgctcaggcgtacattgggttaaaagaaactaaccgactactggaatcacaactgcagtcccaaaagcggtctcacgaaaatgaggctgaagccctacggggagagatccagtctctgaaagaggaaaataaccgccagcagcagctgctggcacagaacttgcagctgccaccagaggcccgaattgaagcgtcattgcagcacgagatcaccagacttactaatgagaatttggacctgatggaacaactagaaaagcaggataaaacagttaggaagctgaagaagcagctgaaggtatttgcaaagaagataggtgaactagaggtgggacagatggagaacatctcgcctggacagataatcgatgaacctattagacccgtcaatatccccaggaaggagaaagattttcagggaatgctggaatacaagaaggaagacgaacagaaactggttaagaacctaatcctggagctcaagcccagaggggtggcagtgaacctgataccagggttgcctgcctacatcctgttcatgtgcgtacgccacgctgattacctcaacgacgaccagaaggtgagaagtctcttgaccagcacaattaactccattaaaaaagtgctcaagaagcgtggcgacgatttcgagaccgtatcgttttggctcagcaatacgtgtagattcctgcactgcctgaaacaatatagtggagaggaggggttcatgaaacataatactagccgccagaacgagcattgtttaacgaatttcgacctggcagaatatcggcaggtactgtcagatttggcaatccagatctatcagcagctggtaagggtcctagagaatatcctgcagccaatgatcgtttcaggcatgcttgaacatgaaaccatccaaggggtgtctggcgtaaaacccacagggctgcggaagaggactagctcaatcgcagatgaaggcacctacactttggatagtattctgcggcagcttaactcatttcactccgtcatgtgccagcacggtatggatccagagcttataaagcaggtggtgaagcagatgttctatattataggagccattaccctgaataacctgctcctaagaaaggatatgtgcagctggtctaagggcatgcagattcgctataatgtttctcagctggaagagtggcttagggataagaacctgatgaattcaggcgcgaaagagacgcttgaacccttgatccaggcggctcaacttctccaggtgaaaaagaaaactgacgacgatgccgaagctatctgttcaatgtgtaatgccctgacaactgcgcagattgtcaaagtgcttaatctttacacaccagtcaacgagttcgaggaaagagtgtccgtttcctttatcagaacaatccagatgagattacgggatcggaaagacagcccacagttattgatggacgccaaacacatcttccctgtgactttcccgttcaacccatcctcattagctcttgaaacgatccagatccccgcgtctctgggactgggtttcatatctcgggtgtag

SEQ ID NO: 196229 - DNA, 5643 bp, synthetic construct
  misc_feature 1..5643: note = Description of Artificial Sequence: Synthetic coding sequence
  source 1..5643: mol_type = other DNA
atgaagagcagcagcctggagaccatgttcgcccgggtgtggatccctgatcctgaggaagtgtggaaatctgcagaactccttaaggactacaagcctggtgataaggtgcttctcctccacttggaggagggcaaagatcttgaataccatttggatccaaaaactaaggagctaccgcacctacggaatcctgacatacttgtgggagaaaatgacctgactgccctgtcatatctgcatgaaccagctgttctgcacaacctgcgggttcgcttcatcgactcaaagctgatatatacgtactgcggtatcgtcttggtggctatcaatccatacgaacaattgccaatttatggagaggacatcataaatgcatactctgggcaaaatatgggggacatggatcctcacatttttgcggtagcagaggaggcctataagcagatggctcgggacgaacgtaaccagagtatcatcgtgtctggtgagtctggggcggggaagaccgtgtctgccaagtacgccatgcgctatttcgctacagtcagtggctccgccagtgaagcaaatgtggaggagaaggtcctggcttccaaccctatcatggaaagcataggcaacgcgaaaactactcgcaatgataactcctcccggtttggcaaatacattgagattggctttgataagaggtatcgaatcattggcgccaatatgcgcacctaccttctcgaaaagagcagggtggttttccaggcagaagaggaacggaattatcacatattctaccagctgtgcgcgagcgcaaaactccccgagtttaaaatgctgcgcctgggaaacgcagacaacttcaactacactaagcaggggggatctccagttattgagggagttgatgatgcaaaagagatggcacacacaagacaggcgtgtactctcctggggatcagcgaatcccaccagatggggatcttcagaatcctggcaggcattctacacttgggtaatgttggttttaccagtcgggatgccgacagctgtacgatccctccaaaacatgaacctttatgtatcttctgcgagctcatgggtgtggattacgaggagatgtgccactggctttgtcatcgcaagcttgcgacagccacagaaacatacattaaacctatatccaagctccaggccactaatgcaagagatgccctcgcgaaacatatttacgccaaactgttcaactggattgttgataacgtgaaccaggctctgcactcagccgttaagcagcattcttttatcggcgtgctggacatctatggctttgaaacatttgaaataaacagtttcgaacagttttgcattaattacgcaaacgagaagctacaacagcagttcaacatgcatgtcttcaagttggagcaggaggaatatatgaaggagcaaattccctggacgctcatagacttctacgataaccagccatgcataaaccttatagaatccaaattaggtatcttggacctgctagatgaagagtgtaagatgcccaagggtaccgacgatacctgggcccagaaactgtataacacccacctgaataagtgtgcattgtttgagaaacctaggctgagtaacaaggcttttatcatccagcatttcgctgacaaagtggaatatcaatgtgaaggcttcctggagaaaaacaaagatacagtgttcgaggaacaaattaaagtgctcaaatcaagcaagtttaagatgctgccagaattatttcaggatgacgagaaagctatcagcccaactagtgcaaccagttcagggcggaccccactaacccgaactccagccaagcccaccaagggacgacctggtcaaatggctaaggagcacaaaaagaccgtgggtcaccagttccggaactctttgcacctactgatggaaacactgaacgctactactcctcactacgtccgatgtataaagccaaacgactttaaattcccgttcacctttgacgaaaaacgggcggtccagcagttaagagcttgcggagtcctcgagacaatccggatctctgctgccggattccctagccgctggacttatcaggaatttttctctcgatatcgcgtactgatgaagcagaaggacgtcctgagtgaccgaaagcagacatgcaaaaatgtactggagaagttgattcttgataaagataaataccagtttggtaaaacaaaaattttctttagggctggtcaggtagcctacctggaaaaactccgggcagacaaattgagggcagcttgcatcagaattcagaaaacaatacgcggctggctgctgcgcaaaaaatatcttaggatgcgcaaagccgcaattactatgcagcggtacgtgaggggctaccaggctcggtgctacgccaagttcctccggcgcactaaggctgccacaatcatccagaaatactggcggatgtatgttgttcggcgcagatataaaattcgcagggcagccacaatagttttacagagctatttaaggggatttttagcccgcaaccggtacagaaagatactgcgcgaacacaaggccgtgatcattcaaaaaagagtccggggatggttggcgcgaacacactacaaacgaagcatgcacgctatcatctatttgcagtgctgtttcaggagaatgatggccaaacgcgagttgaaaaagctgaaaatcgaagcgcgtagcgtggaacggtataagaaactccacattggaatggaaaataagattatgcagctgcagaggaaggttgacgaacagaacaaggattacaagtgtcttgtggaaaaactcacaaacttagaaggtatatacaactcagaaactgaaaagctgcgatctgatctggaaagacttcaactctctgaggaggaggccaaagtcgctacagggagagtgttgtccctccaagaggagatcgccaagctgcggaaggatctggaacagacccgatctgagaagaaatgtattgaagagcatgccgatcggtataagcaggaaacagaacagctcgtgtcaaatcttaaggaagaaaacaccctcctgaaacaagagaaggaggccctcaatcacaggatagtccagcaggctaaagagatgaccgagaccatggagaagaaattggtcgaggaaacaaaacagttagagctggacctgaatgatgagcgcctacgttaccaaaacctgctgaatgagtttagcagacttgaggagcggtacgacgacttgaaggaggaaatgaccctgatggtccacgtccccaagccaggccacaagcgcacggacagcacccattcgtcgaacgagtcagaatatattttctcaagtgagattgcagaaatggaagacatccccagccgcacagaggagccaagtgagaagaaagtgcccctggacatgtcactgttccttaagctacagaagcgggtgactgaactggagcaggagaaacaggtgatgcaggatgaactggatcggaaggaggaacaggtgctgagatccaaagctaaggaagaagagagaccccagattcgtggtgccgagcttgagtacgagtcgctgaaacgacaggaactggaaagtgagaataaaaaactgaagaatgaactgaacgagttgcgtaaagccctttcagagaaatcagcccccgaagtcacggcccccggggcccctgcatacagggtcttgatggagcagctcacatccgtgtctgaagagcttgacgtccggaaggaagaagtcttgatactgcggtctcagctggtgagccagaaggaggcaatccagccgaaactgcacgagaacaccatgactgattccacaatcctccttgaggatgttcagaagatgaaagacaagggtgagattgcccaggcctacattgggctgaaagaaactaataggtctagcgcgctggactaccacgagctgaacgaagacggtgaactttggctagtctatgagggcctgaagcaagcaaacaggttgcttgagtctcagctgcagtcacagaaacgcagccacgagaatgaagcagaagctctcaggggagaaattcagtcactgaaggaggaaaacaacagacaacagcaacttctggcgcagaatctgcagctccctccggaagcgaggatcgaagcctctctgcagcatgaaataaccaggttgactaacgaaaatctatatttcgaagagctttacgcagatgacccgaaaaagtaccagtcctatcgaatttctctttataagcgcatgatcgatcttatggagcaattagaaaagcaggacaagacagtgcgcaagcttaaaaagcagttaaaggtgttcgccaaaaagatcggggagctggaggtagggcaaatggagaacattagccccggccagatcattgatgagcccattcggcccgttaatattccgcgaaaggagaaggatttccaggggatgctggagtacaaaaaagaggatgagcaaaagctggtcaagaacctaatcctcgaactgaaacctagaggtgtcgcagtgaacctgatcccgggtctaccagcatatattctgttcatgtgcgtgcggcacgcagattacctcaacgatgatcagaaggtaagatccctgctcacgtctactatcaactctatcaaaaaagtactcaagaagcggggagatgacttcgagacagtaagcttctggttgtctaacacatgcagattcctccattgcctcaagcaatatagtggcgaggagggattcatgaaacataacacatcaaggcagaacgaacactgcttaactaacttcgaccttgccgagtacaggcaggtgctgagtgacttggcgatccaaatatatcagcaactggttagagtactagagaacatcctccagcccatgatcgttagcggaatgctagaacacgagacgatccagggagtttccggagttaagcctacaggcctgcgaaagagaaccagcagcattgccgacgaaggcacctataccctggactcgatcttgcggcagctgaactcctttcactcagtgatgtgccagcacgggatggatcctgaactgataaaacaggttgtgaagcagatgttttacattattggggccattactctgaacaacctgcttcttaggaaggatatgtgtagttggtccaaggggatgcagatccgctataatgtgagccaacttgaggagtggctacgcgataagaatctaatgaattccggggctaaggaaactttggagcccctaatccaggcggcacagctcctccaggtgaagaagaaaaccgatgacgatgccgaggccatatgttcaatgtgtaatgctctgacaactgctcagatagttaaggtgctgaacctgtatacacctgtaaacgaattcgaggagagagttagcgtgtcatttatcaggaccatccagatgcggctgagagacaggaaggactctccacagctgctcatggatgcgaaacatatttttccagtcacctttccttttaacccctcaagccttgctttagagaccattcagatccctgcatctctggggctggggttcatatccagagtgtag

SEQ ID NO: 196230 - DNA, 4089 bp, synthetic construct
  misc_feature 1..4089: note = Description of Artificial Sequence: Synthetic coding sequence
  source 1..4089: mol_type = other DNA
atgcacgtgttcaagctggagcaggaggagtacatgaaggagcagattccatggactttaattgacttctacgacaaccaaccctgcattaacctcatcgaatccaaactgggcatactggacctgcttgacgaagaatgcaagatgcctaagggcaccgatgatacctgggcccagaaactgtacaacacacacctgaacaaatgtgccttgtttgagaaaccccgactgtccaataaggcctttatcatccaacacttcgccgataaggtcgagtaccagtgtgaagggtttctggagaagaataaagacacagtgttcgaggagcaaatcaaagtgcttaagtccagcaagttcaaaatgcttcccgagctttttcaagacgatgaaaaggcgatctcacccacctctgccaccagttccgggcgtacacctctcacccgcacaccggctaaacccacaaaaggccgccccggccagatggctaaagagcacaagaagacagttggccaccagttccgtaattctctccacctactgatggagactctgaacgctacgactccacattatgtccgctgcataaaacccaatgacttcaaattcccctttacatttgatgaaaagagggccgtacagcagctgcgagcctgcggcgtcctcgaaacaatcagaattagcgccgcagggtttccaagccgctggacgtatcaagaattcttttcacggtaccgggttctgatgaagcagaaggacgtgcttagcgacaggaaacagacctgtaaaaatgtgcttgagaagttaatcctcgacaaggataagtaccagttcggcaaaacgaaaattttttttagggcagggcaggtggcctaccttgagaagttgcgggctgacaagctcagggcagcatgcatacgcattcagaaaacgattcgcggctggctgttacgcaaaaagtacctgagaatgaggaaggcagcaattaccatgcaaagatatgtgcgaggataccaggcccgctgttacgcaaagttcttgcgacggacgaaggccgcgacaatcatacagaaatattggaggatgtacgtggtgcggaggcgatataaaattcggagagcagccacgatagttttgcagtcttatctgcgcggctttctagcaagaaacagatatcggaaaattcttcgcgagcacaaagccgtgatcattcagaagagagtgcgcggctggttggctcggacccattacaagaggtccatgcatgccatcatctatctgcaatgttgtttcagaaggatgatggccaaaagggaattgaagaagctgaaaattgaggcacggtctgtggagcggtataaaaagctccacatcggcatggaaaacaagatcatgcagcttcaaaggaaagtggacgaacagaacaaagattataagtgcctggtggagaagctgaccaatctggaggggatctataacagcgaaactgaaaaactcagatctgacctcgagcgtctccaacttagcgaggaagaggcaaaggtcgctaccgggagagttctctctcttcaggaggaaatagcgaaactccggaaagacctcgagcagacgcggtcggagaaaaagtgtattgaggagcacgcggataggtacaagcaggaaacggagcaactggtatcaaacctaaaggaagagaacactctgctgaagcaggagaaggaagcccttaaccaccgcatagtccaacaagccaaggaaatgaccgagactatggagaagaaactggtcgaagaaaccaagcagctggaactggatctgaacgacgagcgattaaggtaccaaaaccttctgaatgaatttagccgcttggaagaaaggtatgatgaccttaaagaggaaatgacactgatggtgcatgttccaaagccgggccataaacgaacggattcaacacattctagcaacgagtccgaatacatcttctcatcagagattgctgagatggaggacatcccttcaagaactgaggaaccttccgagaagaaagtgcccctggatatgagcctattcctaaaactccaaaaacgggtcaccgagctcgaacaggaaaaacaggttatgcaggacgaactagatagaaaagaggaacaggttctgaggagcaaagcgaaagaggaagaaaggccccagatccgaggcgccgagttggaatatgagagtcttaaaagacaggaactggagagcgagaataagaaacttaagaatgagctgaacgagttgcgcaaggcgctgagtgagaagtctgcccccgaagttaccgcaccaggcgctccagcataccgggtcctcatggagcagctgacgtcagtgtcagaggaactcgacgtaagaaaggaagaggtgctgattctgcgatcgcagctggtgtcgcagaaagaggccatccagcccaaggacgataagaacaccatgacagacagtaccattcttttggaggacgtacaaaaaatgaaggacaagggagaaattgcgcaggcctacatcggactgaaggaaaccaataggctcctagagtcacagctgcaatcccaaaagcgcagccatgagaacgaagccgaagccttgcggggggagatccaatctcttaaagaggagaacaaccgacagcaacagctcctggctcagaatttgcaactgccccctgaggctaggattgaggctagcctacagcatgagataacccgcctgacaaatgagaacctggatctgatggagcaactcgaaaagcaagataagactgtccgcaagcttaagaaacagctcaaagtgttcgccaaaaagatcggcgagctcgaggtgggacagatggagaatatttcccctgggcaaatcatcgatgagcccataaggccagtcaatattcctaggaaggagaaggacttccagggaatgctcgagtacaaaaaggaggatgaacagaagctcgtgaaaaatctcattctcgaactcaagcctagaggggtcgccgttaatctgattcctggactgcccgcctatatcctttttatgtgtgttcgccatgctgactacctaaacgacgatcaaaaggtgcgcagtctgttaacaagcaccattaacagcattaaaaaagttctcaaaaaacggggagacgacttcgaaactgtgtctttctggttaagtaacacctgtcgcttcctgcattgtctgaagcagtattcgggggaagagggctttatgaagcacaacacctcccgccagaatgagcactgtctcaccaacttcgatctcgccgagtacaggcaggtgctgagtgacctggccatccagatatatcagcagctggtgagagtgctcgaaaatatcctgcagcctatgatcgtgtctggaatgttggagcacgagacaatccagggggtatcaggggtgaagccgactggcttaaggaagaggacctcctccattgccgatgaggggacctatactttagactcaatactgaggcaactcaactcattccattccgtgatgtgccagcatggcatggacccagaattgattaagcaggtggtcaagcagatgttttacataattggcgcgataacactaaataacctgctgctgcggaaggacatgtgctcttggagcaagggtatgcagatccgatataatgtgagccagctcgaagaatggctgagagacaagaatttaatgaattctggcgctaaagagactctagaacccctcattcaggccgcccagctgctccaggtcaaaaagaaaacagatgacgatgctgaagctatatgcagcatgtgtaatgccctgactacagcccaaatagtcaaagttctgaacctctacacccccgtcaatgagtttgaggagcgagtgtccgtatcattcatccgcacaattcagatgcgacttcgagaccgcaaagattctccacaactactcatggatgccaagcatatttttccagtcaccttccctttcaacccgtctagcttggctctcgagacaatacagattcctgcttcgttgggcctcgggtttatctcacgggtctag

SEQ ID NO: 196231 - DNA, 5568 bp, synthetic construct
  misc_feature 1..5568: note = Description of Artificial Sequence: Synthetic coding sequence
  source 1..5568: mol_type = other DNA
atggccgccagcgagctgtacaccaagttcgcccgggtgtggatccccgatcccgaagaagtttggaaaagtgccgagctcctgaaggattacaagccaggagataaggttctactactgcatcttgaagagggtaaagacctcgaatatcatctggatcctaaaactaaggagttgcctcatctccggaatccggatattctcgtgggcgaaaacgaccttacagccctctcttacttacacgagccagcggtgctgcacaacctccgggtccgcttcattgattctaaacttatttacacgtactgcggtatcgtgctcgtggccatcaacccgtatgagcagctcccaatttacggggaagatataattaatgcttactccggacagaacatgggcgacatggacccccatatctttgccgttgccgaggaggcgtacaaacagatggcccgtgatgagcgcaatcagtctatcattgtctccggagagtcaggagctggcaagacagtaagcgccaaatacgcaatgcgctactttgcgaccgtttctggaagtgccagcgaggctaatgtcgaagagaaagtcctggcatccaacccgataatggagagtatagggaacgcaaaaaccacgagaaatgacaattcctcccggtttggcaagtacattgagatcggctttgataagcggtaccggattattggtgccaatatgaggacttatctgcttgaaaagtctcgggtggtgtttcaagcagaggaggagcggaattaccacattttctatcagctctgtgcgtccgctaagctccctgaatttaagatgttgcgtctggggaatgcagacaactttaattatacgaaacagggtggcagccccgtaatagagggggttgatgatgccaaggagatggcacacacccgtcaggcctgtacattgctagggatctccgagagccatcagatggggatattccgaatcctggcaggcattctgcatcttgggaatgtggggttcacctcacgcgatgcagacagttgtactatcccccccaaacacgagcccctgtgtattttctgtgaactgatgggggttgattacgaagagatgtgccactggctctgtcaccgaaaactggcaactgccactgagacatacatcaagccgatctccaagcttcaggcgaccaatgcccgggacgctctcgccaagcacatctacgccaaactatttaattggatagtggataacgtcaaccaagcccttcatagcgccgtgaagcagcattccttcattggggtgcttgacatatatggcttcgagacctttgagatcaacagcttcgagcagttttgtatcaactatgccaatgagaaactgcagcagcagtttaacatgcacgtgtttaaactggagcaggaggaatatatgaaggagcagataccgtggacactgattgacttctacgataatcagccttgcataaaccttatagagtccaagttgggaatacttgatctgcttgacgaggaatgtaagatgccaaaggggacggacgatacgtgggcacagaaactgtataatacccatcttaataagtgcgcgctgtttgagaagccaagactgagtaacaaagccttcataatccagcacttcgcggataaggttgagtaccagtgtgaaggctttcttgagaaaaataaagacactgtgtttgaggagcagatcaaagtcctgaagtctagtaagtttaagatgctacctgagctattccaggatgatgaaaaggccatcagccccacttcagccactagttccgggcgtacgccattgactcgtacaccagccaaacctacaaaagggcgtcctggccagatggcgaaggagcataagaagacggtggggcaccagtttcggaattccctacacctcttgatggaaacactcaatgccaccacacctcattacgtgagatgcattaaacccaacgactttaagtttccttttaccttcgatgagaagcgggctgtccagcaactgagagcatgcggcgtgctagagaccatacggatatccgctgccggcttcccatctaggtggacatatcaggagttcttctcgaggtatagagtcctcatgaagcagaaggacgtgctgtccgacagaaaacaaacctgcaagaacgtactggaaaagctcatcctcgacaaggacaagtatcagtttggcaagaccaaaatcttctttcgcgccgggcaggtcgcttatctggaaaagctgcgggcagataaactacgagccgcctgcattagaattcagaaaacgatcagaggatggctcttaaggaaaaagtatttgaggatgcgcaaagccgccattacgatgcaaaggtatgtgagggggtatcaggcacgttgctatgcgaaatttctgcggagaacaaaagccgcaactataattcagaagtattggaggatgtacgttgtgcggcgccggtataagattagacgcgccgctactattgtattacagtcctacctccgtggctttttggcacggaataggtaccgcaagattctccgtgaacacaaagcagtgatcattcagaaacgggttaggggttggttagcaagaacacactacaagcggtctatgcatgcaattatttatctgcagtgctgcttcaggaggatgatggccaagcgggaacttaagaaattaaaaatagaggctaggtctgtcgagcgctacaagaagctgcacatcgggatggagaataaaatcatgcagttgcaaagaaaagtcgacgaacagaataaggattacaagtgcctagtcgagaaactcactaacttggaggggatttacaactctgaaactgagaagcttcgttcggatttggagcgcctacagctgtctgaagaggaagcaaaagtagctactgggagggtactctcgctccaggaagagattgcaaagttgcggaaagacctcgagcagaccaggtcggaaaaaaaatgcatcgaggagcatgctgatagatataaacaggaaacagaacagctcgtttctaatttaaaggaagaaaacacactacttaagcaggagaaggaggcgttgaatcaccgcatcgtccaacaggctaaggagatgaccgagacaatggagaaaaagctcgtggaagagaccaagcaattggagctagatttgaacgacgaacgcctgaggtaccagaatctcctgaatgagtttagccgcttggaagaacgatacgacgacctaaaagaggagatgaccctcatggttcatgtccccaaacctgggcacaaacgaactgacagtacacactcttccaacgaatcggagtacattttcagcagcgagatcgccgaaatggaggacataccgtctagaaccgaggagccttctgaaaagaaggtccccctggatatgtccctgtttctgaaacttcagaaaagggtgaccgagctggaacaagagaaacaggtgatgcaggacgagcttgaccgcaaggaagaacaagtgctaaggtcaaaggcaaaagaagaggagaggcctcagatcaggggcgctgagctggagtatgaaagcctgaaaagacaagaactcgaaagcgaaaacaagaagctaaaaaacgagctgaacgaactgcgcaaagccctttctgaaaaaagtgctcccgaggttaccgcgcctggcgctccagcctatcgggtgctgatggaacagcttaccagtgtgtcagaggaattggatgttagaaaggaagaggtgctcatactgcgctcgcagttggtcagtcagaaggaggctattcagcccaaggacgataagaacacaatgaccgattctactatcctgttggaggacgtacaaaaaatgaaggacaagggagagattgctcaggcatatatcggactgaaggaaaccaatcgatcttccgccctggactatcacgaactgaacgaggatggagaactgtggctcgtgtacgaggggctgaaacaagctaatcggctcctcgaatcacaactgcagtctcaaaaaaggagtcatgagaacgaggctgaggctcttaggggcgaaatacagtccttaaaggaggagaacaacaggcagcagcagctgctagcccaaaatctgcaactgccacccgaagccagaatcgaagcttcgctgcagcatgagatcacgcgcctaactaatgaaaatctggacctgatggagcaattagaaaaacaggacaagaccgtacggaagctgaaaaaacagctaaaggtttttgctaagaagattggcgagctcgaggttggacagatggagaatatttccccagggcagatcattgatgaacctatccgtccggtgaacatcccacggaaggaaaaagattttcagggaatgcttgagtacaagaaagaagacgaacagaaactggtgaagaacctgattttggaattgaagcctcgtggagtggcggtcaacttgatccctggcctgccagcctatattctgtttatgtgcgtccggcacgcagattatctgaatgatgaccaaaaagtacgcagccttctgacatcgactatcaactctatcaaaaaggtgctcaaaaagcgcggcgacgattttgagactgtctctttttggctgagcaacacctgtagattcttgcactgcctcaagcagtactccggcgaggaaggcttcatgaagcacaatacatcccgacagaacgagcactgcctcacaaacttcgatttagcagaatatagacaggtgctgtcagatctggcgatccagatctatcagcaacttgttagggtgctcgagaacatccttcagccgatgatagtcagtggtatgctggagcacgaaacgattcagggagtgagtggcgtcaagcctactgggcttagaaagagaacctctagcattgctgacgaaggtacttatacactcgactctattctgaggcagctgaattcctttcacagcgtgatgtgccagcatggtatggatcctgaactgatcaagcaggtagtgaagcagatgttctatattattggggctataactctgaacaacttgctccttcggaaggacatgtgctcttggtctaaaggaatgcagattcgatataatgtgagtcaactggaggaatggctgagggataagaacctaatgaactctggagccaaggaaacacttgaaccccttattcaggccgctcagctgcttcaggttaagaagaagactgacgacgatgcggaagcaatctgctctatgtgtaacgccttaacgacggcccagatcgtgaaagtgctgaatctgtacactcccgtcaatgaatttgaggaacgggtcagcgtctcatttatacgtactatacagatgagattgcgggaccgcaaggattccccgcagctccttatggacgccaaacacatttttcctgtcacattcccgttcaaccccagttctctggctctggaaaccattcagatccctgcgagcctgggactcggctttatctctagggtatag

SEQ ID NO: 196232 - DNA, 5559 bp, synthetic construct
  misc_feature 1..5559: note = Description of Artificial Sequence: Synthetic coding sequence
  source 1..5559: mol_type = other DNA
atggccgccagcgagctgtacaccaagttcgcccgggtgtggatcccagatccagaagaggtgtggaagtctgcggagctgcttaaagactacaaacccggggacaaggtcttgttgttgcatctggaggagggcaaggacctcgaatatcacctggatcctaaaaccaaagagctgcctcatctgcggaaccccgatatactggttggcgagaatgacctgaccgcactctcttatttacacgagcccgctgtgctgcacaatctgagggtgcgatttattgacagcaagttgatttacacctattgtgggatcgtcctcgtggctattaatccctacgaacaattgccaatctacggggaggacattattaacgcctactctggccagaacatgggcgatatggacccccatatctttgccgtcgcagaggaggcatataaacagatggcccgagacgaaagaaaccagtccatcatcgtgtctggcgagtccggcgccggcaaaaccgtctctgcgaagtacgcgatgagatacttcgcaaccgtctccggatcagcatctgaagctaacgtcgaggaaaaggtacttgcttctaacccgattatggagtcaatcggtaacgccaaaacgacacgaaatgacaattcatcgcgctttggtaagtatatcgaaataggctttgacaaacgctatcgaattatcggcgccaatatgcggacttacctgcttgaaaaatctcgcgtggtcttccaggctgaagaggaacggaactatcacatcttctatcagctgtgtgcttcagctaagctccctgagtttaagatgctgcggttaggaaatgcggacaattttaattacaccaagcaaggcggctcccccgtgatagagggggtggatgacgctaaggaaatggcacacacaagacaagcctgtacgctcctgggaatctccgaatctcaccagatgggcatctttagaattctggctggcatcctccacctggggaacgtcggtttcacttccagggacgctgattcgtgcaccatccccccaaaacacgagcccctgtgtattttctgcgaattaatgggtgtcgactatgaggagatgtgtcattggctatgtcaccgcaaactggcaacagctacagagacatacatcaaacccatctctaaactccaagccactaacgcaagggatgcactcgcaaagcatatctacgccaagctttttaactggattgtggacaacgtgaaccaggccctgcactctgcggtgaaacagcattcttttataggagtactcgacatttacgggttcgagacttttgaaattaattctttcgagcagttctgcatcaattacgctaacgagaagctgcagcaacagtttaatatgcatgtgttcaagctggaacaggaagaatacatgaaggaacagatcccatggacactgatagatttctacgataatcagccatgcattaatcttatcgaatcaaaacttggcatccttgacctcctcgatgaggaatgtaagatgccaaaggggaccgacgacacatgggcgcagaaactttacaatacccatctaaacaaatgtgccctattcgagaagcctcggctgtccaataaagcttttattattcagcatttcgcagacaaggtcgagtatcagtgtgaggggttcttagaaaagaataaagacactgtgttcgaggagcagatcaaggttctcaagtcaagtaaattcaagatgctgcccgagctgttccaggacgacgagaaagcgatttctccgaccagtgctacatcatctggcaggacccccttgactcgcacacccgcgaagccaaccaagggccgcccaggccaaatggccaaggagcacaaaaaaaccgtcgggcaccagttcaggaatagtttacatctgctgatggaaaccctgaatgccaccacccctcactacgtgcggtgcatcaaacctaacgacttcaagtttccctttacattcgatgagaagcgcgctgtgcaacaattacgggcctgtggcgtgcttgagacaatcaggatctctgccgctggttttccttctcgctggacttatcaagaattttttagtagatatagggtccttatgaagcagaaggatgtgctgtctgatagaaaacaaacttgtaaaaacgtgcttgagaagctgattttggacaaagataagtatcagtttgggaaaacgaaaattttctttcgcgcaggccaagtggcatacctcgagaagctgagagccgacaagttgagggcagcatgcatcaggatccagaagactataaggggttggctcctgcggaagaaatacctgaggatgcggaaggcggcaattaccatgcagagatacgtaagagggtaccaggcgagatgctacgccaagtttctgaggagaacaaaggctgccacaatcatccagaaatactggaggatgtatgttgtgcgcagacgatataaaattcggagggccgccactattgtcctccaaagttaccttcggggattcctggcccgtaatagatatcgcaagatactccgggaacacaaggccgtgattatccagaagcgggtacgcggttggcttgcaagaactcactacaagcgtagtatgcatgctatcatttaccttcagtgttgtttccgcaggatgatggccaagcgcgaactaaagaagctgaagatcgaggcacggtctgtggagaggtacaaaaaactgcacattggtatggagaataaaatcatgcagctacagagaaaggtcgacgaacagaacaaggattataagtgcctcgtggagaagctgacaaatctggagggaatctataattctgagaccgagaagcttaggagcgatctggagagactgcaattgtccgaggaagaggccaaggtggcgaccggtagagttttatccctgcaggaggaaatcgcaaagctgaggaaagatctggaacagaccaggtcggaaaaaaaatgtatagaagagcatgccgatcgctacaagcaggaaacagagcagcttgtcagcaatctcaaagaggaaaacacactccttaaacaggagaaagaagcacttaaccaccggatcgtccaacaggctaaggaaatgaccgagacaatggagaaaaaactggttgaggaaacaaaacagttagagttggacctgaacgatgagagacttcgctatcaaaacctgctcaatgaatttagtcgactggaggagcggtatgacgatctgaaggaagagatgaccctgatggtccatgtcccgaaacccggtcataaaaggactgacagtactcatagcagcaatgagagtgaatacattttctcttctgagatcgccgaaatggaagatatcccttcacggacagaggagccctccgaaaaaaaggtgccgctggacatgagtctttttctgaagctgcaaaaacgagtaactgagttggagcaggaaaaacaggtgatgcaggacgagttggaccgaaaagaagagcaggtgctgagatcaaaagccaaggaggaagagagaccccagattaggggtgccgagcttgaatacgagtctctgaaaagacaggaactcgagagtgagaacaagaagctgaagaacgagctgaatgagctgcgaaaggccctcagtgagaaatcggctcccgaggtgacagccccaggagctccagcgtacagagtgctgatggaacagctaacatccgtcagtgaggagctggacgtgcggaaagaggaggtgttgattcttcgctcccagctggtttctcagaaggaagctatccagccgaaaaataccatgactgactccactattttgctggaagacgtgcaaaagatgaaggataaaggggaaattgcccaggcttatatcggactcaaagagaccaatcgatccagcgccctggactatcacgagctcaacgaggacggggagctctggttagtgtacgaggggctcaagcaggcaaatcgactgttggagtcgcaattgcaaagccaaaagagaagccatgaaaatgaggcagaagcgcttcggggtgagattcagtctctgaaggaagagaataatcgacaacagcagcttctggctcaaaatctgcagcttcccccagaggccaggattgaagcatcactccaacatgaaattacacgcctgacaaatgaaaacttggacctaatggagcagctcgaaaagcaggacaaaactgtacggaaacttaaaaagcagttgaaagtcttcgcaaaaaagattggtgagcttgaggtggggcagatggagaatatcagccctggtcagataattgatgaacccatccggccagtgaatataccacggaaagagaaagatttccagggaatgctcgaatacaagaaagaagacgagcaaaagctcgttaagaatctgatcctggagttgaaaccaaggggcgtcgctgtgaatctgatacctggcctccctgcgtatatcttgttcatgtgcgtacgccatgctgattacctgaacgatgatcagaaggtacggagcctccttacctcaaccatcaatagtatcaaaaaagtgctgaaaaagaggggcgatgactttgagaccgtgagtttttggctgagtaacacctgtcggtttctgcattgtttgaagcaatattctggggaagagggatttatgaaacacaatactagcagacagaatgaacattgcttaaccaacttcgatcttgccgagtatcgacaggtcctctctgatctggccattcagatataccaacaactagtccgcgtgctcgagaacatcctgcagcccatgattgtgtccgggatgctggaacacgagaccatacagggcgtgtccggggttaagcctacggggctcaggaagcgcacgagcagtattgccgatgaaggcacctacacactagattcaattcttaggcagttaaactcattccattccgtgatgtgccagcacggcatggatccggagctcatcaagcaagtcgtgaagcaaatgttctatataatcggcgcaataacactcaataacctgctcctgagaaaggacatgtgctcatggagtaaagggatgcagatacgatataatgtctcccagttagaggagtggctccgggataagaatctgatgaatagcggcgccaaagagacacttgagcctcttatccaagccgcccagctgcttcaagtaaaaaaaaaaactgacgatgatgccgaagctatatgctctatgtgtaacgctctgacaactgctcagatagtgaaagtactcaacttatacacacccgtaaacgagttcgaggagagagtttccgtgagcttcatccgcactattcagatgcggctgcgcgaccgcaaggattctcctcagctgttgatggatgccaaacatatttttcccgtgactttcccgttcaatcctagttccctggccctcgagacaattcagattccagcatcactcgggcttggtttcatcagtcgggtgtag

SEQ ID NO: 196233 - DNA, 4377 bp, synthetic construct
  misc_feature 1..4377: note = Description of Artificial Sequence: Synthetic coding sequence
  source 1..4377: mol_type = other DNA
atgtgccactggctgtgccaccggaagctggccaccgccaccgagacgtacataaaacctatcagcaagctgcaggccacaaatgctcgagatgcgttggcaaagcatatctacgccaagctgtttaattggatcgttgacaatgtcaatcaagcactccattccgccgtcaaacagcattcctttatcggggtgctggacatttatggctttgagacattcgagataaacagcttcgaacagttttgcatcaattacgccaatgagaaattacagcagcagttcaacatgcacgtttttaaactggagcaagaggaatatatgaaggaacagatcccctggacactgattgacttctacgacaatcaaccatgcatcaacctaatcgaaagcaagctgggcatcttggacttgttggacgaggagtgcaagatgccaaagggcactgacgacacttgggcgcagaaactctataacacccacttgaacaaatgtgccttgtttgagaagcccaggttatcaaacaaggcctttattattcagcactttgctgacaaggtggagtatcagtgtgaagggttccttgagaagaacaaagatacagtgttcgaggaacagattaaagttcttaaaagctctaagttcaaaatgcttcccgagctgttccaggacgatgaaaaggccatctcacctactagcgccacaagcagcggccgtacccctctgactcgaacccccgcaaaacctaccaaaggaagacccggacagatggctaaggaacataaaaaaacagtggggcatcaatttcggaactccctccacttattaatggaaacattgaatgccaccaccccccactatgtgcggtgcataaagcccaacgacttcaaattccccttcacatttgacgagaagagggccgttcagcagctgcgagcatgcggagttttggagacaattaggatcagtgctgcagggtttccctcacgttggacgtaccaggagttcttctctaggtatcgcgtactgatgaaacagaaggacgtcctgtccgacagaaagcagacatgtaaaaatgttttggagaagctgatcctggacaaggacaagtatcagttcggcaagacaaagatattcttccgagccggacaggtggcatacctggaaaagctccgcgccgacaagctacgcgccgcctgtatccgcatccagaaaaccatccgcggatggctgctccgcaagaaatatctgcggatgagaaaggcagctatcaccatgcagaggtacgtcagaggataccaagcgcgttgctacgcaaagttcctgcgccggaccaaagctgcaacaattatccagaaatattggagaatgtacgtcgtgaggaggagatataaaattaggagggccgctaccatcgtgctgcagtcctacctacgtggctttttggctagaaacagataccggaaaattttgcgcgaacacaaagccgttatcatccagaaacgcgtcagaggctggctagctagaactcactataaacggtccatgcacgccataatttacctgcagtgttgctttcggcggatgatggccaaaagagagcttaaaaagctgaagattgaggctaggagtgtggagagatacaaaaagttacacattggaatggaaaacaagataatgcagctccagcgtaaagtcgacgagcagaataaagactacaaatgcctcgtggagaagctcactaatttagagggcatttataactctgaaacagaaaagctgcgtagcgacctggagagacttcagctgtcagaggaagaggcgaaggttgcgactggtagagtgttatctttgcaggaagagatcgcgaaactcagaaaagatctcgagcagacacgaagtgagaaaaaatgcattgaagaacatgcagatagatacaaacaggagaccgaacagctcgtctctaatctgaaggaagagaacactctcctcaagcaggagaaggaggcactcaatcaccgcatcgtccagcaggcaaaagagatgaccgagacgatggagaagaagttagtggaagaaactaaacagcttgagctcgatcttaatgatgaacgactccgctaccagaacctgcttaatgagttctcccgcctggaggagagatatgacgatctcaaggaggaaatgaccctgatggtccatgttccgaagccagggcacaagcggacggacagcactcactcatccaacgagtccgagtatattttctcttctgagatcgccgagatggaggatattccctcacgcacggaagagcccagtgagaaaaaggtacctctagatatgtccctctttctgaagctgcagaagcgggtgaccgagttggaacaagaaaaacaggttatgcaggacgagctggaccggaaagaggaacaagtgctgaggagcaaggcaaaagaagaggaacgccctcaaatccgtggggccgagctggaatacgagtctctgaagagacaggaactggagtcggagaacaagaagttgaagaatgagcttaatgaacttcggaaggcacttagcgaaaaatctgctccagaagtaaccgccccgggtgcgccagcctaccgcgtactcatggagcagctaacctcagtcagcgaagagctggacgtgaggaaagaggaggtgctgattttgaggagtcaacttgtaagccagaaggaagctattcaaccaaaactgcatgaaaacacaatgaccgattccactatcctcttagaagacgtgcagaaaatgaaagacaagggagaaattgctcaagcatatatcgggctcaaagagacaaacagattgcttgagtctcagttacagagccagaaacgctcacacgagaacgaggcagaggcccttcgtggagagattcagagcctgaaggaggagaataacagacagcagcaactgctggcgcagaacctccagctgccaccggaagctcgaattgaagcctccctccagcacgagattactaggcttaccaacgagaaccttgacctgatggaacagctggagaaacaggacaaaaccgtgcgcaaacttaaaaaacagcttaaagtcttcgccaagaagatcggggagttggaagttgggcagatggaaaacatcagtcccggccagataatagacgagccaataagacctgtgaatattcctcgaaaagagaaggatttccagggcatgctcgaatacaagaaagaggatgaacaaaaactggttaaaaacctcatcctcgagctaaaacctcggggtgtggcggtaaaccttatcccaggactgcccgcctacatcctgttcatgtgcgtgcggcatgccgactacttgaacgatgatcaaaaggtccggtccctgctcacttcaactattaactcaatcaaaaaggtcctaaagaagcggggagacgacttcgagaccgtgtccttttggctgtcaaatacatgccggttcctacactgcctcaagcagtacagtggtgaggaggggttcatgaaacataacacttctcgtcagaatgagcactgcctgaccaatttcgatctggccgagtatagacaggttctgagcgatctcgctattcagatctatcaacagctggtacgggtgctggagaatatccttcaacccatgatagtttccggtatgttagaacatgagactatccagggcgtttctggagtgaaaccaactggtctacgcaagcggactagttcaatagcagacgaaggaacttatactcttgactctatccttagacaactgaattcctttcatagcgttatgtgccagcatggtatggatcctgaactgattaaacaggtcgtgaagcagatgttttatattatcggggcaatcacactgaataacttgcttttgcgcaaggatatgtgtagctggagcaaaggcatgcagatacgctataatgtatcacagctagaggagtggctgcgcgacaaaaaccttatgaattcaggcgcaaaagagacattggaacccctgatccaggccgctcagcttctgcaggtcaaaaaaaagaccgacgacgacgccgaggccatttgttccatgtgtaatgccctcacaactgctcagattgttaaggtccttaacctttacacccctgtaaatgaattcgaggagcgtgtgagcgtctcctttattagaacaatccaaatgagactgcgggatcgcaaggacagccctcagttgttaatggacgcgaagcatatatttccagtgaccttcccctttaatccctcatccctcgctttagagaccattcagattcctgcctccttaggtctgggcttcatttcacgagtgtag

SEQ ID NO: 196234 - DNA, 5562 bp, synthetic construct
  misc_feature 1..5562: note = Description of Artificial Sequence: Synthetic coding sequence
  source 1..5562: mol_type = other DNA
atggccgccagcgagctgtacaccaagttcgcccgggtgtggatccctgatcctgaggaggtgtggaaatcagctgagcttttaaaagattacaaaccaggggacaaagtgctgctacttcacctggaggagggaaaggacctggaataccacctggacccgaagacaaaagagctgccacacttacggaaccctgacatcttggttggggaaaatgacctaaccgccctcagttacctgcacgagcctgcggtcctgcacaatcttagggtacgcttcatcgattcaaagctcatttacacgtattgtggaattgtgcttgtggctattaatccatacgagcaacttccaatctacggtgaagacatcatcaacgcctatagtggacagaatatgggagatatggacccccatatattcgcagtggctgaagaggcttacaagcaaatggcccgggatgagaggaatcagtccattatagtttcaggcgagagcggcgctggcaaaacggtgagcgccaagtatgcaatgagatacttcgctacagtcagtggatcggcatctgaggctaatgttgaggagaaagtcctggcatctaacccgattatggagtctatcggtaatgcaaaaaccacccgtaatgacaattcttcacgttttgggaagtatattgaaatcgggtttgataaacgatacagaataattggagctaatatgcgcacttacctgctggagaaaagccgcgtagtgtttcaggctgaggaagagcggaattaccacatcttctatcaactctgcgcgagtgcgaagcttccagagttcaaaatgctgcgactgggaaatgcagataacttcaattacactaagcaaggaggaagccctgtcatcgagggcgtggatgacgccaaggaaatggcgcacactcggcaggcttgtactctccttggtatttctgagtctcaccaaatggggatattcagaatcctcgcaggaatcctgcatctcggaaatgtaggcttcacttctcgggatgctgattcgtgtaccattccacccaaacacgaaccactctgcattttctgcgagcttatgggcgtggactacgaagaaatgtgccactggctgtgccacaggaagctcgcaaccgccaccgagacatatatcaagcctatctctaagcttcaggccacgaatgcgagggacgcattggcaaaacacatttacgctaagctgtttaactggattgttgacaacgtgaatcaggccctacatagtgccgttaagcagcacagctttataggagtccttgatatttatggtttcgaaacgttcgaaatcaattcatttgagcagttctgtatcaactacgcgaacgagaagctgcagcagcagttcaacatgcatgttttcaagctcgagcaggaggaatacatgaaagagcaaataccctggacactgatagacttctatgataaccaaccatgcatcaacctgatcgagagcaagctaggcatcctggatcttctcgacgaagagtgtaagatgccgaaggggacagacgatacatgggcccagaaattatataatacacatcttaacaaatgcgccctattcgaaaagcctcggttgtcaaataaggcctttataatccaacattttgccgacaaggtggaatatcaatgcgagggtttcctcgagaagaacaaggatacagtctttgaagaacagattaaggtgctgaagtcatccaaatttaaaatgttacccgaactgttccaggatgacgagaaagcaatttcccccacctctgctacaagctccggccgcacaccgttgacccgtacccccgccaagcccactaaaggtagacctgggcaaatggcaaaagaacacaaaaaaacagtggggcaccagttccgcaacagcctgcacttgttgatggagacgctaaacgccaccacaccccattatgtgaggtgcattaaacccaatgattttaagtttccgttcaccttcgacgagaagcgcgccgtccaacagcttagagcatgtggcgtgctcgagactatacggattagtgctgccgggtttccgtcccggtggacataccaggaattcttcagtagatacagggtcctcatgaagcagaaagacgtccttagcgacagaaaacagacatgcaaaaacgttttggaaaaacttatcctagataaagacaagtaccagtttgggaagaccaagatctttttcagagctggtcaagtggcttacctagagaagctgcgagccgacaagcttagggcggcctgtataaggattcaaaaaacgatcagaggctggctactgcggaagaagtacctgaggatgcgtaaggccgcaataactatgcaaaggtacgtccgagggtatcaggccagatgctacgccaaatttttaagaagaactaaagcagccacaattatccagaaatactggagaatgtacgttgtcagaaggcgttataaaattcgacgggccgccaccatcgtactgcagtcttacctgagggggtttctcgcgcggaataggtacaggaagatactccgggagcacaaagccgtcattattcaaaaacgcgtgcgcggctggctagcgaggacccactataaacgcagcatgcatgccattatttacctccagtgctgttttcggagaatgatggcgaaaagggaactgaagaaactcaaaatcgaggccaggtcggtggaaagatataaaaaattacacatcgggatggaaaacaagatcatgcaactgcagcggaaggttgacgagcagaacaaggactataaatgcctggttgagaaactgaccaacttggagggcatttataacagcgaaaccgaaaaactccggtccgatctggagcggcttcagctttcagaggaagaagccaaagttgccacaggaagggtgcttagcttacaagaggaaatcgctaagctgcgcaaggatcttgagcagaccaggtctgagaagaagtgtatcgaggagcacgcagaccgctataagcaagaaacagagcagctggtctcaaatctgaaggaggagaacacactgctgaaacaggaaaaggaggcattgaatcatcgtattgtccagcaggcaaaagaaatgaccgagacaatggagaaaaagttggttgaggagaccaaacagttggagctggatctgaacgacgaaagacttcgctatcagaatctactgaacgaattcagcagactcgaagagcggtatgacgatttaaaagaagagatgaccctgatggtgcacgtgccgaagcctggacataaacgcaccgactccactcatagcagcaacgagtctgagtacatatttagtagcgaaatcgcggaaatggaagatattccaagccgcacagaagaaccatcggaaaaaaaagtcccgctggatatgtctctgtttctgaagttacaaaagcgggttaccgaacttgagcaggaaaagcaggtgatgcaggacgaactggatcgcaaagaagagcaagtgctgagaagtaaagcaaaggaagaggagaggcctcagatcaggggagctgaactcgagtatgagagcctgaaacggcaggaattagagagcgaaaataagaagctaaagaacgaactaaatgagctgcggaaggccctgtctgaaaagtctgctcctgaggtcacggcccccggagccccagcgtacagagttttgatggagcagttaacttcagtatctgaggaacttgacgtgcgcaaagaagaggtcctgattctgcgctcccagctcgtgtctcagaaggaagctattcagccgaaagacgataagaacacaatgaccgacagtacaatattgttggaagacgtgcagaagatgaaggataagggtgagatagcgcaggcgtatatcggcttaaaggaaaccaatagactgttggaaagccagcttcagagccagaagagatctcatgagaatgaagccgaagccctgcgcggtgaaatccagtctttaaaggaggagaacaatagacagcagcagttgctggcccagaatctccagttgcctccggaagcccgtatcgaagcaagcctccagcacgaaataacacgattaacaaatgagaacctgtacttcgaggaactgtatgcagacgatcccaagaagtaccagtcctatcgaattagcctgtacaaacgtatgatagacctgatggagcaactggaaaagcaggataaaacggtaaggaagctgaagaagcagctgaaggtcttcgctaagaagattggtgagttagaggttgggcagatggaaaatatctctccaggccaaatcattgacgaacctatccgacctgtcaacatcccgaggaaggagaaggacttccaagggatgttagaatataagaaagaagacgagcagaagctggttaagaacctgattttagagctgaagccccgaggagtagcggttaatcttatcccaggcttgcccgcctatatcctgttcatgtgtgttcgccatgccgactaccttaatgacgatcaaaaggtgaggtccctcctgacttcaacaattaactccattaagaaagtacttaagaaacggggggacgacttcgaaaccgtgtcattttggctgagtaatacctgccggtttctccattgcttaaaacagtactccggtgaggagggctttatgaagcataacaccagccgacagaatgagcactgtctgacgaatttcgatctggccgaataccgacaggtgctgagcgacctagcaattcaaatttaccagcagcttgtccgggtgttggagaacattctgcaacccatgattgtgagtggcatgcttgagcatgaaacaatccagggcgtgtccggcgtgaagcccactggcctgcgaaagcgtacctcgtcaatcgctgacgaggggacatataccctcgattcaatcctgagacaattgaactctttccactctgtaatgtgtcaacacggtatggaccccgagttaatcaaacaagtagtgaagcagatgttctacatcatcggcgctattaccctaaacaatttgctgctgaggaaggatatgtgcagctggtcaaaggggatgcagattaggtataacgtgtctcagctcgaggagtggttaagggacaagaatctgatgaacagtggggcaaaagagaccctggagcccttgatccaggcagcacagctgctgcaggtcaagaagaagaccgacgacgacgctgaggctatttgcagcatgtgtaacgccctcaccactgcccagatagtcaaggttctgaacctgtacacaccggtgaatgagttcgaggaacgggtctccgtgagcttcatcagaaccatccaaatgcggctacgagataggaaagattccccgcagcttttaatggatgccaagcacatcttccctgtcaccttcccatttaacccgtctagcctcgcgttagagaccattcagatcccagcatctctgggtctgggctttatctcccgggtgtag

SEQ ID NO: 196235 - DNA, 5547 bp, synthetic construct
  misc_feature 1..5547: note = Description of Artificial Sequence: Synthetic coding sequence
  source 1..5547: mol_type = other DNA
atgagcgtgggcgagctgtacagccagtgcacccgggtgtggatccccgacccagacgaggtgtggcggtctgccgagctgaccaaggattacaaggagggagataagtcattgcaactgagactggaagatgagaccattctggagtatcctatagatgtccagcgcaaccaactcccatttctccgtaacccagatattctggtcggcgagaatgacctaactgctctgtcctatctgcatgagccggcagtactgcataatctcaaagttcggtttctggagtccaatcacatttacacctattgcggtatagtgcttgtggctattaatccatacgaacagttgcctatctatggccaggacgtcatctacacctactccggacagaatatgggtgacatggacccgcacatattcgccgtagcagaagaggcatacaaacaaatggctagggacgagaaaaatcagagcattatcgtgagcggagagagtggtgctggaaaaaccgtgagcgcaaaatacgccatgagatacttcgccaccgtgggcggcagtgctagcgaaaccaatatcgaggaaaaagtgctggccagttcacctatcatggaagcgatcggaaatgctaagaccacccgcaatgataacagctctcgctttgggaagtacattcagatcggctttgacaagagataccacataatcggcgctaacatgagaacttatctgctggagaagagcagggttgtctttcaagccgatgatgagcgaaattatcacattttctaccaactgtgcgctgctgctggcctccccgagtttaaggagttggcactgacttctgcagaagactttttctacacttcacagggcggggacacttcgatagagggtgtcgacgatgccgaagacttcgaaaagacccggcaggcttttacactgctgggtgtgaaagagagtcatcaaatgtccatattcaagatcatcgcatccattttacacctgggttctgtggcgattcaggcagagagggacggcgactcctgctccatttcgccacaagacgtatatctatcgaacttctgccgcttattgggggtggaacacagccagatggaacactggctgtgtcatagaaagcttgtgacgacctcagaaacatacgttaagacgatgtcattacagcaggtgattaacgcacgcaacgcgctcgcgaaacacatttacgctcagctgttcggttggatcgtggagcacatcaataaggcgctgcacacatctctgaaacagcactcgttcattggagtgctggacatctacggatttgagacgtttgaggttaactcatttgaacaattttgtatcaattacgccaacgaaaagcttcagcagcagttcaatagccacgtattcaaactggaacaggaggagtatatgaaggagcaaattccctggacactgattgacttctacgataaccagccatgcatcgaccttattgaagctaagcttgggattctagacttgttggacgaggaatgtaaagtgccaaagggaaccgaccaaaactgggcccagaagctttacgatcgacatagctctagtcagcattttcaaaagcctagaatgtcaaacaccgccttcataatagttcattttgcagataaggtggagtatctgtccgacggattccttgaaaagaatcgtgacacggtctacgaggagcagatcaacattctaaaggctagtaagtttcccctggtggctgatctctttcatgacgataaagatccggtgcctgcaactaccccaggaaaggggagttcttccaagatttctgtcagaagtgcacgtcctcccatgaaagtgtcaaataaggaacacaaaaagacggtgggccaccaatttcggacgagtctgcacctgctgatggagacactcaacgctaccacaccccactacgtccgctgtattaagccgaatgacgagaagctccctttccactttgatcccaaaagagccgtgcagcagcttcgcgcctgcggggttctggagacaatcaggatttccgccgccggttacccctccaggtgggcctaccacgactttttcaataggtatcgcgtcctggttaagaagagggaactggctaataccgacaaaaaggccatctgtcgctcagttcttgagaatctgatcaaggatccagacaaattccagtttggtcggacaaaaattttctttcgcgctggtcaggtggcctatcttgagaagttacgggcagacaagtttaggactgccaccatcatgattcagaagactgtaagaggatggctacaaaaggtcaagtatcaccggttaaaaggggcaaccctgacactgcaaaggtactgtcgagggcacctcgcacggcggttagccgagcacctgcgaagaattagagccgccgtagttctgcagaaacactaccgcatgcagcgagcgagacaagcttaccagcgtgtgaggagggctgctgtcgtcattcaggctttcactcgtgctatgtttgtgcgacggacctacaggcaggtactgatggagcacaaagccacaaccattcaaaagcacgtccggggctggatggcccgtcgccattttcagcgcctgcgcgatgctgccatcgttatccaatgtgcctttcgcatgctgaaggcccgcagagaactcaaagcactgagaatcgaagcgcggagcgctgagcatctaaaacgcctgaacgtcgggatggaaaataaggtggtccagctccaacgcaagattgacgagcagaataaagagtttaagactctctctgagcaattatcagttacaacctctacatacaccatggaagttgagcgattgaaaaaggagctcgtgcattaccaacagagccccggagaggataccagtttaaggctacaagaagaagttgagtccttaagaacggaactgcagcgagcccactctgagagaaagattctcgaggatgcgcatagtcgggagaaggacgagcttagaaagcgtgtagcagaccttgagcaggagaatgctctcctcaaggacgaaaaggagcagctgaataaccagatcctctgccagtcgaaggacgagtttgctcagaacagcgtgaaggaaaatctcatgaaaaaggagctcgaagaggaaaggtctcggtaccaaaatttggtgaaggaatattcgcaactggagcagcgctatgataacctccgtgacgaaatgaccattattaaacagacacccggccatcgaaggaatccttccaaccagagtagtttagagtccgattcaaactacccatccatatcaacaagcgagatcggggatacagaagatgcactgcaacaagtggaggagatcggacttgaaaaagcagccatggacatgactgtgtttctgaaactgcagaagagagtcagggaactggaacaggagcgcaagaaactccaggtgcaattggagaagagggagcagcaagattcaaagaaagtgcaagcagagccaccacagaccgacatagatctggatcctaatgcagatctggcctataactctctgaaaagacaggagctggaatctgaaaataaaaagctgaaaaacgatctgaacgagctgcggaaggctgtcgcggatcaagccacgcagaacaacagtagtcatggaagtcccgatagttattcccttctcctcaaccagttaaaacttgcacacgaggaactggaggtgcgcaaagaagaagtgttgatactcagaactcagattgtcagcgcagatcagcgaaggttggcggggcgtaatgccgagcctaacataaacgcgcggtcgagctggcccaattctgagaaacacgtcgaccaggaggacgctatagaggcttatcacggtgtgtgccagactaattccaagacagaggattgggggtacctgaatgaagacggtgagcttggactggcctaccagggcctcaagcaagttgccaggcttctcgaggcacagcttcaagcacaatctcttgagcatgaggaagaggttgagcaccttaaggcccagcttgaggctcttaaagaagagatggacaagcaacagcaaactttctgtcagacattgcttctcagtccagaggcccaagttgaattcggagtgcagcaagagatcagtcggctgacaaacgagaatctggacctgaaagagctggtggagaagctggagaaaaacgaacggaagctgaaaaaacagctcaaaatttatatgaaaaaggcccaagacctggaagcagcccaggcgctggctcagagtgagcggaaacggcacgagctgaatagacaggtgactgtccagcgtaaggagaaagattttcaggggatgctagagtaccacaaggaggacgaagccctacttatacggaaccttgtgacagatctcaagccccaaatgctgtccggcacggtgccatgccttccagcctatatcctttatatgtgcataaggcacgcagattacactaatgacgatctgaaggtgcacagcctgctcacttctactatcaacggcataaaaaaggttcttaaaaagcacaatgacgactttgaaatgacctccttttggctgagtaacacctgtaggttgctccactgtctgaagcagtactccggagacgagggttttatgacccagaacactgctaagcaaaacgaacactgcctgaaaaacttcgacctgacagagtatagacaggttctgagtgacctgagcattcagatttaccagcaactcatcaagattgctgaaggtgtcctgcagcctatgattgttagtgcgatgttggaaaacgaatcaatccagggactgtccggcgtgaagcctacagggtatcggaaacgctccagcagtatggctgatggagacaattcttactgcctggaagcgattatccgacagatgaatgctttccatacggttatgtgtgaccagggtttggaccctgagatcattctccaagtgttcaaacagctcttttacatgattaatgccgtcaccctcaacaatctgttgctgagaaaggacgtctgcagctggtccaccggaatgcagctgagatacaatattagccaactcgaagagtggttgcgtggccgaaatttgcatcagtcgggtgccgtacagaccatggaaccgctcattcaggccgctcagctgctgcagttaaagaagaagacccaagaagacgccgaagccatatgctccctctgcacgagtttgagtacacagcaaattgtgaagattctgaacctgtacaccccactcaatgaattcgaagagcgtgtgacagttgctttcatccgaacgattcaggcccaactccaggaacggaatgatccacagcagctgctgttggacgccaagcatatgttccctgtgctgtttccctttaacccgtcttccttaaccatggatagcatacatattcctgcatgtttaaatctggagtttcttaatgaggtatag

SEQ ID NO: 196236 - DNA, 2892 bp, synthetic construct
  misc_feature 1..2892: note = Description of Artificial Sequence: Synthetic coding sequence
  source 1..2892: mol_type = other DNA
atggagcacaaggccaccaccatccagaagcacgtgcggggctggatggcgcggaggcactttcagagactccgggacgccgctatcgtcattcagtgcgcgtttcggatgcttaaggcccggagggagctgaaggcgctgaggatcgaagcccgctctgctgagcatctcaagagacttaacgtgggtatggaaaacaaagtggtccagctgcagcgcaaaatcgacgagcaaaacaaagaatttaagacactgtccgaacaactgtctgtaacaaccagcacctacacaatggaggtggaacgattgaagaaggagcttgtgcactatcagcagtctccaggagaggatacatcacttagattacaggaagaggtcgagtctctgcgcacagagcttcagcgggcccactccgagcgcaagatcctggaagatgcccactcacgtgaaaaagatgagctgcgaaagcgagtggccgaccttgaacaagagaacgccctcttaaaggatgagaaagagcaactgaataatcagatcctgtgccagtccaaagatgaattcgcacaaaatagcgttaaggagaatctgatgaagaaggagctggaggaagaacggtcaagatatcagaatctggtgaaagaatacagccaacttgagcagcgatacgataacttgcgggatgagatgactatcataaagcagacaccaggccataggagaaatccctctaaccagagctcccttgaaagcgattcaaattacccaagcatctcaacatcagaaatcggtgatactgaagacgccctgcagcaggtagaggagattgggctggagaaggcagccatggatatgacagtgttcttaaagttgcagaagcgggtcagggagctggagcaggagaggaagaagctccaggtgcaactagaaaaaagagaacagcaggactcgaagaaagtgcaagccgaacctccccagaccgacattgacctcgacccaaacgccgacctcgcctataacagcttgaagaggcaggaactggagtccgagaacaagaagttaaaaaacgacctgaacgagctgaggaaagccgtcgccgatcaggcaacccagaacaactcttcccatggtagcccggacagttacagtttactactgaaccagcttaaattagcccatgaagagctcgaagttagaaaagaagaagtgctcatcctgcgtacccagattgtcagcgcagaccagcgaaggctggccggcagaaacgccgagcctaacatcaatgctcgcagtagctggcccaactcagaaaagcatgttgatcaggaggatgccattgaagcataccacggagtgtgtcagacaaacagactgcttgaggcacagcttcaagcccagtcactcgagcatgaagaggaagtggaacaccttaaagcgcagctggaggccctaaaagaagaaatggacaagcagcagcaaacattctgtcagacactgctcctcagcccagaagcccaggtagaatttggcgtgcagcaagagatctccagactgacaaacgaaaacctggatttgaaggaattggtggaaaaactagagaaaaacgaacgaaagctgaagaaacagctgaaaatttatatgaagaaagcccaagacctggaagctgctcaggccctcgcacagtccgaaagaaagaggcacgaactgaaccgtcaagtgaccgtacagcgcaaggaaaaagactttcagggaatgctagagtaccacaaggaggatgaagcgcttttaattcgtaacctcgttactgacctcaagcctcagatgcttagtgggacagtgccatgcttgcctgcgtacattctctacatgtgcatccggcacgccgactacactaacgacgatcttaaggtccatagtcttctgacaagtactattaacggaatcaagaaggtcctgaaaaagcacaatgacgatttcgaaatgactagcttctggctgagtaacacgtgcagactgttgcactgtctgaaacaatactccggcgatgaaggctttatgacacaaaacacggcaaagcagaatgaacattgtctcaagaacttcgatttgacggaatataggcaggtgctgtctgatctgagcattcagatatatcagcagctgatcaaaatcgctgagggggtactgcagcccatgatcgtgagcgctatgctggagaacgagagtatacaaggcctgtctggggtcaagccaacaggctaccgcaaaagaagcagcagcatggcagacggtgacaactcttattgtctcgaagctatcattaggcagatgaacgccttccataccgtgatgtgcgaccagggtctcgacccagaaatcattcttcaagtgttcaagcagttgttttacatgatcaacgcagtgactttaaataatttgttactgaggaaggacgtctgttcttggagtactggaatgcagctgcgttataacatatctcagcttgaggagtggctgcgcggccgcaacctacatcagagcggcgccgttcagacgatggaacccctaattcaggcagcgcagctcttgcaactgaaaaaaaagacccaggaggacgcagaagccatctgtagcctgtgcacctctctcagtacgcagcagatcgttaagattctgaatctctatacaccactcaatgagtttgaggagcgagtcaccgtcgctttcattagaaccattcaagcccaattgcaggagcgaaatgacccacagcaattgctgttggatgctaaacacatgttcccagtgctctttccattcaacccaagttctctgaccatggatagtattcacatccccgcctgcttgaaccttgaattcctgaatgaggtctag

SEQ ID NO: 196237 - DNA, 2163 bp, synthetic construct
  misc_feature 1..2163: note = Description of Artificial Sequence: Synthetic coding sequence
  source 1..2163: mol_type = other DNA
atgcactggcccgtgacccgggagtgcacccgggtgtggatccccgacccagatgaagtgtggcggtccgctgagttgaccaaggactataaagaaggcgataagtcactccagttgcgtctggaggacgaaacaatactagagtatccaattgatgtccaaaggaatcagttgcctttcctccgtaatcctgatatactcgtgggggagaacgatcttactgcactcagttatctgcatgaacccgcagtgctgcacaatctaaaggtgcggttcctagagagcaatcatatctatacctattgcggaatcgtcctcgtggctataaatccgtacgaacagcttcctatctatggacaagatgtgatttatacgtacagtgggcagaatatgggagatatggatccccatattttcgccgttgctgaggaggcgtacaagcagatggctagagacgagaagaaccagagtattatcgttagtggagaatccggtgccggcaaaactgtgtctgccaagtacgccatgaggtattttgcgactgtggggggatccgccagcgagacgaacatagaagagaaagtactggctagtagcccgattatggaagccatcggcaatgcaaagaccactcgtaatgacaacagtagtcgatttgggaagtatatccagatcggcttcgataaaaggtaccatattatcggggcaaacatgagaacctaccttctcgagaaaagtcgggtggtcttccaagccgatgatgaaagaaactaccacatattctatcaactctgtgctgctgctgggctgcccgaattcaaagaactggctctgactagcgctgaggattttttctacacctctcagggcggagatacttccattgaaggggtcgacgatgccgaggactttgaaaagacaagacaggcattcacacttctgggagtgaaggagagccaccaaatgtccatttttaagataatcgcctccattctccatttaggctctgtggccattcaagctgagcgtgacggggactcctgctccatcagcccccaggatgtgtacctctccaatttctgccggctcctgggtgtagagcactcacagatggagcattggctgtgccaccgcaagctggttaccacatccgagacttacgtgaagaccatgagcctgcaacaggtgattaacgctaggaacgctctcgcgaagcatatctacgcacagttgttcggctggatcgtagagcacattaacaaagccctgcatacatcactgaagcaacattctttcattggagtactggacatttacggctttgaaacttttgaggtgaattctttcgaacagttctgtattaattacgccaacgagaagttgcaacagcagtttaattctcatgtgttcaaactcgaacaggaggagtatatgaaggaacagataccatggaccttgatcgatttctacgataaccagccatgtatagaccttatcgaggccaaactcggaatcctcgatctgctagatgaggagtgcaaggttcccaagggaaccgatcagaattgggcccagaagctatacgacagacatagctcctcacagcactttcagaagccacgcatgtctaatacggcttttataattgtgcacttcgccgataaggtggaatatttgtccgatgggttcctcgagaagaatcgtgatacagtgtatgaggagcagatcaacatcttgaaggcatctaagttccctctggtggccgacctatttcacgacgacaaagacccggtgcctgccactacaccggggaagggatcaagttccaaaatatccgtcagatctgcacgacccccaatgaaggtgagcaataaggaacataagaagacagtcggtcaccagtttcggacatctctcagcactcaacaaattgtaaaaattttgaacctatacacacctctgaatgagttcgaagagcgcgttaccgtagccttcataaggactatacaggcacagttacaggaacggaatgacccccagcagctgctcctggacgctaaacacatgttccctgtcctcttcccattcaacccatcatctcttactatggatagcatacatattcctgcctgtctgaacttagagttcctcaatgaagtatag

SEQ ID NO: 196238 - DNA, 5229 bp, synthetic construct
  misc_feature 1..5229: note = Description of Artificial Sequence: Synthetic coding sequence
  source 1..5229: mol_type = other DNA
atggccgtggccgagctgtacacccagtacaaccgggtgtggatcccagatcccgaggaagtctggaaaagcgctgaaatcgctaaggattacagggtaggggacaaagtgctccgcctgctgcttgaagacggcaccgagcttgactacagcgtaaatccagagtccctcccaccacttcggaatcccgatattctagttggtgagaatgaccttacagcacttagttacctgcacgaacctgcagttcttcataacctgcgtatccggttcgcggagagtaagttgatctacacttactccggcattatcctcgtagcaatgaatccctacaaacagctgcccatctatggtgatgcaatcattcatgcatacagcggtcaaaacatgggtgacatggacccccacattttcgccgttgcggaggaggcctacaagcaaatggcgcgtaataaccgcaaccaaagtataatcgtgtccggcgaatcaggggccggtaagactgtcagtgctaggtacgcaatgagatacttcgccacagtgagtaagtcggggtctaatgcccatgttgaggacaaagtgctggcctctaatcccattacagaggctgtaggcaatgctaagactacccgtaatgataactccagccgctttggcaaatacactgagatctcatttgatgagcagaatcaaattatcggagctaatatgtccacctatctgctagagaaatctagggtagtcttccagagcgaaaatgagaggaattatcacattttctatcagctctgcgcgtccgcccaacagtcagaatttaagcacctcaagctggggagtgccgaagagtttaattatactaggatggggggcaacacggtgatcgaaggtgtgaatgatagggctgagatggtggagacgcagaaaacatttacgcttcttggcttcaaggaggatttccagatggacgtgtttaagatcctcgctgccattctacatttgggcaatgtccagataaccgccgtggggaacgaaagatccagtgtgtccgaggacgactcccatttaaaggtgttttgtgaactgctggggctggaatcaggccgcgtagcccagtggctctgcaacagaaaaattgtgacatcctccgagaccgtggttaagcccatgacccggccccaggccgttaatgctcgcgacgcacttgccaagaaaatatatgcccatctgtttgacttcattgtagaacgcatcaatcaagctttacaattttccggcaaacagcataccttcatcggggtcctggacatctacggatttgagacctttgatgtgaacagttttgagcagttctgcattaactatgccaacgaaaaactccagcagcagttcaatatgcatgtgttcaagcttgaacaggaggagtacatgaaggaggacattccatggaccctgattgatttctatgataaccagccagttatcgacctcattgaggccaaaatgggaatcctagaactcctggacgaggagtgcctactgccccatggcaccgacgaaaattggctgcagaaactgtacaataatttcgtgaacaggaatccattgtttgaaaaaccaagaatgagcaatactagttttgtcatccagcatttcgccgataaggtggagtataaatgcgaaggctttttggaaaagaacagagataccgtgtacgacatgcttgttgaaattctccgggctagtaagttccacctgtgcgctaatttttttcaagagaaccccaccccacctagcccttttggatctatgattacagttaagtcggctaagcaggtcatcaagccgaactcaaaacattttcgcacaactgtggggtccaagttccggtcatccttatatctattgatggagactcttaacgccactaccccacactacgtgcggtgcataaagcctaatgacgaaaaattaccatttgagttcgattccaagcgtatcgtgcagcagctcagggcatgcggcgtcctcgagacgattagaatcagcgctcaatcatacccaagccgttggacctacattgaattctactcacgatacggtattttgatgacaaagcaagagcttagcttttcagacaagaaagaggtttgcaaggtagttctgcacagactgatccaagatagtaatcagtatcaattcggtaaaaccaagatcttctttcgtgcaggccaagttgcctatctggagaagttaagactggacaaactccggcagtcgtgcgtgatggttcagaagcacatgcgtggctggttgcagcggaagaagttcctgcgggagaggagggccgccctcattattcaacagtacttccgaggccagcagactgtccgcaaggccattacggccgtcgccctgaaggaggcttgggccgctattatcatccagaaacattgtagaggctacctggttcgctctctctatcagctgatacggatggctacaatcaccatgcaggcctatagccgagggttcctggcacgcaggcggtaccggaaaatgcttgaagagcacaaagcagtgatacttcaaaagtacgctagagcctggctggcccgccggagatttcagtcaatacggagattcgtgttgaatattcagttgacgtacagggtgcagaggctgcaaaaaaaactcgaggaccaaaataaggaaaaccatggcctggtggaaaagctcacaagcctcgctgccttgcgcgcgggtgatgtcgagaagatccagaagctcgaagccgaacttgagaaagccgccactcatagacgcaactacgaggagaaggggaagcgataccgtgatgccgtagaagaaaaactggccaaactgcagaaacacaacagcgagctggagacccagaaggagcagattcagctaaaactgcaggagaagacagaagagctaaaagaaaagatggacaacctgaccaagcaactgtttgacgatgttcagaaggaggagcgccaaaggatgctcttggaaaagagctttgaactcaaaacacaagactatgagaaacagatacagagcctaaaggaagagataaaggccttaaaggatgaaaagatgcagctgcagcaccttgtggaaggcgagcacgtcacttctgatggacttaaggcagaagtggctcggttgtcaaaacaggtcaagaccatcagtgaatttgaaaaggagatcgaattgctgcaggcgcaaaagatcgatgtcgagaaacacgtgcagagccagaagcgtgagatgagagagaaaatgagtgaaatcaccaaacagctgctggagtcttacgacatagaagacgtgagatcgcgtttgtctgtggaggatctggagcatttgaatgaagacggcgaactctggttcgcttacgaaggactgaagaaagcaacacgggtgctggagagtcactttcagagtcagaaagactgctacgaaaaagaaatcgaggctctcaatttcaaggtcgtccacctctctcaagagataaaccatctccaaaagctcttccgggaagagaacgacatcaatgaatccatccgtcacgaggtgactaggttaactagtgagaatatgatgattcccgactttaaacaacagatctccgagctggagaaacagaagcaagatctcgaaatccggctgaatgagcaggccgaaaagatgaaaggtaaattggaagagctttctaatcagttgcacagatcacaggaagaggagggcactcagcgcaaagccttagaggctcagaatgaaatacacaccaaagagaaagagaaactaattgacaagatccaggagatgcaggaggcttccgatcacctgaagaaacagtttgaaacagagtcagaggtcaaatgcaatttcagacaggaagctagccgcttaactcttgagaacagagatctcgaagaggagctggatatgaaggaccgcgtcattaaaaagctacaggatcaggtgaaaactctttctaagacaattggaaaggctaatgacgtgcatagtagctctggaccaaaggaataccttgggatgctgcaatacaaaagggaggacgaggctaaactgattcagaatctgattctggatttgaagccaagaggagtcgtggtgaacatgattcccggattacccgcccacattctgttcatgtgtgtgagatacgccgactctctgaatgatgctaatatgcttaaatcacttatgaattccactatcaacgggatcaaacaagttgtgaaagagcatctggaagattttgagatgctatctttttggctatccaacacatgtcattttctgaactgtctgaagcaatattccggcgaagaagaattcatgaaacacaactccccacagcagaataagaattgtttgaataattttgacctcagcgaatatcggcaaatcctctccgacgttgctataagaatctaccaccaattcatcatcattatggaaaaaaatatccagccaattattgtgcccggtatgctggagtacgaaagccttcagggcatcagcggtctgaagccaacggggttccggaagcgctcctccagcatcgacgacactgacggctacacaatgacatctgtcttacagcaacttagctatttctacactactatgtgtcagaatggactggatcccgagcttgtgcgacaggctgtcaaacagcttttctttttaattggggcagtgacccttaatagtctgttcctgcgaaaagacatgtgcagctgtcgcaagggcatgcagattaggtgtaacatctcctatctcgaggagtggcttaaggacaagaatctgcaaaattcactggcaaaagaaaccctagagcccttgagtcaagccgcatggcttctgcaggtcaagaagactacagactcagacgccaaagagatctatgaaagatgtacttcactgtccgctgtgcaaatcattaaaattctgaacagttataccccaattgacgattttgaaaaacgggtgacgccctcattcgttagaaaagtccaggccctgttaaattcccgagaggactcatcccagctcatgcttgatacaaagtacctatttcaggtgacattccctttcaccccctctccacatgccctggagatgatccagatccccagctcgtttaaactgggatttcttaataggctatag

SEQ ID NO: 196239 - DNA, 1122 bp, synthetic construct
  misc_feature 1..1122: note = Description of Artificial Sequence: Synthetic coding sequence
  source 1..1122: mol_type = other DNA
atgcccagcagcacccccaccgccggccggacctgggccatctggactcacacatatttaccatggcaaaagcggcacacttcaagatggcctgatggcaagagcgaagcgcaagaccttgatctgcttaccctttacctgaatctgtattgtattactcctgcagccgccccggaactgcctccactctacgtgttcgtctgcgagctcgacagtcaaagagccccaattcccggttccgacgcctacaacgagggcgccggcggcgcttacatgaggaataaccggaatcagtctataattgtttcgggggaatccggagcagggaagactgtgagcgcccgctatgcgatgcggtactttgccaccgtgagcaagagtggcagtaatgcccacgtggaggacaaggtcttggcctctaatcccatcaccgaagctgtgggaaacgccaagactacacggaatgacaactcttctaggtttgggaaatatactgagatttcgttcgatgagcagaaccagattattggcgccaatatgtccacttacctactagagaagagcagagtcgtgtttcaatctgagaatgaacggaattaccatatattttaccagctgtgcgcaagcgcccagcaatccgaatttaagcatctgaagctaggctcggcagaagaattcaactacacaagaatgggcggtaatacggtgattgaaggggtcaacgaccgagcagagatggttgagacacaaaagacgttcacactgctcgggttcaaagaggactttcaaatggacgtcttcaaaatcctggcagctatactacacttgggaaatgtacaaatcacagcagtgggaaacgagcgctccagcgtgagcgaagacgactcccacctgaaggtattttgcgaacttctgggcctcgaatctggaagggtcgcacagtggctgtgtaaccgcaagatcgtaacctccagtgagactgtcgttaagccgatgactagacctcaggcagtcaacgccagagacgctttagcgaagaagatctacgctcatttgtttgatttcatcgtggagaggattaaccaggcactgcagttcagcgtgctgaaacctctaatgtag

SEQ ID NO: 196240 - DNA, 321 bp, synthetic construct
  misc_feature 1..321: note = Description of Artificial Sequence: Synthetic coding sequence
  source 1..321: mol_type = other DNA
atgaacccctacaagcagctgcccatctacggcgacgccatcatccacgcttacagtggtcagaatatgggagacatggacccgcatatctttgctgtcgcagaggaagcttacaagcaaatggcacgcaataataggaaccagtcaatcatcgtttctggagagtctggcgcagggaagaccgtgtcagcaaggtacgccatgagatatttcgctacggtgagcaaatcggggtccaatgcccacgtcgaagacaaagtgctggccagcaacccaatcactgaggcagtgggtaacgctaaaacaacacgcaatgactag

SEQ ID NO: 196241 - DNA, 1293 bp, synthetic construct
  misc_feature 1..1293: note = Description of Artificial Sequence: Synthetic coding sequence
  source 1..1293: mol_type = other DNA
atggccgtggccgagctgtacacccagtacaaccgggtgtggatcccggatcccgaagaagtgtggaagtctgccgaaatcgcaaaggattacagggtaggcgataaagtcctcaggctgctgttggaagacggtacagaactggactacagcgtgaatcctgagtccttgccgcccctcagaaacccagatatccttgtgggcgagaacgacctgacagccctgtcgtacctgcacgagccggcagtccttcataaccttcgcattcgctttgccgaaagcaaacttatttacacttattctgggattatcctcgtggcaatgaacccctataaacagctccctatttacggggacgctattattcacgcttactcaggccaaaatatgggcgacatggacccccacatctttgctgtggctgaggaagcatacaagcagatggcccgaaacaatcgaaaccagagtataattgtgtctggcgagtctggtgccgggaagacagtatccgcccggtatgctatgagatatttcgcaacagtttcaaagtcagggtcaaacgcgcacgtcgaggacaaggtgctggcttccaatcccattacagaagccgtggggaatgctaaaacaactaggaacgataactctagtcgctttgggaagtacaccgaaattagttttgatgaacagaatcagataatcggagctaacatgagcacgtatttgctcgagaagtcgcgcgtcgtctttcagagcgagaatgagcgcaattaccacattttttatcaactctgtgcatctgcccaacagagcgaattcaaacatctaaaactgggtagcgccgaagaattcaattacactcgtatgggaggcaacactgtgattgaaggagtgaatgacagagccgagatggtagagacccaaaaaacattcacgctgctgggatttaaggaggatttccaaatggatgtattcaagatccttgccgctatcctgcacctgggaaacgttcagataaccgcagtagggaacgaacgaagttcagtgtccgaggatgatagtcatctgaaggtgttttgtgaattgctcgggctggaatccggacgcgtcgctcagtggctctgcaacaggaaaattgtaacatcttctgagaccgtggttaagcccatgacacggcctcaggcggtcaatgccagagacgccctggccaagaaaatctacgcccacctttttgatttcattgtcgagagaatcaatcaggcactgcagttctctgtgctgaagccactgatgtag

SEQ ID NO: 196242 - DNA, 810 bp, synthetic construct
  misc_feature 1..810: note = Description of Artificial Sequence: Synthetic coding sequence
  source 1..810: mol_type = other DNA
atggccgtggccgagctgtacacccagtacaaccgggtgtggatccccgaccctgaggaggtatggaagtccgccgagatcgccaaggactacagggtgggggacaaagtgctcagactgctgcttgaggatggaaccgagctcgattactcagtgaatccagagagccttcctcccctgaggaacccagatattctcgtcggcgaaaacgacctgactgcgctgagctacttacatgaaccagccgttctccacaacctgaggatccggtttgctgagtctaaactcatctatacttactctggaatcattttagtggctatgaatccctacaagcagttgcctatttacggggacgccattattcacgcttatagtgggcagaatatgggagatatggatccccacattttcgccgtcgcggaagaagcatataaacagatggcccgaaataaccgaaaccaaagcatcattgtgtctggcgaaagtggggctgggaaaacagtttctgccagatatgcaatgcggtacttcgctacagtctccaagtcaggatctaacgctcacgtggaggataaggtgctcgcaagtaatcccataacagaagcggttggcaatgcaaaaacgacaagaaacgacaattcaagtcgcttcgggaaatatacagagatttccttcgatgagcaaaatcagattattggcgctaacatgtccacatatctgctagagaaatcccgtgtagtgttccagggcgtacctaagaacctgatcattcaagaatgggaagcaatccttagcctccgggtgtag

SEQ ID NO: 196243 - DNA, 3762 bp, synthetic construct
  misc_feature 1..3762: note = Description of Artificial Sequence: Synthetic coding sequence
  source 1..3762: mol_type = other DNA
atggaggacggcaagcccgtgtgggccccccaccccaccgacggctttcagatgggtaatattgttgacataggaccagacagtctgactatcgaacccctgaatcaaaagggcaaaacatttctggctctgatcaatcaggtcttcccagccgaagaggattccaagaaagatgtggaggacaactgctcacttatgtacctgaacgaagctacccttctccataatattaaggttaggtacagcaaagatagaatatatacctatgtggcgaatattctaatcgcagttaatccgtacttcgatatcccaaagatatactcctctgaagctatcaagtcttaccaaggtaagtccctggggacacggcctccgcacgtattcgctatcgcggacaaagccttccgggatatgaaagtcctgaagatgtcgcaatctattatcgtgagcggggagtcgggcgccgggaagacagaaaacactaaattcgtactgcgatacctgactgagagctacgggaccggtcaggatatagacgataggattgtcgaggccaatccgctgctggaggcattcggtaacgccaaaacagttaggaataacaattccagcagattcggtaaattcgtagaaattcacttcaatgagaagagttcagtagtcggagggtttgtgagccactatctgctggaaaaaagcagaatatgtgtgcagggcaaagaagaacgaaattaccatattttctatcgtctgtgcgcgggggccagcgaagacattcgggaaaaactgcatttgagttccccagataacttccggtatttaaacagagggtgtacacgctatttcgctaataaagagacagacaagcagatcctccagaacaggaagtctcctgaatacctcaaggccggaagcatgaaggatccactgctggacgatcacggagacttcatccgcatgtgtacagcaatgaagaagattggcttagatgacgaagaaaaactcgatttgttccgagtcgtggccggggtccttcatttgggaaatatcgacttcgaagaagccgggtcaacttctgggggctgtaacctgaagaataaaagtgcacaaagcctggagtactgtgccgagctgctgggactcgatcaggacgacctgcgtgtgagtttaaccacacgtgttatgctgactacagcagggggaacaaagggtactgttattaaggtgcctctcaaggtcgaacaggccaataacgctcgggacgcattggccaagactgtgtatagccacctgttcgatcacgtcgtgaatagggtgaaccagtgcttcccattcgagaccagctcctatttcattggagtgcttgacatcgctggcttcgagtacttcgaacacaactcctttgaacagttttgcatcaactattgcaatgagaagctccaacagtttttcaatgaacgtatcctcaaagaggagcaggaactgtatcaaaaggaaggacttggcgtcaacgaggtgcattatgttgacaaccaggactgcattgacctcattgaggccaagcttgtggggatactggatatcctggatgaggagaacaggctgccgcagccatctgatcaacattttactagcgctgtccaccagaagcacaaagatcattttaggctcactatcccgcgaaagtccaagctggccgtgcataggaatattagggacgacgagggcttcataattcggcacttcgcaggagcagtctgttatgagacaactcagtttgtggaaaaaaataacgatgcactgcacatgtctctcgaatctctgatatgcgagagccgcgacaagtttatccgcgagcttttcgaaagctctaccaacaataataaagacaccaaacagaaggcggggaaactgtcctttatttctgtgggaaacaagtttaaaacccagctgaatctgcttctggacaaactgcgatccactggcgcctcctttattcgttgcatcaaaccaaacctgaaaatgacttcccaccactttgaaggcgcacagattctaagccaactacagtgctccggcatggtgtccgtgctggatctgatgcagggtggctatccatctagggcttctttccacgagctttataatatgtataagaagtatatgcctgacaagttggccaggctggacccaagattattttgcaaggcattatttaaggcactcggcctgaacgagaacgattataaattcggactgactaaagtgttctttagacccggaaaattcgctgagttcgaccagataatgaagtctgatccagatcacttggccgagcttgtaaagcgggtgaatcattggctcacttgttcgaggtggaagaaagtccaatggtgctctctgtcggtcattaagctgaaaaacaagattaagtacagggcagaagcttgtataaaaatgcagaagacaattagaatgtggttgtgtaagagacggcacaagcctaggatcgacgggttggtgaaggtgggaaccctcaaaaaacgactggacaaattcaacgaagtcgtttccgtgctgaaggatggaaagcctgaaatgaacaagcaaataaaaaacctggagatctcaatcgacaccctgatggcaaagatcaagtctaccatgatgacccaggagcagatccagaaggagtacgacgcactcgtcaagtcgagtgaggagcttctgtctgctttgcaaaagaagaagcaacaggaggaggaagcagagagactgcgccgcatccaggaggagatggagaaagagcgaaaacggagagaggaggacgaaaagcgccgacgtaaggaagaggaagaacggcggatgaagctggagatggaggctaagaggaagcaggaggaggaggaacgaaaaaagcgggaagatgatgagaagagaatccaggcagaagtcgaggcacaactggccagacaaaaggaagaagaatctcagcagcaggccgtccttgaacaggagaggagggaccgggaactcgctctccgtatcgcccagtcagaggccgaactgatctctgacgaggcacaggcagatctagccttacggcgtgggcccgccgtgctggcgaccaaagcggcagctggcacaaaaaagtatgacctgtctaagtggaaatatgccgaactacgggacacaataaacacaagctgcgatatcgaattactcgcagcctgtcgcgaggagttccataggaggctgaaagtatatcatgcatggaagagcaagaataagaaaaggaacacagagactgagcagagagccccgaagagtgtcacagactacgcccaacagaacccggccgcccagatacccgctcggcagagagagatcgagatgaaccgccaacagagatttttccgaatccccttcatcagaccggctgaccaatataaagacccacagagtaagaaaaagggctggtggtacgcacactttgatggtccatggatcgcgcggcagatggagctgcatcccgataaacccccgatactgttggtggctggaaaagacgacatggaaatgtgcgagttaaatctggaggaaacaggtcttactaggaagcgcggcgccgagatcctgcctcgccagttcgaggaaatctgggaacgttgcggagggatccagtaccttcagaacgccattgaatcacgccaggcccgccccacatatgcaaccgccatgctgcagagtctgctgaagtag

SEQ ID NO: 196244 - DNA, 3858 bp, synthetic construct
  misc_feature 1..3858: note = Description of Artificial Sequence: Synthetic coding sequence
  source 1..3858: mol_type = other DNA
atggaggacggcaagcccgtgtgggccccccaccccaccgacggctttcagatgggcaacattgttgacattggacccgactctctaactatcgaaccactgaatcaaaagggaaagacattcctggctctcatcaatcaggtgtttccagctgaggaagacagtaagaaagatgtggaggacaactgtagcctgatgtaccttaatgaggctaccctgctgcacaacatcaaggtgcgctactcgaaggaccgtatctatacatacgtcgccaacatcttgatcgctgttaatccatactttgatatcccaaagatctactctagcgaggcaattaagagctatcaagggaagagtctgggcactcgcccccctcacgtgtttgccatagctgacaaggcatttcgcgatatgaaagttctcaagatgtctcaaagcattatcgtgagcggcgagtcaggagctgggaaaacagagaataccaaattcgtgctgcgctatctaaccgagagctatggaactggccaagatatcgatgaccggatagtagaggctaaccctctgctggaagcattcgggaacgctaaaacagttagaaataataacagttccaggtttgggaaattcgtcgagatacactttaatgaaaagagtagcgtggtgggggggtttgtatcccattacctgctcgaaaaaagtagaatctgtgtgcagggtaaagaagagcggaactatcacatattctacaggctatgcgccggcgccagtgaagatatcagagaaaagttacacctgtcgtcaccagataactttcgctatttgaatcgaggatgcacaagatacttcgccaacaaggaaaccgacaagcagatcctccaaaatagaaaatctccagagtatctaaaggcaggttctatgaaagatcctctgctggatgatcatggagattttatccgcatgtgcacggctatgaagaagatcggcttagacgatgaagaaaaactggatctctttagggtggtcgccggcgttctgcacctcggaaatattgatttcgaggaagcgggaagtacatctgggggctgcaacctcaaaaataagagcgcccaatccttggaatactgcgctgagttgctgggcctggatcaagatgacctgcgggtgtcccttacgacccgcgtgatgctgacgactgctgggggaactaagggcacggtaattaaggtgccattgaaagttgaacaggctaataacgcacgggatgccctggctaaaaccgtttattcccaccttttcgaccacgtggttaacagggtgaaccagtgcttccctttcgaaacaagtagttactttataggagtcttagatattgccggctttgaatactttgagcacaattcttttgagcagttctgcatcaattactgtaatgagaaactccagcagtttttcaacgagcggattctgaaggaggaacaggaactctatcagaaagagggtctgggcgtgaatgaggtacactacgtagacaatcaagactgtatcgaccttatcgaagccaaactggtggggatcttagacatcctcgacgaggaaaataggttacctcagcctagcgatcagcatttcaccagcgccgtccatcagaaacacaaagaccactttcggcttacaatcccccgcaaaagcaagctagcggtacaccgaaacatccgagacgatgaaggctttatcattcggcacttcgcaggggcagtatgctacgaaacaacgcagtttgttgaaaaaaataatgacgcactccacatgagtctggagtctttgatctgcgagtcacgcgataaattcattagggaactctttgagtcaagtacaaacaataacaaggacacaaagcagaaggctggcaagttgagtttcattagtgttgggaataaattcaagacacagcttaatttgcttctggacaaactgcggtcaactggagccagcttcatacgctgcattaagccaaaccttaaaatgacctctcatcactttgaaggcgcacagattctctcacagctacagtgttcgggtatggttagcgtactggatcttatgcagggcggctacccgtctcgcgcctcctttcatgagctctacaacatgtataagaagtatatgcccgacaagttggcaagactcgaccccaggctattctgcaaggctctgttcaaggcactgggtctcaatgagaatgactataagttcggattgacaaaagtcttttttaggcccggcaagttcgcggagtttgatcaaatcatgaagagcgatccagaccatctcgccgagctagtaaaacgagtgaaccactggctaacatgttcccgctggaaaaaagtgcagtggtgttccttgtccgtaattaaattaaagaacaagattaagtatcgggcggaggcttgtatcaaaatgcagaaaactatcagaatgtggctgtgcaagagaagacataagcctaggattgatgggctggttaaagtcggaactttgaaaaaacgtctggataagtttaatgaagtcgtatccgtcttaaaggatggcaaaccagagatgaacaagcagattaagaatttggaaatcagcatcgataccctgatggccaagataaaaagcactatgatgacccaagaacagatacagaaagagtacgatgctctggtcaaatccagtgaggagctcctttcagcccttcagaaaaagaaacagcaggaggaggaggctgagagattacgcaggattcaggaggaaatggaaaaagaacgaaaaagaagagaggaagatgaaaaaagaagaaggaaggaagaggaagagcgccgaatgaagttggaaatggaggccaaacgtaagcaggaggaggaggaaaggaagaaacgggaggacgatgaaaagcgaatccaggccgaggtcgaggcacaactcgctaggcagaaggaagaggaatcacagcaacaggccgtgctggaacaggaacgccgtgatcgtgagttggctttaaggatcgctcagtccgaggctgagctgatttctgacgaggcacaggctgatcttgcactgcgtcgcaatgatggcaccaggccaaagatgacaccagagcaaatggcaaaggaaatgtccgaatttctgtcacgggggcccgccgtgctggccaccaaggccgctgccggaacaaagaagtacgatttaagtaagtggaaatatgctgagctgagagacaccatcaacactagctgtgacattgagctgctggccgcatgtcgggaggaatttcaccgtcggctgaaggtttaccacgcctggaaaagtaaaaataaaaagcgaaataccgagactgaacagcgtgccccaaagtccgttactgattacgatttcgcaccatttttgaacaacagtccccagcaaaacccagctgcccagatccctgctcggcagagggagatcgagatgaatagacaacaacgtttctttcggatacccttcattcgccccgccgatcagtataaggacccccagagcaaaaaaaagggctggtggtatgcccattttgacgggccgtggatcgcccgacaaatggagcttcaccctgataagccgcctatcctactcgtggccggaaaagatgatatggaaatgtgcgaactgaacttggaagaaaccgggcttacccggaagcgaggggccgaaattcttccacgtcagtttgaggagatctgggaacggtgtggaggcatacagtacttacagaatgctattgaatccaggcaggcgaggccaacgtacgctactgctatgctgcaaagcctactgaagtag

SEQ ID NO: 196245 - DNA, 3861 bp, synthetic construct
  misc_feature 1..3861: note = Description of Artificial Sequence: Synthetic coding sequence
  source 1..3861: mol_type = other DNA
atggaggacggcaagcccgtgtgggccccccaccccaccgacggcttccagatgggcaacatagtggacataggcccggactctttgactatcgaacctcttaaccagaaggggaagaccttcctcgctctgattaaccaagtatttccagccgaagaagattcaaagaaggacgtggaagacaattgcagtctgatgtacttgaacgaggcaaccttgctgcacaatatcaaagtccggtactccaaggatcggatttatacatacgttgccaatatcttaatcgccgtcaacccctattttgatatccctaaaatatactctagtgaggccattaaaagctatcaaggcaagagcctgggaacccgcccacctcatgtgttcgctatagctgacaaggccttccgggatatgaaggtgcttaaaatgtcccagtctatcatcgtatcgggcgagtcaggcgcagggaagacagagaacactaaatttgtgctgagatatctcaccgagagctacgggaccgggcaggatatcgatgatcgcatagtagaggcgaatcccctcttggaggctttcggaaatgcgaagacagtcagaaataataattcctccagatttgggaaattcgttgagatccacttcaatgaaaagtcaagtgttgttggtggcttcgtctctcactatctgctcgagaaatctcggatttgcgtacagggcaaggaggagagaaactaccatatcttctatagactgtgcgctggtgccagtgaagacattcgcgagaagcttcatctgagctcacccgacaactttaggtacctgaatagaggctgtactaggtatttcgccaacaaagagactgataaacagattctgcagaaccgtaagtcgccggagtaccttaaggctggatctatgaaagaccccctacttgatgaccacggggacttcatccggatgtgtactgccatgaaaaagattggtctggatgacgaagaaaagctcgacctctttcgggtggtcgcgggggtcctgcaccttggcaatatcgactttgaggaagcgggatccacatccggcggatgcaacttgaaaaataagtccgcccagtcattagagtattgcgctgaattgctcggactcgaccaggatgatctgcgagtgtccctgacgaccagggtcatgctgacaactgcaggaggtacaaagggcactgtgattaaggtaccgctgaaagtggagcaagccaacaacgcgagggatgcactagcgaagactgtctacagccacctcttcgaccatgtcgtcaatcgggtgaaccagtgtttcccttttgaaaccagctcctatttcatcggggtcctcgacatcgctgggtttgaatacttcgagcataacagcttcgaacaattttgtataaactattgcaatgagaagctccagcaattcttcaacgaacgtatcttaaaggaggaacaggagctttaccagaaggaaggcctcggcgtgaatgaagtacactacgtggataaccaggattgcatcgacttaatagaagcaaagctggttggtattttggacatactggatgaggagaacagattaccccagcccagtgaccaacatttcacatccgcggtgcatcagaaacacaaagatcactttaggctgaccattcccaggaagagtaagctcgccgtgcatagaaacatccgcgatgacgaggggtttataataaggcatttcgcaggcgccgtgtgctacgagacaactcaatttgttgaaaaaaacaacgatgccctgcacatgtccctggagtctctgatttgtgagtcaagagataagtttatcagagagctcttcgaatcttctaccaataataacaaagacaccaaacaaaaggccggcaaacttagttttatcagcgtgggcaataaattcaagacacagctgaacttgcttctggataaattacgctcaactggcgctagcttcatcaggtgtattaaacccaatctgaagatgacatcacaccattttgagggcgcccagattttatcccaactgcagtgttccggcatggtgtcggttttggacttgatgcaaggcggatatccttcaagagccagttttcatgagctctacaacatgtacaagaagtacatgccagataagcttgcccgactcgacccaaggctcttttgtaaggccctcttcaaagcccttggcctgaacgaaaacgactataaattcggcttaactaaggtcttctttcgacctgggaagttcgccgaattcgatcagattatgaagtcagaccctgaccacttggccgaactggtgaaaagagttaatcattggctgacatgcagccgctggaaaaaagtgcagtggtgctccctgtctgtgattaagcttaagaataagatcaagtatcgggcagaggcatgtattaagatgcagaaaacaattcgcatgtggctgtgcaagcgacgacataagccaagaatagatggcctggtcaaagtgggtacactgaagaagcgcctcgataagtttaatgaagtcgttagcgtgttgaaggatggtaagccagaaatgaataagcagatcaaaaacttggagatctccatagatacactgatggccaagatcaaatccacgatgatgacgcaggaacagatccagaaggaatacgacgccctggtaaagtccagtgaggagctgttgtctgccctgcagaaaaagaagcagcaggaagaagaggctgaacgcctgcggcgcattcaggaagagatggaaaaggaaaggaagcggagagaggaagacgagaagaggcgacggaaggaggaggaagaaaggaggatgaagttagagatggaggcaaagagaaagcaggaggaggaagaacgcaaaaaacgcgaggacgacgagaaacgaatccaagcggaggtcgaagcacagctggcccgccagaaagaggaggagtcccagcagcaggcagtgcttgagcaggagcgcagggaccgtgaactcgcccttcggatagcccaatctgaggccgagttgatcagcgacgaagctcaagctgacctggccctacggcggtacctggatagctacccagtgacaagcaagaacgatggcacacggcccaagatgactcccgaacaaatggccaaggagatgtcagaatttctgtccagagggcccgcagtgctggcgacaaaggcagccgccggtactaagaagtatgatttatccaagtggaagtatgccgagctgagggatacaattaacacctcatgtgacatcgagctgttagccgcctgtcgggaagaatttcatcgcaggttgaaggtgtatcatgcttggaagtcaaagaacaagaagcgcaacaccgaaactgagcagcgcgcgcccaagagtgttacagattatgcccagcagaaccctgctgcccagataccagctaggcagcgcgagattgaaatgaatcgtcagcagcgcttctttcgcatccccttcatcaggcctgccgaccagtacaaggaccctcagtcaaagaaaaaggggtggtggtacgcacactttgacggaccttggatcgcaagacagatggagttgcaccctgacaagccacctatcctgcttgtggctgggaaggatgacatggagatgtgtgagctgaacttggaggagacaggactgacacgcaaaaggggcgcagagatcctgcctagacagtttgaggaaatttgggaaagatgcgggggaatccagtatcttcagaacgctatcgagtccaggcaggcccgccctacctacgccaccgccatgctgcagagcctgctgaagtag

SEQ ID NO: 196246 - DNA, 3789 bp, synthetic construct
  misc_feature 1..3789: note = Description of Artificial Sequence: Synthetic coding sequence
  source 1..3789: mol_type = other DNA
atggaggacggcaagcccgtgtgggccccccaccccaccgacggctttcagatggggaacattgtggatatcgggcccgactctctgactatcgaacccctgaaccagaaaggcaagacttttctggccctgatcaatcaagtgttccctgcggaagaggattctaagaaggatgtagaagataactgttctcttatgtacttaaacgaagccactctcttgcacaacatcaaagtgcggtatagtaaggataggatctatacctacgtggcgaatattctgatcgcagtgaacccatacttcgacattccgaaaatctattcaagcgaggctattaaatcctatcaggggaaatcactcggaaccagacccccccatgtatttgcgatagcagataaggccttcagagacatgaaagtcttgaaaatgtctcagtccattatcgtgtctggcgagagcggcgccggaaagactgagaataccaaattcgttctgaggtatctgaccgagtcctatggcacaggtcaagatatcgatgataggatcgtcgaggccaatccgctactagaggccttcggaaatgctaaaaccgtcaggaacaataactcctcgagatttggcaaattcgttgagatacacttcaacgagaaatctagcgttgtgggcggattcgtttcccactacttactagaaaaaagtcggatttgcgtccaaggtaaagaagaacggaattaccatattttctaccggctttgcgcgggagcttcggaggacatacgcgagaagttgcatttaagctcccctgacaactttcgatacctgaatagaggctgtaccaggtatttcgcaaacaaagagaccgataagcagatcctgcagaacagaaaaagccctgagtatctcaaagccggttccatgaaggacccccttctggatgaccacggggattttattagaatgtgcactgctatgaagaagatcggcctcgacgatgaggagaaacttgatctgttccgcgtggtggcaggagtactacatctgggtaacatagacttcgaggaggccggatcgactagtggcggatgtaatctgaaaaataagagcgcacagtctctcgaatactgtgccgaattattgggactcgatcaggacgacctgcgtgtgtccctgacgaccagggtcatgctcactaccgctggaggcaccaagggcactgtgatcaaggtgcctcttaaagtggaacaggctaataacgctagagacgctcttgcaaagaccgtttacagccacctctttgaccacgtggtgaacagggtgaatcagtgctttccattcgagacaagttcctactttatcggcgtgctggatatagcaggtttcgagtattttgagcataatagcttcgagcagttttgcataaactactgtaacgaaaagctccagcagtttttcaatgagcgtatcctaaaagaagagcaagagttgtatcagaaagaagggttaggagttaacgaggtgcactacgtcgacaaccaggactgtatcgacttgattgaggcgaagctggtcgggatccttgatatccttgatgaggaaaacaggcttcctcagcctagcgaccagcatttcacatcagccgtccaccagaaacacaaagaccacttcaggctgacaatccctcggaaatcaaagctggctgtgcacagaaacattcgtgacgacgaagggtttatcattcggcatttcgccggtgctgtctgctacgagaccacgcaattcgtggaaaagaacaatgatgcgctacacatgtcactggagtctttgatttgtgaatcacgggataagttcattagggaactatttgaaagttccactaacaataataaggacaccaaacaaaaagcgggcaagcttagttttatcagcgtgggcaacaaattcaagactcagctgaacttgctgctggataagctgcggtcaaccggtgccagtttcatccggtgcataaaacctaacctgaagatgacctcacaccattttgagggcgcgcagatcctgagccagctacaatgctccgggatggtttccgtgcttgatttaatgcaaggaggctatcccagtcgagctagcttccatgagctgtacaatatgtacaaaaagtatatgcccgacaagctcgcccgactcgatcctaggctgttctgtaaggcactgttcaaagccctcgggctcaacgaaaacgattacaagtttggactgaccaaggtgttttttcgtccaggcaaattcgcagaattcgaccagatcatgaagtcagaccccgatcacctggctgagctggtcaaacgggtgaaccactggctgacttgctccaggtggaagaaagtgcagtggtgttccctgagtgtaatcaaactcaagaataaaatcaagtatcgcgccgaggcctgcattaagatgcagaaaactatccgaatgtggctgtgtaagaggagacacaagcctagaatagatgggctggtgaaagtcggtaccttgaagaagcgcctggacaagttcaatgaggtggtcagcgtactgaaggatggcaagcccgaaatgaacaaacaaatcaaaaacctggaaatatccatcgacacgctcatggccaaaattaaatcaacgatgatgactcaggagcagatccaaaaggagtatgatgcactggtgaagtcctccgaagagctgctaagcgctctacagaaaaaaaaacaacaagaggaggaagcggagcgcttgcgccggatacaggaagaaatggaaaaggagcgcaagaggcgcgaagaggacgaaaaaagaaggcgcaaagaggaggaagaacggagaatgaagctggagatggaggccaaaagaaagcaagaggaggaagaaagaaagaagagagaggatgacgaaaagcgcattcaggcagaagtcgaggctcagctcgcaaggcagaaagaagaggagagccagcagcaggccgtattagagcaggagagacgggaccgggaattggccttgcgtatcgcacagtccgaggctgagctcatctcagatgaggcacaggcagacctggccttacgcagggggcccgccgtgttagcaacgaaagctgcagccggtacaaaaaagtatgacctgagcaagtggaagtatgccgaattgcgggacacgatcaatacctcttgtgatatcgagctgttagccgcctgtcgggaagaatttcacagaaggttgaaggtctatcacgcctggaaatcaaaaaataagaaaaggaacacagagaccgaacagcgtgctcccaagtcggttactgactatgacttcgcccccttcttaaacaattcacctcaacaaaatcccgcagcacagatacccgccagacaacgggagatcgaaatgaacaggcagcagagattctttcgtattcccttcatccgacccgccgaccaatacaaggacccacaaagcaagaagaagggttggtggtatgctcactttgatggtccctggattgcccggcagatggaactgcatccagataaaccgcctatcttgctggtggccggtaaggatgatatggagatgtgtgagcttaacctggaggagacaggattgacccgcaagagaggcgctgagatcctcccgcgccagttcgaggagatttgggagcggtgcggagggatccagtacctgcagaatgctatcgaatcgcgacaagcccgccctacatacgcgacggccatgctgcagagtttgcttaagtag

SEQ ID NO: 196247 - DNA, 3888 bp, synthetic construct
  misc_feature 1..3888: note = Description of Artificial Sequence: Synthetic coding sequence
  source 1..3888: mol_type = other DNA
atggaggacggcaagcccgtgtgggccccccaccccaccgacggctttcagatgggcaatatagttgacatcggcccagactcactgacgatcgagcctttgaatcagaaaggaaaaacgtttctggctctgattaatcaggtgttccctgccgaagaggattctaaaaaggatgtggaggataactgcagcctcatgtatttaaatgaggccaccctccttcacaacatcaaagtgagatatagcaaggatcggatctacacttatgtcgccaatatactcattgcagtcaacccgtacttcgatatccccaagatctattctagtgaggctattaagtcgtaccaggggaaatccctcggcactcgcccccctcatgttttcgccattgccgacaaagctttcagagacatgaaggttctgaaaatgtctcagtcaataatcgtaagcggtgagtccggagctgggaagacggaaaatactaagtttgtgctgagatatctcacggagtcatacggaacagggcaagatatcgatgaccgcatcgtggaagccaaccccctgctggaagctttcggaaatgctaaaaccgtgcggaacaacaacagcagccgattcgggaagtttgtggaaatacacttcaacgagaagagtagcgtggtcggaggttttgtctcacattatctgttagaaaaatccaggatctgcgttcaagggaaagaggaaaggaattaccacatcttttacagactctgtgcgggggcgtctgaagacatccgggagaaacttcacctgagctcacctgataacttccggtatctgaaccgggggtgcacaaggtatttcgcgaacaaggagaccgacaagcagattttacagaatcggaagtctccagaatatctcaaagcaggcagcatgaaggatccactgctcgatgaccacggggatttcattagaatgtgtactgccatgaaaaagatcggcctcgatgatgaggaaaagctcgacctctttagggtggtcgctggggtgcttcatctggggaatatcgacttcgaggaggccggaagcacttccggcggctgcaatctgaagaataaatccgctcagagtctcgaatactgcgccgaactcctcggtctagatcaggatgacttacgcgtgtccctgacgactcgcgtcatgcttacaacagctggcggcacaaagggcacagtgatcaaggtccccttgaaagttgagcaggctaataacgctcgagacgctctagcaaagactgtctactcacatttgtttgatcacgtagttaaccgagtgaatcagtgcttcccgtttgaaacatccagctatttcattggcgtgcttgacattgcaggctttgagtatttcgagcataactcttttgagcagttctgcataaactattgcaacgagaaactccagcaattctttaacgagcgtatactgaaagaggaacaagagctataccagaaagagggcttgggcgttaatgaagtacattatgttgataatcaggactgcatcgacctaatagaagccaaactggtgggaattttggacatcttggacgaagagaatagactgccacaacccagcgatcagcactttacaagtgcggtacaccagaagcacaaagaccacttccgcctcaccatccctagaaagagcaaactggcggtgcaccggaatatacgggatgacgagggtttcattatccgacacttcgctggggccgtgtgttacgagactacacagtttgtcgaaaagaataacgatgctctgcatatgtccctcgagtctctgatatgtgagagccgggataaattcattagggagctatttgagtctagcacaaacaacaacaaagatactaagcagaaggcagggaagctgtctttcataagtgtgggtaataagtttaagacccagctgaatctgctcctcgataagctgcgtagcaccggcgccagctttatccggtgtatcaaaccaaacttgaaaatgaccagtcaccactttgaaggggctcagatcttgtcacagttacagtgctcaggtatggtgagcgttctggatctgatgcaaggcgggtacccaagtcgggcgtcctttcatgaactttataacatgtataaaaaatatatgcctgataaattggcgagactagacccaagactcttctgcaaggctctgttcaaagccctgggtcttaatgagaatgactataaattcggtctgaccaaagtgtttttccgacctggcaaattcgctgagttcgaccagattatgaagagcgaccccgatcacttggccgagcttgttaagcgggtgaaccattggctcacttgctcccgctggaaaaaggtgcagtggtgtagtttgtcagttatcaaactgaaaaacaagatcaaatatcgagcagaggcctgcataaagatgcagaaaaccatccggatgtggctctgcaagaggcggcataagcccagaatcgatggactggtcaaggtggggaccctgaagaagcgtctggataaatttaacgaggtggtgtctgttctcaaggatgggaaacctgagatgaacaagcagatcaaaaatcttgaaatctccattgataccctgatggctaaaataaagtcgacaatgatgactcaagagcagatccagaaagagtacgacgccctggtgaagagtagcgaagaattgctctctgctctgcagaaaaagaaacagcaagaggaggaggccgagcgcctcaggcggatccaagaggagatggagaaggaaagaaagaggagggaggaggacgagaaacgcagaagaaaggaagaagaagaacgacgcatgaagctagaaatggaggctaaacggaaacaggaagaggaagaaaggaagaagagggaggatgacgaaaagcgaatccaggccgaagtggaagcgcagttagcacggcagaaagaggaagaatcgcaacagcaggcagtgctggaacaggaacggagggacagggaactggcgctcagaatcgcacaatcagaggctgagctgattagtgatgaagctcaggccgacctcgccctgcggagatatcttgattcctaccctgtcacctctaagaacgacggcaccaggcctaaaatgacgcctgagcagatggctaaagaaatgtctgaattcttgtcaagaggtccggctgtgttggctacaaaggccgcggcaggcaccaaaaaatatgatttgtctaaatggaagtacgcagaactcagagataccattaatacaagctgcgatatcgaattgctagctgcctgtcgcgaggagttccaccgaagattgaaggtctaccacgcgtggaaatccaaaaacaagaagaggaacaccgagactgagcagcgtgcccccaagagtgtcaccgattatgacttcgcacccttcctgaacaactcaccccaacagaatcctgccgctcagatccccgccaggcagagggaaatcgaaatgaaccgacaacagaggtttttcaggatccctttcatccggccggccgaccaatacaaggaccctcagtctaagaagaaagggtggtggtacgcacactttgacggtccgtggatcgcccgccagatggaacttcacccagacaaaccaccaattctcctggtggcaggcaaggacgatatggaaatgtgtgagctcaatctggaagagacaggcctcacccggaaacgaggtgccgagatcctgcccaggcagtttgaagaaatctgggagagatgtggaggcatccagtatctacagaatgctatcgaatccagacaggcgagaccaacatacgcgaccgctatgctacagagtttgttgaagtag

SEQ ID NO: 196248 - DNA, 525 bp, synthetic construct
  misc_feature 1..525: note = Description of Artificial Sequence: Synthetic coding sequence
  source 1..525: mol_type = other DNA
aagcggcgggaggaggacgagaagcggcggcggaaggaggaggaggagcgcaggatgaaactcgaaatggaggccaaacgaaagcaggaggaagaggaaaggaaaaaacgggaagacgatgaaaaacgcatccaggccgaagtcgaggcccagctcgccagacagaaggaagaagagtctcaacagcaagccgtgcttgagcaggaacgccgagaccgtgagcttgctctgcgtatcgcccagtccgaggccgaactaatttcggacgaggctcaggcagatctcgccctgagaagtctcgattcatacccagtcacttcaaagaacgacggcactaggcccaaaatgacccccggccccgcagttctcgccaccaaggcggcagctggaacaaagaaatatgacctgtcaaaatggaagtacgctgaactcagggatactattaacacatcatgtgacatcgagctgttagccgcctgtcgggaggaattccataggcggttgaaagtctaccacgcgtggtag

SEQ ID NO: 196249 - DNA, 6276 bp, synthetic construct
  misc_feature 1..6276: note = Description of Artificial Sequence: Synthetic coding sequence
  source 1..6276: mol_type = other DNA
gccctgctgcagaagggcgaccacgtgtggatggacctgcggctgggacaggaatttgacgtgcccattggcgccgttgtaaaactgtgcgattccggtcaagtacaggttgtggacgatgaggacaatgaacactggatcagtccccagaacgccactcacataaaacccatgcatccaacgtcagtgcacggtgttgaggatatgattaggctcggcgaccttaacgaagcaggaattctgcggaacctcttaattaggtaccgtgaccatctcatctatacttatacagggagtatcctggtcgctgtaaatccctatcagttgctctccatctatagcccagagcacataaggcaatacactaataagaagatcggggaaatgcccccccacatttttgcgatcgccgacaactgttacttcaacatgaagcgaaattcccgggatcagtgctgtataatttccggcgagtctggcgctggcaagacagagtctacaaaacttatactgcagtttttggctgctatctctgggcagcactcatggatagaacagcaggtgcttgaggccacacccattctagaggccttcggaaatgcgaaaactattaggaatgataactcgtcaagatttggtaaatacatcgatatccacttcaacaaaagaggcgctatcgaaggtgcaaaaattgaacagtacctgttggaaaaaagcagggtgtgtcgccaggctctggacgagcgaaactatcatgtgttctattgtatgttggaaggcatgtccgaggatcaaaagaaaaagctcggcctgggtcaggcctcagactacaactatcttgctatggtaaaccctccagatctgatgtcttgtctgacgagcaggaccctcattactagaggggagactgtttccacgcccctgagccgagagcaggctctcgatgtcagggatgccttcgttaaaggaatctacggtagactcttcgtttggattgtagacaagatcaatgctgccatatataagcctccttcacaggatgtcaagaactcacgacggtcaattgggttacttgatatctttggcttcgagaattttgccgttaattctttcgaacaactctgcataaattttgccaacgaacaccttcaacagttcttcgtaagacacgtctttaaactggagcaggaggagtatgatctggagtccattgactggctacacattgagttcacagacaatcaggatgcacttgatatgatcgctaacaagcccatgaacattatatcgttaattgacgaagaatcgaagtttccaaaattcctggagaaaaatcgtgatacccttcacggtgatattatccagttggtgcacagcagcaggaacaagttcatcaaacagatcttccaggccgacgtcgccatgggtgccgagaccagaaagaggtctccaaccctgagcagccagttcaagaggtccttggaactcctgatgcgcacactaggagcgtgtcaaccattctttgtgcgatgcatcaaacccaacgaattcaaaaagcctatgctgttcgacaggcatctgtgcgtacgccagcttcggtatagcgggatgatggaaaccatcagaattagaagggccggttatccgatcagatatagctttgtggaatttgttgagaggtaccgggtgctactgcccggagtgaaacccgcttataagcagggcgatctgcggggcacgtgccagaggatggcagaggcagttttgggcacacacgacgattggcaaatcgggaagaccaagatattcctgaaagaccaccatgacatgcttttggaggtcgaacgggacaaggcgataactgaccgggtgatcttattacaaaaagttattcgaggcttcaaggaccgttcaaatttccttaaactgaagaacgccgctacactgattcaacggcattggcgaggccacaattgtcggaagaattacgggctgatgcggttgggatttcttaggctccaggcgctgcacaggtcaagaaagttacatcagcagtataggctcgctaggcagagaatcatccagttccaagccaggtgtagggcatatctggttcgcaaggcattcaggcacagattgtgggctgtgcttaccgtccaagcctacgctcgggggatgatcgccaggcggcttcaccaacggctgagggccgaatatctgtggagactggaagcagagaagatgaggcttgccgaagaagaaaagttgaggaaagagatgtcagctaaaaaagccaaggaggaagctgaacgcaaacatcaagagaggctggcacagttggcaagagaagatgcagagcgcgaactcaaggagaaggaagctgccaggcgcaagaaggagctgttagagcagatggagagagcacgccacgaacctgtgaatcattccgatatggttgataagatgttcggcttcctgggcacctctggagggttacctgggcaggagggtcaagccccttctggctttgaagacctggaaagaggtagaagagagatggtcgaggaggatctggatgctgctctacctctgccagatgaggacgaagaagacctgtcagagtacaagtttgccaagttcgccgccacttactttcagggtactaccactcactcttatacccgaaggccgttgaagcagccattgctataccatgatgacgagggcgaccaacttgccgcactggccgtgtggatcaccattttaaggtttatgggggatctgccagagccgaaataccacaccgctatgagtgacgggtcggagaagatccctgtcatgaccaaaatttatgaaacattaggcaaaaagacctataaaagggagcttcaggcgctgcagggtgagggcgaggctcagttgccggaggggcagaagaaatcgtccgtgagacacaagttggtgcaccttactctgaaaaagaagtctaaactcactgaggaagtgaccaagaggctgcacgatggtgaaagtacagtccaaggtaattcgatgctcgaggatcggccgacttccaatttggaaaagttgcactttatcattgggaacgggatcctgcgaccggctttaagggacgaaatctactgccagatttccaagcagttaacccacaatccatccaagtcctcttatgctcggggatggattctggtgtccctgtgtgtcgggtgttttgcccccagcgagaaatttgttaagtacctcagaaattttatacatggggggcctcccggatacgccccatactgtgaagaaagactgaggcgaacatttgtgaatggtaccaggactcagccaccgtcatggctcgaactgcaggctactaagagtaagaagcccattatgctcccagtgacctttatggatggcacgaccaagacccttcttactgactctgctacgaccgctaaggagctatgtaatgctctagccgacaagatcagcctcaaggaccgtttcggcttttcgttatacatagcgctttttgacaaggtaagttctctgggatcgggatccgaccacgtcatggatgccattagccagtgcgagcagtatgcaaaagaacagggtgcacaggagcgcaacgccccttggcggttgttcttccggaaggaggtttttacgccttggcattcacccagtgaagataatgttgcgaccaacttgatctatcaacaagtcgttcggggagtcaaatttggagaatacaggtgcgagaaggaggatgacctcgcagagctcgcgtcccagcagtattttgtggactatggtagcgagatgatcctggaacggctcctcaacttggtgccgacatatatcccagatcgcgagattactcctctgaagacacttgaaaagtgggcgcagttagctatcgccgcacataaaaaaggaatctacgctcagcggagaaccgacgcgcagaaggtgaaagaggacgtggtttcctacgccaggtttaagtggcccttgttgttcagccgcttctatgaggcttacaagttctcaggcccatcattgcccaaaaacgatgttatagtagctgtgaattggaccggcgtatacttcgtagacgaacaggagcaggtcttattggaactgagcttccctgagattatggccgtgtctagctcacgagagtgtcgggtgtggcttagcttgggttgttctgacctcggctgcgctgccccccatagtggatgggcagggttaaccccagccgggccctgctcgccttgttggagctgcaggggagcaaagacgactgcgccttccttcacactcgctaccatcaagggcgacgagtataccttcacaagttcgaacgctgaggacatccgggacttagttgtaacatttctcgagggtcttcggaagcgctcgaaatacgtcgtggccctacaagataatcctaaccctgcaggggaagaatcaggctttttgtcctttgcaaagggggatcttatcattttagaccatgacacgggagagcaagtgatgaactccgggtgggccaatggaattaacgaacggacaaaacagcgtggagactttccgacagactctgtgtacgtcatgccaactgtgactatgcccccaagagagattgtggccctcgttacaatgacacctgatcagaggcaggatgtcgtaagactgcttcagttacgcaccgctgaaccagaagtacgcgccaaaccctatacccttgaggaattctcttatgattatttccgacccccacctaaacataccctttctagggtgatggtgagcaaggctcgaggcaaagataggctgtggagccatacccgagagcctctcaagcaggcgctgctaaaaaaactgcttggatccgaagagctgtctcaagaagcgtgcctcgcattcatcgcggttcttaaatatatgggtgactatccgtccaagaggacccggtctgtgaatgagctgacagaccagatttttgaggggcctctgaaggcagaacccctgaaagatgaagcatacgtgcagatccttaagcagctgaccgataaccacattagatattctgaggaacgcggctgggagttgctgtggttatgcaccggcctttttcccccaagcaatattctgctaccacacgtgcagcgattcctgcagagccgcaagcactgtccattagcaatcgactgtctgcaacggctgcaaaaggcgttgcgcaatggctcccggaagtatccccctcatctcgtcgaggttgaagcgattcagcacaagaccacccagatcttccataaagtctattttccagatgacacagacgaggcattcgaggtggagagcagcaccaaggcaaaggatttctgtcagaatattgccacccgattactcctgaagagcagcgaaggattcagcttgttcgtcaaaatcgccgataaggtgctgtcagttcccgagaacgatttctttttcgacttcgtcaggcaccttacagattggatcaagaaggcacgtccaatcaaggacggcatcgtgccctccttaacgtatcaagttttttttatgaaaaaactgtggaccactaccgtgccgggcaaagacccaatggccgacagcatcttccattattaccaggaattgccgaaatatctccgcggctaccataaatgtacaagggaagaagttctccagttaggagccctcatttaccgtgtgaagtttgaggaagacaaatcttattttccatccatacccaaacttttaagggagctggtcccacaggacctgatacgccaagtctcacccgatgattggaagcggagcatagtggcctatttcaataaacatgcaggcaaatctaaggaggaggctaagctggccttcctgaagctgattttcaagtggccaactttcgggtccgcttttttcgaggtaaagcagactaccgagccaaatttcccagagatcctgctcattgccatcaataagtatggggtttccctgatagaccccaagaccaaggatattctgaccactcatccatttaccaagatttcaaattggagttcaggcaatacttattttcacataacgatcggcaacttggtgcgggggagtaagctcctttgtgaaacatctctgggttacaagatggatgacctgctgacctcttatatcagccagatgctcactgcaatgtccaagcagaggggttcccgctccggcaagtag

SEQ ID NO: 196250 - DNA, 6555 bp, synthetic construct
  misc_feature 1..6555: note = Description of Artificial Sequence: Synthetic coding sequence
  source 1..6555: mol_type = other DNA
gccctgctgcagaagggcgaccacgtgtggatggacctgcggctgggacaggagttcgatgtcccgattggcgccgtggtcaaactgtgcgattccggacaagtgcaggttgttgatgacgaagacaacgagcattggataagtccacagaacgctacacatattaagcctatgcaccccacttccgtgcacggggtcgaagatatgattcggctcggcgatcttaacgaggccgggatactgagaaatctgctgatccggtacagagaccatttgatctacacttacactgggagtatcttagtagccgtgaacccgtatcagctactgtctatatattccccagaacatatcaggcagtataccaataaaaagataggggagatgcctccgcatatcttcgccatcgctgacaattgttacttcaacatgaaaagaaactcacgagaccagtgctgcattatttcgggcgaatccggggcaggtaagactgagtctactaagctcatattacagttcttagccgcgataagcggacagcactcgtggatcgaacaacaggtacttgaagccacaccaatattggaggccttcggcaatgccaagaccattaggaatgacaactcatcaaggtttggaaagtatatagacattcatttcaacaaacgcggagcaatcgaaggcgccaaaatcgagcagtacctgctggaaaagtcacgggtgtgtagacaagctctggatgaacggaactaccacgtcttctattgtatgctcgagggtatgtcagaagatcaaaaaaaaaaactggggctgggccaggcctcagattacaattacctggccatgggcaactgcataacttgcgagggacgcgtcgattcacaggagtatgcaaatatacgctcagcaatgaaggttctaatgtttaccgacaccgaaaactgggaaatcagcaagctcctggccgcaattctgcaccttgggaatcttcagtacgaggctcgcacgttcgaaaatttagatgcatgtgaggtgctgttctccccttctttggccaccgccgcctcattgttagaggtaaacccaccagatctaatgagctgtctgaccagtcggaccctaatcactagaggggagacggtaagcacaccattgagtcgcgaacaagctctcgatgtaagggatgcctttgtgaaggggatttatgggagactttttgtgtggatcgtggacaaaattaatgcggcgatctacaaacctccttctcaggacgtgaagaacagcaggcggtccataggccttctagatattttcggatttgaaaacttcgccgtcaacagcttcgagcagctgtgtatcaactttgctaacgaacacctgcagcagttctttgtgcgtcacgtctttaaactggagcaggaggagtacgacctagaatcaattgattggctacacatagaatttactgataatcaggacgccctggacatgatcgccaataagccaatgaatatcatctctctgatcgatgaagagtcgaaattccctaagggaactgacactacgatgttacataaattaaacagccaacataaactgaatgctaactacataccacctaagaacaaccacgagactcagttcggaatcaaccacttcgctgggatcgtgtattacgaaacccagggattcttggagaaaaatagggataccctccacggtgacatcatccagctggtgcactccagcaggaacaagttcatcaaacagatatttcaggctgatgtcgctatgggggccgaaacgaggaaacgctctcccactctgtcttcccagtttaagcgctccctcgaactgctgatgcgcaccctgggagcctgccagccatttttcgtccgctgtatcaaacccaatgaatttaagaaacctatgctgttcgatcggcacttgtgcgttcgccaattacgatatagcgggatgatggaaaccatccgcatccgcagggcgggctatcctatccgctattccttcgttgagttcgtcgaacgctatagagtattgctgcctggggtcaaacctgcatacaagcagggtgacctccggggcacctgtcagcgaatggcagaggccgtgctgggcacccacgacgactggcagattggaaagactaaaattttcttaaaggaccaccacgacatgctcctcgaagtagaacgcgataaggctatcaccgaccgagtgatcctcctgcaaaaggtgattagaggttttaaggatcgctctaattttttaaagctgaagaatgcggcaacactcattcagcggcattggcggggccacaactgcaggaaaaattatggtctgatgaggttaggattcctccggttacaggcgctgcatcggtcgcgtaaactacaccagcagtacagattggctagacagcggattatccagttccaggcccgctgtcgcgcatacctggtgcgaaaggccttcagacatcgtctttgggctgttctgactgtccaggcttatgccaggggaatgattgcacgtaggctgcatcagagactaagggcagaatacctctggcggctcgaggctgagaagatgcggctggccgaagaagagaaactccgcaaagagatgtccgccaaaaaggccaaagaggaggcggaaaggaagcatcaggagcgccttgcccagcttgcccgcgaggatgctgagagagagctcaaagagaaagaggccgcgaggagaaagaaggaactgctggaacagatggagcgcgcgcgtcatgaacccgtgaatcattctgacatggtcgataaaatgtttggctttctcgggacatctggcggtttgcctgggcaggagggccaggcgccaagcggattcgaggatctcgaaaggggacggagggagatggtggaggaggatcttgatgctgcactccccctgcctgatgaagacgaggaggatctgagcgagtacaagtttgccaagttcgccgctacttattttcagggcacaaccacccacagttacacacgtagaccgttaaagcaaccactactgtatcacgacgacgaaggtgaccagttagccgccttagccgtctggattaccatcctgaggttcatgggagatctgcccgagcctaagtatcacactgccatgtctgacggaagcgagaagatccccgtgatgaccaaaatctatgagactctgggcaagaagacgtacaaacgcgagctccaggccctgcagggagaaggtgaggtgaccaagcgcctccacgatggggaatctactgtgcaaggcaattccatgctagaagatcggcccaccagcaacctagagaagttgcacttcatcattgggaatggaatcctgcggcccgcacttagagatgaaatctactgccaaatctccaaacagctaacgcacaacccctctaaatcatcttatgctcgcggatggatcctggttagcctatgcgtgggatgctttgccccctcagagaaatttgtcaagtacctgcggaactttatacatggcggtccccccggatacgcaccttactgtgaagaacgactgcgaagaaccttcgtgaacggcactagaacacagcccccttcctggctggaactccaagctactaagtccaaaaagcctattatgctcccggtgacttttatggatgggacgactaagacactccttaccgacagcgccaccacagcaaaagagctgtgcaatgctctggcagacaaaatcagcttgaaggaccggttcggattttcattatatatcgccctctttgacaaagtgtcctcattaggctcagggtcagaccacgttatggatgccattagccagtgtgaacagtatgccaaggaacaaggcgcacaggagagaaacgccccgtggcgactgtttttcaggaaggaagtgttcacgccctggcactccccatccgaggataatgtggccacaaatctgatctaccaacaggtggtgcggggcgttaaatttggagagtaccgctgtgagaaggaggatgacctggctgagctggcatcacaacagtactttgtcgattatgggagtgagatgatcctcgagcggctgctgaatctcgtcccaacctatatccccgatcgcgagattactcccctgaaaactctggaaaagtgggcccagctcgccattgccgcccacaaaaagggcatctacgctcaacggcggaccgacgcccagaaggtgaaggaggacgtggttagctatgctcgctttaagtggcccctgctcttcagcagattttacgaggcctataagttctccggaccctctctccccaaaaatgatgttatcgtggccgttaactggaccggggtgtattttgtcgacgagcaggaacaggtcctcttagaactatctttcccagagattatggctgtgagctcatcccgggaatgtcgggtgtggctgagtttagggtgtagtgacctgggctgtgctgcgccccatagtggctgggccggtttgaccccagcaggcccgtgttccccatgctggtcctgccgtggggccaagactactgcaccatcttttacactagctactataaaaggagatgaatacaccttcacgagctcaaacgccgaggacatcagagacctggtcgtcacgtttctcgagggtctgaggaaacgatctaaatatgtggtcgctttacaggataaccctaatccggcaggggaggagtcaggtttcctgtcctttgcaaagggcgacctcattattctggaccacgacacaggcgagcaggtaatgaacagcggatgggccaacggcataaatgagcgaacaaaacaacggggggattttccaaccgactcagtgtatgtgatgcctactgtgaccatgccaccacgcgaaattgtggctctggtgactatgacgcctgaccagcggcaggacgtggtgcgcctactgcagcttcgaaccgccgaacctgaggtaagagccaagccctacaccctagaggaattttcctacgattattttcgccccccccccaaacacaccctttcaagagtgatggtcagcaaggctagagggaaggaccgcctgtggtcgcatacaagagaaccactcaagcaggccctgcttaaaaagttactcgggagtgaagagctgtcgcaagaggcctgtctggcctttatagcagtacttaagtatatgggggattacccttctaaacgcaccagatctgtgaacgagttgaccgaccagatttttgagggacccctaaaggccgagccgctcaaggacgaagcctatgttcagatccttaagcaactgactgacaaccatattcgatattcggaggaaagggggtgggagctattatggctctgcactggtctgttcccaccctccaatatcctgttacctcacgtacagcgatttctgcagagtagaaagcactgccctcttgccattgactgtctccagcggctgcagaaggcgttgaggaacggttcacgcaagtatccacctcacttggttgaggttgaggccattcagcataagacgacacagattttccataaagtgtatttccctgatgacaccgacgaggcctttgaggtggagagcagtacaaaggctaaggatttttgccaaaacattgctactcgactcctccttaagtcctcagagggattctctcttttcgtgaagatcgccgacaaggttctaagcgtgcctgagaacgatttttttttcgactttgtccgccatctcaccgactggataaaaaaagcacgtcctattaaggatggcatcgtgccctcactgacttatcaggtgttttttatgaagaagctgtggacaaccaccgtgcctgggaaggacccgatggcggattctatatttcattactaccaggagctgccgaagtacctgagaggataccacaagtgcactcgagaggaggttcttcagcttggggctctcatctacagggtgaaatttgaagaggacaaaagctactttccttctattcccaagctcctcagagagttggtgcctcaggacttgattcgccaggtaagccctgatgactggaaaagatctatcgtggcgtactttaacaagcacgcgggtaaatcaaaagaagaggctaagctcgcctttctaaaattgattttcaaatggcctacatttggatcggccttcttcgaagtcaaacagactaccgagccgaattttccagagatcctgcttatcgcgataaataagtatggggtgagtctgatcgatcccaaaactaaggatatactgactacacaccccttcactaagataagtaactggtcctcagggaatacgtattttcatatcacaatcggtaaccttgtgaggggctctaagctcttgtgcgagactagtctgggctacaagatggatgaccttttgacctcgtatatatcgcagatgctgacagccatgtccaaacagagagggtcacggtccggtaagtag

SEQ ID NO: 196251 - DNA, 3609 bp, synthetic construct
  misc_feature 1..3609: note = Description of Artificial Sequence: Synthetic coding sequence
  source 1..3609: mol_type = other DNA
gccctgctgcagaagggcgaccacgtgtggatggacctgcggctggggcaggaattcgacgtgccaatcggcgctgtggttaagctgtgtgattcgggtcaggtacaggtggttgatgatgaagacaatgagcattggatctcaccgcagaacgcaacccacattaagcccatgcatcccacttcggtccatggggtggaggacatgatacggttaggcgacctgaacgaggccggtatattgcgtaacctactaattcgctatagggatcatctgatctatacatataccggctccattctcgtcgctgtgaatccatatcagctgctgagtatttactcccccgagcacattagacaatatactaacaagaaaatcggagagatgccaccacacatatttgccatcgccgacaattgctatttcaacatgaaacgaaattcacgcgatcagtgttgtatcatctctggggaaagcggagcagggaaaaccgagtcaacaaaactgattttgcagtttctggccgccattagcggacagcacagctggattgagcagcaggtgctcgaggccactcccattttggaagctttcggtaatgccaaaaccattaggaatgataattctagccgtttcggaaaatacatagatatccactttaataaacgcggagcgattgaaggcgccaaaatcgagcagtatctactggagaagagtcgtgtgtgcagacaggccctggacgaaaggaactaccacgtgttttactgcatgctggaggggatgtccgaggatcagaagaagaaattaggtttggggcaggcttcagactacaattacctcgctatgggtaattgtattacgtgcgaagggcgagtggattctcaggagtacgccaatatcaggtccgcaatgaaggttctgatgttcactgacacggagaactgggagatatccaagctcctcgccgcaatcctgcacctgggtaacctgcagtatgaagctaggacttttgagaatttggacgcatgtgaggtactgttctcaccttccctggcaaccgcagcctcactgctggaggtaaaccctcctgatctgatgtcttgcctcacaagtcgaactctgattactcgcggagaaaccgtatcgaccccactgtcccgggaacaggccctggatgtgagagatgccttcgtgaagggaatttatggaagattgtttgtttggatagtggataaaattaatgccgccatttacaagcctcccagccaggacgttaagaacagcaggaggagcattggccttttagacatatttggatttgaaaattttgctgtgaacagttttgagcaactctgtatcaatttcgctaacgaacacctgcagcagttcttcgtgcgccacgttttcaaattagagcaagaagaatatgacctcgagagtattgactggctccacattgagttcacagacaatcaggatgccttggatatgattgcaaataaacccatgaatatcatttcattgatcgacgaagaaagtaaatttccaaaaggtactgacactaccatgctgcacaaattgaatagccagcacaagttgaacgcgaactacattcctccaaaaaataaccacgagacccagtttggaattaatcatttcgctggaattgtatattacgagactcagggctttctcgaaaagaatagagatacacttcacggcgacatcatacagctagtccattccagccggaataagtttatcaaacagatttttcaagcagatgttgccatgggggccgagactagaaaacggagtcctaccctgagcagtcagttcaagagaagtttagagttgttgatgaggaccctcggtgcctgtcagccattcttcgtccgctgcataaagcccaacgagttcaaaaagcctatgctgttcgataggcacctatgcgttagacagctgcggtactcaggaatgatggagacaattcggatcagaagagccggctaccccataagatactcattcgtcgaatttgtcgagcgctacagagtgctactgcctggcgttaagcctgcctataaacagggagacctcagaggaacttgccaaaggatggctgaggccgtgcttggcacccatgatgattggcagataggaaagactaagatcttcttaaaggaccaccatgatatgctgctagaagtagaacgcgacaaggcaattacagacagggtgattctgttacagaaggttattagggggttcaaagatcggtctaactttctgaagctgaagaatgcagctaccttgattcaaagacactggcggggtcacaattgtcgtaagaactatggactcatgaggcttggcttcttgcgcctgcaggctctgcacaggtcgcgtaagctgcaccagcagtacaggctggccagacagagaattatacagtttcaggccagatgccgggcttatctggtacgaaaagcttttagacataggctgtgggctgtgttgacagtgcaggcctatgcccgcgggatgatagctcgaaggttgcatcaaagacttagagccgagtacctttggcggttggaagccgaaaagatgcgtctggcggaggaagagaagctgcggaaggagatgtcagccaaaaaggcaaaagaggaagccgagaggaagcaccaggaacggttagcacagctcgctagggaggatgccgagcgagaactcaaggaaaaggaagctgctagacgcaaaaaggaactgctcgaacagatggaacgagcgaggcatgagccagtcaatcacagcgatatggtggataagatgtttgggttcctgggaacaagcggcgggttgcctgggcaagaaggtcaggccccgtcggggtttgaagatttggagaggggaagacgtgagatggtggaggaggacctagacgctgcactgcccttacctgatgaggacgaagaggatctaagtgaatataaatttgccaagttcgccgccacctatttccaggggacaacaactcactcatacaccagaagacctctgaagcagccactgctgtatcacgatgacgagggggatcagctagctgccctcgccgtttggatcaccattctcaggttcatgggagacttacccgagcctaagtaccacaccgccatgtctgacggatctgaaaagatccccgtcatgaccaaaatctacgaaacgctggggaagaaaacttacaaacgtgagctgcaagccctgcagggggagggggaagtgttacaggctcagttgccagaaggacagaaaaaatcctccgtgcggcacaaactggttcatctcactctaaaaaagaagtctaagcttactgaagaggtaacgaagagacttcacgatggggaatctacagtgcagggcaacagcatgttggaggaccggcctacctccaatctggagaagctgcatttcataatcggaaacggtatccttagacccgccctgagaagcgttccgcctgagagtctacttgttgctgaatggtgcctgtgccagcccagcaaacgtctgtcccaggcacctggctttgggttcgccgcttcatag

SEQ ID NO: 196252 - DNA, 6645 bp, synthetic construct
  misc_feature 1..6645: note = Description of Artificial Sequence: Synthetic coding sequence
  source 1..6645: mol_type = other DNA
gccctgctgcagaagggcgaccacgtgtggatggacctgcggctggggcaggaattcgatgtccctataggcgccgtcgtcaaattgtgtgattctggtcaggtccaagtggtggacgatgaggataacgagcactggataagcccccagaatgcgactcacattaagccaatgcatcccacatcagttcacggcgtggaggacatgatcagattgggtgatttgaacgaggccggcatcctacgaaacttactaatccgctaccgcgaccacctgatttacacctacactggctctatcttggtggctgtgaatccttaccagctgctgagtatttattcaccagaacatatccgccagtacaccaacaagaagattggagaaatgccgcctcacatctttgcaatcgccgacaattgctattttaatatgaagcgcaactctagagatcagtgttgtattattagcggggaaagtggcgccggcaagacagaatcaacaaagctgattcttcaatttcttgcggccattagcggacaacatagttggatcgaacaacaggtgctggaagccactccaattcttgaggccttcgggaatgccaagacgattaggaacgataactcaagtcgatttgggaaatacatagatatacatttcaacaagcggggggcgatcgagggtgccaaaatcgaacagtatctgttggaaaaaagcagagtgtgtcgccaggcactggacgagcgaaattaccacgttttctattgtatgctggagggtatgtccgaggatcaaaagaaaaagcttggtctagggcaagcctcagattacaactatctggcaatgggcaactgcatcacttgtgaagggcgtgtggactcccaagagtacgctaacatccgctccgctatgaaggtcctcatgtttaccgacacagaaaattgggaaatcagcaagctgctcgccgcaatattgcacctgggaaatctgcaatacgaggctcggacatttgagaacttagacgcatgcgaggtcctcttctctccatctctggctactgcggcctctctactggaagtgaatccaccagatcttatgagctgcctgacctcacgaacgttgatcacgagaggcgagacggtatcaactcccctgagtagagaacaggccctggacgttcgcgacgcctttgtaaaaggtatttatgggcgcttgttcgtctggatcgtagataagattaacgctgctatctacaaaccccccagtcaggatgttaagaatagcaggcggtcaattgggttgttagacatatttggttttgagaactttgccgtgaacagctttgagcaactctgcatcaacttcgcaaatgagcatttgcagcagttcttcgttagacacgtgtttaagttggagcaggaagaatacgacttggagtccatcgattggctgcatattgaattcactgacaaccaagatgcccttgatatgatcgccaataagcctatgaatatcatttcactgattgacgaggaaagtaagttcccgaaaggaactgataccactatgctgcacaaattgaacagtcagcacaaactcaatgccaattatatcccaccaaagaataatcatgagacccagttcggcattaaccactttgcgggtatcgtttattacgagacccagggcttcctggaaaaaaatagggatactttgcacggagacattatccaactggtacattcgtcaagaaataagttcatcaagcagatttttcaagccgacgtggctatgggcgccgaaacgcggaaacgcagccccaccctaagctcccaatttaagcgttctctcgagctacttatgagaacactgggagcctgccaacctttctttgtaaggtgtattaaaccaaacgaattcaaaaaaccaatgcttttcgaccgccacctttgcgttcgtcagttaagatatagtgggatgatggagactatccggattaggagggccggataccccatcaggtacagtttcgttgagttcgtcgagaggtaccgtgtgctcctcccgggcgtgaagcccgcgtacaagcaaggggatcttcggggcacctgccagaggatggccgaagccgtccttgggacccatgacgactggcagattggcaagaccaagatctttctcaaggatcatcacgacatgctcctggaagttgaacgagacaaggcgatcacagaccgagtgattctgctacaaaaggtaattagagggttcaaggaccgcagcaatttcctcaaactgaagaatgctgctacacttatccagcgccactggagaggccataattgtcgaaaaaactacggcctgatgaggctgggattcctgcgactccaagctctccaccgttcccggaagttgcatcagcagtataggctggcccggcaaaggattatccagttccaagcaaggtgcagggcatatctagttagaaaggctttccgccaccgtctgtgggctgtgctaaccgtacaggcatacgctagaggaatgatcgcacggcggttgcatcaacgacttagggctgaatacctgtggagactagaagctgagaagatgaggttggctgaggaagaaaaactgagaaaggagatgtcagccaagaaagcaaaagaggaagcggaaagaaaacaccaagaacgactggctcagctcgcaagagaggatgctgagagagagctgaaggagaaagaagccgcccgaaggaaaaaggagttgctggagcagatggagagggccagacacgaacctgtgaatcattctgacatggtggacaaaatgtttggattcctggggactagtggcggtctgcccggccaggagggccaagctccatccggtttcgaagacctcgaacgaggaagacgcgaaatggtggaagaagacctggatgccgccctgcctctacctgatgaggacgaagaggacctgagcgaatacaaatttgccaaattcgctgctacttacttccagggcacaaccacccactcttatacgagaagaccattgaagcagccccttttataccacgacgatgagggagaccagttagctgccctcgccgtttggatcaccattctgcgcttcatgggggatctccccgagcctaaataccatactgcgatgtcggatggaagtgagaagatccccgtgatgacgaagatttacgaaaccctcggtaagaagacctataagagagaattgcaggcattgcagggcgagggggaggcacagctgccggagggccaaaagaagagctctgtgcgccacaagctggtgcacctgactttaaaaaaaaaatctaagttaactgaagaggtgaccaagaggctgcacgacggagagtcaacggtgcaagggaatagcatgctcgaggacaggcctacctcaaatctggaaaagctgcacttcattattggcaacggaattcttcgcccagcactgcgtgatgaaatctactgccagatcagcaaacagctgacccataaccccagcaagagctcatatgcacgcggctggatcctcgtgtcattgtgcgtcggttgtttcgccccatccgagaagttcgtgaagtatctgagaaattttatccacggtgggcctcctggttacgccccgtattgtgaagagagactgcggcggacgtttgtgaatggaacgaggacccagccaccttcatggctcgagcttcaggccacaaagagcaagaagccgatcatgctacctgtcacattcatggatggaaccacaaagacactactcacggatagtgccaccaccgcaaaagaactctgtaacgcgctcgcagataagatcagcttaaaggatcggtttggcttttctttatacatagccctgttcgataaagtgtcaagcctaggcagcgggtcagatcacgtgatggacgcgatttcgcagtgcgagcagtacgcaaaggaacagggagctcaagaaagaaacgccccatggcgtctgttttttcgcaaggaggttttcaccccttggcactcaccatccgaggataatgttgccacaaacctgatataccagcaggttgtcagaggcgtgaaattcggagagtatcgctgtgagaaggaagacgatctcgccgagctagcttcccagcagtacttcgtggactacggttcagagatgattctggaacgtcttcttaatttagtccctacctacatccctgatcgagagatcactccacttaagacattggagaaatgggctcagctcgcgatcgctgcacataagaaggggatatacgcccaaagacgcaccgatgcacagaaggtcaaagaagacgttgtgtcttatgctcgcttcaaatggccactgctattttccaggttctacgaggcatataaattttccgggccgagtctgcccaagaacgatgtaattgtggctgtgaactggacgggtgtttattttgttgatgaacaggagcaggtgctgcttgagctgtcttttcccgagatcatggccgtcagcagcagccgcgaatgcagggtttggctctccctgggctgcagcgacctgggctgcgcagccccacacagtggctgggcaggtctgacccctgctggtccatgtagtccgtgctggtcatgtcggggggcaaagacaaccgcaccctctttcacactcgccactattaaaggtgatgagtataccttcacctccagcaacgctgaggacataagagaccttgtagtgacctttcttgagggtctccggaagcggagcaaatacgtggtggccctgcaggacaatcccaacccagccggagaggaatctggcttcttgtccttcgccaaaggcgacctaataatccttgatcatgacacaggcgagcaggttatgaacagtgggtgggctaacggaatcaatgaaaggaccaagcagcggggagactttcctaccgactcggtgtatgttatgccaactgtgacgatgcccccacgtgagatcgttgccctcgttaccatgactccagaccaacggcaagacgtagtgcgtttgctgcagctgagaacagcagagcccgaggttagagctaaaccatataccttggaggagttctcttatgattactttcgtcccccccctaagcacaccctgtcccgagtgatggtcagcaaggcaagaggcaaggacaggctttggtcccacacccgcgaaccgctgaaacaggccctgctgaagaaactcttagggtcggaagaactctctcaggaggcctgtctggcttttattgctgtgctaaagtacatgggcgactatccctcaaagcgcacaaggagtgtgaacgagttgaccgaccagatcttcgaagggcccctgaaagccgagccgttgaaagatgaagcctacgtccagattttaaaacagctgacagataaccatattcgctactcggaagagcgaggctgggaactgctttggctgtgcaccggcctgtttcctcccagtaatattctgctgccacacgtgcagcggtttcttcagtctcgaaagcattgcccgctagctatcgactgtctgcagcgtctgcagaaagcattacgaaatgggtcccggaagtatcccccacacctcgtcgaggtggaggccatacagcataaaactacccagatctttcataaggtttacttcccagacgataccgatgaggctttcgaggtcgaaagctcaaccaaggccaaagacttttgtcagaatatcgcaacgcgcttgctgctaaagtcctctgagggctttagcctctttgtgaaaattgccgacaaggttctttccgtgccggagaacgatttttttttcgattttgttcgccacctcactgactggatcaagaaggctcgccccattaaggatggcatcgtcccgtccctgacatatcaggttttcttcatgaagaagctgtggacaactactgtccccgggaaggatcctatggctgatagcattttccactattatcaggagcttcccaagtacctaagaggctatcacaaatgtacccgcgaggaagtcttacagcttggcgccttaatctacagggtgaaatttgaagaagataaaagttacttcccctcaatccccaagctgttgagggagctggtcccccaggacctgattcggcaagtctctcctgacgactggaagaggtccattgtcgcgtacttcaataaacacgccggaaaatccaaggaagaggcgaaacttgccttcctaaagctcatattcaagtggcccacttttggcagcgctttctttgaggtgaagcaaaccaccgagcctaacttccccgaaattctgttaatcgccattaacaagtatggcgtctcgctgatcgaccctaaaacaaaggacatccttacgacacacccctttaccaagatatccaactggtccagtggcaatacttacttccatatcactatcggaaatctggtcagaggtagcaaactgctgtgcgaaaccagtctcgggtacaagatggatgatctgctgaccagctacatttctcagatgttgaccgcaatgtccaaacagcgtggttcaagaagcggaaagtag

SEQ ID NO: 196253 - DNA, 6648 bp, synthetic construct
  misc_feature 1..6648: note = Description of Artificial Sequence: Synthetic coding sequence
  source 1..6648: mol_type = other DNA
atggtgatcctgcagcagggcgaccacgtgtggatggacctgcggctcggacaggaattcgacgttcccataggcgccgtcgtaaagctgtgtgatagcggacaggtacaggtggtagacgacgaggataacgagcactggatatccccacaaaatgcaactcatatcaaaccaatgcatcccacatccgttcatggggttgaggacatgatacgtctcggcgatctgaacgaggccgggatcctgaggaatttactgataagatatagagaccatctgatttatacctatactgggagtatcctggtggcagtgaatccttaccagctgctgtctatttattcgcccgagcatatacggcagtacacaaataaaaaaatcggggagatgcctccacatatcttcgctatcgctgacaattgttatttcaatatgaagcggaactcaagggatcagtgctgcatcatcagtggcgagtcaggagcgggaaagaccgaatcaacgaagctcatcttgcagtttctagccgctatcagcgggcagcacagttggatcgagcagcaggtcctagaagccaccccaatccttgaggcttttggcaacgcaaaaaccatcaggaacgacaactcttctagattcggcaaatatattgacattcacttcaataagaggggcgcgattgagggtgcgaagattgagcagtacctgctggagaaatcccgtgtgtgcaggcaggccctggacgaaaggaactatcatgtgttctactgcatgttggagggcatgtctgaggaccagaagaaaaaactcggactcggccaggccagcgattacaactacttagccatggggaattgtatcacttgtgaaggaagagtggactcacaggaatacgccaacattagatctgctatgaaggtcttgatgttcactgatacagagaattgggagatctcaaaactgctcgctgcgattttgcatctaggaaacctacagtatgaggccaggacattcgaaaatctggacgcgtgtgaggttctattctcaccatcactggccacggctgcttccttgctggaggttaacccacccgaccttatgtcctgtcttacatcaagaacgcttatcaccaggggcgagacggttagcacacctctgagtagggagcaggccctggatgttagagacgcttttgttaaagggatttacggccggctatttgtttggatagtggacaagatcaacgccgctatctacaagcctccgagtcaggacgtgaaaaatagcagacgatccatcggactgttggatatctttgggttcgagaacttcgctgtgaacagttttgaacaattgtgtatcaactttgctaatgagcatctccaacagttttttgtgcgccacgtgttcaagctggaacaggaggaatatgatctggagtcgattgattggctgcatatagaattcaccgataaccaagacgccctcgatatgatcgccaacaaaccgatgaacatcatctctctcattgatgaagagtctaagtttcccaaaggtaccgacactacgatgctacataaacttaacagtcaacataagttgaacgcgaattatattcctcccaagaataatcacgagactcagttcggaatcaaccactttgccggtattgtttactacgagacacagggtttcctggagaagaatagagacacacttcacggagacattatccagctggtacatagttcgagaaacaagttcatcaagcaaatttttcaggcagatgtggccatgggcgcagagacccgcaaaagatctcccacgctgagcagccagtttaaacgatctttagaacttctgatgagaacactgggagcttgccagccctttttcgtcaggtgcatcaaacccaacgagttcaagaaaccaatgctctttgaccgccacctctgtgtgcgccagctgcggtattctggtatgatggagacaatccgtatcaggagagcaggctatccaatcagatactcctttgtggagtttgtcgagcggtaccgggtgctcctacccggggtgaaacctgcttacaaacaaggtgatcttcgggggacatgccagagaatggcagaagcagtgctgggcacccacgacgattggcagattgggaaaaccaagatcttcctgaaggaccaccatgacatgctgctggaagtcgaacgggacaaggctatcaccgatagagtcattctgctacaaaaagttatccgaggcttcaaagaccgatccaacttcctcaagctgaagaatgctgccacgctcattcaacgccactggcggggacataattgtcgcaagaactatggtctgatgcgcctcggctttttacgactccaggccctgcacaggagtcggaagctccatcaacagtacagactcgccaggcagcggatcatacaatttcaggccagatgcagagcatacctcgtgcgaaaagcgttccgacatcgtctatgggccgtgcttacagtgcaggcttatgcccgcggtatgatcgcacgtagactccaccagcggctgcgagctgagtacctgtggaggttagaagcagaaaaaatgcgactagcggaggaagaaaagctacgaaaagagatgtccgcaaagaaggctaaggaggaggccgagcgcaagcaccaggaaaggctggcccagctggcacgggaggatgccgaacgcgagctgaaagagaaggaggcagccagacggaagaaggaactgctcgagcagatggagcgggcccgtcacgagccagtgaatcattctgatatggtggataaaatgttcggctttctgggcacaagtggcggtctgccaggacaggaaggacaggctccatctggtttcgaggacctggagagagggaggagggaaatggtggaggaagaccttgacgcagcattacctttgccagacgaggacgaagaagacctctccgaatataagtttgccaaatttgccgctacttactttcagggaacaactacacattcatacactcggcgtcccctgaaacaacccctgctgtaccacgacgatgaaggggaccaactcgctgcactagcagtgtggattacaatccttcgcttcatgggagacttacccgaacccaaataccacacagccatgtctgatgggtcagagaagattcccgtgatgaccaagatttatgagaccctcggtaaaaagacctacaaacgagaactgcaggcacttcagggcgaaggggaggcacagctgccagaagggcaaaagaagtcctcggtcaggcacaagctcgtccacctcacacttaagaaaaaatcaaagctaacagaggaggtaacaaagcgactgcacgatggtgagagcaccgtgcaaggcaactccatgctcgaagaccgccctacttccaacttagagaagctccactttatcatcggcaatggcatccttcggccggcactgcgggatgaaatctactgccagatcagtaagcagctcactcataatccctccaaatcatcctacgccagaggctggatcctcgtctccctgtgcgttggatgtttcgctccaagcgagaagttcgtcaagtatctgcgcaactttatccacggcgggccgccaggatatgcaccttattgcgaggagagacttcggcgaaccttcgtaaatggcaccagaacccagcctcccagctggttggaactgcaagcgaccaagtccaaaaagcctattatgctccccgtgacgttcatggacggcacaacaaagactttgctgaccgattccgcaactaccgccaaggaactctgcaacgcactggccgataaaatctctcttaaggataggtttggtttctcgctgtacatcgccctctttgacaaggtgagctctctaggctcagggtccgatcacgtgatggacgcaattagtcagtgtgagcaatatgccaaagaacagggtgcccaggagcgcaacgccccatggcggttgttctttagaaaggaagtatttaccccctggcattctccctctgaagacaatgtggcgaccaacctaatataccaacaggtcgtgaggggcgtgaagttcggagagtatcgttgcgaaaaggaggacgatctggcagagctggccagccagcaatacttcgttgattatggaagcgagatgattctggagagactactgaatcttgtgccaacctatattcccgatcgggaaattacccccttgaagactctggagaagtgggcccaactggctattgcggcccacaaaaaaggaatctacgcacagaggcggactgacgctcagaaggtgaaagaagacgtggtgtcttatgcccggttcaaatggccactgctgttctcccgtttctacgaagcatataaattttccggccctagcttacctaagaacgatgttatcgtagctgtgaactggactggcgtctatttcgtggatgaacaggagcaggtactcctagaattgagctttcccgagataatggccgtatcctccagccgagaatgccgggtgtggcttagcctcggctgttctgatctgggctgtgccgctcctcatagtggttgggcggggctaacaccagcaggtccctgcagtccctgctggagttgtagaggggccaagacaactgctccctcattcacgctggccacaattaaaggagatgagtacaccttcacctccagcaatgccgaagacatcagagatctggtcgtgacctttctggagggattacggaagaggtccaaatatgtggtagccttacaggacaacccaaatcctgctggggaagagtccggatttttatccttcgcgaagggcgatttgatcattctcgatcatgatactggtgaacaggtcatgaactctggctgggctaatgggattaacgaacggaccaagcagcgaggggactttccaaccgatagcgtctacgtgatgccgactgtgacaatgccccctcgggagatcgtggctctggtgaccatgacacctgatcaacgccaggatgtggtcaggttgctgcaactgcgaaccgcggagccagaggtgagggccaaaccttacacgttggaggagttctcatacgattattttcgacctccgccaaagcacactctgagccgcgtgatggtctctaaggcccggggtaaagaccgtctttggagccacacgcgagaaccactgaaacaagcactcctcaaaaagcttttggggtcagaagaactgtcacaggaagcatgcttagcctttatagccgtgctgaagtacatgggagactatccttcaaaaagaactagatccgtgaatgaactgaccgatcaaatttttgagggccccctcaaggccgagccgcttaaagacgaagcctacgtgcagattctcaagcagcttacagataatcacattagatattcagaagaacggggttgggagctcctatggctgtgcactggtctcttcccaccttccaacatcctgttgccccacgttcaaaggttcttacaaagcagaaagcattgcccccttgccatcgattgcctgcagagactgcaaaaagccctacgcaatggatcccgaaagtaccctcctcacctggtagaagtggaggcaatccaacataaaactacacagatattccacaaggtctacttccctgatgacacagacgaggccttcgaggtggaaagttccacaaaggctaaggatttctgtcagaatatcgccaccaggctccttcttaagagttcggaaggattctccctttttgtgaaaattgctgataaagtactttccgtgcccgagaacgattttttcttcgattttgtgaggcatctaaccgactggattaagaaggcgcggccaatcaaggatggtatcgttccaagcctgacctaccaggtctttttcatgaaaaagctatggaccacaaccgtccccgggaaggatccaatggcagatagtattttccactattaccaggaactgcccaaatacctgagaggataccacaaatgtacccgggaggaagtactgcaactgggtgccctgatttaccgcgttaaattcgaggaggataagtcctactttccatctatccccaagctactgagagagctggtaccacaagacctgattagacaagtgtctcccgatgactggaaacgcagtatagttgcatacttcaacaagcacgctggcaagtccaaggaggaggctaaactggcctttttgaaactcatctttaaatggcccaccttcgggagcgccttctttgaagtaaaacagacaacagagccgaattttcccgagattctgctgattgccataaacaaatacggagtgagcctcatagatcccaaaactaaagacatcctgacaacccaccccttcaccaagatctccaattggagctccgggaacacatatttccacattaccattgggaatttggtacgaggcagtaaactactgtgtgagacgtcccttggttacaagatggatgatctgctgaccagttatatctcgcagatgttgactgccatgtcaaagcagcggggcagcaggagcgggaagtag

SEQ ID NO: 196254 - DNA, 3537 bp, synthetic construct
  misc_feature 1..3537: note = Description of Artificial Sequence: Synthetic coding sequence
  source 1..3537: mol_type = other DNA
atggtgatcctgcagcagggcgaccacgtgtggatggacctgcggcttgggcaggagtttgatgtgcctatcggggccgtggtgaaactttgcgacagcggccaagttcaagttgtcgatgatgaggacaacgaacactggatcagccctcaaaacgcaacccacatcaagccaatgcacccaacatcagtgcatggggttgaggacatgattcgcctcggtgacctgaatgaggcggggatcttgaggaatctgctcatccggtatagggaccacttaatctacacctataccggcagcattctggtcgcagttaatccttaccagctgctgtcaatctattcacccgaacatatacgccagtacacaaataaaaagataggcgaaatgccaccccatattttcgctatcgctgataactgttacttcaacatgaagagaaactctcgggaccaatgctgtatcatctccggagagagcggcgcaggaaaaacagaatcgaccaaacttatactgcagtttctcgcagctatctccggccagcacagctggattgaacagcaggtgcttgaggctaccccaatactggaggcatttggcaatgccaagactatccgtaacgacaattcatcccgattcgggaagtacattgacatccatttcaataagaggggcgctatcgagggggcaaagatcgaacagtatctcctggaaaagtctagggtctgtcggcaggcacttgacgagaggaattaccacgttttctattgtatgctggaagggatgtccgaagaccagaaaaagaagctcggcctaggacaagcaagtgattataattatctggccatgggcaattgtataacttgtgaaggaagagtcgactcccaagaatatgcgaacatccgcagcgccatgaaagtcctgatgttcactgataccgaaaactgggagatcagcaagctgctcgccgccattctccatctgggcaatctccagtacgaggcccgtacattcgagaacttggacgcttgcgaggttctcttctcacccagtttagccactgcggcctctctactggaggtgaatccgccagatttgatgtcatgtcttacatctagaacgctgattacccggggagagaccgtgtctacccccctttccagggagcaggctctggacgtccgtgacgcttttgtgaaaggcatatacggcagattattcgtgtggatcgttgacaagatcaatgccgctatttacaagccgccctctcaggacgttaagaactcacgacgcagcatcggactgctcgacatattcgggtttgagaacttcgccgtaaatagtttcgagcagctgtgcatcaatttcgccaatgagcacctccagcaattttttgttcggcacgtgttcaaacttgagcaagaggagtatgacctggaaagtatcgactggctgcacatcgaatttactgacaatcaagacgccctggatatgatcgcaaataagcctatgaatattatctctttgatcgacgaagagtccaagttcccaaaggggaccgacacaactatgcttcataaactgaactcacagcataaattgaacgccaattacatccctcctaagaacaaccacgagacacagttcggaatcaaccacttcgccggcatagtgtactatgagacccaggggttcttggagaagaatcgagatacactgcacggtgacataatccagcttgtccatagtagtagaaacaagtttataaagcaaattttccaagccgatgtggctatgggagcggaaaccagaaaacggtctcccacactctcgtcccagtttaagaggtctctggagctactcatgagaacccttggggcctgccagcccttttttgtgcgctgcatcaaacctaatgagtttaagaaaccaatgctctttgaccgccatctctgcgtgcggcagctgagatatagcggtatgatggagactatccggataaggagggcggggtacccaataagatatagcttcgtcgagttcgtggagcggtacagggtgttactgccaggggtgaagccagcttacaagcaaggggacctgaggggaacctgccagcgcatggccgaagcagtgcttggcacacacgacgattggcaaatcggcaagacaaaaatattcctgaaagaccaccacgatatgttgctggaggtggaacgagacaaagctatcaccgatcgagtcattctgctgcagaaggtgatccgcgggttcaaagatcgcagtaactttctgaaattgaagaatgctgcaacactgatccagaggcactggagaggccacaactgccgaaaaaattacggtttgatgcggctcgggttcctcaggttacaggcgttacacaggagcaggaagttgcatcaacaatatcgcctcgcaagacaacgcatcatccagtttcaagcacgttgccgagcctatcttgtccgcaaggccttcaggcaccggttgtgggctgtgctcaccgttcaggcgtacgctcgtggaatgatcgcccgccggctgcaccagagattgcgggcagaatacctctggagattagaggccgagaagatgcgtctggcagaggaggagaagctccggaaggaaatgagtgccaagaaagccaaggaggaagctgaacgcaagcatcaagagcggctggcgcagctggcgcgagaggacgccgagagggagttaaaagaaaaggaagccgctcgcaggaaaaaggagctgctcgaacaaatggaacgtgcgagacatgaacctgtgaaccactctgatatggtcgataaaatgttcggtttccttgggacatcgggcggtttgcctgggcaggaaggtcaggcccccagcggcttcgaggaccttgaaaggggccgcagagagatggtggaagaagacctggacgctgcgctccccctgccagacgaagatgaggaggatctttctgaatataagttcgccaaatttgccgccacatattttcaggggactacaacccactcctacactcgccggccgctgaaacagcctctcctctatcatgacgatgagggcgaccagctggcggctctggcagtgtggattacgatcttgcgattcatgggggatttgcccgagcccaaatatcacactgccatgtccgatgggagcgagaagatccccgtcatgaccaaaatttacgaaacccttggtaaaaagacttacaagcgggaactccaggccttgcagggcgagggagaagcccagctcccggaaggccaaaagaagagttccgtcagacataagctggtgcacctcacactgaaaaagaagtcaaagctgaccgaggaagtcactaagcgcctgcacgacggtgagtccacagtgcaagggaattccatgcttgaggaccggcctacatctaatctggaaaaactgcatttcattattggaaacggaattctccgcccggctctgaggagcgtccccggaggcggagatacccgggcctag

SEQ ID NO: 196255 - DNA, 6528 bp, synthetic construct
  misc_feature 1..6528: note = Description of Artificial Sequence: Synthetic coding sequence
  source 1..6528: mol_type = other DNA
atggtgatcctgcagcagggcgaccacgtgtggatggacctgcggttgggccaagagtttgatgttcctatcggcgctgtcgtaaagttgtgcgacagcggtcaggttcaggtagttgacgacgaggataacgaacactggatttcaccccagaacgcgacacacataaaacctatgcatcctaccagcgtccacggcgtggaggatatgattcgcctcggagatctgaacgaggcaggaatcctcaggaatttattgatacggtacagggatcacttgatctatacctacaccggtagcatactcgtcgccgtgaacccttaccagctgctgagtatctatagccccgaacacataaggcagtacaccaacaagaaaataggtgagatgccaccacacatcttcgctattgctgataactgctattttaacatgaagcggaattcccgagaccagtgctgcataatcagcggggagagcggcgcgggaaaaacagagtcaactaagttgatcctgcaattcctggccgctatttctgggcaacactcctggatagagcaacaggtgctagaggccacacccatacttgaggcttttggcaacgccaaaaccattagaaacgataatagcagtagatttggcaaatacatcgacatccacttcaacaaaagaggcgccatcgaaggcgccaaaattgagcagtatctcctggaaaaatcccgggtatgtagacaggctcttgacgaaaggaactaccacgttttctactgcatgcttgaagggatgtctgaggaccagaaaaaaaagcttggactgggccaagcgtctgattataactacctcgctatgggtaactgcataacgtgcgaagggcgcgtcgacagccaagaatacgcaaatatccggtcagccatgaaagtactgatgttcactgacaccgaaaattgggaaatctccaagctgctggcagccatacttcacctaggaaatttgcagtacgaagcacgcacctttgagaacctcgatgcatgcgaggttttgttttcccccagtctggcaacagctgccagcctgctggaggtgaatcctccagacctgatgtcttgcttgacatcccgcaccctgatcacccgaggggaaaccgttagtacccccctgtcacgagaacaggctctcgacgttcgcgatgcattcgtcaaaggaatctacgggaggctgtttgtgtggattgtggataaaattaacgcggcaatttataaacctccttcgcaagatgtcaagaatagccgccggtccattggcctccttgacatttttggctttgagaattttgccgttaatagcttcgagcagctttgtatcaattttgctaacgaacaccttcagcagttcttcgtcagacacgtgttcaaactggagcaagaggagtacgatctagaaagcattgattggctgcacattgagttcactgataaccaggacgcactcgacatgatcgctaataagcctatgaacattatatccctgattgacgaggagagcaagtttcccaagggtactgatacgaccatgttgcataaattgaattcacagcacaagctcaatgcaaattacattcctccgaagaacaatcacgagactcagtttggaattaaccacttcgcaggcatcgtctactatgagactcagggctttctagagaaaaacagagacacgttacacggcgacatcatccagctcgtgcattcgagcagaaataaatttatcaagcagatcttccaagcagacgtagccatgggcgctgagaccagaaagcgttctcccactctgagctcacagtttaagaggtctctcgaattattgatgcggaccttaggagcctgccagccattttttgtaaggtgcatcaaaccgaatgagtttaagaagcccatgctttttgatcggcacttgtgtgtgcgtcagttgagatactcgggaatgatggagactattaggatccgaagggctgggtatcccatccgctactctttcgttgagttcgtggaacggtaccgtgtccttctacctggggtcaaacctgcatacaagcaaggagacctgaggggaacctgccagcgaatggcagaagccgttctgggaacacatgacgattggcagatcggtaagactaaaatcttcctcaaagatcaccatgacatgctcctcgaagtggagagggataaggctatcacagatcgcgtcattttacttcagaaggtgattagaggattcaaggaccgctctaacttcctcaaactaaaaaatgccgccaccctgatccagcgccactggcgcggacacaattgtagaaaaaactatggactgatgagactaggcttcctgagactacaggctttacatcgctcccgcaagctgcaccaacagtacagactcgcccgacagagaattattcagtttcaagcccgttgccgcgcttaccttgttaggaaagccttcagacaccgcctgtgggctgtcctgaccgttcaggcatacgcgcgaggtatgatcgcccgaagactgcaccagcggttgcgggcagagtatctctggcgccttgaggccgaaaaaatgcgcctggcggaggaggagaagctgcggaaggaaatgtccgcaaagaaggctaaagaagaagctgaacgcaaacatcaggagcggttggcccagctggcgcgcgaggacgccgagagggagttgaaggaaaaggaggccgcgaggcgtaagaaagagctgctggaacagatggaacgcgcgcgccacgaaccagttaatcattcagatatggtggacaaaatgttcggttttctgggaaccagtggcgggctgcctggtcaggagggccaggcgccaagcggttttgaggatctggagcggggccgccgcgaaatggttgaggaagatctggatgctgcacttcccctgccagacgaggatgaagaagacctgagtgagtataagtttgctaaatttgcagccacttacttccagggaactactacccacagctacacaaggcggcccctcaaacagccgctactgtatcatgacgacgagggagatcagttggccgcattggccgtttggattaccatccttcgattcatgggcgacctcccagagcctaagtatcacaccgctatgagcgatggctcagagaaaatacccgttatgaccaaaatatacgaaacccttggaaagaagacatacaaacgagaactgcaggcacttcagggtgaaggcgaggctcagctgccagaaggccagaaaaaatccagtgtgagacataagttggtccacctcacactaaaaaagaagtctaaactgacagaagaagtcacgaagaggcttcatgatggcgaaagcacagtgcagggaaattctatgctcgaggatcggccgactagtaatctcgagaaattgcattttatcattggaaacggaatactgcgcccagcactgcgagatgaaatctactgtcagataagtaagcagctgacccacaacccgtctaaatctagctacgcccggggatggatcctggttagcctgtgcgtgggctgctttgctccttctgaaaaatttgttaagtatctccgaaattttatacatggaggcccgccgggatacgctccatactgcgaggaacgtctccgcaggacttttgtgaatgggactcgaacacagcctccctcatggctggagctacaggcaacaaagtccaagaagccaatcatgctgccggtgactttcatggacggtacaaccaagacactcctcacagattctgctaccaccgccaaagagctatgcaatgccctggctgataagatttccctcaaagaccgctttggctttagtttgtacatcgcactttttgacaaagtttcgtccctggggagcggctccgaccacgtgatggacgccatcagtcagtgtgagcagtacgctaaagaacagggtgctcaagagcgcaatgcgccatggagactctttttccggaaggaagtgtttaccccatggcatagcccctcagaggacaatgtggccacaaatctcatctaccaacaggtagtgagaggcgtgaaatttggggaatatcgatgtgaaaaggaagatgacctcgccgaactcgctagccagcaatatttcgtagactacggtagcgaaatgattttagaacgcctgttaaacctggtacccacctacattcctgatagagagattacccccctcaaaaccctggaaaaatgggcccagttggcaatcgctgcacataaaaaaggcatatacgcgcagagacggacagacgctcagaaggtaaaagaggatgtcgtttcttacgcacggttcaaatggccccttctattcagtcggttctacgaagcctacaagttctccggaccctccctcccgaagaatgatgtgattgtggcagtcaattggacaggtgtgtatttcgtcgatgagcaggagcaggtcctcctagaacttagctttccagaaatcatggccgtcagctcctctagaggcgcaaagacaactgccccctcgtttactcttgccaccattaagggggatgaatacacgttcacctccagcaacgccgaggacatacgggatttggtagtaacttttcttgagggcctgcgaaaaagaagcaaatatgttgtggctctccaggataacccaaaccccgccggcgaagagtccggctttctgtctttcgctaaaggtgacctgataattctcgaccacgatacgggggagcaggtaatgaactctggatgggccaatggaataaacgaacgaaccaagcagcgcggggactttcctaccgattcggtctacgtgatgccaactgtaacaatgcctcctcgagaaatcgtagctttagtgaccatgacccccgaccagcgccaggacgtggtgaggcttctgcagttgcggactgcagaaccagaggtacgggctaagccatatactcttgaagaattcagctatgattactttaggccgcctcctaagcacaccttgtctcgagtgatggtgtctaaggcccggggaaaggaccggctttggtcccataccagggagccactgaagcaggcacttttgaagaaattactgggctccgaggagctatcccaagaagcctgcctggccttcattgccgtgcttaagtatatgggggactacccgtctaagaggactcgcagtgttaatgaacttaccgaccagattttcgaaggcccactgaaggctgagccgctgaaggatgaagcctatgtccaaatattgaaacagctcacggataatcacataagatatagcgaggaacgagggtgggagctgctatggctttgtacaggcctcttccctccgtcgaacatcctgctcccgcacgtccagcggttcctgcagtccaggaagcattgcccccttgctattgactgcttgcagagactgcagaaagctctaaggaatggttcacgcaagtatcccccacacctggtcgaggttgaagcaatccagcataaaactacccagatctttcacaaagtctattttcctgacgacacagacgaagcatttgaggtcgaatcgtctacaaaggcgaaagacttttgccagaatattgccaccagacttttgctaaaatcttctgagggcttcagcttgttcgtgaagatcgccgacaaggtgttgtccgtgccagagaatgatttctttttcgactttgttcgtcacctcaccgactggatcaagaaagcccgtcctattaaagatggcattgtaccttctttaacctatcaggtgtttttcatgaagaagctgtggacaaccactgtcccgggcaaagatcccatggcagatagtatattccactactaccaagaactgcccaagtacctgagggggtatcacaagtgtacccgcgaggaggtgctgcagcttggcgccctgatctatcgtgtcaaatttgaggaagacaagtcctactttccctccatacctaagcttctacgcgaactggtgccacaggacttaatccgtcaggtgtcccccgatgactggaagcgttctatcgtggcttactttaataagcacgccggtaagtccaaggaagaagctaagctcgctttcttgaagcttatctttaaatggccaacctttggcagtgctttttttgagcagacgacagagccaaatttccctgagatcctcctgatcgcgattaataagtatggagtatccctgattgatcctaaaacaaaggatatactgaccacacacccctttaccaaaatatccaactggtcatcaggcaatacctactttcatatcacgatcggaaatttagtcagagggtcgaaactgctgtgcgaaaccagcctgggatacaaaatggacgatttactgacaagttacataagtcagatgttgacagcaatgagcaagcagcgggggagccgatccgggaagtag

SEQ ID NO: 196256 - DNA, 2532 bp, synthetic construct
  misc_feature 1..2532: note = Description of Artificial Sequence: Synthetic coding sequence
  source 1..2532: mol_type = other DNA
ggcctgagcgtgcagtggctgctggacggcctggcctgcttcttcgcaagcctgcacgttcccctcgggcgggtacaactgcacgccagcgcaagagggatccaggagaaggaggatgacttggcggagctcgcatctcagcagtacttcgtggattacgggtccgagatgatccttgagcggctgctaaacctggtgcccacatacatccccgaccgcgagataactcccctgaagacgttagagaagtgggcacaacttgctatcgccgctcataagaagggaatctacgcccagcggcggacagacgcacagaaggtgaaggaagatgtggtttcctatgcccggttcaagtggcctcttttattctcacggttttacgaggcatacaaattctcaggacccagcctcccaaaaaacgacgttatcgtagcagtcaactggaccggagtatactttgtagatgagcaggagcaagtgctgctggagttgtcttttcctgaaatcatggccgtctcatcctctagaggggcgaaaacgacagctcccagttttaccctcgcaacaataaagggtgatgaatatacatttacaagttctaatgcagaggacattcgcgatctggtggtgacgttcttggaaggcttgagaaaacggtccaaatacgttgtagccctgcaggacaatccaaaccccgcgggcgaggagtcaggttttctaagtttcgctaaaggcgatctgattatcctggatcatgataccggcgagcaagtcatgaactctgggtgggcaaatggtattaacgaacgtacaaaacaacggggagactttccaaccgatagcgtgtatgtcatgcctacggttacaatgcccccccgcgagatcgtggctctggtgacaatgacccccgatcagagacaggatgtggtcagacttctccagctgaggacagccgagccagaggttcgtgccaaaccctatacactggaggagtttagttatgattacttcaggcctcccccgaagcacactctgagtagagtgatggtttcaaaggccagagggaaggatcggctttggtcccatacacgagagcctctcaaacaggcattgttgaagaaactcttagggagcgaggaactgtcccaggaggcttgccttgcattcattgcagtgctaaaatacatgggcgactatcccagcaagcgtactagaagtgtcaacgaactgactgatcagatcttcgaggggcccctgaaggcagaaccgctcaaggacgaagcctacgtgcagattctcaagcagcttacagataaccacattagatatagcgaggagcgaggctgggagctcctgtggttatgcacaggactgtttccgccatccaacattctcctcccacatgtccagcgttttcttcagtcgcggaagcattgtcctctggccatcgactgtcttcagagactacagaaggccctccgtaatggtagtcgaaagtatccacctcacctggtggaggtggaggctatccagcataagaccactcaaatcttccacaaggtgtactttcctgacgacacagatgaggctttcgaagtggaaagctcgacgaaagctaaagacttctgtcagaacatagcgacccgcctcctgttaaagagctctgagggcttcagtctgttcgtgaaaattgccgataaggttctgagcgtccctgaaaatgattttttttttgattttgtgaggcacctgaccgattggattaaaaaggcccgtcctattaaggatggcatcgtgcctagcttaacttaccaagtattctttatgaagaagctttggactactaccgtccctggcaaagaccccatggccgactctatcttccactactatcaggagcttccgaagtaccttagaggttatcacaagtgcactcgggaagaagtgttgcaactcggcgccttgatctacagagttaaatttgaggaagacaaatcttacttcccgtctattcccaaactgctgcgggagctggtgccacaggatcttatccgtcaagtcagtccagacgattggaaaagatctattgtggcctacttcaataagcacgccgggaagagtaaggaggaggcaaagctggctttcctgaaactgatcttcaaatggcccacctttggatctgccttttttgaagtgaaagtgcaccacggacttttacgagccgaggaggaaggaaacagagctttgattaagcaccgagactctagcctcggcctttgggagcgtgccatggctctcgatacctgccctggtgaaggcaggagagctgccccctccgccttgtctcagctgtctgtcctggccggcgtcagtccgggagacaggggtactcggcggtcctctgcatggcagtggagacagacatgtaaacaggcgggcgtcatggaggacggcctgtgctcggatacaggggaaccatcccccaggtggcagtcatccggcggatcagcggggtgtgagaaggcatcctag

SEQ ID NO: 196257 - DNA, 4167 bp, synthetic construct
  misc_feature 1..4167: note = Description of Artificial Sequence: Synthetic coding sequence
  source 1..4167: mol_type = other DNA
atgcggctgggcttcctgcggctgcaggccctgcaccggagccggaaactgcatcagcagtacaggctcgcacgacagagaataattcaattccaggctcgctgtagggcctacctggttcggaaggcatttcgtcataggctctgggccgtcttgaccgtccaggcttacgcgcggggcatgattgctaggcggctccaccagcggctcagggccgagtatctatggcgtctcgaggctgagaaaatgcgcctggccgaggaggagaaactgcgcaaagagatgtccgccaaaaaagcaaaagaagaggccgaacgcaagcatcaagagcgcctggctcaactggcacgcgaagatgcagaacgggaactgaaagagaaggaggccgcccggagaaagaaagagctgttggaacaaatggaacgggcccgtcatgagccagtgaatcactcagacatggtagataaaatgtttggcttcctcggcaccagcggaggccttcctggtcaagaaggtcaagccccatccggctttgaagacctcgagcgcggcagaagagagatggttgaagaagatcttgacgccgctctccctctgcccgatgaggatgaagaagatctttccgaatataagtttgccaagtttgctgcaacctattttcagggtacaaccactcacagctataccaggaggccactgaaacaacccctcctgtaccacgatgatgaaggtgatcagttggctgctctcgcagtgtggataacaatccttcgtttcatgggcgatttgcccgaacccaagtaccataccgccatgtctgatggctctgagaaaattcccgtaatgaccaagatctatgaaacactaggtaagaagacgtacaagcgggagctccaggcgttgcagggagaaggcgaagcccaactccccgaaggccagaagaaaagtagcgtgcgtcataaacttgttcacctcaccctcaaaaagaaatcgaagctcacggaggaagtcactaagcgccttcacgatggtgagtccaccgtccagggcaatagtatgctcgaagatcggccaacgtctaacttagagaaactgcacttcatcatcggaaacgggattttgaggcccgctctgcgagacgaaatctattgccagatttcaaaacaactgacccataacccgtcgaaatcctcctatgcacgtggatggatcctcgtctcactgtgcgttggctgtttcgcgcccagcgagaagttcgtaaaatacctccgcaactttatccacggaggccccccagggtacgcgccttactgtgaagagaggctccgccggacctttgtcaacggcacgcggacccagcctccctcttggcttgagcttcaagctaccaaatccaaaaagccaatcatgctccccgttactttcatggatgggaccacaaaaacccttctaacagattccgccactacagccaaggagctttgtaacgccttagccgataaaatctctctgaaagataggtttggattcagtctgtatatcgcactcttcgacaaagtgagtagcctcggatccggaagcgatcacgtcatggacgccatcagccagtgtgaacagtatgcaaaagaacaaggggcccaggaacgcaatgcaccgtggcggctgttttttcgtaaggaggtctttacgccctggcactccccatccgaggacaatgtagctacaaatctgatttaccagcaggtggtgcggggagtgaagtttggagagtaccgctgtgagaaggaggatgatctggccgagttggcaagccaacagtacttcgttgattacgggagcgaaatgatcctggaaaggctgctcaacctagtgcccacctacatccctgatagagaaataactccgctgaagaccctcgagaaatgggcacaactagcaattgccgcgcacaagaagggcatatacgctcaacgcaggactgacgctcaaaaagtgaaggaagatgtcgtgagttacgccagatttaagtggcctctgctgttctctagattctatgaggcctataagtttagtggtccctcactccccaaaaatgacgtcatcgtggctgtgaattggactggcgtgtacttcgtggatgagcaagagcaggtgctgcttgaattgtcgttccctgagatcatggctgtatctagcagccggggggccaagacaaccgcgccgtcttttaccctggccactataaaaggggacgagtacacattcacaagtagcaatgctgaggacatccgcgatctggtggtgacgtttcttgagggtctgaggaagcgctctaaatatgtagtcgccctgcaagataatccaaatcccgctggggaggaaagtggattcctctccttcgccaagggcgatttaatcattctggaccatgatacaggtgagcaagttatgaactctggatgggctaatggaattaacgaaagaaccaagcagcggggcgacttcccaacagattcggtatatgtcatgccaactgttacaatgccaccacgcgagatagtcgcattggttaccatgacacctgaccagcgtcaggacgtggtgagactgctccagctgaggactgcagagcctgaggtgcgcgctaagccttacactctcgaggagttttcttatgactattttcgtcctccccccaaacacacactgtcccgcgtgatggtatccaaagccagaggcaaggaccgactgtggtcgcacaccagagagcccctgaaacaggcactcttaaagaagctcctggggagtgaggagctatcccaggaggcttgcctggcctttatcgcggtgttgaaatacatgggtgattatccaagcaaaaggactcggtcagttaacgaactgaccgaccaaatttttgaggggcccctgaaggccgaaccacttaaagatgaagcatatgtacagatactgaagcaactgactgacaatcatatcagatatagcgaggaaaggggatgggaactactgtggctctgtaccgggttattcccaccaagtaacatcctactcccccatgttcaacgctttttgcaatcacggaagcactgtcccctcgccatagactgtttgcaaagacttcaaaaggctctgagaaacggctcacggaagtaccctccacacctggttgaagtggaggccatccagcacaagacaactcagattttccacaaagtctactttcctgatgacactgacgaagccttcgaagtcgaaagcagcacgaaagccaaagacttctgtcaaaacattgccacacggctgttattaaagtcgtccgaagggttttctttgtttgtgaagatcgccgacaaagtgctttctgtccccgagaatgactttttctttgattttgttaggcatctgacggattggatcaagaaagctaggcccatcaaagatggaatagtgccctctttgacttatcaggtgttctttatgaagaagctatggaccaccacggtgcctggcaaggatcccatggccgatagcatctttcattattatcaggagctccccaaatacctccgaggctaccataaatgcacccgcgaggaggtgctgcagttgggagctctgatataccgagtgaagtttgaggaagacaaaagctattttccttctatccctaaactattacgagaactcgttccccaggacctgattcgtcaggtgagtcctgacgattggaaaaggagtattgtggcttattttaacaaacatgcgggtaagagcaaagaggaagccaaattggccttcctcaaactcatcttcaaatggccaacctttggtagtgctttctttgaagtaaagcagacgaccgagccgaattttccagaaattctgcttatcgccatcaataagtacggagtgagtctgatagatcccaagacaaaagatattctgacaacacatccgttcaccaaaatctccaattggagcagcggaaatacttactttcatatcaccattggcaacctagttcggggtagtaagctgctgtgcgagacaagcctaggttacaagatggacgatttgctgactagctacatcagtcagatgctaaccgcaatgagcaagcagagggggtccaggtcaggaaaatag

SEQ ID NO: 196258 - DNA, 2580 bp, synthetic construct
  misc_feature 1..2580: note = Description of Artificial Sequence: Synthetic coding sequence
  source 1..2580: mol_type = other DNA
atgggccggaagctggacctgagcggcctgaccgacgacgagaccgaacatgtgctccaagtggtgcagagagactttaaccttaggaagaaggaggaggagcgattgtctgagctaaagcagaaactcgacgaagaaggctcaaagtgcagtatccttagtaaacatcagcaattcgtggagcactgttgcatgaggtgctgtagcccatttacatttttagtcaatactaagcggcaatgcggagactgtaagtttaatgtatgcaagagctgttgtagttaccaaaaacacgaaaaggcttgggtgtgctgcgtttgccaacaggcacggcttctcagggcgcaaagcctggagtggttttataacaatgtcaaatcccgcttcaaacgatttggctcagcaaaagtgctcaaaaacctgtacaggaaacacagactggagtccggtgcgtgctttgacatcctgggagggtcattgttcgagtccaatctggagaatgaaggatctatttctggaagcgacagcactttttataggcaatccgaaggccattctgtaatggacacgctcgcagtggcgctgcgcgtggcggaggaagcgatcgaggaagctatctccaaggcagaggcctacggggattccctcgacaaacagaacgaagctagctatctgcgtgaccataaggaggagttgactgaagaactagcaacgaccatcctgcagaagatcatcagaaaacagaaatctaagagcgagcagcaggtggaagaggagcccggatggccgcaccctcagtcttgcagtacgaaggtagcagatgaaggaacatcggcctctccaggtggctaccgtgctccggccgcgctgtggaggagccagagtgcattttccattaccggggaggaagctctcaaaacaccacccgtggaagcgccttctcgacaacccagggaccagggacagcaccccagagctgagtcggccctgccttcctggaaatccgtcgatcgcctggatgagacaaacctggccccagtgctgcagagccctgatggtaattgggttgccctgaaagacggtgctcccccaccgacccggctactggctaaacccaagtcaggcacctttcaggcattggaggtcgctagttcagtggcaagtgcctacgatgaaatggggtccgactccgaggaagattttgattggagtgaggctctttccaagctttgcccgcgttctagggcgctcccccggaacccacagccgcagcctacccaggctcagtcatcagaccagggacctatcgctgcaagcccctcctcagctctctcaccaaacccagaggcaatgtgttcagattccgaaacgtcttccgccgggtcttcgcgtgaagtgggacaccaggctagactgtcatggctccagcgaaaggcccctcggaacccagccgcagagaaaatgcggctccatggagagctggatgtaaatttcaatcctcaactcgcctcccgcgagaccagcgactccagcgagcccgaggaggctccacacaccaccgatcgtagagctcgacgctggcggagggctaggctcgggtctgaggaaccgagtaaagagcctagttcgcccagtgcccagctcagggatctggatactcatcaagtgagtgatgatctttcagaaacggacatttccaatgaggcccgcgatccacagacgctgacagataccaccgaagaaaagaggcgtaacagactgtatgagctcgccatgaagatgtctgagaaggagaccagttcgggcgaagatcaggagagcgagccgaagaccgaaagcgaaaatcagaaggagagtctctccagcgaagacaactctcagagcgtccaagaggaactgaagaaaaaattctccgccgtatctctttgcaatatttcaactgaagttctcaaggtgatcaacgccacagaggaattgatcgccgggtcaaccggaccatgggagagcccgcaggtcccacccgatcggcaaaagggtatgtttccccggggaactgatcaggttcgcttagacgagcaacttacctccctggaagaaaatgtctatttggctgccgggactgtgtacggtctggaaactcagttaacagagctggaagatgctgccagatgcatacactcaggtacagacgagactcatctggccgatctcgaggatcaggttgcaacagcagctgcccaggtgcaccacgccgaattacagatttctgacatcgagagtcggatttcagcattgacaatcgccgggctaaacattgcgccttgtgtgcgcttcacaagacgccgagatcaaaagcagaggacgcaggtccaaaccatcgatacaagccgccagcagcgacgaaagctccccgctccaccagtgaaggccgagaagattgaaacatcatctgtcacgaccatcaagactttcaaccataactttattttgcagggatcctcgacaaatcgaacaaaagagagaaagggcaccacgaaggatctcatggagcctgccctcgaatccgccgtgatgtattag

SEQ ID NO: 196259 - DNA, 2313 bp, synthetic construct
  misc_feature 1..2313: note = Description of Artificial Sequence: Synthetic coding sequence
  source 1..2313: mol_type = other DNA
atgcggaaggccgccagcgccgccagcagccggagcaccagcagcctatggagcaccgccgcttgtgctgcggcaaggccatcacccagttcttcaacccccagtgccagcgtcgaaatagcaaattcgatgtccgccagggccgccgcccctaccaggagtacaaagcggccaggaagcgctgcctcagcgagcaagcggggaggctctttattcgaatccaacctcgagaacgaggggtctatttccggctcagactcaaccttctatcgccagagcgaaggccattccgttatggataccttggctgtcgccctgagagtcgccgaggaggctattgaggaggccatcagcaaagccgaggcctacggggactccctggataaacagaacgaagcatcctatctccgcgatcacaaggaggagcttactgaggagctggccactacaatactccagaaaatcattcggaagcagaaatccaagagtgagcagcaggttgaggaggaacctggttggcctcacccccagtcttgcagcacgaaggtggctgatgagggtacttccgcatcccctggcggttacagggcaccagcagctttgtggcgcagtcagagtgcattctcaataacaggggaggaggcactcaagacaccgccggtggaggccccatcccggcagcccagggatcagggacagcatcctcgcgctgagagcgccttgccaagttggaaatctgtggaccgcctggatgagacaaacctagccccagttctgcaatcgccagatggtaactgggtcgctctgaaggacggtgctccaccccctacgcgacttttagctaagccaaaaagcggcacatttcaggcactggaggttgccagttccgtggccagtgcgtacgatgaaatggggagcgatagcgaggaggacttcgattggtccgaggcattgtcaaagctgtgccctcggagccgggcgctgcctcgcaacccgcagccacagcccacccaggcccagagctccgaccagggccccatcgccgcctcaccatcctctgcgctaagccctaatcccgaggccatgtgtagtgactcagagaccagttcagctggatcttctcgggaagttgggcatcaggcacgtctctcttggctgcagaggaaggcccctcgaaacccagcagccgagaagatgcggctccatggtgaactcgacgttaattttaaccctcaactggcttctcgtgaaacctccgatagttctgagcccgaagaagcaccccacacgacagaccgcagggctaggaggtggcgccgggcgagacttgggagcgaggaacctagcaaggaaccaagttctccctctgcgcagttacgggatctcgacacgcatcaggtcagtgacgatctgtcagagacggacatttcaaatgaggcccgcgatccccagacactgacggataccacggaggaaaaacgcaggaatcgactgtacgaactggccatgaaaatgtccgaaaaagaaacctcctctggagaagatcaggaatctgagccaaaaacggaatccgagaatcaaaaagaatcactatcgtccgaagacaactcccagtctgtgcaggaggaacttaagaagaagttctccgccgtgtcactgtgcaatatctcgacggaggtgttaaaggtgattaatgcaacggaagaattgattgctggaagcaccggtccatgggagtctccccaggttccccctgaccggcagaaaggaatgtttcctcgggggaccgaccaggtacgactggacgagcagttgactagtctagaggaaaacgtgtatttggctgctggcacggtttatggactagaaacccagctgaccgaattggaagacgccgcccgctgtatccatagtgggactgatgaaacccatctggctgaccttgaggatcaggtggctacggccgctgcacaggtccaccatgccgaactccagatcagcgatatcgaaagccgcatttctgctttaactatagctggactcaacatagctccatgtgtccgcttcacccggcggagggaccagaaacagaggactcaggtccagacgattgacacgagtcggcagcagaggaggaagctgcctgcaccccctgtaaaggcggagaagatcgaaacctcttctgtgacaaccatcaagacattcaaccataattttattctacagggctcttcaacgaatcggacaaaagagcggaaagggacaaccaaggacctgatggagcccgcgctagaaagcgccgtcatgtactag

SEQ ID NO: 196260 - DNA, 2580 bp, synthetic construct
  misc_feature 1..2580: note = Description of Artificial Sequence: Synthetic coding sequence
  source 1..2580: mol_type = other DNA
atgggccggaagctggacctgagcggcctgaccgacgacgagaccgaacatgtgctccaagtcgtgcaacgcgacttcaaccttaggaagaaggaagaggagcgtctctctgagctaaaacagaaactcgacgaagaaggctctaaatgctctatcctctcaaaacatcagcagtttgtggagcattgctgcatgcggtgctgttcaccgtttacttttctggtgaacaccaagcgacagtgtggtgattgcaaatttaacgtctgtaagtcgtgctgctcatatcagaagcatgagaaagcctgggtatgttgtgtctgccagcaagcgcggctgctccgggcccagagcctggagtggttctacaataacgtaaagtcccgcttcaagcgattcggctccgctaaagtgttgaagaacctctacaggaaacaccgtcttgagtctggcgcctgtttcgacatactgggggggagcctattcgaatccaatttggaaaatgagggcagtatctcaggatcagactcgactttctatcgtcaaagcgaggggcacagcgtgatggataccttggctgttgcattgcgcgtggccgaggaggctatagaggaggccatctcaaaggcagaggcatatggcgattccctcgataaacagaacgaggcttcatatttgagagaccataaagaggaactgacagaagagctcgctacaacaatcctgcagaaaataattagaaaacagaaatccaagtccgagcaacaggtagaggaggagccaggctggcctcacccccagtcatgcagcacaaaggtggccgacgaagggacatctgcatcaccgggcggataccgcgcaccagccgctctttggcgcagccaaagcgctttctctattactggcgaggaagctctcaagactcctcccgttgaggcaccttctcgccagccccgagatcagggccagcatccaagggctgagtctgcactcccaagctggaagtctgtggacagacttgacgaaaccaatctggcccccgtgctgcagtctccagacggaaattgggtcgctcttaaggacggggcccctcccccaacgcggctcctggctaagcctaagtccgggacattccaagccctggaggtggcatcatctgttgctagcgcctatgacgaaatggggtccgattctgaggaggatttcgattggtctgaggccttgtcgaagctgtgcccccgaagcagagccttgccgagaaatccgcagccccagccaacccaggctcagagctccgaccaggggcctattgccgccagccctagctctgcgctgtccccgaatccagaggctatgtgcagtgacagcgaaaccagctccgcaggttcttctcgagaggtggggcatcaggctcgcctctcctggttacagcgaaaggccccgcggaacccggcagcggaaaagatgcggttgcatggggagctggatgtaaactttaacccacagctggcttcacgggagactagtgactcaagcgaaccagaggaggccccacataccacggacagacgagcccgccgttggcggagggcgcggctcggcagcgaagagccctcaaaggagccttctagtccatccgctcagctgagggacttagacacccaccaggtctctgacgacctctccgagactgacatttccaatgaagcccgagaccctcagactttgaccgacaccacagaggagaaacgacgaaatcgtctttacgagctggccatgaaaatgtccgagaaagaaacctcttcaggcgaggaccaagaatcggagcccaaaaccgagtcggaaaatcaaaaggagagcctgtcaagcgaagacaattctcagagcgtgcaggaggaactcaaaaaaaagtttagtgccgtgagcctgtgtaacatctctactgaagtgttgaaggtcattaatgccactgaggagctgattgcaggcagcacaggcccctgggaatctccccaagtcccgcccgacaggcagaagggtatgtttcctcgggggaccgatcaggtccgcttggatgaacagctcacgagcctggaggagaacgtgtacctcgccgcgggaactgtctacgggcttgagactcagttgactgagctggaggatgctgcaagatgcattcactccgggacagacgagacacacctggctgatctggaggatcaggtggcgactgcagctgcacaagtgcaccacgcagagctgcagatcagcgacatcgagagcaggatcagcgccttgactatcgctggcctgaatattgccccctgtgtgcgcttcactagacggcgagatcaaaaacagcggacgcaggtgcagacaatcgacacctcaagacaacagcggcggaaactgccggccccacccgtcaaggctgagaaaatcgagactagcagcgtcactactatcaaaacatttaaccacaatttcatcctgcaaggcagctcaaccaatcgtaccaaggagcggaaaggcacaaccaaggatcttatggaaccagccctcgaaagcgccgtgatgtattag

SEQ ID NO: 196261 - DNA, 2019 bp, synthetic construct
  misc_feature 1..2019: note = Description of Artificial Sequence: Synthetic coding sequence
  source 1..2019: mol_type = other DNA
atggacaccctggccgtggccctgcgggtggccgaggaggccatcgaggaagccatctctaaagccgaggcctatggcgacagcttagacaagcagaatgaggcctcctaccttagggatcataaggaggagctgactgaggaattggccactactattctgcagaagatcatcaggaaacaaaagtccaagtccgagcaacaagtggaggaggagcccggatggccccacccccagagttgtagcaccaaagtggctgacgagggcacaagtgcgagccctggaggttatcgtgcccccgccgcactctggcgatcacagagcgcgttctcaatcaccggagaggaagccctaaaaacccctcctgtggaggccccttcacgtcagccccgggatcagggacagcatccgcgggctgagagcgctctgcctagctggaagtcagtcgataggttggatgaaacaaatctagcgccagtgctgcagagccctgacgggaattgggtggcccttaaggacggcgcgccaccgcccacacgcttgctggccaaaccaaagtccggaacttttcaagccctggaggttgctagtagcgtcgcctcagcctacgatgagatgggatctgatagcgaggaggacttcgattggtccgaggcgcttagcaagctgtgtcctcgcagccgcgcactcccccgaaacccccagccccagcccacacaggcgcagagtagtgaccaggggccaatcgccgcaagcccaagttctgccctcagtcctaatcctgaagctatgtgtagcgactctgagactagcagcgctggcagtagtcgtgaggtgggccaccaggctcggttgtcttggctccaaagaaaggcgccacggaaccctgctgctgaaaagatgaggctgcacggggagttagacgtaaacttcaacccgcagctggcgtcccgggagacaagcgattcttcagagcctgaagaggctcctcatacaacggataggcgggcgagacggtggcgaagagcaaggctagggtccgaggaaccctctaaagaacctagttccccgtcggcccaattacgggaccttgatactcatcaggtatctgacgatctgagcgagaccgacattagtaacgaagccagagatccacagacgctgacggacacgaccgaagaaaagcggaggaacagactatatgaactcgcgatgaagatgtctgaaaaggaaactagttccggcgaagaccaagagtctgaaccgaagaccgagagtgagaatcagaaggagtccctgagttctgaagacaacagtcaatcagttcaggaggagctgaagaagaaattctcggcagttagcctgtgtaatatctctacagaagtactcaaggttataaacgccaccgaggagctaatagccggctccacaggcccgtgggagtctcctcaggtgccacccgatcggcaaaagggaatgttccctaggggcacagatcaggttagactggacgaacagctaacttccctggaggagaatgtctatttagctgctggcactgtgtatggcctggagacccagcttacggaacttgaagatgctgccagatgtattcacagtggcacggatgaaacccatcttgcagacctcgaagatcaggtcgcgacggcagccgcgcaggtgcatcacgccgaactgcagataagcgacatcgagtcgagaatcagcgccctgaccatcgccggactcaatatagctccctgcgttcgatttactaggagacgtgaccagaaacagcgtacccaggtgcagaccattgatacgtcaaggcaacaacgccggaagctcccagctccccccgtgaaagcggagaagatcgaaactagtagcgtaaccaccatcaagacctttaatcacaatttcatcttgcaaggatccagtacaaaccgcacaaaagagaggaagggcactactaaggatctgatggagcctgccctagaatccgcagtgatgtattag

SEQ ID NO: 196262 - DNA, 2886 bp, synthetic construct
  misc_feature 1..2886: note = Description of Artificial Sequence: Synthetic coding sequence
  source 1..2886: mol_type = other DNA
atgaagtacctgctgaacttcatcggccagggccccgccacctacggtcctttctgtgctgaacgactgcgccgcacctatgcaaacggagtgagagctgagccacctacatggctggagctccaggcagttaagtcaaagaagcacatccccatccaggtgattctggccactggcgaatcgctgacagtgcctgtcgattccgctagcacatctcgcgagatgtgcatgcatatcgcacacaagcagggattgtctgaccatcttggctttagcctccaggttgctgtctacgacaagttctggtctctcgggagtggacgggatcatatgatggacgccatagccaggtgcgaacagatggcccaggaacgcggcgagagtcagaggcagagtccctggaggatctattttagaaaggagtttttcactccatggcacgacagccgcgaggatcccgtctcaaccgaactcatctatagacaggtgcttagaggtgtatggagtggcgagtactcattcgagaaagaggaggaactggtcgagctcctggcccgccactgttatgttcagcttggggccagtgccgaatctaaagccgtccaggaattactcccctcctgcatcccacataagctttaccgcaccaagccacctgataggtgggcatcactcgtgactgccgcatgcgccaaagccccatatacccagaagcaggtgacgcccctggccgtgagagagcaggtggtggacgccgcccgcctgcagtggcctctcctgttcagcagactgttcgaggtcattacccttagcgccttcactttgcctagcctgctggcaaggccgcctcctgcccaggatgccggaccagcaggagaggatgccgctgggacactctttcccagaggacatggtagtggccaccagcaggtcagagcactgcgagaggacttattcctacacacggagccccacccgcctgccccaggaagaacggctcatgaggtgctgcactggggcatcacaagatgcaccggatctttcagcctgaaaccaaggtctacccggaaaggacagggctcagtgcaacccctcgctggaacataccttgaagggtcattcctgtgccacgggcgtgaacttgtcgcatggagagtgcaggtcgtgtgggagggcgataagggccagtgtctggccggggctgacccgcactctcatggctctccctggattagcttaacggggaacttcagtatgccctttggaaagtctacgcagcagagcggcacttgtattagtggactatgccaagtgtactcaggtcatcatagccccctggcaacctcccccagaagtaccgacagcatcactcatagcgctgacgagagaatgtcaaagctaaaacacgccgaagtccgctggctgagggtctcaacctggcagtcccgacaactgatctccgccttgacattcgcagtttcattaaggtgtcactgtacccccgctacatccctgtcagcccatagccagcctcacacctgggcagcgcctttgtcagcttcagagaggccaaccgtggtcagcggcttggttctggcattggccgagcagctctgcgttcttattcgctggcgcggactcttggttaccctgtcgtttatatcccgcgaggcccagggaggacaaagactgctactgtctacaatgcatgaagagtacgagtttgtcagcccaagctcagtagctatcgccgagctcgtggccctgtttctggaaggcctcaaagagcgcagtatctttgctatggcattgcaggacagaaaggcgactgacgacacaacccttctggccttcaaaaaaggcgacttactcgttctgaccaagaaacaggggctgctcgccagtgaaaactggacacttggacagaacgaccggaccgggaaaaccggtctggtccccatggcgtgcctgtataccatccccacagtcaccaagccttcagcccagctgcttagtctactggcgatgtcaccagagaaaagaaagcttgctgcccaggaaggccagttcacggaaccacggccagaggagcccccgaaagagaaattgcacacactggaggagttttcatacgagtttttcagagccccagaaaaagacatggttagtatggcagtgcttccattggccagggccaggggtcacctgtgggcgtactcctgtgagccccttcggcaaccactactcaaaagagtgcacgcaaacgtggacctgtgggatattgcatgccaaatttttgctactcccatacttagatacatgggagactatccctcccgccaggcatggcccactctggagctcaccgaccagatttttactctggctctgcaacaccccgctttgcaggacgaggtctactgtcagattcttaaacaactgactcataactcgaaccgacactccgaggaacgtgggtggcagctgctgtggctatgtaccggactctttccgccttcaaaaggtctgttgccacacgcacagaagttcatcgataccagacgcgggaagctgcttgccccggattgctcacggcggatacaaaaagtgctcagaaccggccccaggaaacagcccccacaccaggtcgaagtcgaggccgccgaacagaacgtaagccgcatctgccacaaaatctattttccaaacgatacctccgaaatgcttgaggtagtagccaacacgcgggtcagggacgtttgcgactctatcgctactcgactgcagcttgcttcctgggagggctgttcactcttcattaagatctcagacaaggtgatctcccagaaggagggggatttttttttcgattccctacgcgagtag

SEQ ID NO: 196263 - DNA, 6354 bp, synthetic construct
  misc_feature 1..6354: note = Description of Artificial Sequence: Synthetic coding sequence
  source 1..6354: mol_type = other DNA
atgagcggcttccggctgggcgaccacgtgtggctggagcccccctccactcataagaccggagtggctattggggggataatcaaagaagcaaaacctggtaaagtgctggttgaggacgacgaaggtaaggaacactggatcagggctgaagattttggtgttctctcccccatgcacccaaatagcgtccagggagtcgacgacatgattcggttgggggacctcaatgaagcaggaatggtgcataaccttctgatccgttaccagcaacacaagatttatacctacacgggatctatcctcgtggccgtgaatcccttccaggtgctgccgctttataccctcgagcaagtccaactgtactattcaagacacatgggggagcttccacctcacgtcttcgctatcgctaataactgctatttcagtatgaaacgcaacaagagggaccaatgttgcattatctcgggcgaatccggggctggcaagacagagaccactaaactgatactccagttccttgcaaccattagcggccaacacagttggatcgagcagcaggttttagaagctaatcctatcctggaggcctttggcaacgccaagacaatccggaatgacaacagctctcgattcgggaagtacattgacatttattttaatccctctggagtgatcgaaggcgcccgtattgagcagttcctgctggaaaaatccagggtttgcagacaggcacccgaagaacgcaattaccacatcttctactgtatgctaatgggagtatccgctgaggataagcaactactgtcgctcgggactccctcagaataccactacctcacaatgggcaactgcaccagctgtgaaggactgaatgatgctaaggactacgctcacattcggtccgctatgaaaatactacagttctccgatagtgaatcatgggatgtgatcaaattattggcggcgattctccatctcggcaacgtggggttcatggcatcagtgttcgagaacctggatgcatctgatgtgatggagacacccgcattcccgactgtgatgaagctgctggaggtgcaacaccaggagctgcgggattgcctgatcaagcacactattctgatcaggggtgagtttgttacaagaagcttgaatattgctcaggccgcagaccgcagagatgcctttgtaaaggggatatatggtcatctgtttttgtggattgttaagaaaataaacgccgcgattttcacgccaccggcccaggaccctaagaacgttcgccgtgcaatcgggctcctggacatcttcggtttcgagaactttgagaacaatagcttcgaacagctgtgcattaacttcgcgaacgagcacctccaacagttttttgtccagcacgtgttcaccatggagcaggaggagtaccgaagcgagaacatctcttgggactatattcattataccgacaaccgcccgaccttagacctgctagccctgaagccaatgtccattatctccctgctcgacgaagagtccaggtttccccagggtacagacctcaccatgctgcagaaacttaatagtgtccacgcaaataacaaagcatttttgcagccaaaaaacatccacgatgccaggtttggaatcgcccatttcgcgggcgaagtgtactaccaggctgaggggttcctggaaaagaacagggacgtgttgagtaccgatatcctcactttagtgtactcctcaaagaacaaattcttaagggagatcttcaatctggagctggcggagacgaagctgggccatggcacgatccggcaggccaaagctggcaatcacctttttaagtctgctgactctaataagcggccttctacgctgggttctcagtttaagcagtctctcgatcaattaatgaaaatccttacaaactgccagccttatttcattcgctgtataaagcctaacgagtacaagaagccgctcctttttgacagggaactgtgcctgcggcagctgcgctatagcggcatgatggagaccgtccatatcagaaaaagcgggtttcctataagatacactttcgaggaattctctcaacgtttcggagtcttgttgccaaatgccatgaggatgcagcttcaggggaagctccggcagatgaccctggggatcacagatgtatggttacggactgataaggattggaaggccggcaagactaagatctttctgcgggatcatcaggatacgctcctcgaggtccagcgttctcaggtactggaccgggccgccttgtccatccagaaggtgctgcggggttaccgctatcgcaaagagtttctgaggcagagaagagccgccgtaaccttgcaggcttggtggagaggatattgtaatagacgcaatttcaagctcatcctggtcggattcgagagactccaagcaattgcgagatctcagcccctcgcccggcagtaccaagcaatgaggcagagaaccgtccagcttcaagccctgtgtagagggtatctggtgaggcaacaagtgcaggcaaagagaagagcggtcgtagtgatacaggcacacgctagaggcatggccgccagaagaaacttccagcagagaaaagcgaacgctcctttggtgattcccgccgagggccagaagagccagggcgcgctgccggccaagaagcgacggagcatttacgacactgtgaccgatactgaaatggtggagaaggttttcggctttctaccggcaatgatcggtggccaggaggggcaagctagcccacactttgaggacctcgagagtaagacacaaaagttactcgaagttgacctggatactgtgccgatggcagaagagcctgaagaagatgtggatggattggctgagtacaccttccctaagtttgccgttacctatttccagaagagcgcctcacatacccacattcgaaggccactgcgctatcccctgttataccacgaggatgatacagactgcctggctgccctagtgatctggaatgtgatcctccgatttatgggagatctccctgagcccgttctgtacgccaggagttctcagcaggggtcgagcgtaatgcggcagatacacgacactctgggaagggagcatggtgcccaggtgccccagcatagccgctccgcccaggttgcatctcaattaaatattggcgaggaagctcttgagcccgacggacttggcgctgataggcctatgtccaacctggagaaggtacattttatcgttggttatgccatcctcagaccgagcttgcgggatgaaatttattgtcaaatatgtaagcaactgtcagaaaatttcaagactagttccctcgcaagggggtggatcctcctatctctgtgtctggggtgtttcccgccctccgaaaggttcatgaaatatctcctgaatttcattggccaggggcctgccacatacggaccgttttgcgctgagcggctaagaaggacgtacgccaacggcgttagagccgaacctccaacctggctagaattgcaagctgttaagagcaagaaacacatacccatacaagtgatcctggccaccggagagtccttgacagtccccgtggacagtgcatctacgtcccgtgagatgtgtatgcatattgcccataagcagggattgagtgatcacttaggcttctcccttcaggtggctgtttatgacaagttctggagcctaggtagtggcagagaccatatgatggacgctatcgcacggtgcgaacagatggctcaggaacgtggtgaatcccagagacagtccccgtggcgcatatattttagaaaggagttcttcaccccctggcatgactcccgggaggaccccgttagcacggagctaatctacaggcaagtgctgaggggggtgtggtcaggtgaatactcgtttgagaaggaggaggagctggtagaactgctggccaggcactgctatgtgcaactgggagccagcgcagagtccaaggcagtccaggaactactcccatcatgtattcctcataagctgtacaggactaagccgcccgatcgttgggcctccctggttacagcagcatgtgcaaaggctccgtacactcagaagcaagtgacccccctggcagtgagagagcaagtcgttgacgccgctcggttgcaatggcccttactttttagccgcctgttcgaggtgattaccctgtctggccctcgtctgcctaagactcagctgattttggccgtcaattggaagggactctgttttctggatcagcaggagaagatgttgctagaactctcattcccagaggtcatgggactggcaaccaacagagaggcccagggagggcaacgattactcctgtccaccatgcatgaggaatacgaatttgtctctccttcctccgtggctatcgctgaactggttgctttgttcctcgaagggttgaaggagaggtcgatattcgcaatggcactgcaagaccgcaaggctactgatgataccacacttctggccttcaagaaaggcgacctattggtgctcaccaagaagcagggactccttgccagtgagaactggactcttgggcagaacgatagaacagggaagactgggttggtgccgatggcttgcctgtacaccattccgactgtgaccaagccctccgcacagctgctgagcttacttgccatgtctccagagaagaggaagctggcagcccaggaaggacagtttaccgagccccggccagaagaaccacccaaagaaaagctgcatacacttgaagaattctcatatgagttcttccgggccccagaaaaagacatggtttccatggccgtgcttccgctggcaagagctcgcggccatctctgggcttactcctgtgaacccctccggcaacccctgctcaagcgtgtccatgccaacgtcgacctgtgggacatcgcttgccagatcttcgccactcctatccttcggtacatgggggattacccatctaggcaggcatggccgactctcgaactgaccgatcaaatctttaccctcgcgctacagcacccagcactgcaggatgaagtctattgtcagatcctgaagcagctgactcacaatagcaaccggcattccgaagaaaggggatggcagctgctgtggctctgcacggggttgttccctccatcgaagggactcctgccccatgcccagaagttcatagatacgagacgcggaaagctgctggcaccagactgctcgaggcgaattcagaaagtactgcgtactgggccccgcaagcaacccccccatcaggtcgaagtggaggccgctgagcagaacgtgtctcgcatatgccacaaaatctacttcccgaatgatactagcgagatgctggaggttgtagcaaacaccagggtcagggatgtgtgtgactcaattgccacgcgactgcaactggcctcttgggaagggtgctccttgtttatcaaaatcagcgacaaggtcatttctcagaaggagggcgacttcttctttgactctttgcgcgaggtgtcagattgggtaaaaaaaaacaaaccccaaaaagagggggctccagtcactcttccataccaggtttactttatgagaaagctttggctaaatatttcacctggcaaggacgtcaacgctgatacaatcttgcactaccaccaggagctgcccaagtatctgcgtggatttcataaatgtagtcgggaggacgcaatccatctagccggtcttatctataaggcccaatttaacaatgatcgcagtcagctcgcttcagtgccgaagatcctccgcgagctcgttcctgaaaacctgacccgactgatgtcctcagaggagtggaagaaatcaatcctcctggcctacgacaagcacaaggataaaaccgtggaggaagccaaggttgcgtttctcaagtggatttgccgctggcccaccttcggatcggccttctttgaagtaaagcagaccagcgaaccttcataccccgacgttattcttatagcaatcaacagacacggggtgctcttgattcaccccaagacaaaagacctcttgacgacgtaccccttcacaaagattagttcgtggagtagcggatctacttattttcatatggctctcgggtctctcgggagaggatcaaggctactgtgcgagacatctctgggatataagatggacgacttgcttacgagttatgtgcaacaactgctgagcgcaatgaataaacaaaggggttctaaggcacctgctttggcttctacatag

SEQ ID NO: 196264 - DNA, 6351 bp, synthetic construct
  misc_feature 1..6351: note = Description of Artificial Sequence: Synthetic coding sequence
  source 1..6351: mol_type = other DNA
atgagcggcttccggctgggcgaccacgtgtggctggagcccccctctacacacaagacgggggtggcgattggagggatcattaaagaggcaaagcccggcaaggtgctggtagaggacgacgagggaaaggaacattggattcgggccgaggatttcggcgtcctctcccccatgcatccaaactcagtgcagggcgtggacgatatgatccggctcggcgatctcaacgaagccggcatggtgcataatctgcttattaggtaccagcagcacaagatatacacctataccggaagcatcctggtagcagttaatcccttccaagttttgccgctatatacgctcgagcaggtccagctgtactactccagacacatgggggagctgccaccccatgtgtttgctatagctaacaactgctacttttccatgaagagaaacaaaagggatcaatgctgcattatttctggggaatccggcgccgggaagactgaaaccacaaagttgattctgcagttcctcgccacgatctccggtcagcatagctggatcgagcaacaagtgcttgaggccaatccgattttggaggcttttgggaacgcaaaaacaattcggaacgacaatagctctcgcttcggcaaatacatcgatatctacttcaatccatctggggttattgagggcgctcgcattgagcagtttctgttggagaagagccgcgtgtgccgccaggcccctgaagaacgtaattatcatattttttattgcatgctgatgggtgtgtcagcagaggacaagcaactgctgagcttagggacaccatctgagtatcactatctaaccatgggaaactgtacaagctgcgagggcctaaacgatgcgaaggactatgcgcatatccgttcagccatgaaaattctccagttttccgactcagaatcctgggacgtaatcaagctccttgctgccattctgcacctgggaaatgtgggcttcatggccagcgtattcgaaaatctagatgcctccgatgttatggagaccccagcatttcctaccgtgatgaaactccttgaagtccagcaccaggagctcagggactgccttatcaagcacacaatcctgatacgaggtgaatttgtgacaagatcactgaatatcgcccaggccgcggacagacgggatgccttcgtgaagggtatctacggccacctgtttctctggatcgttaagaaaatcaacgctgccatctttactcccccggcgcaagacccaaaaaacgtgagaagggccatcggcctcttggatatcttcggctttgaaaacttcgagaataacagttttgagcagctgtgcatcaactttgccaacgaacaccttcaacaatttttcgtgcagcacgtgttcacaatggaacaggaagagtatcgatcggaaaacattagttgggattatatccattatacagacaaccgtcccaccctcgatctcttggcactaaaaccaatgagcatcatatccctgctggacgaggagtccagattcccgcaagggacagatcttactatgctgcagaaacttaattccgttcacgccaacaataaagccttcttacaacctaagaatattcacgacgcccgttttggtattgcccacttcgctggagaggtgtattaccaagctgaaggctttctggaaaagaacagggacgtgctcagcaccgatattcttacccttgtttactcaagcaaaaataagtttctccgagagatctttaatctggaactggccgaaaccaagctgggccacggcacaattcgccaggctaaagctggaaaccacttattcaaatccgccgactcgaacaagcgcccttccacactgggcagccagttcaagcaaagtctcgatcagctgatgaagattctgacaaattgccagccgtactttatccgctgcatcaaacccaatgagtataagaaacccctgctgttcgatagggaactgtgcctgaggcagctccgatattctggaatgatggaaacagtgcatatcagaaagtcagggtttcccataaggtacacatttgaggaattttctcagagatttggggtgctgttgccgaacgccatgcgaatgcagctccaggggaagctgcggcagatgaccctcggaatcacagatgtgtggcttcgaacagacaaggactggaaggcaggcaagaccaaaatcttcctcagagaccatcaggacaccctacttgaggtgcagaggagccaagtgctcgacagggctgctctgtcaattcaaaaagtgctccgtgggtatagataccggaaggagtttctacgtcaacgaagggcggctgttacattgcaggcatggtggcgcggatactgtaacagaaggaacttcaagttgattctcgttggttttgaaagactgcaggcgatcgcaaggtctcagcctctcgcaaggcagtatcaggccatgcggcaacgcaccgtgcaacttcaggcactgtgtcgaggctatctggttaggcagcaggtacaggcaaaaagacgcgccgtcgttgttatccaagctcacgcacgggggatggctgctaggagaaacttccagcagcgtaaggctaacgctcctttggtcatccctgctgaaggtcagaagtcgcaaggtgcgcttcctgcaaagaaacggcgaagcatatacgacaccgtgaccgacacagagatggtggagaaggtctttgggtttctgccggctatgatcggtgggcaggagggtcaggcttccccccattttgaggacctggagtctaaaactcaaaagctgctggaggttgatctcgacaccgtgccaatggctgaggaacctgaggaggatgtcgatggcctggccgaatacactttcccaaaatttgcagtgacatacttccaaaaaagtgcctcccacacccatataaggcgccccctgcggtatcccttgctataccacgaagacgataccgactgcttagccgcactggttatttggaacgttattcttcggttcatgggcgatctgccagagcctgtgctgtacgccaggtcctctcaacagggatcttcggttatgcgccaaatacatgacacactgggtagggagcacggcgcacaggtaccgcagcattctcgaagcgcgcaggtcgccagccaactcaatatcggcgaagaggctctggaacctgatggccttggcgccgacaggcctatgtccaatctggaaaaagtccactttattgtggggtacgccatactacgtccctctctgcgggacgaaatctattgtcagatatgtaaacagctctccgagaactttaaaacgtcatctctggccagaggttggatacttctctcactgtgtctgggctgctttccgccgtccgagcgttttatgaaatacctgctgaacttcattggacaaggccctgccacatacggacccttttgtgcagagcgactgcggcgaacttatgcgaatggcgttcgcgctgaaccaccgacgtggttggagctgcaagctgtgaagtccaaaaagcatattcctatacaagttatcctggctacaggtgaaagcctcacagtgcccgtcgatagcgcatccacctcaagagagatgtgtatgcacattgctcataagcaggggctgtcagaccatctgggattcagcttacaggtcgcagtttatgacaagttttggtctctaggaagtggccgtgatcacatgatggatgccattgcccggtgtgagcagatggctcaggagaggggagagtctcagagacagagcccatggcgcatttatttcaggaaagagttcttcaccccgtggcatgattcacgggaagatcctgtttccaccgagctcatctaccgacaggttcttcgtggcgtttggtcaggcgaatattcattcgagaaggaagaagagctggtagaactgctggccaggcattgctacgtacaactgggcgcaagcgcagaatctaaggcagtacaggaactactgccctcctgtataccgcacaagctgtataggactaaacctccagacagatgggctagccttgttacggccgcgtgtgctaaggctccctacacgcagaagcaggtgacacccctggctgtgcgtgagcaggtcgtggatgctgccagactccagtggccgctcctattttccagattgttcgaggtgattacattgtctggtccccgcctgcctaagactcagctgatcttggccgtaaattggaaagggctctgtttcctcgaccagcaggaaaagatgctcctggagctctctttccctgaagtcatgggactggcgactaatagggaagcccaaggaggacagcggcttctcctttctactatgcatgaagagtacgagtttgtgtctccctcctccgtcgccatcgcagagctcgtggctcttttcttggagggcttgaaagagcgctcaatttttgcaatggccctgcaggatcgaaaagccaccgacgacacaactctactggcgttcaaaaagggcgatctcctcgtgctaaccaagaaacagggactgctcgccagcgagaattggacgctggggcagaacgacagaactggcaaaaccggactcgtgccaatggcctgtctctacaccatccccaccgtaacaaaaccttcggctcagttgctgtcgctgttggccatgtcacccgaaaagcggaagctggccgcccaggaggggcaatttacggagccacggccggaggagcctcctaaagagaagcttcatacccttgaagagttctcgtatgagttctttcgagctccagagaaggatatggtctctatggccgtgctacccctggcgagggcacgcgggcacctgtgggcatatagttgcgagcccttgcggcagcccctgctcaagcgggtgcatgcaaacgtggatctgtgggatatagcctgtcagatctttgtggccattttacgttatatgggcgattaccctagtagacaggcctggcccacgctggagttgaccgaccagatattcaccctcgccttgcaacaccccgctttgcaggatgaggtctattgtcagattctcaaacagctgacacacaattctaaccgacattcagaagaaaggggctggcaacttctgtggctttgcacaggtttgttccccccctcaaagggacttctgccccacgcacagaagtttattgatacacggcgggggaaacttctggcccccgactgtagtaggaggattcaaaaggttctccgaaccggaccaaggaagcagcctccgcaccaggtggaggtcgaggcagcagagcagaatgtctcgagaatttgtcacaagatctatttccctaatgacaccagtgaaatgctagaagtagtggccaatacacgcgtgagagacgtgtgcgattcaatcgctacacgactgcagctcgcttcctgggagggatgctcactgttcataaaaatctctgacaaggtgatctcccagaaggagggtgattttttcttcgacagtctccgcgaagtctctgactgggtgaaaaaaaataagccacagaaggaaggggcgccagttacactgccgtaccaggtttacttcatgcgcaagctgtggcttaacattagtccaggcaaagacgtgaacgcagatactattctacactaccatcaggagctgcccaaatacttgagagggtttcacaagtgctccagagaggatgccattcacctcgccggcttgatctacaaggcacagtttaacaacgatcgcagccagctggcaagtgtgccaaaaatactcagggagcttgtgcctgaaaacctgacacggctgatgtcgtccgaagagtggaagaagtccatcctcctcgcttatgacaagcacaaagataagactgttgaggaggctaaggtggcattccttaaatggatttgccggtggcctactttcgggtcagcattcttcgaggtcaagcagaccagcgagcccagttaccccgatgtgatcttaatcgctataaatcggcatggagtgctgcttatccacccaaaaaccaaggacctgttaacaacatacccgttcaccaaaattagctcctggtcaagcggttccacctacttccacatggcattgggaagtctgggccgggggtccagattgctgtgcgagacaagtctgggatataaaatggatgaccttcttacaagctatgtccagcagctcctgagcgccatgaacaagcagcgcggaagcaaggctcctgcactggctagcacttag

SEQ ID NO: 196265 - DNA, 6351 bp, synthetic construct
  misc_feature 1..6351: note = Description of Artificial Sequence: Synthetic coding sequence
  source 1..6351: mol_type = other DNA
atgagcggcttccggctgggcgaccacgtgtggctggagcccccctcaacacataagacaggcgtggcaatcgggggcataatcaaggaagcaaagcccggtaaagttctcgtagaggatgatgagggcaaggaacattggatcagagcagaagactttggggtgcttagccctatgcacccaaatagcgtacaaggagtggatgatatgatccgtctgggcgacctgaacgaagcggggatggtgcacaacctcttgatcaggtaccagcaacacaagatctatacatatactggaagcatcttggtggcagtgaatccctttcaagttctgcctttatacaccctggaacaggtgcaattatattactctagacacatgggagagttaccgccacatgtctttgctattgctaataactgctatttctcaatgaaacggaataagagggaccaatgctgcattatttctggagagtctggcgctggaaagaccgaaacaacaaaattgattctgcaattcctggccactatttcaggccagcacagttggatcgaacagcaggtcctcgaggccaaccccatcctcgaggcttttggtaatgctaaaaccatcagaaacgataactcatctagattcggaaaatacatagacatttacttcaatccttctggcgtgatcgagggagcccggattgagcagttcctcctcgagaaatctcgcgtctgtaggcaagcccctgaggagcgaaactaccatattttttactgcatgttgatgggcgtcagtgcagaagacaaacagctcttgtctttgggaaccccatccgaatatcactatctcacgatgggcaactgcacgagttgcgaaggactgaacgatgccaaggactacgcccacattagaagtgctatgaagatactgcagttttctgatagcgaatcatgggatgtgattaaactcctggccgccatcctgcatcttgggaatgtcggcttcatggcatctgttttcgagaacctggatgcctctgatgtgatggagaccccggcatttccgaccgtcatgaaactgctggaagttcagcatcaggaacttcgcgactgcctaattaaacacacaattctgattcgcggcgaatttgtgacccgatctctcaacatagctcaggccgcagatcgcagggatgctttcgtcaaggggatctacggacatctcttcctatggatcgtgaagaagatcaacgccgccatattcaccccgcctgctcaagatcccaagaatgtgcggcgggctattggattgttggacatcttcggctttgaaaacttcgaaaataatagctttgaacagctttgcatcaattttgcgaacgagcacctgcaacagtttttcgtccagcatgtgtttacaatggaacaggaagagtacagatctgagaacatatcatgggattatatccattacaccgacaatcggcctactttagatttgcttgccttgaaacctatgtccattattagcttgctcgacgaagagtcacgctttccccaagggacagaccttacaatgcttcagaagctcaattcagttcatgcgaataacaaggctttccttcaacccaaaaacattcatgacgctaggtttggcattgcccatttcgctggcgaagtgtactatcaagcagaaggtttcctggaaaaaaaccgggatgtgttatccaccgacattttgacgctggtctattcttcaaagaataagttcctgcgggagatctttaacttagagttggccgagaccaaactggggcatggaacaattaggcaggccaaggctggtaaccacctgtttaagtcagccgactctaacaaaaggccgtccacccttggaagccagtttaaacagagcctggatcagctgatgaaaattctgactaactgccagccttattttattcggtgtattaagcctaacgaatataagaaacctcttctattcgatagagaattgtgtctgaggcagctccgatacagcggaatgatggaaacagtgcatatcagaaaatccgggttcccgatcaggtatacttttgaagagttttcacagcggtttggcgtgctgctgcccaatgctatgcggatgcagctccagggaaaactgagacagatgacactcggcatcaccgacgtgtggttacgaacagacaaggactggaaagccggtaagaccaaaatttttctgcgtgatcaccaggacactcttctggaagtccagcggtcccaggtactggacagggctgcattgtctatccaaaaagtcctgaggggttacagataccgcaaagagtttctgaggcagagacgggccgcagtcactttgcaagcttggtggcgtggctactgtaatagacggaactttaaactgattcttgttggatttgaacgcctacaggccatagcccgtagccagccgctggctcgccagtatcaggccatgaggcagcgcacagtgcagctgcaggcgctctgtcggggctatttagtacggcagcaggtccaggctaagcggagagcggtggttgtgattcaggcccatgcccgtgggatggcagcccgtcgcaatttccaacagaggaaggccaatgctcccttggtgatccctgccgaggggcaaaaatctcaaggcgcactaccagctaaaaagcgccgctccatttacgacacagtgactgatactgaaatggtggagaaagtgttcggatttcttccggccatgattggcggccaggagggccaggcctccccccactttgaggacctcgagagcaagacacagaagctgttggaggtggatctggataccgtgcccatggcggaagagcctgaggaggatgtcgacggattagctgagtacacatttccgaagtttgctgttacttatttccagaagtctgcctcccacacccacatccgaaggccactgcggtacccacttctatatcatgaagacgatacggattgtttagccgcactcgttatctggaatgtaatactgcgcttcatgggggacttgcccgagccggttctttacgcgcggtcgtctcagcagggcagttcggtgatgagacagattcatgacaccctgggtcgggagcacggcgcccaagtgccacagcattccaggtccgcccaggtggcttcacagctgaatattggcgaggaggctctggaaccagatggacttggtgccgaccgccccatgtccaacctagagaaggtccactttattgtgggatatgccatactcaggccctccctgcgtgatgagatctactgtcagatatgtaaacagctgtctgaaaattttaagacctcatccctcgccagagggtggatcctgctcagcctttgtttaggttgctttccaccatctgagagatttatgaaatacctattgaacttcattggtcagggcccagccacctacggccctttctgcgctgaacggttgagaagaacatacgctaacggagttagagcagagccgcccacctggctggaactccaagcagtgaaatcaaagaagcatatcccgatccaggtgattctcgccactggcgagtcccttaccgtccctgtggactctgcatctacctcaagagaaatgtgcatgcacatcgcacacaagcaaggcctgtccgatcatttgggcttctccctacaggtggccgtatatgacaagttctggagtctgggcagcgggagagaccacatgatggacgcgatcgcacgctgtgaacagatggcccaggagcgcggcgagtcacagcggcaaagtccatggcgtatctactttcggaaagagttcttcaccccttggcacgatagtcgcgaagatcctgtttcaacagagctcatatataggcaggtgctcagaggcgtgtggagtggggagtacagctttgagaaagaggaagagctggttgaactgctggcgagacattgctacgtgcagctaggagccagtgctgagagcaaagcagtgcaggagctcctcccctcctgcattccccacaagctgtaccgcacaaagcctccagaccggtgggcctctctggtcactgctgcctgtgcaaaagccccgtacacacagaagcaagtaacaccactcgctgtacgggaacaagtggtcgatgcagcacgcctgcagtggccccttctcttctcccgactgtttgaggtgatcaccctgtcaggccctcgactccccaaaacacagcttattcttgccgtgaattggaaaggattatgtttcctggatcagcaagagaagatgctcctcgagctttcattccctgaagtaatgggattggcaaccaaccgggaagcacaagggggccagcgattgctgctgagcacaatgcatgaggagtacgaattcgtcagcccttcctccgttgcgatcgccgagctggtggcgctgtttcttgaaggtttgaaagaaaggtcaatctttgccatggcactgcaggacaggaaggctacagatgacaccactctgctagctttcaaaaagggcgatttattggttctgaccaagaagcaggggctcctagcgtcagaaaattggactctgggacaaaacgatcgaacaggcaaaacaggcctcgtccccatggcttgtttatatacgatcccgaccgtcacaaaaccctccgctcagctcctgagtcttctcgcaatgtccccagagaaaaggaagctggcggcgcaggagggacagttcaccgaaccacgccccgaggaaccccctaaggagaagcttcacacgctggaagaattttcctacgaatttttcagggcacccgagaaagatatggtgtcgatggccgtcctacctctggccagagcgcgcggtcacttgtgggcgtattcttgtgaacccctgcggcaaccccttctcaagagggtccacgctaatgtcgacctctgggacatcgcctgtcagatcttcgtggctatccttaggtatatgggggactacccaagtcggcaggcttggcccacactagagctgacagaccagatattcactctggccctgcagcacccagcactgcaggatgaggtgtactgtcaaatcctgaagcagctaacacacaattccaacaggcactcggaggaacgaggctggcagcttctgtggctgtgtactgggctctttcctccgagtaaaggattactgccccacgctcaaaaattcattgacactaggcgaggcaagctgctcgcgccagactgcagtcgacggatccaaaaagtactgagaacggggcctaggaaacaacctcctcatcaagtggaagtggaagcagccgagcaaaacgtgagccggatttgtcataagatctacttcccaaacgataccagcgagatgctggaggttgtggctaacacaagggtaagagatgtttgcgactccatcgcgacacgtctgcagctggcatcttgggaggggtgctccctgtttataaagattagcgacaaggtgatcagtcagaaagagggagatttttttttcgatagtcttagggaagtgagcgactgggtgaagaaaaacaaacctcagaaggagggagctccagtcaccttaccttaccaagtgtactttatgcgcaagctgtggctgaatatcagccccgggaaagatgtcaatgccgacaccattctccattaccaccaagagctgcccaaatatctcagaggtttccacaaatgctcccgtgaagatgcaattcacctcgctggattgatatacaaggctcaatttaacaacgacaggagccagctagcctctgtgcccaagatcctaagagagttggtccccgagaacctcacacggctgatgagttccgaagagtggaaaaagagcatcttactggcatacgacaagcataaggataagacagtggaagaggcgaaagtggcattcctgaaatggatttgccgctggcccacttttggttcggccttcttcgaggtgaaacagacatctgagccttcataccctgacgtgattctgatcgccattaaccgccacggggtcttgttgatccaccccaaaaccaaagatttacttacaacgtatccttttaccaaaatttccagttggtcttcaggcagcacctactttcacatggccctcggctccctcggtcgtggctccaggcttctgtgcgagacatcccttggctataagatggatgatctgctgacatcctacgtgcaacagctgttatccgcgatgaacaagcaacgcggtagcaaggccccagcgctcgccagtacctag

SEQ ID NO: 196266 - DNA, 4248 bp, synthetic construct
  misc_feature 1..4248: note = Description of Artificial Sequence: Synthetic coding sequence
  source 1..4248: mol_type = other DNA
atgcccgaccagttcgaccaggccgtggtgctgaaccagctgcggtacagcggcatgttggaaaccgtacgaatccgcaaggcaggttacgcggtacgaagaccatttcaggacttttacaagcggtacaaagtcctcatgaggaacctcgctctgccagaagacgttcgtgggaagtgtaccagcctgctccagctgtacgacgccagtaactccgagtggcaacttggtaagaccaaagtgtttcttagagaatcgttagaacagaagctggaaaagagaagagaggaggaagtgtcacatgccgccatggtcatacgcgcccacgtcttgggctttctggcgaggaaacaataccgtaaagtgctgtattgcgtcgttattattcaaaagaactatcgagcatttctgctaaggaggaggttcctgcacctgaaaaaagctgctatcgtgttccagaaacaactgcgcggccagatagcacgcagagtgtacagacagcttctggccgaaaagagggaacaggaagaaaaaaaaaaacaagaagaggaggagaaaaaaaagagagaagaggaggaacgggagagagagcgggagcgcagagaggccgagctccgcgctcaacaggaagaggagacccgaaagcagcaggaattggaggctctgcagaagtcccaaaaggaggcagaactgacccgggaactcgagaagcagaaggaaaataagcaggtggaagagattctgagacttgagaaagagatcgaagatcttcaacgcatgaaggagcagcaggagctatccttgactgaggcctcccttcagaagctgcaggaacgccgtgaccaggagctcaggcgactggaagaggaagcctgtagggctgcccaggagttcctagagtccctgaactttgatgaaatcgacgagtgcgttagaaatattgagagatcattgtcagttggaagcgaattctcaagtgaactagctgaaagtgcctgcgaggagaagcctaacttcaacttctcgcaaccctatcctgaggaggaagttgacgagggcttcgaagccgacgatgacgccttcaaggacagccccaacccgagcgagcatggacactctgatcagagaacgtcgggaatccggacaagcgacgattcctctgaagaggacccctacatgaatgatacagttgtccctacgagccccagcgctgactctacagtcctgttggctcctagcgttcaggactccggatctttacacaatagttccagcggcgaaagtacgtactgtatgccgcaaaacgctggagacctgcccagcccagatggtgactacgattacgaccaggacgactacgaggacggtgccataacctccggatcaagtgttacatttagcaactcctacggttcacagtggtctcctgattaccggtgttcggtcggtacctacaacagttcaggagcctaccgtttttctagtgagggcgcccagtccagtttcgaggattcagaggaggactttgattctcgctttgatacagacgatgagttatcctaccggagggattcagtttattcatgcgttaccctcccttatttccatagtttcctgtatatgaaaggcggccttatgaattcttggaagcggcgatggtgtgtgctgaaggacgagacgttcctgtggtttcggtctaagcaagaagccctgaagcagggttggctgcacaagaaaggcggaggatcttctacgctctctaggcggaattggaagaagagatggttcgttctccgacagtctaagctcatgtatttcgagaatgactctgaagagaagctgaaagggactgttgaggtgagaacggccaaagagatcatcgacaataccactaaggagaacggcattgacatcattatggccgacaggaccttccacctgattgccgaaagtcctgaggacgcaagtcaatggttctctgtgctatcacaggttcacgccagcacagatcaagagatccaggagatgcatgacgagcaggccaacccccagaacgcggtgggaaccctggatgtcgggctgattgattccgtgtgtgctagtgacagcccagatagaccaaactccttcgtaatcatcacagcaaatagagttctgcactgcaacgccgatacccctgaggagatgcatcactggatcacccttctccaaaggagcaaaggggacacgcgtgtcgaggggcaagaattcatagtgaggggatggctccataaggaggtaaagaactctcccaaaatgtcttctctgaagctgaagaagagatggttcgttttaacccacaactccctggattactacaagagctcagagaaaaatgctctcaaactggggacactggttctaaattctctctgcagcgtggttcctcccgacgaaaaaattttcaaggaaacaggctactggaacgtgaccgtgtacggaagaaagcactgctataggctgtataccaagcttctgaacgaggcaacccgctggagctccgccatccaaaatgtgacagataccaaagctcctatcgatactcccactcagcaactgatccaggatattaaggaaaactgcctcaacagcgacgtcgtcgagcaaatatacaagaggaatccaattcttagatatactcaccatcccctacattcaccactccttccattaccttacggcgacatcaacctcaatctgctgaaggacaagggctatactacactccaagacgaagctattaaaatcttcaattcactccagcaactggaatccatgtccgacccaatcccgatcattcagggcatcctgcagaccggtcacgatcttcgcccccttagggatgagctgtattgccaactgattaaacagactaacaaagtcccccacccagggagcgttggcaacctgtattcatggcaaatcctgacctgtctgagttgcacatttctgccttcacgaggcattttgaagtatcttaaattccacctgaaacgcattcgtgaacagttccccgggagcgagatggagaagtatgccctattcacatacgaaagcctcaaaaaaacgaagtgccgagagtttgtgccttccagagacgagattgaagccttaatccataggcaagaaatgacttcaacagtgtattgccacgggggaggaagctgcaaaataaccataaattctcacactacggctggcgaagtggtggagaagctgattcggggcctcgcaatggaggactcaaggaacatgttcgcactttttgaatacaacgggcacgtggataaagcgatcgagtcccgaacagttgtggccgatgtgctagccaaattcgagaagttagcggccaccagcgaggttggagacctcccttggaaattttatttcaagctctattgcttcctggacacggataatgtgccaaaggatagcgtggagttcgcttttatgtttgagcaggctcatgaggccgtgattcacggccaccatcctgcccccgaagagaacctccaagtgctggccgcactgcgcctccagtatttacagggtgactataccttgcacgctgccatcccacccttggaagaagtttattcccttcagaggctaaaggctcgcattagccagtcaacaaagaccttcaccccctgcgagcgactggagaaaaggaggacctcatttctggagggtactctccgcagatcattccgcaccggctcagtagtccgtcagaaggttgaggaagaacaaatgctcgacatgtggataaaagaggaggtatcttcagccagggctagcatcatcgataagtggcgaaaattccagggcatgaaccaggaacaggccatggcaaagtatatggccctgataaaggagtggccggggtatgggagtaccttgtttgacgtcgagtgcaaagagggagggttccctcaggaattgtggctaggcgtttccgcggatgctgtttctgtgtataagagaggagaggggcgcccgctcgaagtttttcaatatgaacacatcctaagctttggagcccctttggccaatacttataaaattgtggttgacgagcgggagctgttgttcgagacctccgaagtggtagatgtagcaaagctgatgaaagcctatattagcatgatcgtaaagaaaaggtatagcactactcgcagcgcttccagccagggttcgagcaggtag

SEQ ID NO: 196267 - DNA, 4248 bp, synthetic construct
  misc_feature 1..4248: note = Description of Artificial Sequence: Synthetic coding sequence
  source 1..4248: mol_type = other DNA
atgcccgaccagttcgaccaggccgtggtgctgaaccagctgcggtattcggggatgctcgaaacagtacggatcaggaaggcagggtacgccgtgcgtcgaccttttcaagatttttacaagcgctacaaggtcctcatgagaaacctcgccttgcctgaagatgttcggggtaagtgtacttcattactgcaactttacgatgcaagcaacagtgagtggcaacttggcaagaccaaagtctttcttagggaaagcctcgaacagaaactagagaagcggcgcgaggaggaagtcagtcatgcggccatggtaatccgggctcacgtgcttggcttcctggctcgcaaacagtatcgtaaggttctgtattgtgtggtcattatccagaaaaattatagagcttttttacttcggaggcggttcctgcacctgaaaaaggcagcgattgtttttcagaaacaattgcgggggcagatcgcacggcgtgtgtatcgccagcttctggccgagaaacgcgaacaagaagaaaagaagaagcaggaagaagaggagaagaaaaaacgggaggaagaggagcgcgaacgggaacgggagcggagagaggctgagctgcgcgcacaacaagaggaagaaactagaaaacagcaggaactcgaagccctccagaaatcccagaaggaagcagaactgacaagagagttagagaaacaaaaggaaaacaagcaggtggaagagattctgagacttgaaaaagagatcgaggacctgcaaagaatgaaggagcagcaggagttaagcctgaccgaagcatccctgcagaagttacaggagaggcgggaccaagagctcagaaggctggaggaggaggcgtgccgcgccgcccaggaattcttggagagccttaacttcgatgagatagatgagtgcgtgagaaacattgagagaagtctgagtgtgggttccgagttctcttcagaacttgctgaatctgcttgtgaggagaaacctaatttcaatttctcccagccataccccgaggaagaggttgatgaagggttcgaagctgacgacgacgctttcaaggattccccaaatccctcagaacacggtcatagcgaccagcgcacaagcggcattagaactagcgatgacagtagcgaggaggacccatatatgaatgatacagttgtcccgacttctccttctgctgactctacagtgctgctagcaccatcagttcaggatagtggtagcttgcataattcaagttccggcgagtcaacgtattgtatgccacagaatgctggtgacttgccctccccagacggcgattatgattacgaccaagacgattacgaagacggagctattaccagtggatcttctgttacattctccaactcctatggcagtcaatggtcccccgactatcgatgtagcgtcgggacatataacagttctggagcgtatcggtttagctccgaaggcgctcagtcgtcttttgaagactcagaggaggatttcgactccaggtttgacactgacgacgaactgtcttatcggcgcgattccgtttacagttgtgtgactctgccttactttcactcattcctgtacatgaaagggggactcatgaatagctggaagcgtaggtggtgtgtcctcaaggatgagacatttctatggtttcgaagcaaacaggaagctctaaagcagggctggctgcataagaaaggaggcgggtcctcaacgttgagccgaaggaattggaagaaacggtggtttgtgctgaggcagagcaaacttatgtactttgagaatgatagcgaggagaaacttaagggaacggtggaagtgaggacggccaaagagattattgacaatactaccaaggagaatggcatcgacattatcatggctgaccggacattccatctgatagctgagtctcccgaggacgcaagtcaatggttctccgttctctctcaagttcatgcatcaacagatcaggagattcaggaaatgcacgatgagcaagctaacccccagaatgcagtagggactttggacgtgggactgattgactctgtctgtgcttccgacagccctgaccggccaaatagttttgttattataactgctaaccgtgtcttgcattgcaacgcagacacacctgaggagatgcatcattggatcacccttcttcaaaggagtaagggcgacactcgtgtggagggccaagagtttatcgttaggggttggctgcataaggaggtcaagaactcgcctaagatgtcctccttgaaactgaagaaacgctggtttgtgctcacacacaattctttggactattataagtcttctgaaaagaacgcccttaaactcggcacactggtactgaacagcctatgttcggtcgttccccccgacgagaaaatttttaaagagacgggatactggaacgttactgtgtacggaaggaagcattgttatagactctacactaaattactcaacgaagcgaccaggtggagttcggccatacagaacgtcacagacaccaaggctcccattgacacccctacccaacagctgatacaggacattaaggagaactgccttaactcggacgttgtcgagcagatatacaaaagaaacccaattcttcggtatacccatcaccccttgcactccccgttgctcccactgccgtacggcgatatcaatcttaatctgctcaaagacaagggttacacgactctgcaagatgaagctataaaaatcttcaattctcttcaacagctcgaatcaatgtccgatcccattcccatcatccaaggcatcttacagaccggccacgatttgcgccccctgagggatgaactatactgccagttaattaaacagacaaataaggtgccccaccccgggagcgttgggaacctgtacagctggcagatcctaacttgccttagttgcacttttctgcctagccgtggtattctgaaatacctgaagtttcatcttaagaggataagagagcagtttcccggcagcgaaatggagaagtacgccctgtttacatatgaatctctcaaaaagaccaaatgcagagagttcgtgccaagcagagatgaaatcgaggccctcattcaccgccaggagatgaccagtactgtgtattgccacgggggcgggagttgcaagattactattaattcacataccaccgcaggagaggtcgtagagaaattgattcgcgggctggctatggaagattccaggaacatgtttgccttgtttgagtacaacggtcatgtggataaagctatcgaaagccggacagtcgtcgccgatgtgctggctaaattcgagaaactggccgctacaagtgaagttggggaccttccatggaagttctattttaaactttattgttttctagacacagacaacgtcccaaaggattctgttgaattcgcctttatgttcgagcaggcgcatgaggctgtgatacacggacaccacccagcaccggaggagaatctgcaggtgcttgcggcactgcggttacagtacctacagggggattatacactccatgctgccattcctcctctcgaggaggtctactctttgcaacgcctcaaagcgaggataagccagagtacgaaaactttcactccatgtgagcgcctggaaaagaggcggacctccttcttagaggggactctgcgtaggagcttccggacgggcagcgttgtaagacagaaagtagaggaggaacagatgctggatatgtggataaaggaggaggtgtcgagcgcgagagcctcgattatagataaatggcgaaagtttcagggtatgaaccaagagcaggccatggccaaatacatggccctcattaaagagtggcctggctacgggagcactctgttcgacgtggaatgcaaggagggcgggtttccacaggaattgtggttgggtgtgtctgccgacgcggtctcagtgtacaagcggggagaggggagaccactggaggtgtttcagtatgaacatattctctctttcggcgctcctctagccaacacatataagattgtggtggacgagcgcgaactgcttttcgaaaccagtgaggtcgtggacgtggcaaaactcatgaaagcgtacatctccatgattgtgaagaaaaggtactccaccactagatctgcaagctcccaggggtccagccggtag

SEQ ID NO: 196268 - DNA, 4194 bp, synthetic construct
  misc_feature 1..4194: note = Description of Artificial Sequence: Synthetic coding sequence
  source 1..4194: mol_type = other DNA
atgctggagaccgtgcggatccggaaggccggctacgccgtgcggagaccctttcaggatttctacaagcgctataaagttctcatgcgcaatctggctttgccggaagatgtccgagggaagtgcacctctctgctgcagttgtatgatgcctctaattccgaatggcagctgggcaaaaccaaagtattcttaagggagagcctggagcaaaagttagagaaaaggcgcgaagaggaggtttctcatgctgctatggtgatccgggcgcacgtcctgggattccttgccagaaaacaatatcgtaaagttctctactgtgtggtgattatccagaagaactaccgggcatttttgctccgacgccggtttcttcatcttaagaaggcggcaatcgttttccagaaacagctaaggggtcaaatcgctaggagagtgtaccgtcagctgttggcagaaaagcgagaacaggaagagaaaaaaaagcaagaggaagaggagaagaagaaaagggaagaagaggagagggagcgcgagagggaacgcagagaggctgagctgagagcccaacaggaggaagaaacgcggaagcagcaggaactggaagccctccagaagtcacagaaagaagccgagctcacgcgcgagctggaaaaacagaaggaaaacaagcaggtggaagagatcctgcggttggaaaaggaaatcgaggatttgcagcggatgaaggagcaacaggaactgtcactgacggaagcgtctcttcaaaagctccaggagcgccgggatcaggagttgaggcgcctggaagaagaggcctgtagagccgcacaggaattcctagaaagtcttaactttgacgaaatcgacgagtgcgttagaaacattgagcgatccttgagcgtgggctcagaattttctagcgagctagcagaatccgcatgtgaggagaagccaaactttaacttctcccagccatacccagaagaggaggtggacgagggtttcgaggcggacgacgatgccttcaaagattctcccaacccatccgaacacggccactcggatcaacgcaccagcggcatccgaacctctgatgatagctcagaagaggatccttatatgaatgataccgtggttccaaccagccccagtgcagactcaacagtcctgttggccccctccgttcaggacagtggtagcctgcacaactctagcagcggcgagtccacctactgcatgccgcaaaatgctggcgacctgccctctcccgatggggactatgattatgaccaggatgactacgaggacggagcgattacaagtggatcttccgtgaccttctcgaatagctatggctctcagtggtctcctgattaccgttgttccgtgggtacatataattcatctggcgcttataggttttcaagcgagggtgcacagtcaagctttgaagattcggaggaggactttgactctcgctttgacaccgacgatgagctatcctacaggcgggactctgtgtactcatgtgttactcttccatatttccactctttcctgtacatgaaaggcgggctgatgaactcctggaagagacggtggtgtgttctcaaggatgaaacttttctgtggttcagatctaaacaagaagccctgaaacagggatggcttcataaaaagggcggtggatctagcacgctgtcgagaagaaattggaaaaagagatggttcgtcttaagacaaagcaaattaatgtattttgagaatgattctgaggagaaactgaaagggaccgtcgaggtgcgcacggccaaggagattatcgataacactactaaagagaacgggattgatataataatggcagacagaacgtttcatctgatcgcagaaagtccggaagacgcatctcagtggttcagcgttctttcccaggtccatgcgtccactgaccaggaaatccaggagatgcatgacgaacaggccaacccgcagaatgcagtcggcaccctggacgtgggcctgatcgatagcgtctgcgcctctgacagcccagatcgacccaacagcttcgttattattactgccaatagggtactccattgtaatgccgatactcctgaggaaatgcaccattggatcacattgctacaaagaagtaagggagacactagagtagaaggacaggagttcattgtgagggggtggctgcataaggaggtgaagaacagccccaagatgtcaagcttaaaactgaagaaacgctggtttgtgttgacccacaatagtctggactactataagtccagcgaaaaaaatgctctgaagctgggcacactggtgctgaattctctgtgtagtgtggtccctcctgatgaaaagatctttaaagagaccgggtactggaatgtgactgtatacggcaggaagcactgttacaggctgtacacaaagctgctgaacgaggccactagatggtctagcgcgatccagaatgtgaccgatacaaaagcccccattgacacccccacgcagcaactcatccaggacatcaaggagaactgcttaaactcagacgtcgtagagcaaatttacaagagaaaccccattctgagatatacgcaccatcctctgcactccccgctgctgcctttaccctatggcgatattaacctcaatttgctgaaggataaaggatatacaacgttacaggatgaggccatcaaaattttcaattcacttcaacaactagaaagcatgagtgaccccatccccatcatccaagggattttacagaccggccatgatctccgaccactgagggacgagctgtattgccagttgataaaacagaccaacaaagtgccccacccgggttcagttggcaatctgtacagttggcagattttgacgtgtctcagttgcacatttctcccaagccgaggcatcttgaagtacttgaaattccatctcaaacgaatccgcgagcagttccccgggtctgaaatggagaagtacgctctgtttacttatgaaagcttgaagaaaactaaatgcagagaattcgttccctccagggatgaaattgaggcgctcatacatcgccaggagatgaccagcaccgtatactgtcacggagggggcagctgcaagattacaatcaattctcacacgacggccggagaggtggtggaaaagttaatcaggggcctggccatggaggacagcaggaatatgttcgctctgttcgagtataatgggcacgtggataaggcaattgagtcaagaactgttgtggccgatgtgttggcaaaattcgaaaagctggccgcaacaagtgaagtcggggatcttccatggaagttttactttaagctatattgtttcttggacaccgacaacgtgccaaaagacagtgtggagttcgcattcatgtttgaacaggcccatgaggcagtgatccacgggcatcatccggctcccgaagagaatctgcaggtgttggcagccttgagattacaatatctgcagggggattataccctgcatgcggccatcccccctctggaggaagtgtacagcctccaacggttgaaagccagaatctcgcaaagcactaagacgtttacaccttgcgagagactggagaagagaaggacctcattcctggagggcacacttcggagaagcttcagaactggatctgtggtgcgtcagaaagtagaggaggagcagatgctggacatgtggattaaagaagaggtgagtagcgctcgcgccagtatcatagataagtggcgcaagttccagggaatgaaccaggagcaggcgatggctaaatatatggccctcataaaagagtggcccggctatgggtccaccttatttgatgtggagtgcaaggaaggtggatttccacaggagttgtggctgggggtgagtgccgacgctgtgagcgtgtacaagcgcggcgagggtaggcctttagaagtgttccagtatgagcatatactgagtttcggtgctcccctagctaatacttacaagatagtggtcgatgagcgggaactcctgttcgagacatcagaggtagtcgacgtggcaaaactcatgaaagcttacatttccatgatagttaagaagcggtatagcactactcgatccgcctccagccagggatcgtcccgatag

SEQ ID NO: 196269 - DNA, 6177 bp, synthetic construct
  misc_feature 1..6177: note = Description of Artificial Sequence: Synthetic coding sequence
  source 1..6177: mol_type = other DNA
atggacaacttcttcaccgagggcacccgggtgtggctgcgggagaacggacagcactttccctctaccgtgaattcttgcgccgaggggattgtggtgttccgaacagactatggccaggtctttacttataagcaaagcaccatcacgcaccagaaagtcaccgccatgcacccgacaaacgaggagggagtcgacgacatggcctcactgacagaactccacggaggctccataatgtacaacctgtttcagcgctataaaagaaaccagatctatacctacataggttccatactggcttccgttaatccttaccaacccatcgcgggtttatatgaaccagccaccatggaacaatattcccgcaggcatctgggcgagctgccaccccacatctttgctattgccaacgagtgctatcgctgtctctggaagcgccacgacaatcaatgtattctcatcagcggcgagtcaggcgccggcaagacggaaagcacaaagctgatcctgaagttcctgtctgtgatctcacagcagtctttagagttatcccttaaggagaaaacatcatgtgttgaacgcgctatattggaatcatcgccaatcatggaggcattcggcaacgcaaaaactgtctacaacaacaactcctcacgctttggaaagttcgtccaacttaacatctgtcagaaggggaatatccaaggcggaaggatcgtcgactatctgctggagaaaaatcgcgtggtgcgtcagaaccccggcgagagaaactaccatattttttacgcactgctcgcaggtttagagcacgaggagcgtgaggagttctatctttctactccggaaaattatcactatttgaatcagagtggctgcgtcgaggacaaaactatctccgaccaggagtctttcagagaagtgatcaccgccatggatgttatgcagtttagcaaggaagaagtgagagaagtctcccggctgctcgccggcatattgcacctggggaacatagagtttattaccgcaggaggtgctcaggtgtcattcaagactgccttgggaagatctgccgagctgctgggccttgatccaactcaattaaccgacgccctgacgcagcgctccatgtttctgcggggagaagagatcctcactccacttaacgtgcagcaggcagtagacagtagggattctctggcaatggccctgtatgcgtgctgttttgagtgggtaattaagaagatcaattccagaatcaagggcaacgaggattttaaaagcataggaattctcgacatattcggtttcgagaacttcgaggttaatcacttcgaacagttcaacatcaattatgctaacgagaaattgcaggaatacttcaacaaacatattttttctttggagcagctggagtattcgcgtgaagggttagtctgggaagacattgattggatagataacggcgagtgtttggacttgattgaaaagaagctgggcctcctagcactgattaatgaagagtcacattttcctcaggccaccgactctacactcctggaaaagctccactcccagcacgccaacaaccacttttacgtcaaaccacgggtcgctgtcaacaactttggagttaagcactacgcaggtgaagtgcagtatgacgtgaggggtatccttgagaagaacagagataccttccgggacgatctgctgaatctgttgagagagtctaggttcgattttatatatgacctgtttgagcacgtgagctctcgaaataatcaggacacacttaagtgcggaagcaagcatcggcggcccactgtctcgagtcaatttaaagactctctgcatagcttgatggcaactctgagttcttctaacccgttcttcgtgagatgcatcaagcctaatatgcagaagatgccagatcagtttgatcaggcagtcgtcctcaaccaattgaggtacagtggaatgctggagaccgttaggatcagaaaagcagggtacgctgtccgacgcccatttcaagacttttacaaacggtataaagtactaatgcggaatcttgccctccccgaagatgtcagggggaaatgtacttctctattgcagctgtatgatgcctccaactcagagtggcagctcggaaaaaccaaggtttttctgagagaatcactcgagcagaaactggaaaagcgtagggaggaagaggtctcccatgccgcaatggtcatccgagcccatgtcctaggctttctggcccgtaagcagtacaggaaagtcctatactgcgttgttatcatacagaagaattaccgagcgtttctactgagacggcgcttcctccacctcaagaaggctgcaatagtgtttcagaaacagctcagaggccagatcgcacggagagtatacagacaactgctagccgagaagagggaacaggaggagaaaaagaaacaggaggaggaagagaagaaaaaacgtgaggaagaagagcgcgaacgcgaacgggaacgcagagaagccgaactccgcgcccagcaggaagaagagaccaggaaacagcaagaactggaagctctccaaaaaagccaaaaagaggccgagctcaccagggagctcgagaagcagaaagaaaataagcaggtggaggaaattctcaggctggaaaaagagatcgaggatttgcaacggatgaaagaacagcaggagctatccctgactgaggcctctctgcaaaagctgcaggaacgtcgtgaccaggaattgcggagactggaggaagaagcctgtagggcagcccaggaatttctggagtctctcaacttcgatgaaattgacgagtgcgtgaggaatatcgagagaagcctgagcgtcggcagtgaattcagttctgagctggccgagtctgcgtgcgaggagaagcccaatttcaatttctctcagccgtatcccgaggaggaggtagacgagggatttgaggctgacgacgacgcgtttaaagactctccaaacccatccgaacacgggcactccgatcagaggacatccggtattcgcacatctgatgattcctccgaggaagatccttatatgaatgacacggtggttccaactagtccatctgccgactcaaccgtactgctagctccatcagtgcaggattctggaagccttcataacagctcctcaggcgagtcaacctactgcatgcctcagaacgctggagacctgccaagccctgacggggactatgattatgaccaagatgactacgaagacggggctatcacttctggttcttcggtgaccttctcaaacagttatggttcacagtggagtcctgactatcgatgcagcgtcggtacttacaatagcagtggggcctacagattcagctcagaaggcgcacaatcttcctttgaggacagtgaagaggatttcgactcacggttcgacactgatgacgaactttcctaccggagagactccgtttactcttgcgtgaccctgccatattttcacagctttctgtacatgaagggtgggctgatgaattcttggaaacgcagatggtgtgtcttaaaggacgagactttcctgtggttccgatcaaagcaggaagcactgaaacagggttggctgcacaaaaaaggcggggggtcatcaaccttatcgagacggaactggaaaaagaggtggtttgttctgcgtcagtctaagctgatgtactttgaaaacgactccgaggagaaactaaaggggacagtggaggttcggacagcaaaggaaattatagataacacgactaaggagaacgggatcgacatcatcatggctgaccgcacgtttcacctgattgccgagtcgccagaggacgcttctcagtggttttcagtgctaagccaggttcacgcaagtaccgatcaggagatccaggaaatgcacgacgaacaggctaacccacagaatgccgtaggaacccttgacgtgggcctgatagactctgtgtgtgcgtctgacagtccagataggcctaattcatttgtgatcatcaccgcaaatagggtactgcattgtaacgctgataccccagaagagatgcaccactggatcacgctactccagcgttccaagggagatacccgtgtggagggacaggagtttatcgtgcgcggatggcttcacaaggaggtgaaaaattccccgaagatgtcttctttgaaactcaagaagaggtggtttgtgttgacccacaactccctggactactacaagagttccgaaaagaacgccttaaagctgggcacacttgtgcttaactcactgtgctccgttgtaccccccgatgagaaaatattcaaggagaccggttactggaacgtgacagtgtacggacgcaagcactgctacaggttgtacacaaaactactgaatgaggcgacacgatggtcatccgcgatccagaacgtaacagacacaaaagcgccaatcgatacgcccacccagcagcttattcaggacatcaaggagaattgcctgaattccgatgtggttgagcagatatacaagagaaatccaattctcagatacactcaccatccactgcactctcctctgctgccattaccttatggtgatatcaacctcaacttactcaaagacaagggttatacaaccctgcaggacgaggcaataaaaatctttaactctctccaacaattagaatccatgagtgatccaattcctatcattcaggggattctgcagaccggccatgacctgagaccgctgcgcgacgagctttattgtcagctgatcaagcaaacaaataaagttcctcatccaggctctgtcggtaacctgtacagctggcagatcctcacgtgtctgagttgcacatttctgccatcgaggggtattttaaagtatttgaagttccacctgaaacggataagggaacaatttccaggatcagaaatggaaaagtacgccctctttacctacgagagtctgaaaaagacaaaatgtcgggagtttgtcccctcccgtgacgagattgaggccctaatccacaggcaggagatgaccagtactgtgtactgccatggaggtgggtcctgcaagattactataaactctcatactacggcaggggaagtagtggaaaagctgattcggggacttgcaatggaggattcaaggaatatgtttgctttgttcgaatataatggacatgtagataaggctattgagtcaagaaccgtagttgctgatgtcttggccaagttcgagaaactcgctgccacttccgaagtcggcgatctgccctggaaattttatttcaagctgtactgcttcctggataccgacaacgtccccaaggacagcgtggaattcgccttcatgttcgagcaagcacacgaggcagtcatccatgggcatcaccctgcacctgaggagaacctgcaagtgcttgcagcactaagactgcagtacctccaaggggactacacactccatgccgctatccctcccctggaggaggtttatagcctacagcgcttgaaggctaggatatctcaatccactaaaacattcaccccatgcgagcgactagaaaaaaggaggacttcttttctggagggcaccctcagaaggtcctttagaacaggatctgtcgtgcgtcaaaaagtggaagaagagcaaatgctcgacatgtggattaaagaggaggtgtcatccgcaagagcttcgatcatagataagtggcgtaagtttcagggtatgaaccaggagcaagccatggccaagtacatggctctgattaaggagtggccggggtatggctctacgcttttcgacgtcgaatgcaaggagggcgggttcccccaggaactgtggttaggcgtgtcggctgacgccgtgtcagtgtacaaaaggggcgagggtaggcccttggaagtctttcaatacgagcatattttgagttttggagccccactggctaacacgtacaagattgtggtggacgaacgcgagctgcttttcgagacatccgaggtcgttgatgtcgccaagctcatgaaagcttacatatccatgatagtaaaaaagcggtattccactacccggagcgcctcttcccagggcagttctaggtag

SEQ ID NO: 196270 - DNA, 4194 bp, synthetic construct
  misc_feature 1..4194: note = Description of Artificial Sequence: Synthetic coding sequence
  source 1..4194: mol_type = other DNA
atgctggagaccgtgcggatccggaaggccggctacgccgtgcggcgcccgttccaagacttctacaaacgttacaaagtgcttatgcggaatttggctctccctgaggacgtcaggggaaaatgtacctctctgctccaactgtacgacgcatccaattccgagtggcagctcggcaagacgaaagtgtttctgagggagtcactagagcagaagctggagaagagacgagaggaggaagtgtctcacgccgcgatggtgatccgggcccacgtactcggttttttagctcgcaaacagtaccgtaaggttctatactgcgtcgtcattatccagaaaaactatcgcgcctttctcctgcggaggcgtttcctgcatttgaagaaggccgcaatcgtatttcagaagcagctgcgtggtcaaatcgcaagacgagtgtataggcagctcctggccgaaaagagggagcaagaagagaaaaagaaacaggaggaggaggagaagaagaaaagagaggaagaagagagggaacgtgaacgagagagacgtgaggcggagttaagggctcagcaagaggaagagacacgaaagcaacaagaactggaggccctccagaagtcccagaaagaggcagaattgaccagagaattggagaaacagaaggagaataagcaggtggaggagattcttcgtctcgaaaaggagattgaggacctccagcgtatgaaagagcagcaggagttgagtcttaccgaggccagcctgcagaagctccaggaacgccgggaccaggagttgaggcgcttagaggaggaggcctgccgcgcggcccaagagttcctggagtctctaaactttgatgaaattgacgagtgcgttcgaaacattgagaggtccttgtcggttggctctgagtttagctccgaactcgccgaaagcgcttgtgaggagaaaccaaacttcaatttcagtcaaccttacccagaggaggaagtggacgagggatttgaagcagatgatgatgctttcaaggattctcccaacccgagtgagcatggacacagcgaccagagaacgtctggtattcgcacaagcgacgactcttcggaggaggacccatatatgaacgatactgtggtacccacctccccatccgctgactctacagtcctgctggctccaagtgtgcaggattccggatcactgcacaacagttctagcggcgaatctacgtattgcatgccccagaacgcaggagacctccctagtcctgatggggattacgattatgatcaggacgattacgaggatggcgccatcacatccggctcttccgttaccttctccaatagttacggctcccagtggtcgcctgattataggtgttctgttggcacgtacaacagcagcggcgcctatagattctccagcgagggggctcagagcagcttcgaggattccgaggaggatttcgactccaggttcgacaccgatgatgagctgtcttaccggcgcgattcagtgtatagctgtgtaacactgccttacttccactcctttttatacatgaagggagggctcatgaactcctggaaacgcagatggtgtgtccttaaggacgagacgttcctctggtttcggtctaagcaggaggctctaaaacagggatggctgcacaagaaaggcggcggcagcagcaccctcagccgtaggaactggaaaaagaggtggtttgtcctcaggcagtccaaactgatgtatttcgaaaacgattccgaagaaaagctgaagggaacagtcgaggttcggaccgcaaaggaaattatcgacaacactactaaggagaacggcatcgacattatcatggctgatcggacctttcacctgatcgctgaatcccccgaagatgcttcccagtggttttctgtgctgtctcaggtgcatgctagcaccgatcaggagatccaggaaatgcatgacgaacaagccaaccctcagaatgctgtgggcaccttggatgtgggcttaatagattccgtctgtgcttccgatagtcccgatcggccaaatagtttcgtgattatcactgctaaccgcgttttgcattgcaacgcagatacgccagaggagatgcaccattggattaccctgctgcagcggagcaagggcgacacccgagttgaggggcaagaattcattgtccgcggctggctgcataaagaagtgaagaacagcccaaagatgagctctctgaagctgaagaaaaggtggttcgtgcttactcacaatagcctggactactacaagagctcggaaaagaacgcgctgaagctgggtacattagtattaaacagtctttgttcggtcgtcccgccagacgaaaaaatcttcaaagagacaggctattggaacgtcaccgtttacggaagaaaacattgctacaggctgtacacaaaactcctgaacgaagccacacggtggtctagcgccatccagaacgtgaccgacacgaaggcaccaatcgacacccctacccagcaactcattcaggatattaaagagaattgcttaaactcagatgttgtcgaacagatctacaagcgtaacccaattctgaggtacacacatcaccccttgcactccccattgctgcccctcccttacggcgacatcaacctgaacctcctgaaggataaaggctatacaactctccaagacgaagctatcaagattttcaattccctgcagcagcttgaaagtatgtcagatccaattcccataattcagggcatcctgcagaccggccacgatctgcgccctctgagggatgagctctactgtcagctgattaaacaaacgaataaggtcccacatcctggcagcgttggaaatctgtattcttggcagatactgacctgcctgagttgtaccttcctgccctctaggggtatcctgaaatatttaaagttccaccttaaacgcatcagggagcagttccctgggagcgagatggaaaaatacgcccttttcacatacgagagtctgaaaaaaaccaagtgccgggagtttgtcccatctcgggatgaaattgaagccctcatccatagacaagagatgacctctacggtatattgccacgggggcggctcatgtaaaatcaccataaacagtcataccaccgccggcgaagtggtggagaagctaatccgcggcttggcaatggaagactctcgcaatatgtttgccctttttgagtataatggccacgttgataaagccattgaaagtcgcaccgtggtggctgatgtgcttgcaaagttcgaaaaattggcagctacgtccgaagtaggggacctgccctggaaattctatttcaagctgtactgtttcctggatacagacaatgtccccaaagactcggtcgagttcgcattcatgtttgaacaggctcatgaggcagtgattcatggacatcacccggcaccggaggaaaacctacaagtgctcgcagctctgaggctccagtatttacaaggtgactacactcttcacgccgcgatcccacccttggaagaggtctacagcttgcagcgcctgaaggctcgtatttcccagtcgacaaagacttttacaccctgtgagcggcttgaaaagaggcgcacctcattcctcgaaggaacgcttcgaagaagcttccgaaccgggtctgtggtcaggcaaaaagtcgaagaagagcagatgttagacatgtggattaaggaggaggttagctccgcacgagccagtatcatcgacaagtggcggaaatttcagggaatgaaccaggagcaagccatggcaaaatacatggcactcatcaaagaatggccaggttatggcagcaccctgttcgatgtggaatgcaaggagggcggcttccctcaggaactctggctgggtgtctccgccgacgctgtgtctgtgtataaaaggggggagggacggccattggaggtattccagtacgagcacattctcagctttggcgctcccttagccaatacctacaagatcgtggtcgacgagcgcgagttactttttgagactagtgaagttgttgatgtggctaagttaatgaaggcttacattagtatgattgtcaagaaacgctatagtacaacgcggagcgcctcttcacagggcagcagtcgctag

SEQ ID NO: 196271 - DNA, 552 bp, synthetic construct
  misc_feature 1..552: note = Description of Artificial Sequence: Synthetic coding sequence
  source 1..552: mol_type = other DNA
atggagaacggcgccgtgtacagccccaccaccgaggaggaccccggcccggcccggggaccacgttcaggactagccgcatatttctttatgggcagactgcctctgctcaggagggtgctgaagggcctgcaactgctcttatcactcctggctttcatttgcgaagaggtggtgtctcagtgtacactttgtggtggattgtactttttcgaattcgtcagttgttctgcgttccttctgtccctgttgatcttgatcgtgtactgcacaccattttatgaaagagtggatacaactaaggttaaatcatctgatttctacataacactgggcaccggctgtgtcttcctgcttgcgtcaatcatcttcgtgtcaacccacgaccgtaccagcgctgaaatcgccgcaattgtctttggtttcatagcctcattcatgtttctcctggactttattactatgctctacgagaagcgacaggagtctcaactgaggaagcccgaaaatacaacgagggccgaagcgctgactgaaccgcttaacgcgtag

SEQ ID NO: 196272 - DNA, 1437 bp, synthetic construct
  misc_feature 1..1437: note = Description of Artificial Sequence: Synthetic coding sequence
  source 1..1437: mol_type = other DNA
atgctggagttcgcccagaagtacttccgggacccccagcggcggccccaggacggactccgtttgaaaagcaaagaaccaagagagtcgagaacgctggaagacatgttatgctttactaaaactcctctgcaagaatctctgatcgaactgtcagattcctctctgagcaagatggccacggacatgtttcttgccgtcatgaggtttatgggtgatgcacccctgaaaggccagtccgacttggacgtgctgtgtaatctcttaaagctgtgcggcgaccacgaggtgatgcgtgatgaatgttactgtcaggtagtcaagcagattacagacaacacaagttcgaaacaggacagctgccagcgaggctggaggctgctctacatcgttacggcttaccatagctgctcagaggtactgcacccacatctgacaaggtttttgcaggacgtgagccggaccccagggctcccattccaaggaatagccaaagcctgcgagcagaacctccagaagactctccgctttggaggccggctggaactgccgagttcaatagagctgcgcgccatgttggcaggccgcagctccaaaagacagcttttcctgctcccagggggcctggagcgacacctgaagataaagacctgcactgtcgctctcgatgttgtagaagagatctgcgctgagatggcattgactcgcccagaggccttcaacgagtacgtaatttttgtggtcacaaatcgggggcaacatgtgtgtcctttaagtaggcgcgcctatattttggatgtggctagcgagatggagcaggtagacggggggtacatgttgtggtttagacgagtcttgtgggaccagccccttaaattcgagaatgagctgtacgtgaccatgcactacaaccaggtcctccctgactacctcaaggggctcttcagctccgtgccagcatccagacccagtgagcagctgctgcaacaggtctccaagctggctagcttacagcacagagcaaaggatcatttttacctgccatctgtccgggaggtgcaggagtatatcccggcgcagctgtaccgcacaacagcaggatcaacttggctcaaccttgtgtcccaacatcgacaacagacgcaggctctgagtccgcaccaggctagggcgcagtttctgggactgctatcagcgctcccaatgttcgggtcctcctttttcttcatccagagctgcagtaacatcgctgtgccggccccctgtatattggcaatcaatcacaatgggctaaactttttgagcaccgaaacacacgtctctggattatctctggcactccctagccctccatcagtaccctggtcccccacccctagtaagcgtccacgcccccccgccgcggaggcccagttccactgcttaccaccctcctag

SEQ ID NO: 196273 - DNA, 555 bp, synthetic construct
  misc_feature 1..555: note = Description of Artificial Sequence: Synthetic coding sequence
  source 1..555: mol_type = other DNA
atgaacatgctgagcagcctgagccccaccgtggtgctgcccgactacctcaagggattgttttccagcgttccagcatctcgtccttccgagcaactgttgcagcaggtgtctaaactggcatcactgcagcatcgagcgaaagaccacttctacctgccgagcgtgcgcgaggtccaagaatatatcccagctcagctatatagaaccaccgccggctccacatggctgaacctcgtgtcacagcaccgtcaacaaactcaggccctgagtcctcatcaggcaagagctcaatttctgggactgttgtcagccttgccgatgtttggaagctcatttttttttatacaaagctgcagcaatattgccgtacccgccccctgcattttggcgattaaccacaacggattgaacttcctgtccaccgaaacacacgtctccgggctttctttggcactgccctcacccccttctgtgccctggtcaccgactccaagcaaacgaccccgtccacccgccgctgaagcacagttccattgcctgcccccttcatag

SEQ ID NO: 196274 - DNA, 735 bp, synthetic construct
  misc_feature 1..735: note = Description of Artificial Sequence: Synthetic coding sequence
  source 1..735: mol_type = other DNA
atgcgggacgagtgctactgccaggtggtgaagcagatcaccgacaacacatcttcaaagcaagattcgtgccagagggggtggaggctgctttacatagtgaccgcttatcactcgtgttctgaagtgctgcacccacacctaacgagatttctgcaggatgtctcccggaccccaggccttccattccagggtatcgcgaaggcgtgcgaacagaacttacaaaaaacacttcgctttggcggaagattagaattaccctcaagtatagagctgagggctatgctggctggtagatcttcaaaacgtcagctgttcctcctgccgggcgggctggagagacatctcaaaatcaagacctgtaccgtggcattagacgtcgtagaagaaatctgtgcagaaatggctctgactcgaccagaggccttcaatgaatatgttattttcgtcgtgacaaatcgcggggggaaaagccggtcgaccagtcaaccaagctcaactgtgcagcggcaggcacgaccgggctctacttggtccgctagcaccggatctaggcacaggcgaagtgccccaacccggccggttccatccttctgggcgtcatctgccccctacctgtgcagcgctcccccctcgtcttctagccgcgccgccgctactctcctgtgtcagccgttggcctcgcttccttccaccactatggcctctaccttcagcgctcaacgtcttatgtag

SEQ ID NO: 196275 - DNA, 429 bp, synthetic construct
  misc_feature 1..429: note = Description of Artificial Sequence: Synthetic coding sequence
  source 1..429: mol_type = other DNA
atggtgaagggcggccaggaggccggcggccagctgcgggtgctgcgtgcctattccttcgccgatattctgtttgttactatgccatcccagaacatgttggagtttaacctcgccagcgagaaggtgattttgttcagcgcaagggcccatcaggtcaaaaccctagtcgacgacttcatccttgagcttaaaaaagacagcgactacgtcgtggcagtgcgaaattttctgcctgaagaccccgctctgcttgcattccacaaaggagatattatccacctccagcccctggagcctcctcgcgtaggctatagcgctggttgcgtcgtccgaagaaaagtggtgtatctcgaagagttacgaaggcgaggcccagattttggcgtctgtccacgcacgtggaaccccattcgaggagcttcctag

SEQ ID NO: 196276 - DNA, 6165 bp, synthetic construct
  misc_feature 1..6165: note = Description of Artificial Sequence: Synthetic coding sequence
  source 1..6165: mol_type = other DNA
atgttcaacctgatgaagaaggacaaggacaaggacggcggccggaaagaaaagaaggaaaaaaaggagaaaaaggagagaatgtccgctgcagagttgcgatctctggaggagatgtccctcagaagagggtttttcaacctgaataggagctccaaacgggaaagcaagactaggctcgagatatcgaacccgattcctatcaaggttgcgagcgggtcggacctgcatctgacggatattgacagcgacagtaataggggatcagtgattttggattctggccaccttagtacagcatctagctccgatgatcttaaaggtgaggagggttcttttagaggatctgtgcttcaacgtgctgccaagttcggatcattggctaaacagaatagccagatgattgttaagaggttttcatttagtcagaggagcagggacgaatcggcatccgagacatctaccccgtctgaacacagcgcagccccttctccccaggtcgaggtgcgcaccctggagggacagctcgtccagcaccctgggccaggcatccctcggcccggtcacagatctagggccccggagctcgtcaccaaaaagttccccgtggacctgaggcttccaccagtggtaccactccctccgcctacattgcgggagctcgaactccaaagacgacctactggagatttcggtttttcgcttcggcgcactactatgttggatcgtgggccagaggggcaggcttgccggcgggttgtccatttcgccgagcctggcgcaggcacaaaggatctggccctggggctcgttcctggggaccgcttggtggagataaacggccataacgtggagtcaaagagccgggatgagattgtcgagatgatccgacagtcaggggactcagtgcgcttaaaggttcaaccgatccctgagctctccgagttgagccgctcttggttgcgaagcggagaaggaccccgcagggaaccctccgatgcaaagaccgaagagcagatcgccgctgaggaggcatggaacgaaactgaaaaagtgtggctggtgcaccgggacgggttttctctcgcttcacagctcaagagcgaggaactaaatctgcccgaaggtaaggtacgggtaaagctcgatcacgatggggcgattctggacgtggatgaagacgacgtcgagaaggctaacgcgccaagctgcgaccgtttagaagacctcgcctccttggtttatctaaatgagtcttccgtcctccatacactccgccagcgttacggagcaagtctgctgcatacctacgctggtcctagccttctggtgttgggcccacgcggtgcccctgccgtttactctgaaaaggtcatgcatatgtttaaaggatgcaggcgcgaagatatggccccacatatctatgcggttgcccagaccgcataccgagcaatgttgatgtcccgtcaagatcagtcaatcatattgttaggatcttcagggagtggcaaaactacttcttgccagcaccttgtacagtacctggccacgatcgccggtatctcagggaataaagtgttttctgtcgaaaaatggcaggcgctgtacacattgctcgaggccttcggcaactcaccgactataatcaacggcaatgccacgcgcttttcgcagatactctccttggacttcgaccaagctggccaggtggcatcagcctcgatccagactatgctgctggagaagctgagggtcgcacggaggccagcctctgaagccacatttaacgtgttttattatctgctggcatgtggcgacggcactcttagaactgagctccacctcaaccaccttgcagagaacaatgtttttggtattgttcccctcgcgaaaccagaagaaaaacagaaggcagctcagcagttctccaaactccaggccgcgatgaaagtgctgggcatatctccagacgagcagaaggcctgttggtttatccttgccgcaatctaccacctaggcgccgccggcgccaccaaagtccactctaccgcaggaagaaagcaattcgccaggcacgagtgggcccaaaaagcagcctacctgttaggatgttcacttgaggaactctcatcagccatttttaagcaccaacataagggtggaaccttgcagagaagtacttcgtttcgacagggacccgaggagagcggtctgggagatggtacaggccctaaactgtctgccctggagtgtctggagggcatggccgcgggtttgtacagcgaactattcaccctgctggtgagccttgttaacagggcactgaaatctagccagcactccctctgttcaatgatgatagtggatacacctggcttccaaaatcccgaacagggcggatctgcaagaggtgccagcttcgaagagctgtgtcacaattatacacaggacagactgcagcgcctgttccacgaaaggacttttgttcaggaacttgagaggtataaggaggagaatattgaactagcatttgacgacttagaaccccctacggatgattccgtggcagctgtagaccaggcgagtcatcagagtctggttagaagcttagccaggactgatgaggcacgcggtctcctgtggcttctcgaagaagaggcgttagttccgggagcttcagaagacaccttgttggaaaggctgtttagttactatgggccacaggagggcgataaaaaagggcagtcgccactccttcacagcagcaagccacaccatttcctgttgggccacagccacggcaccaactgggtggagtacaatgtcaccggctggttgaattacacaaaacaaaatccagcgacacaaaatgccccccggctactccaagattcacagaaaaaaatcatcagcaatctgtttctcggcagggcaggcagcgccacagtactatcaggatctattgccggtctagaagggggctctcagctggcactgcgtcgtgcaacgtccatgcgtaagacgtttactacggggatggccgcagtgaagaaaaaatcattgtgcattcagatgaagttgcaagttgacgcgctcatagacacaattaagaaatccaagctccattttgtccactgctttctccccgtcgctgaggggtgggccggggagccacgcagtgcatccagtcgtagggtgagctcatcatcggagttggatctgccatccggcgaccactgtgaggccggtctcctgcagcttgatgttccattgctgcgaacccaactcagaggaagcagactactggacgccatgagaatgtataggcagggatatcctgaccacatggtgtttagcgagttccgcagacggtttgacgttttggccccacacctgaccaaaaaacacgggagaaactatatagtcgttgacgaaagaagagccgtagaagaactgctcgagtgtctggatcttgaaaaaagtagttgttgcatggggctgagtcgagtattctttcgtgccgggacccttgctaggctggaggaacaaagggatgagcagacttcccgcaacctgaccctgtttcaagccgcatgtcggggctacttggcccgccagcactttaaaaagcgcaagatccaagatttagctatccgttgtgtccagaagaacattaagaagaataaaggtgtgaaagattggccctggtggaagttgtttaccaccgtgcgacccctaatcgaagttcagctgtccgaggagcaaataaggaacaaagatgaggagatccaacagctgcgaagcaaattagaaaaggctgaaaaggaaaggaacgagctgagacttaacagcgaccgccttgaatcaagaatcagcgagctgacaagtgagttaacagatgagaggaataccggtgagagcgccagtcagctcctcgatgccgaaactgctgagcggctgcgcgcggaaaaggaaatgaaagaacttcaaacacagtacgacgctctgaagaaacagatggaagttatggagatggaagtcatggaagctcggctgatacgtgccgcagagattaacggcgaggttgacgacgatgacgctggcggggagtggagactgaaatacgaaagagccgtccgggaggttgattttaccaaaaaacgactgcagcaggagttcgaggacaagttagaagtcgaacaacagaataaacgtcagttggagaggcgcctaggcgacctccaagccgattctgaagagtcgcaacgtgccctgcaacagctcaagaaaaagtgccagcgactaactgccgagctgcaggatactaaattgcatctggagggccagcaggtgcgcaatcatgagctggaaaagaagcagcggcgcttcgactcagaattgagccaggcacacgaagaggcccagagggagaagttacagagagagaaattgcagagagaaaaagacatgctgcttgctgaggccttcagtctgaaacagcagctcgaggagaaagatatggacatcgctggttttactcagaaggtcgtgtccttggaggctgagctccaggatattagttcgcaggagtcaaaggatgaggctagcctagccaaggtgaaaaaacagctccgggacttggaggccaaggtgaaagatcaggaggaggaactcgatgagcaggcaggtaccattcagatgctggagcaggccaagttacgtctggaaatggagatggaacggatgagacagactcacagcaaggaaatggaatctcgtgatgaggaagttgaagaggcccgccagtcgtgccagaaaaagctcaagcagatggaggttcagcttgaggaggagtatgaggacaagcagaaggtgttgcgtgagaaacgggaactggaagggaagctggctacactgagtgatcaagtgaatcggcgcgactttgagagcgagaagcgtctgcgaaaggatctgaagaggacgaaggcactgttagccgacgctcagttaatgctggatcacctcaaaaactccgcgccttctaagagagagattgcccagctgaagaatcagctagaagaaagtgaatttacttgcgcagcggctgttaaggcccgcaaggccatggaggttgagatcgaagacctgcacctccagatcgatgacatcgccaaggctaaaacagccctggaagaacaactgtctagactgcagcgcgagaagaatgaaattcaaaacaggcttgaggaggaccaggaagatatgaacgagcttatgaaaaagcacaaagcagcagtggctcaagcctcaagggatcttgcacaaataaacgatctacaggcccaactggaagaagcgaacaaggaaaagcaggagctgcaggagaagctgcaggccctccaaagccaggttgagttcctggaacagtctatggttgataaatccttagtctcacgtcaggaagctaagattagggagttggagacgcgcctggaatttgagcggacacaggtgaagcgactcgagagcctcgcatccaggctcaaagagaatatggagaagcttacagaagagagagaccagcgaattgcagctgaaaatcgcgagaaagagcagaataaacgcctccagcgtcagctccgggacactaaggaggaaatgggcgagctggcccgcaaagaagcggaagcatcaagaaagaaacacgagctcgagatggacctcgagtctctcgaggccgcgaaccaaagcttacaggctgatcttaagcttgcattcaagcgcattggagacctccaggccgctatcgaggatgaaatggaatccgacgagaatgaagatctgataaactctttacaggacatggtgacaaagtatcagaagcgcaagaataagcttgagggagacagtgacgtcgacagcgagctggaagaccgggtagacggggtaaagtcatggttgtctaagaacaaaggcccctccaaagcagccagcgacgacgggtcacttaagtcctctagccccaccagctattggaagtcacttgctccagaccggtcagacgatgaacacgaccctctggacaacacttcacggccaagatattcccatagttacctgtcagacagcgataccgaggcgaaactgaccgagaccaatgcatag

SEQ ID NO: 196277 - DNA, 6009 bp, synthetic construct
  misc_feature 1..6009: note = Description of Artificial Sequence: Synthetic coding sequence
  source 1..6009: mol_type = other DNA
atgttcaacctgatgaagaaggacaaggacaaggacggcggccggaaggaaaaaaaggagaaaaaagagaagaaggaaagaatgagcgctgcagaattgcgctcgctggaagaaatgtcattgcgccggggcttctttaaccttaataggtcaagcaagagagaaagcaagacccggctcgagatcagcaaccccatccccattaaggtcgcgagcgggtcagatctgcatctcaccgacatagactctgatagcaaccgcggctccgttatcctcgattctggacatctgtcgactgcaagtagttccgacgacttgaagggagaagaagggagtttccggggttcggtgctgcagagggcggccaagttcggttccctggctaagcagaacagtcagatgattgtaaaacggttctcattctcacaacgtagtcgcgacgagtctgcctccgaaacctccaccccttcagagcacagtgcggctcctagccctcaagttgaggtacggacgctcgagggtcagctcgtacaacaccctggccctgggattccacggccgggccatcgctcaagggctccagagctggtgacaaagaaattccccgttgacctacgcctgccccctgttgtgcctctgccgccacccactctgcgggaactagagctgcagcgcaggcctaccggtgacttcggctttagtctgcgtcgaacaaccatgttggaccgaggtcctgagggtcaggcctgcagaagagtggtgcattttgctgaacctggggcaggcacaaaggacttagccctggggctggtgcccggtgaccggctggtggagatcaacgggcataacgtggagtctaaatcccgggatgagattgtcgagatgatccgccagagcggcgactccgtgaggctgaaagtgcagcctattcctgagcttagcgaactctcaagaagctggctcagatccggcgaaggccccagacgggaacctagcgacgccaaaacagaggaacagattgctgccgaggaagcatggaacgagaccgaaaaagtttggttagtgcaccgcgacggcttctccctagcgtcacagctgaagagcgaagagttgaatttgcccgaggggaaagtccgtgtcaagttagatcacgacggtgcaatcctagatgtggatgaagatgacgtagaaaaggccaacgccccgagctgcgaccgacttgaggacctggcctccctggtatatctcaacgaaagctctgtcctgcacaccttgaggcagcggtacggcgcaagccttctccacacttatgctggaccaagtttgctagtgctgggccctaggggtgctccggcagtgtacagcgaaaaagttatgcacatgtttaaaggatgtaggagggaagatatggctccccatatttacgccgtggcgcagaccgcctacagggccatgctgatgagtcgccaggatcagagcatcatcctgctggggagtagcggctcgggaaagacaacgagttgccaacacctcgttcagtatcttgccactatagccgggatcagcggaaataaggtgttctcagtggagaagtggcaggcactgtatactctgttggaagctttcggcaatagccccacaatcattaatggtaacgcgacccgcttctctcagattctgtccctggatttcgatcaggcgggccaggtggcttcggcatcaatacagacaatgttgctagaaaaactgcgggtggcaaggaggccagcttcagaggccacattcaatgtattctattacctgttggcctgcggcgacggcacgttgcgtacggaactccacctcaaccatcttgctgagaacaatgtgttcggcatcgtgcctctcgctaagcccgaagagaagcagaaagcggcccagcagtttagtaagctgcaggccgcaatgaaagtcttaggcattagtcccgacgagcagaaagcctgctggtttatcttggcagccatttaccacctaggtgctgcgggggctaccaaggtacacagcaccgccggtcggaagcagttcgcgcggcatgaatgggctcaaaaagccgcctacctgctcgggtgcagcctggaggaactgagctcagcaatctttaaacaccagcacaagggaggaacactgcagcgcagtacaagcttcagacagggcccagaggagagcggcctgggcgatgggactggacccaagttgagcgcccttgagtgcctggaaggtatggccgcaggcctctacagcgaactgtttactctgcttgtctccttggtcaacagagccctaaagagttctcaacacagcctgtgcagcatgatgatcgtggacactcccggttttcagaacccagagcagggtgggtccgctcggggcgctagtttcgaagagctgtgccataactatacacaggacaggttacagcgcctcttccatgagagaaccttcgtgcaagaactcgagcgttacaaggaagaaaacatagaactagccttcgacgaccttgagccccccactgatgatagcgtcgccgccgtggaccaggctagtcaccagtctctggtgcgtagtctggcccgcacagatgaagcacgcgggctgttatggctattagaggaagaggcgctcgtccctggagcctcagaggatacactgttagaacgactattttcatactatggaccccaggaaggagacaagaaggggcagagccccctgctgcactcgtcaaagccgcaccattttctgctaggccactcacacgggaccaactgggtggagtataacgtgacaggctggctcaactacactaagcagaatccagctacacagaacgctccccgcttgctgcaggactcccagaaaaagatcattagcaacctcttcttaggcagggccgggtcagccaccgttctgtctgggtccatcgctggtctcgagggagggtcacagctcgccctccgtcgcgctacaagtatgagaaagacatttaccacagggatggctgcagtcaagaagaagagtctgtgcattcagatgaagttgcaggtggatgccctgatagacactattaagaaatccaaattacatttcgtgcactgcttcctaccagtggccgagggctgggccggggagccgagatctgcctctagtagacgcgtatcctctagttccgagctcgacctaccctctggggaccattgtgaagccggcctgcttcagctcgacgtgccattgctgagaacgcagctgcggggttcacgactcctcgacgctatgcggatgtataggcaggggtatcccgatcatatggtgttcagtgagtttcgtcggagatttgacgtgctagcccctcatctgaccaaaaaacacggccggaattacatcgtggttgacgaaaggagagctgtggaggagctgctggaatgcctggacctggaaaagagcagttgttgtatgggactctcccgggtcttttttcgtgctggcactttggcaaggcttgaggaacaaagagatgagcaaacctcaagaaacctgacgctgtttcaagcggcgtgtcggggctacctcgcccgacagcacttcaagaagcggaagattcaggacttggcaatcaggtgtgtccagaagaacattaagaagaataaaggagtcaaggactggccgtggtggaaactcttcactaccgtccgccctctcattgaagtccaactgtctgaggagcagattcgaaataaggacgaggagatacaacagttaaggagcaagctggagaaggctgagaaagaaagaaacgagctcaggttgaattcagaccgactggagagcaggatctcagaattaacctctgaattaaccgatgagcgaaacacaggggagtcagcttctcagttgttggacgcagagaccgccgaaaggctcagggcagagaaagagatgaaagaattacagacccaatatgacgccctgaaaaaacagatggaggtgatggagatggaggtgatggaagccagactgatccgggctgcagagatcaatggtgaagtggacgacgacgatgctgggggtgaatggcgacttaagtatgaacgggcggtcagagaggtcgattttaccaagaagcgcttacagcaagagttcgaggacaagctggaggtggagcaacagaacaaaagacagcttgagaggcgcctaggggacttgcaggcggacagcgaagaatcccagagagccctgcaacagctgaaaaagaaatgccagcgacttacagccgaacttcaggataccaagctacatttggagggtcagcaggtcaggaatcacgaattagagaaaaaacagcgaaggtttgatagtgagctgtcccaggctcacgaagaggcccagagagagaaattgcaaagggagaaactccagcgcgagaaggacatgctactcgccgaggccttctctctcaaacaacagctggaggagaaggacatggatattgcgggcttcacacaaaaggtcgtctcccttgaagccgagttacaggatatttcttctcaagagtcgaaagacgaggcatcactcgccaaggtgaaaaagcaactacgcgatctggaggccaaagtaaaggaccaggaggaagaactcgacgagcaggccgggactattcagatgctggagcagctcaagcagatggaggtacagctagaggaggaatacgaggacaaacagaaagtcttacgggagaagcgagagctggaggggaagctggcgaccctgagtgatcaggttaaccggcgggacttcgagagcgagaaaagacttcggaaagatttgaagagaactaaggcactcctcgccgacgcacagctcatgttggaccacttgaaaaattctgcgcccagcaagagggagatagctcagcttaagaatcaactcgaggagtctgagtttacatgtgcagcggctgtcaaagcaagaaaggcaatggaagtggagatcgaagatctgcacctacagatcgacgacatcgctaaagcaaagaccgcgcttgaagaacagttgagtcgcctgcaaagggagaagaacgagattcagaaccgcttggaagaagatcaggaagatatgaatgaactgatgaaaaaacacaaggcagctgtggctcaggccagtcgggatctagcccagatcaacgaccttcaagctcagctcgaggaagcaaacaaggaaaaacaggaattacaggaaaagttgcaagcactccagagtcaggtcgagtttctggaacagagcatggtggacaagtctttagttagcagacaggaggccaagatacgcgaattggagactcgcctcgagtttgaaaggacacaggtgaagcgcctggagtcactggctagtagactgaaggagaatatggaaaagctcactgaggagcgagaccagagaatcgcagcggaaaatcgagagaaagaacagaataagaggcttcagagacagctcagagatacgaaagaggagatgggggaattggccaggaaggaggcggaggccagtcgcaagaaacatgaactggaaatggatctggagagcctagaggccgccaatcagagcctccaagcagatttgaaactggcattcaagaggattggagacttgcaggcagccattgaagacgaaatggaaagcgacgagaatgaggatctgattaattcagagggcgatagcgacgttgattctgagttagaggatagggtggatggcgtgaagtcttggttaagcaaaaacaaggggccttcaaaagcagccagcgatgatggtagtctaaagagcagtagccccacaagctactggaaatcactggccccggacagatcagatgacgagcatgaccctctggacaacacgagtcggccacggtattcccactcttatctgtccgacagcgataccgaggcaaaactgacggaaacaaatgcctag

SEQ ID NO: 196278 - DNA, 4929 bp, synthetic construct
  misc_feature 1..4929: note = Description of Artificial Sequence: Synthetic coding sequence
  source 1..4929: mol_type = other DNA
atggagggcccccggaccaccaagctggagggcagcagcaaggagggctccggtccctcacgatcaccccagcctccgacttcgcctatccctcccgaaacgtcccagcgggcaagatcacctgctccaaccttggctatgaacggacccggcgccgctaccgcagaagggttatccgaggaagcgccagcggtttattccgaaaaagtgatgcacatgttcaaaggatgtcgcagggaagatatggccccccatatctacgctgttgctcagactgcttatagggcgatgcttatgtctcggcaggatcagagcattatcctgttggggtcctcaggctcagggaagaccaccagctgccaacatctggtgcagtatctcgcaaccattgctggaatctccggcaataaagtcttttctgtggaaaagtggcaggcattgtacacactcctggaagcattcggtaattcacctactataatcaatggcaacgctacgagattttcgcagatcctctctcttgactttgatcaggctgggcaagtcgcgagcgcaagcattcagacaatgctcctagaaaaactgcgcgttgccaggagaccagcaagtgaggctacctttaacgttttctattatctgctggcctgtggtgacggcaccctcagaaccgagctacatctgaaccacctggctgagaacaacgtgttcggaatcgttcctctggccaaaccagaggaaaagcagaaagcagcccagcaattctcaaagctgcaagctgcaatgaaagttctcggcatcagccctgatgagcagaaggcttgttggtttattctggctgccatttaccatctgggtgccgcaggcgcaacaaaagaggccgccgaggctgggaggaagcagttcgcccggcacgaatgggcacagaaggcagcgtatcttctgggctgtagcttggaagaactgtcttcagccattttcaagcaccaacacaagggcgggaccttgcagcggtccaccagtttcagacagggccccgaagagtcaggacttggcgatggcaccggacccaaactgtccgctctggagtgtctggaaggtatggccgcagggttatatagcgaacttttcactctgttagtgtccttggtaaatcgtgccctcaagagctcacagcactcactttgcagcatgatgatcgttgacacacctggatttcaaaaccccgagcagggtggatcagccagaggcgcttctttcgaagagctttgccacaactatacgcaagatagattgcaacggctcttccacgagagaacattcgtacaggagctcgagagatataaagaggagaatatcgaactggccttcgacgacctcgagccccccacagatgattctgttgccgctgttgatcaggcaagtcatcagtcactggtgaggagcctggccagaaccgatgaagcacggggtctactttggctgctcgaagaagaggccctcgtccccggcgcttcggaagacaccttattggagcggctgttctcctactacgggcctcaggagggagacaaaaaaggccagagccccctgctgcactcttcaaagccacatcattttctgctgggccattctcacggcaccaactgggtcgagtacaatgttacagggtggctaaactacaccaagcaaaatccggctacacagaatgccccaaggctgttacaggatagccagaagaaaatcattagcaatctcttcttaggcagagcaggatccgcgaccgtgctgtctggaagtatcgctggtctggagggcggaagccagctcgcattaagacgggccactagtatgaggaaaacctttaccacaggcatggccgctgtcaaaaagaagtcactgtgcatccagatgaaactgcaggtggatgctctaattgacaccatcaagaaatctaagctccacttcgttcactgcttcctgcccgtcgccgaaggctgggcaggcgagccacgatccgcatcttctagacgcgtgtcctctagtagcgagctggaccttccttcaggcgaccactgtgaggctggccttctccagctcgatgtaccccttctacgcacccagctgcgtgggagcagactgctggacgctatgcgcatgtaccgccagggctatcctgaccacatggtgttcagtgaattcagacgccgtttcgacgtgcttgccccccacttgaccaagaagcacggcagaaattacattgtagttgatgagcgccgggccgtagaagagttgctcgaatgccttgatctcgagaaaagcagctgctgcatgggtctgtctagagttttctttagagccggcacgcttgccagattggaagagcagcgggatgaacagacctcccgcaatctcacgctgttccaggcggcttgcagggggtacctggccagacagcatttcaagaagaggaaaattcaggatctagctatcaggtgtgttcagaagaatatcaaaaagaataaaggtgtgaaagattggccctggtggaaattgttcaccacagtgagacccttaattgaggtgcagttatctgaggaacaaatccgtaacaaggatgaagaaatccaacagctgagatctaaactcgagaaggccgagaaggaacggaacgagctgcggttgaacagcgatagactcgagtcacgaatttctgagctgacgagcgagctgactgatgagcgcaacaccggggagtccgcctcccagcttttagatgcagaaactgccgagcgactccgcgccgagaaggagatgaaggagttacaaacccagtacgacgccctcaaaaagcagatggaagtcatggagatggaagttatggaggcaaggctgatccgcgctgcagagataaacggcgaggtggacgatgacgacgctgggggggagtggcgcctgaagtacgagagagctgtgagggaggtcgatttcactaagaagcggctgcagcaagagtttgaggataaactggaggtggagcagcagaataagagacagctagaacggcggcttggagacttacaggcagattcagaagaatcacagagagctctccagcagctgaagaaaaagtgccagcggctaacggccgaactgcaggatactaagttgcatctggagggccagcaggttaggaatcatgagctggagaagaagcagagaagattcgattcagaactctctcaggcacatgaggaagctcagagagaaaagttgcagcgagaaaagcttcagagagagaaagatatgcttctagctgaggcattcagtctgaaacagcaactggaggaaaaggacatggatatcgccggattcacgcagaaggttgttagtctagaagctgaactacaggatatctcctcccaggagtcgaaggatgaggccagcctggctaaagttaaaaagcagctgcgagatcttgaggccaaggttaaagatcaggaagaggaactcgatgaacaggccaagcttaggcttgaaatggaaatggagaggatgcgacagacgcacagcaaggagatggagtctcgagacgaagaggtggaagaagcccggcagagctgccagaaaaaactgaaacagatggaggtacagctggaagaagagtacgaggacaagcaaaaggtactgcgagaaaagagggaactggaaggtaagctggctaccctaagcgatcaggtgaatagaagagactttgaatccgagaagcgactgcggaaggatctgaaaaggacaaaggccctcctggccgacgcgcagctaatgttagaccatcttaagaacagcgctccaagtaaacgcgaaattgcccaattaaagaatcagctggaggaatccgagttcacgtgtgcggccgcggtgaaggcacgaaaagcaatggaggtggagattgaggatctgcatcttcaaattgacgatattgcaaaagcaaaaactgctttggaagagcagttaagcagactgcagagggagaaaaacgaaatccagaacagactggaggaggaccaggaagacatgaacgaactcatgaagaagcacaaagctgccgtcgcacaggctagcagagacctggcacagattaatgacctgcaggcccagctcgaagaggcaaataaggaaaagcaggaactgcaggagaagctgcaggcgctccagagccaggtggaattcttggagcagagcatggttgacaagtcactggtgtcccggcaggaagctaagattcgtgagttggagactcgtctggaattcgaacgcacacaggttaagagactggaatcgcttgcatcacgcctaaaagaaaacatggaaaagttaaccgaagaacgggatcaaagaatagccgcggagaatcgagagaaggaacagaacaaacgtctgcaaaggcagcttcgagacacaaaagaagagatgggagagcttgcaagaaaggaggctgaagcttcacgcaagaaacatgagctggaaatggacctcgagagcttagaagctgccaatcagtccctccaggccgatttaaagctggcgttcaaacggattggtgatctccaggccgctattgaagatgaaatggaatctgacgagaacgaggatctgatcaactctgagggtgacagcgacgttgattctgaactcgaggatcgggtcgatggagtgaagagttggctgagcaaaaacaaaggtccctcaaaggccgccagcgatgacggatcccttaagtctagcagtcctacatcatactggaagtctctggctcccgataggtccgatgacgagcatgacccactagacaacaccagtagaccccgttactctcatagctacctatcagatagcgacacggaagccaaacttacagagacaaacgcatag

SEQ ID NO: 196279 - DNA, 6165 bp, synthetic construct
  misc_feature 1..6165: note = Description of Artificial Sequence: Synthetic coding sequence
  source 1..6165: mol_type = other DNA
atgttcaacctgatgaagaaggacaaggacaaggacggcggccggaaggaaaagaaggaaaagaaagaaaaaaaagaaaggatgtctgccgctgagctgaggtcactggaagaaatgagcttgcgtcggggattctttaacctgaaccggtcttccaaacgcgagtccaaaacacgcttggaaatttctaatccaattccaattaaagtcgcttctgggagtgatcttcatcttactgatattgatagcgactctaaccgaggctctgttatcctggatagcggccacttgagcaccgcgtcctctagcgatgatcttaaaggtgaagaaggatcctttcgaggatcagtgctgcaacgtgccgccaagttcggttcgttagcgaagcagaactctcagatgattgtgaaacggttctccttttctcagcgttctagggacgaatcagccagcgagacaagcacgccctcagagcacagtgctgctccaagccctcaggtagaggtgagaaccttggaggggcagcttgttcaacaccccggacctggaataccgcgccctggccaccggagcagggctcccgagctagtaaccaagaaattccccgtagatttgcggctgccgccagttgtgcccctgcccccccccacacttagggagctcgaacttcagcgcaggccaacaggggactttggatttagcctacggcggactaccatgctggatcgcggccctgaagggcaagcttgccgccgggtggtgcatttcgccgagcccggagccggtactaaagacctggcactaggcctcgttcccggggatcgtctggttgagatcaacgggcacaacgtggagtctaagagcagagatgagattgttgagatgatccgccaaagcggagacagtgtgcgtctcaaggtacagcctattcctgagctgtccgaactgagcagatcctggctacgttcaggagaagggcccaggcgtgagcctagcgatgcgaagaccgaagagcagatcgccgccgaggaggcttggaacgaaaccgaaaaggtgtggcttgtgcacagagacggcttttcacttgctagtcagcttaagtctgaggagctgaatttgccggagggaaaggttagagtcaagctcgaccatgacggagccattttagacgttgacgaagatgatgtggagaaagctaacgccccctcctgtgatcgcctggaggacttagcctcgttagtgtaccttaacgagtcttccgtgctccatacacttcgtcagcgctacggtgctagcttgctgcatacatatgctgggccctccctgctggtcctcggcccacggggagccccagcagtgtacagcgagaaggtgatgcacatgttcaagggatgccgtagggaagatatggccccacatatttatgctgtggcacagactgcctacagagccatgctcatgtccagacaggatcagtctataatcctgttaggttccagtggctcaggtaagaccaccagttgccaacatcttgtacaatacttagccaccatagccggcattagcggaaataaggtcttttctgttgagaaatggcaggcgctgtacaccctgctcgaggcgttcggtaactctccaaccattatcaatggaaacgctacacgctttagccagatcctctctttagatttcgaccaggcaggtcaggtagcgtccgcctctatccagacaatgctgctggagaagttgcgagtggcacggcggcctgccagcgaagccacctttaatgtcttctattatctgctggcatgcggagatggaacacttagaaccgaactgcaccttaaccaccttgccgagaacaatgtgttcgggattgtgcctctagcaaaacccgaggagaaacaaaaggccgctcagcaattttctaagctgcaggccgccatgaaggtactgggaattagtccagatgagcaaaaggcctgctggtttattctggccgctatctatcacttgggtgctgcaggggcgacaaaggaggccgctgaagccggccgcaaacagttcgctagacatgaatgggctcagaaagctgcctacctgctgggctgtagcctcgaggagctcagttctgccatcttcaagcaccagcacaagggtgggaccctacagaggagcacatcctttagacaagggccagaggagtcaggcctcggggacggaaccgggccaaagctctccgcactcgaatgcctggaggggatggccgcaggtttgtacagcgagttgttcaccctgcttgtttccctggttaatcgggctctaaagtcttcccagcacagcctgtgttcaatgatgatagtggacacccctggttttcagaacccagaacaaggcggctcggctcggggcgcctcttttgaagagctgtgccacaattacacccaagatcgtctgcagaggctttttcacgagcggacgtttgtgcaagagcttgaacgctacaaggaggaaaacattgagctggcctttgatgatcttgaaccgcccactgatgactccgtggccgccgtagaccaagcttcccatcagagcctagtgcgttctctggccagaaccgatgaggctcgcggcctgctttggctcctggaagaggaagcgctcgtacccggagcctcagaggacaccctgttggaacgcctattttcgtattacggtccccaggaaggggataagaagggccaaagtcccctgttacatagctctaaaccccaccacttcctgctgggccactcacatgggacaaactgggtcgagtataatgtgacagggtggctgaactacaccaagcagaaccccgctactcaaaatgctcccaggctactgcaggactcacagaaaaaaattattagcaatctcttccttgggcgcgcaggatcagccacagtcctcagcggcagcatcgcaggacttgagggcggaagccagttggctctgcggagggcaacgagcatgaggaaaacctttacaaccggcatggcggcagtaaagaaaaagtcactctgcattcagatgaagctgcaagtcgatgccctgattgacactatcaagaagagcaagttgcattttgtacattgttttttgcccgtggcagagggatgggctggggaaccgaggtcagcttcctcccggcgggttagctcttccagtgagctagacctgcctagtggagaccattgtgaggccggcctcttacagctggatgtccctctgctaaggactcaactcaggggaagtcgacttctagatgcgatgcggatgtacagacaaggttatccagaccacatggtgttttcagagtttagaagaagattcgatgttctggctccacacctgaccaaaaagcacggacggaactacatcgtcgttgacgagcgcagggctgttgaggaactgctggagtgcctggacctggagaaatccagttgctgtatggggctctccagggtgttcttccgggctggaacattggcccgactggaggagcagagagacgaacagacttcaaggaatttgaccctttttcaggctgcatgtcgggggtacctggccaggcagcattttaagaagagaaagattcaagatcttgctatccgctgtgtccaaaagaatattaaaaaaaacaaaggcgtcaaggattggccctggtggaaactctttactacagtacggccactgattgaagttcagttaagtgaggagcaaatccgcaacaaggatgaggaaatccagcagctacggtccaaactcgaaaaggctgaaaaggaacgaaacgaactgcgccttaattctgaccggctggaatccaggatctcagagctgacctcagaacttaccgacgagcgtaacacaggagagtctgcaagccagctgctggatgctgagaccgcagagaggttgcgcgccgagaaagaaatgaaagagctgcagacacagtacgacgcactgaagaagcagatggaggtgatggagatggaagtgatggaggccagactaatccgtgccgcagaaataaacggggaggttgatgacgacgacgcaggaggcgagtggaggctaaagtacgaacgcgcggttcgagaggtagattttaccaaaaagcggctgcagcaagaattcgaagacaaattagaggtcgagcaacagaataagaggcaactggagaggaggctgggtgatctgcaggccgatagtgaggagtcacaacgagctttgcagcaattgaaaaaaaagtgccaacgcctgacagccgaactccaggatactaagctccatctcgaaggtcaacaggtcaggaaccacgaactcgagaaaaagcagaggaggttcgattccgaactgagtcaggcgcacgaagaggcccagcgagagaaactgcagagagagaagctccagcgcgaaaaagacatgttgttggcagaggctttttcgcttaagcagcagttggaagagaaggatatggatatcgccggcttcacacaaaaggttgtctcgctcgaggccgaactgcaggatatttcatcacaggagagcaaagacgaggcttctcttgcgaaggtgaagaaacaactcagggacctggaggctaaggtgaaagaccaagaggaggagctcgatgaacaggccggaacaatccaaatgctcgagcaggcaaaacttcggctggagatggaaatggagcgaatgcggcaaacgcacagtaaagagatggagagccgtgacgaggaagtggaggaggcaagacaaagttgtcagaagaaactcaaacagatggaggttcagctcgaggaggagtacgaggacaaacagaaggtgctcagagagaagagagaactagaaggcaagcttgctacgctgagtgatcaggtgaatcgccgagatttcgaatcagagaaacggctgcggaaagacctgaaaagaacaaaagctctcctcgccgacgcacagctgatgctggatcacttgaagaatagtgccccaagcaaacgagaaatcgcccagttaaagaatcagctggaagaaagcgaatttacgtgtgccgccgccgtgaaagccaggaaagcaatggaggtggaaatcgaggatctgcatttgcagattgacgacatcgcaaaggcaaaaacagctttggaggagcaactctctaggctacagcgtgagaagaacgagatacagaacagactggaagaagatcaggaggatatgaacgaactgatgaaaaagcataaggccgctgtcgcccaggcttcccgggatctggcgcagataaacgatttgcaggcccagctggaggaggccaacaaggaaaaacaggagcttcaggagaagctacaggccctgcagtcccaggtcgagttcctagaacagagtatggtcgataaatctctagtgagtagacaagaggccaagatccgggaattggaaactagactagagttcgagcgcacacaagtgaaacggctggagtcactggcttcaaggctgaaggagaatatggagaaactgacagaggagagggatcagagaatcgcagctgagaaccgcgaaaaggagcagaataaacggctccagaggcagctgcgcgacacgaaggaggaaatgggcgagttggctaggaaagaagcggaggccagcagaaaaaagcatgagttggagatggacctagagagcctggaagccgcaaaccagagtctgcaggccgatctcaagcttgctttcaaaaggatcggcgacctgcaggccgcaattgaggatgagatggagagtgatgaaaacgaggacttgataaatagcctgcaggacatggtgactaaatatcagaagcggaaaaacaagctagaaggggattccgacgtggactcagaacttgaggatcgcgtggacggtgttaagtcctggctcagcaaaaacaaagggccatctaaagccgccagcgacgacggctcccttaagtcgtcatcccctactagctactggaaatcgttggcaccagacaggagtgatgacgagcacgacccgctggacaatacctcccgtccacgatactcacacagttacctctccgacagcgatactgaggcaaagctcacagaaaccaatgcctag

SEQ ID NO: 196280 - DNA, 2808 bp, synthetic construct
  misc_feature 1..2808: note = Description of Artificial Sequence: Synthetic coding sequence
  source 1..2808: mol_type = other DNA
atgcggatgtaccggcagggctaccccgaccacatggtgttcagcgagtttcggcgaaggttcgatgtcctggccccccaccttacaaaaaagcacggccgaaattacattgtagtcgacgagcgaagggctgttgaggagttgctcgaatgccttgatctggagaaatcctcttgctgcatgggcttgtccagagttttttttcgggccggaacgctggcacgactggaggaacagagagacgaacagacctccagaaacctaaccttgttccaggcagcatgtagaggttatctggcacgacaacattttaagaagaggaagattcaggatcttgccatccgatgcgtgcagaagaacatcaagaaaaataaaggcgtaaaagattggccctggtggaagctgttcacaactgtgaggccattgattgaggttcagctgtccgaggagcaaatccgtaataaggatgaagagatacagcaactgaggtctaaattagaaaaggctgaaaaagagaggaatgagttgcgactcaatagtgacaggctggagagcagaatttctgagctaactagcgaattgaccgacgagaggaacaccggcgagtctgccagccagttgctagacgccgaaactgccgagcgtctcagagcggagaaggagatgaaagaactccagacccagtacgatgccctgaaaaagcagatggaagtcatggagatggaagtgatggaagcacgattaattcgtgccgctgagattaacggggaggtcgatgacgacgacgcaggaggggaatggcggcttaagtatgagagggctgtgcgagaagtggacttcaccaaaaagcggctacagcaagagttcgaagataagctcgaagttgagcaacaaaacaaacggcagcttgaacggcgactgggggacctccaggccgactctgaagagtcccaaagggctttacagcaactgaagaagaaatgtcagcgacttaccgccgagttgcaagacaccaaactgcatctggaggggcaacaagtccgcaatcacgagctggagaaaaaacagaggcgcttcgactcagagctgtctcaggcccatgaggaagcccagcgtgagaaactgcaacgggagaaactgcagagagaaaaggatatgctgctcgccgaagccttcagtttgaaacaacagctcgaggaaaaagatatggacattgcaggtttcacacagaaggtcgtgagcttggaggcggagctgcaggatattagttcccaggagtcaaaggatgaagccagcctggctaaggtcaagaagcaactgcgcgacttggaggcaaaagtcaaagatcaggaagaggagctggacgaacaggccggaaccattcaaatgcttgaacaggcaaagctccgactggagatggagatggagcgtatgagacagacccattctaaggaaatggagtctcgggacgaggaggtcgaagaggctcggcagtcctgtcagaagaaactgaaacaaatggaggtgcagctcgaagaagaatatgaggacaaacagaaggttttgagagaaaaacgcgagctggaggggaagctggctactctgtccgatcaggtgaaccgccgggacttcgagtcagagaaacgcttaagaaaggacctcaagcgcaccaaggctttgctggctgatgctcagctgatgctggatcatctcaagaactccgccccctccaaacgggagattgcccagcttaagaatcagctggaggagtccgagttcacatgcgccgctgccgtgaaggcaagaaaggcaatggaggtggagatcgaagatcttcacctccagatcgacgatatagccaaagcaaaaaccgctctggaggagcaactgagccgactgcaacgcgaaaaaaatgaaatccagaatcgcctggaggaagatcaagaagacatgaacgaactcatgaaaaagcataaagccgccgtcgcgcaggcgagcagggacttagcccaaattaatgacctgcaggcgcagctcgaagaggctaataaggagaaacaggagttgcaagagaagctacaggcccttcagtcacaggttgagtttctggaacagtcaatggtggataagtcccttgtgtctcgacaagaggctaaaatcagggagctcgagacgagactggagtttgagcgaacgcaggttaagcgtttggagtctctggcctcacggctaaaggagaatatggagaagctgactgaggagcgcgatcaaaggatagctgccgagaaccgggagaaggagcagaacaagaggttgcagagacagctcagggacaccaaggaagagatgggagagctggcacgcaaggaggcagaggcctcacgtaaaaagcacgagctggagatggatcttgagagcctggaggctgctaaccagtccctccaggccgacctgaaactggcctttaaacggatcggggacctgcaggccgccattgaagacgagatggaatctgatgaaaatgaagacctgatcaacagcgaaggagactccgatgtggattctgaactcgaagatagggtggatggtgtgaagtcatggctgtccaaaaacaaaggtccctccaaggctgctagcgacgacggcagcctgaaatctagttcccctacatcgtactggaagagtcttgcccctgatcgctcagacgatgagcatgatcccctcgacaacacttctagacctcgctatagccactcttatctgtctgactccgacacagaggcaaaattaacagagaccaacgcatag

SEQ ID NO: 196281 - DNA, 6120 bp, synthetic construct
  misc_feature 1..6120: note = Description of Artificial Sequence: Synthetic coding sequence
  source 1..6120: mol_type = other DNA
atgttcaacctgatgaagaaggacaaggacaaggacggcggccggaaggaaaaaaaagaaaagaaggaaaagaaggagcggatgagtgcggccgaactgaggtccctggaagagatgagcttgagacggggtttcttcaatctgaataggagttccaagagggagagcaaaactcggctggagatctccaatcctatccccataaaagtggcctccggctcagatctgcacttaacagatatcgacagcgattccaatcgaggctcagtaattctggacagtggccatctgagcacagcttcttccagcgatgatctgaaaggggaggagggctctttccgggggagcgtgctgcagcgcgccgcgaagttcgggagcttggccaagcagaacagtcagatgatagttaagcgcttcagctttagccagagatctcgcgatgaatcagctagcgagaccagcaccccttctgagcacagcgctgcaccttctccacaggtggaagtccgcactctggagggacagctcgtccagcaccccggaccaggcatccccagaccaggccaccgctcaagagccccagaattggttactaagaaattccctgtggatctgcgcttgccacccgtggtccctcttcctcctccaacgctccgggagctggagctacaacgacgccctaccggcgacttcggtttctcgttgagacgaactactatgctggaccggggaccagagggacaggcctgccggcgagtcgtccatttcgccgagccgggagccggcactaaagatttagcgctgggcttggtccctggagatagattggtagagattaatgggcacaatgttgagtccaaaagccgggatgaaatcgttgagatgatacgccagagcggcgactcagttcgcctgaaagtccaacctatccctgagctttcagaactgagcagatcctggctgaggagcggcgagggtccgaggcgtgagcccagtgatgcaaaaaccgaggaacagattgccgcagaggaggcatggaatgagacagagaaagtgtggctggtgcacagggacggatttagcttggcttcccagctgaaaagcgaggagctgaatctgcctgaggggaaggtgagggtgaaactggaccatgatggagccattctggatgtcgatgaggatgacgtggaaaaagccaacgcaccgtcttgtgatcgacttgaagatctcgcttctctggtttacctgaacgaatcctcagttcttcacactctgcgccagcggtacggcgcgtctctgctgcacacctacgcgggaccttccctccttgtgttagggccccggggcgcacccgccgtgtactctgaaaaagttatgcacatgttcaaaggatgtcgacgggaggacatggccccacacatatatgcagtagcccagacggcttatcgcgctatgctgatgtccaggcaggatcaatctattatccttctggggtcatctgggtctggtaagacaacttcctgccaacaccttgtccaataccttgcaaccatcgccggtatttctgggaacaaggtgttttcagtcgagaagtggcaggcactctataccctcctggaagccttcgggaacagtcccaccatcatcaacggcaatgccactcggtttagccagatcttgagtctcgatttcgatcaagctgggcaggtggcatccgcttcgatccaaaccatgctgttagaaaaactgcgcgtggcaagacggcccgcaagtgaggccacattcaatgtcttttattatttgctggcttgtggggacggcacactgcgcaccgaactgcacctgaaccatttggcagagaacaacgtatttggaatagtgcccctggctaaacccgaggagaagcaaaaagcagcccaacagttcagtaagctgcaagccgccatgaaagtgctgggcatttctcccgatgagcagaaagcctgttggttcattctggctgcaatttaccatctcggagctgccggtgccacgaaagaagcggcagaagcagggagaaaacagttcgcccgccacgagtgggcgcagaaggccgcgtatttgctggggtgctccctggaggagctctcttccgccattttcaagcaccagcacaagggaggaactctacagcgctccacaagcttcagacagggcccagaagagagcggacttggagacggaaccggacccaaacttagcgccctggagtgcctcgagggcatggcagctggtttgtacagcgaactgtttactctcctggtctcgctcgtgaatcgagcccttaaaagctcgcaacacagcctttgctctatgatgatcgtggacactcccggcttccagaacccagaacaaggcgggtccgcacgcggagcatccttcgaagaactgtgtcataactacacacaggatcggctacaacggcttttccacgagcggactttcgtgcaggaactcgaacggtataaagaggagaacattgagctggcattcgacgatctagaaccacctacagatgactccgtggcagcggtggatcaggcaagtcaccagtccctggtgaggtccctggctaggaccgacgaggccagggggctactgtggctgctagaggaagaagcattggtgccaggagctagcgaagacactctgctggaaaggctcttcagctactacggcccccaagaaggggataagaagggccaaagtccactgctgcactcctccaaacctcatcatttcctcctcggccattcccacggcacaaattgggtggaatataatgtcacaggatggctcaactacacaaagcagaaccccgccactcagaacgccccacgcttgcttcaggatagccagaagaaaatcatttctaacctcttcctgggacgagccggttccgccaccgtgctgagtggttccatcgcaggattagagggcggatcgcagcttgctctgcggagggctacttcaatgaggaaaacatttactacaggcatggccgccgtgaaaaaaaagtcgctgtgtatccagatgaagctgcaggtggatgccctaatcgacacaatcaagaagagcaagctgcattttgtgcactgcttcctccccgtggccgagggttgggccggggaacctagaagcgcgagtagccgcagggtgagttcaagtagcgaactcgacctcccttccggggatcattgcgaagccggcctcctacagctggatgtgcccttactccgcacgcagctgcgtggcagccgactgctggacgctatgcgtatgtaccgccagggctatcccgaccacatggtcttcagcgaatttagaaggaggttcgatgtcctcgctccccatcttactaagaagcacggacgcaactacatagtggttgacgagcgcagagccgtggaggaactgctggaatgcctggaccttgagaagtcttcatgttgcatgggcttatcaagggtcttctttcgggctggtacactcgcacggctggaagagcagagggacgagcagacctccaggaacttaactctgtttcaggccgcttgtcgcggatacctcgcccgacagcacttcaagaagcggaagattcaggacctcgcgatccggtgcgtccagaaaaacattaagaaaaacaaaggcgttaaggactggccatggtggaaattgtttactacagtgagaccactgattgaagtgcagctgtctgaggaacagatcagaaataaagacgaagagattcagcagctgagaagtaaacttgaaaaggcggaaaaagagaggaatgagctacggctaaattccgaccggttggagagcaggatatcagaactcaccagcgagctgactgatgagcgaaacaccggggaatcagcttcccagctgctggatgctgagacggcggagagacttagagctgaaaaggagatgaaggagctacagacacaatacgatgcactgaaaaagcagatggaagtcatggaaatggaggtgatggaggcacggctgattagagcagctgagattaacggagaagttgacgatgacgacgcagggggcgagtggcggctcaagtacgagcgagcagtgagggaggtggattttacaaagaaaaggttacagcaggagtttgaggataagctggaggtggaacaacagaacaaaaggcaactggaaaggcggcttggggacctgcaggccgattcagaagagagccagcgggctctacaacaactgaagaaaaagtgccagaggcttaccgcggagctgcaagacacaaagctccacctggaagggcagcaggtgagaaatcatgagcttgagaagaagcagcgccggtttgattctgaactgagtcaggcccatgaagaggcccagagggaaaagctgcagagagagaagctgcagcgggagaaagatatgctgctcgccgaggctttctccctgaagcagcagctggaggaaaaagacatggatatcgccggatttactcaaaaggttgtgtccctcgaagccgagcttcaggacattagttcccaggaatcaaaagatgaggcgagcttggccaaggtcaagaagcagttgcgggacttagaagcaaaggtcaaggaccaggaggaagagctcgatgaacaggccggcaccatccagatgctggaacaagcgaaactgcgccttgaaatggaaatggagagaatgcggcagacacactctaaagagatggaatctcgtgacgaggaggttgaggaagcccggcagtcttgccagaaaaagctgaaacagatggaagtgcagttggaagaggagtacgaggataagcagaaagtgcttcgggaaaagagagagctggaaggcaagcttgccactcttagcgatcaggtgaatagaagagactttgagtctgagaagaggttacggaaagacctcaagcgtacaaaagctttgctggcagacgctcagctgatgcttgatcacttgaagaattcggctccgtccaaaagagagattgctcagctcaagaaccaactggaggagtctgagtttacttgcgcagctgccgtcaaggcacgcaaagctatggaggttgagatcgaggacctgcatctgcagatagatgacattgcaaaggcaaaaaccgcacttgaagagcagcttagcagattgcagcgcgaaaagaatgaaatacaaaaccgcttggaagaggatcaggaggacatgaatgagctcatgaaaaagcacaaggctgcagttgcccaggcttcccgcgatctggcccagatcaacgacttgcaggcccagctcgaggaggccaataaggaaaaacaagagctccaggagaagctacaggctttacagtcacaggtcgagtttttggaacagtcaatggtcgataagagtctggtatctaggcaggaagccaagatacgtgagcttgaaactagactggagttcgaaaggacgcaggtcaaacgtctggagagtctggcgagcaggctcaaggagaatatggaaaagctcacagaggagcgggatcaaaggattgcggcagagaaccgggaaaaagaacaaaataagcgcctccaacggcagttacgagacactaaagaggagatgggcgagcttgcccggaaagaagcagaagcgtctcgcaaaaagcacgaacttgaaatggacctggaaagcctggaggcagctaaccagtctctccaggctgacttgaagctggcgttcaaacggatcggggacttgcaggccgccatcgaggatgaaatggagtcagacgagaacgaagatctgatcaacagtgagggtgacagcgatgtagattcggagctcgaggaccgggtcgatggggtgaaaagttggctctctaaaaacaaaggcccctcaaaagccgccagcgacgacgggtccttgaagagcagttcccctacctcttactggaagtctctggcccctgatcggagtgacgatgaacacgatccactggataacactagtcgcccccggtattcccactcatacctcagtgattcagataccgaagccaagctcacggaaacaaacgcttag

SEQ ID NO: 196282 - DNA, 6009 bp, synthetic construct
  misc_feature 1..6009: note = Description of Artificial Sequence: Synthetic coding sequence
  source 1..6009: mol_type = other DNA
atgttcaacctgatgaagaaggacaaggacaaggacggcggccggaaggaaaaaaaggaaaaaaaagaaaaaaaagagcggatgtctgccgccgagttacgtagccttgaggaaatgtcacttagaagaggatttttcaatctcaacagatccagcaaaagggagtcaaagacacgcttagaaatcagtaaccccataccaatcaaggttgcatcaggctccgatcttcacttaaccgacatcgactctgattctaatcgaggttccgtgatcctcgactccggccatttgagtaccgcctcctcgtccgacgatctaaaaggcgaggaggggagcttcagaggatccgtcctgcagcgcgcagccaagttcggatccttagccaagcagaattcccagatgatcgttaaacgcttttccttctcgcagcggagccgcgacgagagtgcctctgagacctccactccctctgagcattcagcagcgccttctccgcaagtagaagtgcgaaccctagaaggacagctggtgcaacacccgggccccggaatccctcgcccgggccacagatctcgtgcgcccgagcttgtgactaagaagtttccggtggacctgcgccttcctccagtcgtaccgcttccacccccaaccctgcgagaactcgaacttcagcgcagacccacgggggattttggcttttcactgagacggacaaccatgcttgaccgtggccctgaagggcaggcgtgtagacgtgtagttcactttgcggagcctggagccggcactaaggatctggcactggggctcgtgcctggggacagattagtcgaaataaatgggcataatgttgagagtaagagcagagatgagatcgtggaaatgatccggcagtccggagacagcgtgcggttaaaggttcagcccattccagagctttctgaactatcccgctcttggcttaggtccggggagggccccaggcgcgagccctccgacgctaaaaccgaagagcaaatcgcggcggaggaagcttggaacgaaaccgagaaggtctggcttgtgcatcgagatggcttcagcctggcctcccagctgaagtccgaggaacttaacctccctgagggaaaagtgagagtgaagctggaccacgatggtgcaatcctggacgtggacgaagatgacgttgagaaagcaaatgctcccagttgtgatcggctggaggacctcgcatctctggtatacctcaatgagtccagtgttctgcataccctgaggcaaaggtacggagccagcttgttgcatacatacgctggcccatccctgcttgtgctcggccctcgcggagcacctgccgtctactccgagaaggtgatgcatatgtttaagggctgtcggagggaagacatggctccacacatatatgcagttgcccagactgcttatagggccatgctgatgagtagacaggatcagtcaataatcctcctcggatcatctggctctgggaagacaacttcatgtcaacacctggtgcagtatttggccactattgctggtatttcaggtaataaagtgttttcagtcgagaagtggcaagccctgtacaccttgctggaggcttttgggaactcacccacgatcataaatggcaatgcgacgcgctttagccagatactctcactggactttgaccaggcaggacaggtggcctctgcctccattcagaccatgctccttgaaaagcttagggtagccaggagacctgccagcgaggcaactttcaatgtgttttactatctgctcgcatgcggagacgggacgctgcggacagagttacatctcaaccatctagctgagaacaacgtctttgggatcgtgcctttagcaaagcctgaggagaaacagaaagcagcacagcaattctccaaactccaggcagccatgaaagtcctgggcatttctcccgacgaacagaaagcctgctggttcattctagctgccatctaccatctgggtgctgccggcgcaaccaaagaagctgctgaagcaggccgaaagcagttcgcgaggcacgagtgggcccagaaggccgcctatctgctaggatgttcacttgaggagctctcttctgccatcttcaagcaccagcataagggcgggaccctgcagagaagcacatcctttagacagggaccagaggagagcggcctgggcgatggtactggaccaaagttgagtgccctcgagtgtctggaaggaatggcagccgggttgtattccgagctgttcactttactggtttcgttagtgaatcgagccttaaaaagttcccagcattccctgtgctccatgatgatcgtggatacacccggcttccagaaccccgaacaagggggttctgccaggggagcttccttcgaggagctgtgtcataattacacccaagaccgactccagaggctcttccacgaacgaacatttgtccaggaattagaacgttataaagaagaaaacattgaactggctttcgatgacctggaacccccaaccgacgactctgtggctgctgtcgaccaggcctctcatcagagcctggttcgctctctcgccaggacggacgaggcaagggggctactgtggctgctcgaagaggaggcactcgtgcccggggcgagtgaagacaccttgttggagcggctgtttagttactacgggccccaggagggcgataagaagggccaaagccctttgctccatagttctaaaccgcaccatttcctactcggacactcccatgggactaactgggtggagtacaatgtgacgggatggctgaattataccaagcagaacccggctacgcagaacgctcccaggctgctacaggactcccaaaaaaaaattatctctaacctctttttaggacgcgccggtagcgccactgtgttatcgggtagcatcgcaggcttggaaggaggatctcaattggctctgcggcgggccacatccatgaggaagacttttaccaccggtatggccgcagtgaaaaagaaatctctgtgcattcagatgaagttgcaggtcgatgccctgattgacacgattaaaaagtctaagttgcattttgtgcattgtttcttacccgtggctgagggatgggctggtgaacctcgctcggcctcctccagacgcgtgtcaagctcctccgagttagatcttcccagcggcgatcattgtgaagccgggttacttcagttggatgttcctctgctgcgcacgcagctaaggggaagtcgcctactggacgccatgcggatgtaccgccaaggatacccggatcacatggtgttctccgaattcagacgtcggttcgatgtcctcgccccacatctgaccaagaaacacggccggaactacatagtggtggatgaaaggagagctgtggaagagctcctggagtgccttgatttggagaagagctcctgctgcatgggactctcacgtgtattctttcgggccggcaccctcgcacgactcgaagaacaaagggacgagcagactagccgcaacctgacactgtttcaggccgcatgccgcgggtatctggctagacaacattttaagaagagaaagatacaggatctggctatcagatgcgtccaaaaaaacataaagaagaacaagggcgtcaaagattggccatggtggaagctcttcaccaccgtccgtccattgatcgaagtgcagctcagtgaggagcagattcgcaacaaggatgaggaaattcagcaactcagatctaaacttgaaaaagccgaaaaggagcggaacgagctcaggctcaattctgataggctggagtcgcgaatctcggaacttacaagtgaactcaccgatgaaagaaataccggagagtcagcgtcacagctgctcgacgccgaaaccgcagaaaggctcagggccgaaaaagagatgaaggaattacaaacccagtacgatgctctgaagaaacagatggaagtgatggaaatggaggtcatggaggccagactcatcagggcagctgaaatcaacggtgaggtcgacgatgacgatgcagggggggagtggcgtctaaaatacgagagggctgttagagaggtcgacttcacaaagaagcgactgcagcaggaatttgaggataaactcgaagtcgagcagcaaaacaaacgccagctcgaacggcggctcggcgatctgcaggctgacagcgaggagagccagagggcactccagcagctgaaaaaaaagtgtcaacgcttaacagccgaacttcaggacaccaagttacatctcgagggtcagcaggtacgcaaccatgagctggagaaaaagcaaagacgattcgactcagagctaagccaggcgcacgaagaggcccagagagaaaaacttcagagagagaagttgcagcgcgaaaaggatatgctgctggccgaagccttttcgttgaagcaacagctggaggagaaggacatggacatcgccggcttcacccagaaggttgtgtctctcgaggccgagcttcaagacatatctagtcaggaatccaaggatgaggcttcactggccaaggtgaaaaagcagctgcgcgacctcgaagccaaagtcaaagatcaggaagaggaactggatgaacaggctgggaccatccaaatgctggagcaactaaagcagatggaagtgcagctagaggaggagtatgaggataagcagaaagtgctcagggagaaacgagagctggaaggaaaacttgccacattaagcgaccaggtgaatcggcgggacttcgagtcagaaaagagactgagaaaagacctgaaaagaactaaggcccttctagctgacgctcagctgatgctggatcatctcaaaaacagcgcaccatcaaagcgtgaaatagctcagctgaaaaaccagctggaggagtccgaatttacctgcgctgctgcagtgaaggcccgtaaagccatggaggtggaaattgaggacctgcatctgcagatagatgatatagcaaaagctaagacagccctggaggagcagctgtctaggttgcagcgagagaagaacgaaatccagaacagacttgaggaggatcaggaagacatgaacgagcttatgaagaagcataaagccgcagttgctcaggcatccagggatctggcacaaataaatgacctgcaggctcagctggaagaggcaaacaaggaaaaacaagagctccaggagaagctccaggctctccagtcccaggttgagtttctggagcagagtatggtcgacaaatcactggtgtccaggcaggaggccaagatcagagaacttgaaaccaggcttgagtttgaaagaacacaggtgaagagactggagagcctggcgtcgagactgaaggaaaatatggaaaaactgactgaggagagagaccagaggatcgccgccgagaacagggaaaaagagcagaataagagattacagagacaactgcgggacacaaaagaagagatgggcgaacttgccagaaaggaggccgaagcgtcgcggaagaaacacgagctggagatggacctcgaatctctggaggccgctaaccagtctttgcaggcagacctgaagctcgcgttcaagcgcataggagacttgcaagccgccattgaagacgagatggagtccgatgaaaacgaggatcttatcaactccgagggcgattcagatgttgactcagagctggaggacagagttgacggcgtgaaatcctggctctctaagaacaaaggccctagcaaggccgcaagcgacgatgggagcttgaagtcctcaagtcctaccagttattggaaatctcttgcccctgaccgctcagacgatgagcatgatccattagataatacatctagaccccgatattctcacagctacctcagcgactccgatactgaggccaaactgactgaaactaacgcttag

SEQ ID NO: 196283 - DNA, 2808 bp, synthetic construct
  misc_feature 1..2808: note = Description of Artificial Sequence: Synthetic coding sequence
  source 1..2808: mol_type = other DNA
atgcggatgtaccggcagggctaccccgaccacatggtgttcagcgagttccggcgcaggtttgatgtgctcgcacctcatctcactaagaagcatggaaggaactatatcgttgtagacgagcggagagctgttgaagagttgttggaatgtctggacctggagaagtcttcatgctgcatggggctcagtcgcgtctttttccgcgctggcacgcttgccaggttggaagaacagagggacgagcagaccagcaggaatctcacgctgtttcaggcagcctgtcgtggatatctcgcacgccagcactttaaaaagcgaaagattcaagacctagccattcggtgcgtgcagaagaacataaaaaagaataagggcgtcaaggattggccttggtggaaactattcacaactgtgagaccactgatagaggtccagttatcagaagagcagatcaggaataaagatgaggagattcagcaactcagatccaaactagaaaaggcagaaaaagagcggaacgaactgagactcaattctgaccggctagaatctcgcatcagcgagctcactagcgaacttaccgacgagcggaataccggggagtctgcaagtcaactgcttgacgccgaaaccgcagagagactgagggcagaaaaagaaatgaaagaattacagactcagtacgacgcattaaaaaaacaaatggaagtgatggagatggaagtcatggaagcccgtttgatacgagccgccgagatcaacggggaggtggacgacgatgatgccgggggtgaatggcgtttgaagtatgaaagagccgtgagggaggtcgattttacaaaaaagcggctccagcaggagtttgaggacaagttggaagtcgagcaacagaacaagcggcaactggagcggcgccttggagatcttcaggccgactccgaggagtcccagcgggccttgcaacagctcaaaaaaaagtgtcagcgcttgacagccgaattgcaggacaccaaattgcatctggaggggcagcaggtgagaaaccacgagctggagaagaaacagcgcaggttcgactctgagctttctcaagctcacgaagaggctcagcgcgaaaagctccagcgagagaagctgcagcgggagaaagacatgcttctggctgaggcttttagcctcaaacagcagctcgaagaaaaggatatggatatagccggatttacgcagaaagtggtgtctctggaggccgagctccaggatatttcaagccaggagagtaaagacgaggcgtcactcgccaaagtgaagaaacagttgcgcgatttagaagcaaaggtcaaagatcaggaagaggagttggacgaacaggcgggcaccatccagatgctagagcaagccaagctgaggctagagatggaaatggaaaggatgaggcaaacacactcaaaggagatggaatccagggacgaagaagtggaagaggcgcgccagtcgtgtcagaaaaaacttaaacagatggaggtgcagctggaggaggagtacgaggacaagcagaaagtgctgagggagaagcgggagctggagggcaaactggccactctgtcagatcaggtgaaccgaagagacttcgagagtgagaaacggctacggaaagatcttaaaagaactaaagccctgcttgcagatgcccagttaatgctcgaccatttgaagaattcagctccctcaaaaagggagatagcccagttgaagaaccaactagaggaaagcgagtttacttgcgccgcagcagtgaaagcaagaaaggccatggaggtggaaatcgaagacctgcatctgcaaatcgacgatattgcaaaggccaaaaccgctctggaggagcagctatctaggctacagcgtgagaagaatgagattcagaatagactggaggaggatcaggaagacatgaacgaattgatgaagaaacacaaagcagctgtcgcacaggcgtccagggacttggcgcagattaacgacctgcaggcccaactcgaggaggcaaataaggaaaaacaagaattgcaggaaaagttacaggcattgcaatcacaggttgaattcctggaacagagcatggtcgataagtccctcgtgtcgagacaggaagctaaaattcgcgagttggagacccgcctcgaattcgagaggacacaggtgaagcgactggaaagcctggcctccaggctgaaggaaaacatggaaaaactgactgaggaaagggaccagcgcatcgccgccgaaaaccgagagaaagaacagaacaagaggcttcagcgccagctgagggatactaaagaagagatgggggaactggccaggaaagaggcagaggcatcaaggaaaaagcacgagcttgagatggatctcgaatctttggaggccgccaatcaaagcctccaggccgacctcaagcttgcatttaaaagaatcggagacctccaggcagcaattgaagatgagatggagtctgatgagaatgaagatctgatcaattcagagggggatagcgacgtggattctgagttggaagaccgggtcgatggcgtcaaatcttggttgagcaaaaacaagggtccctccaaggccgcatccgacgatggttcccttaaaagttcttcccccaccagttactggaaaagtttggcccccgatcgttcagacgatgagcacgacccgcttgacaatacctctcggccgagatactcacacagctatctctccgacagcgataccgaggctaagctcactgagaccaatgcctag

SEQ ID NO: 196284 - DNA, 963 bp, synthetic construct
  misc_feature 1..963: note = Description of Artificial Sequence: Synthetic coding sequence
  source 1..963: mol_type = other DNA
atgaccttcgtgctgctgagcagcagccagctggaggagcagctgtcccgtcttcagagggagaagaacgagatccaaaaccggctggaggaagatcaagaggacatgaatgaactaatgaagaaacataaggccgcagtcgcccaggcctcccgcgatctggcacagatcaacgatcttcaagctcagctcgaagaggccaataaagaaaaacaggaattgcaagagaaattgcaagcactgcagagccaggtggagttcctggagcagtccatggttgataaatcccttgtatctagacaggaggctaaaatacgggaactcgaaactaggctggaatttgagagaactcaggtcaagcgtctggaatcgctggcaagcagactgaaagaaaatatggagaaactgacagaagagagggatcagcggattgcagccgagaatcgtgaaaaggaacaaaacaaaaggctgcagcggcagctgagagatactaaggaagagatgggtgaactcgcacggaaagaggcggaagctagtagaaagaaacacgaactcgagatggacctggaaagtctggaggccgccaaccaaagcctgcaggccgacctgaagctggcttttaagagaattggtgacttacaggcggccatcgaggatgaaatggaatccgatgagaacgaggacctgataaactcagagggagactcggacgtggatagtgagctcgaggaccgagtggacggagttaagagctggctctctaagaataagggaccctctaaagccgcgagtgacgatggttccttgaagtccagttcaccaacctcttattggaagtccctggccccagatcggagtgacgatgaacatgacccgcttgataatacaagcagacctagatattcccattcatatctgtctgactccgacactgaagcaaagctgaccgaaacaaatgcatag

SEQ ID NO: 196285 - DNA, 7704 bp, synthetic construct
  misc_feature 1..7704: note = Description of Artificial Sequence: Synthetic coding sequence
  source 1..7704: mol_type = other DNA
atggccatcagcagccggctggccctgtgggagcagaagatccgggaggaggataaatcccctcctccctcttcaccgccccctctctttagcgtgattcccggggggttcataaagcagctggtgcgtggcactgaaaaggaagccaaggaggcacggcagaggaagcagttggccgtcgccagcccagaaagagaaatccctgaaatatctatctcccagcctaactctaagtcatcgtcagggacaaggtcagggtcccaacagatatcccaggatgaccagagctccagtcctggctcatcggacatcttagggaaggaatctgaaggcagtcggagtcccgatccagaacagatgacttctatcaatggcgaaaaagcacaggagctcgggtcgagtgctacacccacaaaaaagacagttcctttcaaaaggggcgttcgcagaggggatgttctgctcatggtggccaagctggatcccgacagcgcaaaacctgaaaaaacccaccctcacgatgcccctccctgcaagacatctccccccgctactgacaccggaaaagaaaagaaaggagaaacctctcggacgccctgcggttcccaggcaagtaccgagatcctggctcccaaggctgagaaaacccgcactggaggactgggtgatcctggccagggtacagtggctttaaagaaaggcgaggagggccaatccatcgtgggcaaggggcttggcacccctaagaccaccgaactgaaggaggcggagcctcagggcaaggaccggcagggcacccgccctcaggcccagggccctggagaaggtgtacgccccggcaaggccgagaaggagggcgccgaacccactaatacagtcgaaaagggaaatgtttccaaggacgtgggcagcgagggcaaacatgtgaggcctcagattcctgggagaaaatgggggggctttctagggagacgttccaagtgggacggaccccaaaataaaaaggacaaggagggggttttgctgtccaaggccgagaagaccggagaaccacagacgcaaatggaaaaaacaagtcaagtgcagggggaactgggggatgatttgagaatgggggaaaaggcgggcgaactcaggtctaccaccggtaaggctggagaatcctgggataagaaggagaaaatggggcagccccagggaaagtccggcaatgctggcgaagctcgaagccaaaccgagaaagggtgcgaggcacccaaagaggtctcgacaatggttgagagccctgccgcaccaggaaaaggtggttggccgggaagtagaggccaagaagctgaagagccctgctcacgcgctggggacggcgctggcgctctggagactgagctggagggcccatcccagcctgcgttagagaaggatgccgagagaccacggatccggaaggagaatcaggacggccccgctccccaggaggagggcaagggcggccagtcgcgagactcagatcaggcacctgaggacagatggtatgaggctgaaaaggtgtggctcgctcagaaggacggttttactctggcaacggtgctcaagccggacgaggggacagcagatctccctgcagggcgagtgcgactgtggattgatgccgataaaactataacggaggttgatgaggagcacgtgcaccgagctaacccccctgagctggaccaggtggaggatcttgccagcttgatctcagtgaacgagtcaagcgtcctgaatacgcttctgcagcgctataaagcccagttgctccatacctgcaccgggccagacttgattgtcctgcagccgcggggcccgtcagtcccctccgcagggaaggtgccgaaaggaagacgggatggcctcccggctcacattggaagcatggcccagcgggcttactgggctctccttaaccagagaagggatcaatccatcgttgccctggggtggagtggagcgggcaaaactacgtgttgtgaacaagtgctggaacacctggtaggaatggctggatccgtcgatggcagggtgtctgtcgaaaaaatccgggccacctttacagtgctcagagcctttgggagcgttagcatggcccattcgaggtccgctacaagattctcgatggtaatgtcccttgatttcaatgcaacgggtagaatcactgccgcccagcttcagaccatgctgctggaaaagtctcgtgtagcgcgccaacccgagggggagtccaactttctggtattttctcaaatgctggctgggctggatttggatttgcgaacggagctcaatttgcaccagatggcagactccagctctttcggcatgggcgtttggtctaaaccagaggacaagcagaaagccgccgccgctttcgcccagctgcagggggctatggaaatgttgggaatatctgagtccgagcaaagggccgtgtggcgcgtactggccgccatctaccacctgggtgctgccggagcctgtaaagtgggccggaagcagttcatgcgttttgagtgggctaactacgccgcggaagcgctggggtgcgagtacgaggagctgaatacagccaccttcaagcaccacctccgacaaattatccagcagatgactttcgggcccagccgttggggcctcgaagatgaggaaacctcttccgggctgaagatgaccggggttgattgtgttgagggaatggccagcggactctaccaggagttgtttgcagccgttgtgtccctaattaataggagtttttcttctcatcatcttagtatggccagcatcatggttgtggactctcctggctttcagaatccccggcaccagggcaaagacagggccgcaacctttgaagagttatgccacaattacgctcacgaacggcttcagttactcttctaccagcgcacatttgtgagcacgttgcagcgttatcaggaggaaggagtgcctgtgcagttcgaccttccagatccctcccctgggaccaccgtagccgtcgtggaccaaaacccgtcacaggtgagattaccagccggcggcggtgcacaggatgccaggggactattttgggtccttgacgaagaagtgcatgttgaaggcagtagtgactcagtggttttggaacggctatgcgctgcatttgaaaaaaagggggccggaacagagggatcttccgcgctgcgcacatgtgagcagcccctgcagtgcgaaatctttcatcagttaggctgggatcctgtgcgttacgatttaaccgggtggctgcaccgggccaagccaaatctttcagcattagacgcgcctcaggtgctgcaccaatccaagcgggaagagttacggtctctcttccaggcacgtgcaaagctgcctccggtatgcagagctgtagcaggcctggagggcacttctcagcaggccctgcagagaagcaggatggtgaggcgaacctttgcatctagcctggccgcagtgcgcagaaaagccccttgttcccagatcaagctccagatggacgctttgacaagcatgataaagaggtcacggttgcactttatccactgtctggtcccaaatcccgtggtggagtcccgttctggccaggagtcacccccccccccgcagcccgggagggataagccaggtgctgggggccctctggcactggatatccccgccctcagggttcagctcgctggttttcatattttggaggccctacggctgcaccgcacaggttacgccgatcacatgggcttgacccggtttaggcggcagtttcaagtgttagatgcccccttgctgaagaagctaatgtccacatccgaaggcattgatgaaaggaaagcagtagaggagttattagagaccctggacttggagaagaaggctgtggccgttggtcattcccaggtttttttgaaggccggggtgatctctcgactcgaaaaacaacgggaaaagctcgttagtcagagtattgtgctcttccaggctgcatgcaagggctttctgtcacgccaggaatttaagaaactgaaaatcaggcggttggccgcacaatgtatacagaaaaacgtcgcggtcttcctcgcggtgaaagactggccctggtggcaactgctgggttctttgcaacctcttctctccgccacgataggtaccgagcagttgcgagctaaagaagaggaactcactacacttcgccgcaagctagaaaaatcagaaaaactgcgtaacgagcttagacagaataccgacttattggaatccaaaattgccgatctgacgtctgacctggccgacgagagattcaagggcgatgtagcatgccaggtgctcgagagcgagcgcgcggaacgcctgcaggcattccgtgaagttcaggagctgaagagcaaacacgagcaagtgcagaagaaactgggcgacgtgaataagcagcttgaagaagctcaacaaaaaatccagctgaacgatctggaaaggaatcccacgggcggagccgacgaatggcagatgaggttcgactgtgctcagatggagaatgagtttctgcgcaaaagactgcagcagtgtgaggaaagattagattccgagctcacggcccggaaagagctcgagcagaaactgggtgaactacagagcgcgtatgatggtgctaaaaaaatggcgcaccaattaaaacgcaagtgccatcacttaacctgcgatttagaagacacctgcgttttgctggaaaaccaacaatccagaaaccatgagctggagaagaaacaaaaaaagtttgatttacaactcgcccaggctctgggggaatctgtgtttgagaagggtctgagagaaaaggttacccaggagaataccagcgtcaggtgggaactgggccagctccaacaacagctgaaacaaaaagagcaggaagcctctcaattgaagcaacaagtcgaaatgctgcaggatcacaagagggagctgctggggtcaccgagcttgggcgaaaattgcgttgccgggctgaaagaaaggctgtggaaactggaaagctccgccttggagcagcaaaagatacagagccagcaggaaaataccatcaaacagctggagcaactcaggcagaggttcgaactggagatcgagcgaatgaagcagatgcaccaaaaagatcgtgaggaccaagaggaggagctcgaggacgtgcggcagtcttgccaaaagagactgcatcaactcgagatgcagctagagcaggagtacgaagagaaacagatggtgctgcacgagaagcaggatctcgagggcctgatcggcactctgtgtgaccaaattggccacagggatttcgacgtagaaaagaggctgcggcgtgatttgcgccgaacacacgccctgctgtccgacgttcagctgctcctgggaaccatggaggatggcaagacatctgtcagcaaagaggaactggagaaagtccactcccagctggaacagagtgaggccaaatgcgaggaagcactgaagacccagaaagtgctaaccgctgacttggaaagcatgcattcagaattagaaaacatgactcgtaacaaaagcctggtggatgagcagttgtacagactccagtttgagaaggccgatcttctcaagagaattgatgaagaccaagatgacctgaatgagttgatgcagaaacataaagacctgatcgcccagtccgccgccgacatcgggcagattcaggaactccaactgcaactggaagaggcaaagaaggagaagcacaagctccaagagcagctgcaggttgcccagatgcgtatagagtacctggagcaatccacggtagatcgcgccattgtctccaggcaagaagcagttatttgcgacctcgagaacaaaacagagtttcaaaaggtccaaattaagcggttcgaggtccttgtgatccggcttcgagactcccttattaagatgggggaggagctgtcacaggcagctacctcagaatcccagcagagggagtcctctcagtattaccagaggagacttgaggaactgaaagctgacatggaggagctggtccagagagaggccgaagcttcccgccggtgtatggagcttgagaaatacgtagaggagttggccgccgtcagacagacgctgcagactgacctggaaacctcaattaggcggatcgccgatctgcaggctgctctcgaggaggtagctagcagcgactccgataccgagtcagttcaaacagctgtggactgcgggagcagcggacggaaagagatggacaatgtgagcattctcagcagccaacccgagggctccctccagtcttggttgtcgtgtactttaagtctggccactgacaccatgcgtacacccagtcggcagagcgcgacctcgagccggattctatccccccggatcaatgaggaagcgggtgacaccgaacgaactcaaagtgccctggccctgtcacgcgcccggtccactaacgtgcacagtaaaacgtcaggcgataagccggtgtctccccacttcgttaggcggcaaaagtactgtcacttcggcgacggggaagtcctcgcagtgcagcggaaatccactgagaggctcgaaccagccagctcccctctggcctctaggtccaccaatacatcacctttgtccagagagaaactgccctcaccgtcagccgccctgtctgaattcgtagaaggcctcaggagaaagagagcccagagaggccagggttccaccctgggtcttgaggattggcctacactgcccatctaccaaaccacaggggctagcaccctcagaaggggtcgcgccggatcagatgagggcaatttgtcactcagggtgggtgcgaaaagtccactggagattgaaggcgccgcgggcggcctcctgcgctcaacatccttaaagtgcatctccagtgacggagtgggcggcacaacgctgctgcctgaaaaaagcaagacccaattttctagctgtgaaagtctcctcgagtcaaggcccagtatggggaggaaacttagtagccctaccactccacgggatatgttgctctctccaactttaaggccacgcaggcgctgtctcgagagcagcgtagacgacgcaggatgtccagatctgggaaaagagcctctggtctttcagaatagacagttcgcccacttgatggaggagcccctgggttctgacccctttagctggaagttaccgtcattagattacgagcgcaagaccaaggtggatttcgatgactttctcccggccattcggaagccccaaactccaacctcactggctggatcagccaaaggtggacaggacggcagccaacggagcagtatccatttcgaaaccgaggaagctaacaggtcctttctgagtggtatcaaaacaattttgaaaaagtcacctgagcccaaagaagatccggcgcacctgagcgactcttctagctcctcaggttccatcgtgtcatttaagtcggccgacagtataaaatctcggcccgggatcccacgactagctggggacgggggcgagagaacgtccccagagcggagggagcctggcacaggtcggaaagacgatgatgttgcttccattatgaagaaatatcttcagaaatag

SEQ ID NO: 196286 - DNA, 7707 bp, synthetic construct
  misc_feature 1..7707: note = Description of Artificial Sequence: Synthetic coding sequence
  source 1..7707: mol_type = other DNA
atggccatcagcagccggctggccctgtgggagcagaagatccgggaggaggacaaatctcccccaccatcgtccccacctcctttattcagtgtgattcctggtggattcattaaacagctggttcgcggcactgaaaaagaggctaaagaagctcgccagcggaagcagttggccgtggcttcaccagagcgagagattcccgagatatcaataagccagccgaattcgaagtcttcgtccggcacaagatccggctcgcagcagatctcccaagatgatcaatcttccagtccagggtcaagcgacatacttggtaaagagagcgaaggatcccgctcacctgacccagagcagatgacgtccataaacggtgaaaaggcgcaagaacttggttccagcgccactcctaccaagaagacagttcctttcaagcggggggtgcgcaggggcgatgtgctgctgatggttgcgaagttagatcccgattccgccaagccggaaaaaactcatcctcatgacgccccaccatgcaagacatctccccccgctactgataccgggaaggagaaaaaaggagagacctcaagaaccccttgtggctctcaggcttccacggaaatcctcgctccaaaagctgaaaagacccggacggggggccttggggaccccggccagggcaccgtcgctctgaagaaaggggaggagggacagagcatcgtgggcaagggacttggcacccccaagactacggagctgaaggaagccgaaccacagggcaaagatcggcagggaacgcgtccacaggcccagggacccggtgaaggtgtcaggcccggaaaggccgagaaagaaggagccgaaccaaccaatacagtggaaaagggcaatgtgtccaaggacgtgggtagtgaggggaagcacgttcggccccagattccaggtagaaagtggggggggtttctcggcagacgctccaagtgggacgggccccaaaataaaaaggataaagagggggtgctgctgtcaaaagcagaaaagacaggcgaacctcaaacccaaatggagaaaactagccaggttcagggggaactgggtgatgacctccgaatgggcgagaaggcgggtgaactgagatcgacaaccggaaaggctggcgaaagctgggataaaaaggagaagatggggcagccacagggaaagtcgggtaacgcaggcgaagctcgtagtcaaaccgagaaggggtgcgaggcccccaaggaagtgtccactatggtggagtcgccagccgcacctggaaagggcgggtggcctggttcccgcgggcaagaagccgaggagccatgtagtagggctggagacggagcgggggccttggagacagagcttgaggggccgtcacagcctgcgctggaaaaggacgcagaaaggcccagaatacgcaaagagaaccaggatgggccggcccctcaagaggaggggaaggggggtcagtctcgcgacagcgaccaggcaccagaagaccggtggtatgaagcggagaaagtgtggctcgcacaaaaggacggctttactctggccacagtgctgaagcctgatgagggcactgccgacctgcccgcgggacgcgtgcggctgtggattgatgcggataagacaatcacagaggttgacgaagaacatgtccatagggccaaccctccggagctagatcaggtagaagacctagcctccctgatctccgtcaacgagtctagcgtgctcaacactctcctgcagaggtacaaggctcagcttctacacacctgcaccggcccagatcttatcgtcttgcaaccaagaggcccctcggtgccaagcgccggaaaggtgccaaagggtcggagggacgggctccctgcacatatcgggtcaatggcacagcgcgcttactgggctctgctaaaccagcggagagaccagtccatcgtggctctgggttggtcaggcgctggaaaaaccacctgctgcgaacaggttctggagcatttagttgggatggcgggctccgttgatggccgagtatcagttgagaaaattcgtgccacgtttaccgtgctgcgagctttcgggtctgtgtctatggctcactcaaggtcggccacccgcttcagtatggtaatgtcactggattttaatgccaccgggcgcatcacagctgcacagctgcaaaccatgctcctggaaaaaagtcgggttgcgcgccagccagaaggcgagtccaacttccttgttttcagtcagatgttggcaggcctggacctggacctacgtacagagcttaacctacaccagatggccgactcctcatcctttgggatgggcgtctggagcaagccggaggacaaacagaaggcagctgctgccttcgcccagctgcagggtgctatggagatgttaggcataagtgagagtgaacagcgcgccgtgtggcgcgtattagccgctatttaccatcttggtgccgctggtgcctgcaaggtcggacggaagcagtttatgcggttcgaatgggcaaactatgccgccgaggcattaggctgtgaatacgaagagcttaacactgccacgtttaaacaccacctgagacagatcattcagcagatgacctttgggccatcccgttggggactggaagacgaggaaactagctccggcctcaaaatgacaggagtggactgcgtggagggaatggcctctggactgtaccaggaactatttgcagcagtagtgtccttaattaaccgctccttctcttctcatcacttgtccatggccagtattatggtcgtggacagccctggcttccagaatccacgacatcaaggaaaggaccgcgcagctaccttcgaggaattgtgccacaattacgcgcacgagcggctccagctgttgttctaccaacggacttttgtaagcaccctgcaaagatatcaagaagagggcgtcccagtgcagttcgatctgcccgatccttcccccggaacgaccgtggccgtggtggatcagaacccttctcaacaggtacgcctccctgctggcggtggcgctcaggatgctcgcggactattctgggtgctggacgaagaggtgcatgttgaaggtagtagtgatagcgtggtactcgagaggttgtgtgccgctttcgagaagaagggagccgggacggagggtagctctgcacttcggacctgtgagcaaccactacagtgcgagatcttccaccagctgggctgggaccccgtgaggtacgatctgaccggttggttgcaccgcgccaaaccgaacctaagcgcgctggatgcccctcaagtgctgcaccagagcaaacgagaggaactgagaagcctgtttcaggccagggcaaaattgcctcccgtgtgtcgcgcagttgcgggtctggaaggaaccagccagcaagccctccagaggtcccgcatggtcagacggactttcgcttcctccctggccgctgtcagaagaaaggctccttgtagccagatcaaactccagatggacgcgttaacatccatgatcaagcggtcgagactgcatttcatacattgccttgtgccgaatccagtcgtcgaaagccgaagcggacaggagagtcccccccccccccagcccgggcgcgataaaccaggggccggtggccctctcgctctggacattcctgccctgagggtccagttagcgggtttccatattctggaggccctgaggttacataggacgggatacgcggatcatatggggctgacccggtttaggaggcagttccaggtgctggatgcccctctgctaaagaagctaatgtctacgtctgagggcattgatgagcggaaggcggtggaggagctactcgaaacccttgacctcgagaaaaaggcggttgccgttggccactcccaggtcttcctcaaggccggcgtgatctcacgtctcgagaaacagcgggagaagcttgtatcacagtctattgtgctctttcaggccgcttgcaagggttttctcagtagacaagaattcaaaaagctcaaaatcaggcggctggccgcacaatgcattcagaagaacgtggccgtgttcctcgctgtcaaggactggccatggtggcagctcctgggtagcctgcagcctctgctcagcgcaactataggcactgaacaactgagagcgaaagaagaggagttaacaacccttcgtagaaaattagaaaaatctgagaaactgcgaaatgagctgcggcagaacacggatctgcttgaaagcaagattgctgacttgacttcagatttagctgatgaacggtttaagggtgacgtcgcatgccaggtcctcgaatcggagagggccgagaggctgcaggcctttcgcgaagtgcaggaacttaagagcaagcacgagcaggtccagaaaaaattgggcgatgtgaataagcagctggaagaggcccagcagaaaatacagctgaacgacttggagagaaatcctaccgggggcgcagacgagtggcagatgcggttcgattgcgcacagatggagaacgagtttctccgaaaacggctccagcagtgcgaggagaggctagatagcgagctgactgctcgaaaagagctggagcaaaaactgggagagctccagtctgcgtacgacggcgcaaagaaaatggcacaccagctcaagcgaaaatgccaccacctcacgtgcgacttagaggatacgtgcgtgctgctcgaaaatcaacaaagccggaatcatgaactggaaaaaaagcagaaaaaattcgacctccaattggcacaagccttgggggaatccgtgttcgagaaaggcctccgcgagaaggtcactcaggagaacaccagtgtccggtgggaacttgggcagttgcaacagcaactcaagcagaaggaacaagaggccagtcagctgaagcaacaggtggagatgctgcaggaccataaacgagagctgctggggtccccaagccttggtgagaactgtgttgcgggcctgaaggagagactctggaagcttgaaagctcagccctggagcagcagaagatacagtcccagcaggagaacacgatcaaacagctggagcaactgcggcagcgtttcgaattggagattgagaggatgaagcagatgcaccagaaagatagggaagatcaggaagaagagctcgaagatgtccggcaatcttgtcagaagcgcctgcatcaactggaaatgcaactggagcaagaatacgaggagaagcagatggtcctgcatgagaagcaggacctcgaggggctgatcgggacgttgtgtgatcagattggacatcgggactttgacgtcgaaaaaaggctcagacgcgacctgcggcgcacccacgcacttctgtctgatgttcagttactgttagggacaatggaggacggcaagaccagtgtgtccaaagaggagctggaaaaagtccattcacagctcgagcagagcgaggcaaagtgtgaagaggctttaaagacccaaaaagtgttaacagctgacctggagtcaatgcatagtgagctcgaaaatatgactaggaataagtctctcgttgacgagcagctctaccgtctccagttcgaaaaggctgatttgttaaaacggatcgacgaagatcaagacgacctaaacgaactgatgcagaaacacaaggatctcattgctcagtccgctgcagatatcggtcagatccaggagctccaactccaactggaggaggcaaagaaagaaaaacataagttacaggaacagctccaggttgcccaaatgcgcattgagtatttggagcagtccaccgtggaccgtgccatcgtgtcaaggcaggaggcggtgatctgtgacttggagaacaagaccgagttccagaaggtgcagatcaagcgcttcgaggtgttagtcatccgcctgcgcgatagcctaatcaaaatgggagaggagctgtcacaggctgccaccagcgagtctcagcaacgtgaaagcagccagtattaccagcgccgtttggaagagctgaaagccgatatggaagagttggttcagcgtgaggcggaagcctctagacgatgtatggagctggagaagtacgtcgaggaactggcagccgtcaggcagactcttcagacggatctggagacatccatccggaggatcgccgacctccaggctgccctcgaggaagttgcctcatcagattctgataccgagagcgttcagacagccgttgattgtggcagttcaggaaggaaagagatggacaatgtgtcgatactgtcctcccaacccgagggctccttgcagtcctggctctcttgcactctctctttggccaccgacaccatgagaacgcctagcaggcagtcggcaacaagcagtcggatcctgagcccacggataaacgaggaagccggcgatacagagcgaactcagtccgccctggccctgtctagagcccgtagtacaaacgtacatagcaagaccagcggcgacaaacccgtgagtcctcactttgtgcgccggcagaagtactgccattttggtgatggtgaggtgctagcagtgcaacgcaagtccactgaaagactcgagcccgcttccagtcccctggcttcacgaagtaccaacacctctcctttgagccgagagaaactcccgagcccatccgcagcgctgtccgagtttgtcgaagggctgcgtagaaaacgtgcacagcgtggtcaggggtccaccttaggtcttgaagattggccaactcttcccatctaccagacaaccggagcttcaaccctgagacgcggacgcgctggctccgatgagggaaacttgtctctacgggtcggcgcaaagagcccattagaaatcgagggtgccgccggcgggctactgagaagcacttcactgaaatgtatatcctcagacggcgtaggaggcactacattattacccgagaagtctaaaacacaattctcctcatgcgaaagtttgttggagagtcggccgtccatgggccggaaacttagttctccaacaacaccccgcgacatgctgttgagccctactctgagacctagaaggagatgccttgagagctccgtggacgacgccggctgccccgacttgggcaaagagccattggtgtttcagaacagacaattcgctcacctgatggaagaacccctgggctcagacccattctcatggaaactccccagcctggattatgagcgaaaaacgaaagtcgacttcgatgattttctgccagcaatacggaaaccgcagaccccgaccagcctcgcaggatcagctaaaggcggtcaggacgggtcacaacgtagcagtattcacttcgaaacagaggaggcaaacaggagcttcctgtccggaattaagaccatcctgaagaagtcacctgagcccaaagaagacccagctcatctgtccgactcttctagttcttcaggaagtatcgtttctttcaaatccgccgactcaatcaagtcacggccaggcatcccacgtttagctggagacggcggggaacggacctctccagagagacgggaacccggtactggccgaaaggacgatgacgttgcaagtattatgaaaaagtacctccaaaagtag

SEQ ID NO: 196287 - DNA, 7704 bp, synthetic construct
  misc_feature 1..7704: note = Description of Artificial Sequence: Synthetic coding sequence
  source 1..7704: mol_type = other DNA
atggccatcagcagccggctggccctgtgggagcagaagatccgggaagaggataagtctccccctccttcaagtccacctccactgttcagtgttattccagggggatttatcaagcagctggtccgtggcacagaaaaagaggcaaaggaagctcggcagaggaagcagctcgcagtggcaagccctgagagggaaataccggagataagtataagccaaccaaatagcaaatcctcctcgggcacacgcagcgggtcccagcaaatttctcaggatgaccaaagctcgtctcctggaagttcagacatacttgggaaagagtccgaaggcagccgaagccccgaccccgaacagatgacctcgatcaacggcgaaaaggcccaggaactcggttcctctgccaccccaacgaagaaaacagtcccctttaagcgaggcgtgagacgcggtgacgtgttactcatggttgcaaagctcgacccggacagcgctaagccggagaaaacacatcctcatgacgcaccgccctgtaagacatctcctcccgccacagatactgggaaggaaaagaagggcgaaacctccaggactccctgtgggtcccaggccagcactgaaatcctagccccgaaggccgagaagacccgcaccggaggactgggagaccccgggcaagggactgtggccctcaaaaagggagaggaaggacaaagtattgtaggtaaagggctgggaactcccaaaaccaccgaattaaaagaggctgaacctcagggtaaagacaggcagggtactaggccacaagcgcaggggccgggggagggggtgcgacctggaaaagccgagaaagagggcgcagaacctacaaacactgtggaaaaaggtaacgtgtctaaggatgtcggcagcgagggaaaacacgtgaggcctcagattcccggcaggaagtggggcggtttcttgggacggaggagcaagtgggacggaccacaaaacaagaaagataaagagggtgtccttttgtcaaaggctgagaaaaccggggagccacagacgcagatggagaagacctcgcaggtacaaggagagctgggcgacgacctcaggatgggagagaaggctggcgagcttcggtcaactaccggcaaggccggtgaatcttgggataaaaaagagaagatgggacagccacaaggcaaatccggaaatgccggagaggctagaagccagaccgagaaaggctgcgaggccccaaaggaagtgagcaccatggtcgagagcccagccgcacccggaaagggcggctggccgggatctcgggggcaggaagcagaggaaccgtgttccagagctggcgacggggcaggagcacttgaaacagaattggagggacctagccagcccgcactcgaaaaggacgccgaacgcccacgaatacggaaagaaaatcaggatgggcccgctccacaggaagagggtaagggaggtcagtccagggattcagatcaggcacctgaggacagatggtacgaagccgagaaggtctggctcgcacagaaagacggcttcactttggcgacagtcctcaaacctgatgagggcaccgcagatctgcctgccgggcgtgtcagattgtggatcgacgcggacaagacgatcaccgaagtggacgaggagcatgtgcacagagccaatccacccgagctggatcaggttgaggacctggcgtctctgatctccgtgaacgagtcgagcgtactcaacaccctcctgcagaggtataaagcacagttactgcacacttgcaccggacctgacttgatcgttttacagccccgaggtcctagtgtcccgtctgctggaaaggtccccaagggtcgaagggatggcctcccggcccacataggaagtatggcccaaagagcttactgggctctgcttaatcagcgtcgtgatcagtccattgtagccctggggtggtcaggcgccggcaaaacaacatgctgcgagcaggtattggagcacctggtagggatggcgggatctgtggacggtcgcgtgtccgttgagaagatacgggcaacttttactgttctgcgggctttcgggagcgtctccatggcccattctagatctgcaaccaggttttctatggtgatgtccctggattttaacgccactggtaggatcactgctgcccaattgcagacaatgctactcgaaaagagcagagtcgctcggcagcccgagggcgaaagtaactttctggtatttagtcagatgctagccggcctggatctagacttgcggacggaactcaaccttcatcagatggctgactcctcctcgtttggaatgggcgtgtggtctaaacctgaagataagcaaaaagcagccgctgcctttgcgcaacttcagggcgctatggagatgttaggaatatccgagtccgaacaacgtgctgtgtggcgggtcctggcggcaatctatcacctcggtgctgcgggggcgtgtaaagttggtcggaagcagttcatgaggtttgaatgggctaattacgctgccgaagccctgggctgtgagtatgaagagctaaacaccgctacatttaagcatcatctgcgacaaataattcagcagatgacttttggtccaagtaggtggggacttgaggacgaggagacctctagcggcctgaagatgactggggtggactgcgtagagggaatggcctctggtctgtaccaggaactcttcgccgctgttgtctccctgattaaccgcagcttctcgagtcaccatctgtccatggcatccattatggtagttgactcgcctgggttccagaatcctagacaccaggggaaagacagagccgcaacatttgaagaattgtgtcacaactacgcccatgagcggctccagctgttattttatcaaagaacattcgtgagtactttgcagcgctaccaggaggagggtgtgcctgtgcagttcgacttgcctgatccaagccccggcaccactgtggcggttgtggaccaaaatccgtcacaggttagactgcccgctggcgggggtgcacaggacgcccgagggctgttctgggtgcttgacgaagaggttcacgtggagggctcatctgactctgttgtccttgaaaggttgtgtgcggcgtttgagaagaagggggcgggcacagaaggcagctccgcgctgcgtacctgtgaacagccgctgcaatgcgaaatcttccatcagctggggtgggacccggtgaggtacgatttaacgggctggctgcacagagcaaagccaaacctcagcgcactggacgcacctcaggtcctccatcagtctaagcgcgaggagcttagatctctgttccaggcaagagccaaactcccccctgtctgccgggcggtggctgggcttgaggggaccagtcagcaggccctccagaggagtagaatggtaagaagaactttcgcctcatccctggccgctgttcggaggaaagccccctgttcccagatcaaactgcagatggatgccttaacatccatgatcaaacggtcaagactccacttcatacattgcctagtgccgaatcccgtggttgaaagccgaagcggccaagagagcccaccaccgccccagcctggacgcgataaacctggagccggcggccctctggcccttgatattccagcccttcgcgtgcaactcgctggctttcacatactggaggctttacggctgcacagaactggctacgccgaccatatggggctcacccgtttcagacggcagttccaagtgttggatgcaccattgcttaagaagttaatgtcaaccagcgaggggatcgacgagcgtaaagcagtcgaagaactgctggagacccttgatctcgaaaaaaaagccgtggccgtaggacacagccaagtgtttctgaaggccggagtgatatccagactagagaagcagcgcgagaaactcgtaagtcaatctatcgttctcttccaggcagcctgcaagggattcctcagtcgtcaggagtttaagaaactgaagattaggagactggccgctcaatgcatacagaaaaatgtcgccgtatttctggctgtgaaggactggccttggtggcagcttctgggctctctccagcctctgctgtcagcaactatcggaactgagcaactccgcgccaaagaggaagagcttactaccttgagacgaaaactggagaagtctgagaagctgaggaacgagctgaggcagaacactgatctgttggagagcaaaatagccgacctgacatctgacttggcggacgagcggtttaagggggacgtggcttgccaggtcttggagtcggaaagagcagagcgcctccaggcattccgagaggtacaggagctgaaatccaagcacgagcaagttcagaagaaacttggcgatgtgaataaacagctggaggaagcccaacagaaaatccaactgaacgatctggagagaaaccccacaggcggcgcagatgaatggcagatgcgttttgactgtgcccaaatggaaaacgaatttctgcgcaaacgtctccagcagtgcgaggagcgcctggactctgaactgactgcgcgtaaggagctggagcaaaagctgggggaactacagtccgcctacgatggagcaaagaaaatggctcatcagctcaagagaaagtgccaccacctgacctgtgacctggaagacacttgtgtgttgctcgagaaccagcagagccgcaaccacgagctggagaaaaagcagaaaaaatttgaccttcaactggcacaggcacttggagaaagcgtgttcgagaaaggccttagagaaaaagtgacgcaggaaaacacttccgtacgatgggaactgggacagcttcaacagcagctgaagcagaaggagcaagaagcatcccagctgaagcaacaggtcgagatgctacaagatcataagcgggaactcctggggtccccatctctgggggaaaattgcgtggccggtctgaaagaacgactctggaagctggaaagttctgcattagagcagcaaaagattcagagccagcaggagaacacaattaaacagcttgagcaattgagacaacgcttcgagcttgagattgaacgaatgaagcagatgcaccagaaagacagggaggatcaagaagaagaactggaggacgttagacagagctgtcagaaacggctgcaccagctggagatgcagttagagcaagaatatgaggaaaaacagatggtgcttcacgaaaagcaagacctggaggggctgatcggtacactctgcgaccagatagggcaccgggattttgacgtggaaaagcggctcaggcgggatctgcggcggacacatgctcttctctctgatgtgcaacttctgttgggaacaatggaggacggtaagacctctgtaagcaaagaggagctcgaaaaagtgcatagccagctggagcagtctgaggctaaatgcgaggaggcgcttaaaacacagaaggtattgacagccgatctggagtcgatgcattcagagctcgagaatatgacacgcaacaagtccttggtggatgagcagctgtatcgccttcaattcgaaaaggctgatctgttgaaacggattgacgaggatcaagacgatctcaacgaactgatgcaaaagcataaggatcttatcgctcagagcgccgcagacatcggccagatacaagagctgcaactccagttggaggaggcgaaaaaagaaaagcacaagctacaagagcaacttcaggtagcacagatgaggattgagtatttggaacagtcaacagtggatagagccattgtctctcggcaggaggcagtgatctgcgacctcgagaacaagacggaatttcagaaagtgcaaatcaagcggtttgaggtgcttgtgatccggctccgcgactccctcattaagatgggcgaggaattgagccaggcagccacatcagaatcccaacagcgtgagagcagccagtactaccagcgtagactcgaagagttgaaggcagacatggaggaattggtacaacgcgaagccgaagctagcaggcgatgcatggagctcgagaagtatgtggaagaactcgccgccgtacgccaaaccctgcagactgacctggagactagcatccgccgtattgctgacctacaggccgctctggaggaagtggcatccagtgacagcgacactgaaagcgtgcagacagcagtggattgcggttccagcggcagaaaagagatggataatgtgagtatcctatcttctcagcccgaggggtctctgcagtcctggctcagctgcaccctgagtttagccacagacacaatgaggaccccctcccggcagtctgccacctccagcagaatcttgagtccccgtattaatgaggaagcgggagacaccgagcggactcaaagcgccttggccctgagtagagctcgctctaccaacgtgcacagcaagaccagcggtgacaagccagtttctccccattttgtgcggcgtcagaagtattgtcatttcggggatggcgaagtgctagccgtgcagagaaagtctactgagcgactggagccagccagcagtcctttagctagtaggtccacaaacactagccctctctctcgcgaaaaacttccatccccttccgcggcgttgagcgaatttgtcgagggcttaaggaggaaacgagcacagaggggacagggatctacactcggattagaagactggccaactctcccaatttaccagaccacaggtgcctcaaccctgcgacggggaagagctgggagcgacgagggcaacctgtctctgcgagtgggagcaaagtcacccttagaaattgaaggagctgctggaggactgcttcgtagcacatctctaaaatgtatatctagtgacggggtgggcgggacgaccctgctaccagagaagagcaagacacagttttctagctgtgaaagtctgcttgaatcccgcccaagcatgggtagaaagctatcatctcctaccacacccagggacatgctattgtctcccactttgcgaccccgcagacgctgcctcgagtcaagcgtcgatgatgccggctgtcccgatcttgggaaagagccgctggtgtttcaaaatagacagttcgcccacctcatggaggaacccctcggctccgacccgttctcctggaagctgccttcacttgattacgagcggaaaacaaaggtagactttgacgactttctcccagcaataagaaaacctcagaccccgacaagtttggccggatcagcgaagggcggccaagatggctcccagagatcctccattcatttcgaaacagaggaggcgaaccgaagctttttatctgggatcaaaacaatcctgaaaaaaagcccagaacccaaagaggatccggctcacttgtccgactcatcgtcttcttctggttctattgttagtttcaaatccgcggattcaattaagagccgccccgggatccccagattggcaggcgatggcggcgagcgtacatcacctgaacgcagggaacctgggaccggacgtaaggatgatgatgtcgctagcatcatgaagaagtatttacagaagtag

SEQ ID NO: 196288 - DNA, 603 bp, synthetic construct
  misc_feature 1..603: note = Description of Artificial Sequence: Synthetic coding sequence
  source 1..603: mol_type = other DNA
atgggcaacagcaagagcggcgccctgagcaaggagatcctggaggagctacaactgaacaccaagttttcagaagaagagttgtgctcctggtaccagagcttcctgaaggattgtcctaccggccgcatcactcagcaacagttccagtctatctatgccaagtttttccctgacacggaccctaaggcctacgcccaacacgtatttagatctttcgacagtaaccttgatgggactttggactttaaagagtacgttatcgcgttgcacatgactacggccggcaaaactaatcagaaactggagtgggcctttagtctgtacgacgtagatgggaatgggacgatctctaagaatgaggtgttagagatcgtgatggctatctttaagatgataacccccgaagatgtgaagctgttgcccgacgatgagaacacccccgagaaacgggcagagaagatctggaagtattttggcaaaaatgatgacgataagctgaccgagaaagagttcatcgaaggaactctcgccaacaaagagatactccggcttatccagttcgaaccacaaaaagtcaaggagaaaatgaagaacgcgtag

SEQ ID NO: 196289 - DNA, 1884 bp, synthetic construct
  misc_feature 1..1884: note = Description of Artificial Sequence: Synthetic coding sequence
  source 1..1884: mol_type = other DNA
atgagcagcgacagcgagatggccatcttcggcgaggccgccccctttttaagaaagtcagaaagggagaggattgaggcccagaataaacccttcgatgcaaagacaagcgtgtttgtggtggatcctaaggagtcattcgtcaaagccactgtccagtctcgcgagggtggcaaagtgactgcaaagaccgaggctggcgcgactgtgacagtgaaggacgatcaggtgttccctatgaatcccccgaagtacgataagatcgaagatatggccatgatgacacatttgcacgaacccgctgtgttgtataacctcaaggagcggtatgccgcctggatgatctatacgtacagcgggctgttctgtgtgaccgtgaatccttataagtggctgcccgtgtataacgccgaggttgttaccgcatatcgcggcaaaaaacggcaggaagctcctccccacatattctctatcagcgacaacgcctatcagtttatgcttaccgaccgcgagaatcagtccatcctgatcaccggcgagagtggggcaggaaaaactgtcaatactaaaagggtgattcagtattttgcaacaatcgcggtcaccggcgaaaaaaaaaaggaggaggtcacctctggcaaaatgcagggcactctggaggaccagattatcagcgccaatcccctgctagaagctttcggaaacgcgaaaactgtgcggaacgataattcgtcccgattcggaaagtttattcgcattcactttggaactacgggaaagctggcctcagccgacatcgaaacctatttgcttgaaaaatcacgcgtgaccttccaattgaaagccgagcggtcatatcatatcttctatcagatcatgagcaacaaaaaacctgatctcatcgagatgttgcttatcacaactaatccctatgattacgcattcgtcagccagggagagatcacggtcccatctatagatgaccaggaggagcttatggccactgattctgccattgaaattttgggattcaccagcgacgaaagagtgtccatatataaactgaccggcgctgttatgcattacggtaatatgaagtttaaacagaagcagagagaagagcaggccgagccggatggcacagaagtggcggacaaagcggcttatctccagaacctcaatagcgccgatttgctgaaggcgttatgttacccgcgtgtcaaggtgggaaatgaatatgtgaccaaaggccagactgtgcaacaggtctacaacgccgtcggagccctggccaaagcagtgtatgataaaatgtttctatggatggtgactcggatcaaccagcagcttgataccaagcagccacgcgccaacagtgaggttgcgcagtggcggaccaaatacgagactgacgcgatccagcggacagaggagctggaggaggcaaaaaagaagcttgcccaaaggctccaagatgctgaagaacacgtggaggctgtcaatgccaagtgcgcatcactggagaagactaagcagaggctgcagaacgaagtggaagatctgatgatcgacgtggagcgcacgaacgccgcctgtgccgccctcgataaaaaacagcgcaactttgacaaaattctggcagagtggaagcaaaaatgtgaagagacccatgcggagctggaagcctcccagaaagagagcaggtctctgtcaactgaacttttcaaaatcaagaacgcgtatgaggagagcctggatcaactggagaccctgaaaagagaaaacaagaacttacagcaagagataagtgacttaaccgaacagatcgctgaggggggaaagagaatccacgaactggagaaaatcaagaagcaggtggagtag

SEQ ID NO: 196290 - DNA, 5919 bp, synthetic construct
  misc_feature 1..5919: note = Description of Artificial Sequence: Synthetic coding sequence
  source 1..5919: mol_type = other DNA
atggcccagaagggccagctgagcgacgacgagaagttcctgttcgtcgataagaatttcataaactcacccgttgcccaggcagattgggccgccaaacgtcttgtctgggtaccctccgaaaaacagggtttcgaggccgccagtattaaggaggagaaaggggacgaagtggtggtagagctggtggaaaatgggaagaaggtaacagtgggcaaggacgatatccagaagatgaatcctcccaaattctccaaggtggaggacatggccgaactcacgtgtctgaacgaagcaagcgttcttcataatctcagggaacggtatttttccgggctcatctatacctactcgggactattctgcgtggtggttaacccttacaagcacctgcccatctactctgagaaaatcgtcgacatgtacaaaggcaaaaaacgccacgagatgcctccccacatttatgccatcgcagacactgcctatcgctctatgctacaggatcgggaggatcagtcaatactgtgcaccggcgagagcggtgcgggtaagactgaaaatacaaagaaagtgattcagtatctggcagttgtcgcatcttcccacaaagggaaaaaagacacctctatcaccggggaacttgaaaaacagctccttcaggcaaatcctattctggaagctttcggtaacgcgaaaacagtgaaaaacgacaatagctcacgtttcggaaaatttattcggataaactttgatgtgacggggtacatcgtcggcgccaatatcgaaacgtatctcctggaaaaatcccgggcaattcgccaagcccgggatgagcgtactttccatattttttattacatgattgcgggagctaaggagaaaatgaggtccgatctgctgttagaggggttcaacaactacacattcctttcaaacggatttgttccaatccctgccgcccaggatgacgaaatgttccaagaaacagtggaggcgatggccattatgggattttctgaggaggaacagctgagcattctcaaagtcgtgtcgtcggtgctgcagctggggaatattgtgtttaagaaggagcgcaataccgaccaagctagcatgcctgacaacaccgccgctcagaaagtgtgccatctgatgggaatcaatgtgacggacttcacccgttctatcctcactcctcgcattaaggtgggccgggacgttgtgcagaaggcccagacgaaggagcaggctgattttgcggtggaggccttggccaaggctacctatgaaagactgtttagatggatcttgacacgcgttaataaggccctggacaagacacacaggcaaggagctagcttcctgggtatcctggatattgccggcttcgagatattcgaagtgaatagctttgagcaactctgcatcaattacaccaatgagaagctgcagcaactattcaatcataccatgttcatccttgaacaggaagaataccagagagaagggatcgagtggaatttcatagacttcggtctggacctgcagccttgtattgaattaatcgaacgacctaacaacccgccaggagtcctggcccttctcgatgaggagtgctggttcccaaaagcgactgataaaagttttgtagagaagctgtgcactgagcagggttcccatcctaagttccagaagccaaagcagcttaaagacaagaccgaattctcaatcattcattatgctggaaaggtagattacaatgcgtccgcctggttgaccaagaacatggatcctcttaacgacaacgttacatctctgcttaacgcatcatccgataaatttgtcgctgatctgtggaaagatgtggatcgcattgtgggactggaccagatggcaaaaatgaccgagtccagcctgccgtctgcttccaagaccaagaagggtatgttccgaacggtgggacagctgtataaggagcagctcggaaaactgatgacgaccctgcgtaacaccacaccaaactttgtgcgatgtattatcccaaatcatgagaaaaggtccggcaagcttgatgcctttctcgtcctggaacaactacgctgtaacggagtcctggagggcattcgcatctgtaggcaagggttccccaacagaatagtctttcaggagttccgccagaggtacgaaatccttgccgccaatgctatccctaagggtttcatggacgggaagcaagcctgcatactgatgatcaaagcattggagctcgaccccaatctttacagaattggccagtcgaaaatctttttcagaacaggcgtcctggcacacctagaggaagaacgagacctcaagatcactgatgttataatggcattccaggcaatgtgtcggggctacttggcccgaaaagcattcgccaaacgtcagcaacagctgactgccatgaaagtgatccagaggaattgtgctgcttaccttaaactgagaaactggcagtggtggcgcctctttactaaggtcaagccgctcctacaagtgacaaggcaggaggaggagatgcaggccaaggaggacgaattgcaaaaaactaaggaacgccagcaaaaagccgagaatgagttaaaggaactggagcaaaagcattctcagctaacagaggagaagaacctgctgcaggagcaactgcaggctgaaacggaactgtatgctgaggcagaagagatgagggtgagactggcagcaaaaaagcaggagcttgaggagatcctgcacgagatggaggcacgtctcgaagaagaggaggacagaggccagcaactccaggccgaaagaaagaagatggcgcagcagatgctggacttagaagaacagctcgaggaggaagaggctgcgcgacagaagctgcagttggagaaggtcaccgccgaggccaagatcaagaagctggaggatgaaattctagtcatggatgatcaaaataacaaactgagcaaggagcgtaaactgctggaagagcgcatctcagacctgacaacgaacctggctgaggaggaagagaaggcaaaaaatttgaccaagctgaagaataagcacgagagtatgatttcagaacttgaggtgagactaaagaaggaagaaaagagtcgccaggagctcgaaaaactgaagagaaagctcgagggggatgcatcagactttcatgagcaaatcgccgacctacaggcccaaatcgccgaacttaagatgcagttggccaagaaagaagaggaactccaggccgccctggcacgcctggacgacgaaatcgcgcagaaaaataacgctcttaagaagattagggaactggaaggtcatatctctgacctccaagaggacctcgacagcgaaagagctgcacgtaacaaagccgaaaaacagaagcgggacctgggggaagagctggaagccctcaaaaccgagctcgaggataccctcgactcaacagccacacagcaggagctaagagccaaaagggagcaggaagtgacggtactgaaaaaggccctggatgaagagacgcgatctcacgaggcacaggtccaggagatgcgccaaaagcatgcacaggcggttgaggagctgaccgagcagctggagcaattcaaacgcgcaaaggcaaacctggacaagaacaagcagaccctggagaaggagaatgctgacctggccggggagctcagagtcttgggacaagccaaacaggaggttgagcacaagaaaaagaagcttgaggcacaagtgcaggagctgcagtctaaatgttctgacggtgaaagggcaagggctgagcttaacgacaaggtgcacaagctccagaatgaggtggaatctgttactggcatgctaaatgaggccgagggcaaggcaatcaagttggctaaggacgtggcaagccttagctcccaactgcaggacacgcaggaattgttacaggaggaaacccggcagaagttaaacgtgtcaaccaagctccggcagctggaggaagagaggaactctctccaggatcagttggatgaggagatggaagccaagcagaacttggaacgccatatctctacgctgaacatacagctgtccgacagcaagaagaagttgcaggacttcgcaagtacggtggaggccctggaggaaggcaagaaacggttccagaaggagatcgagaatcttacccaacagtacgaggaaaaagctgcagcctacgacaaactggagaaaacgaagaacagactccagcaggaacttgacgacctggtagtcgacctcgataatcagcgacaattagtttcgaacttagagaaaaagcaaagaaaattcgaccagttgctggcggaggagaaaaatatttcaagcaaatacgcagacgagcgggatagagcagaggcggaggcgcgggagaaagaaacaaaggcattgagtctagctagagcgctcgaggaagcactggaggctaaagaggagctcgagaggaccaataagatgctcaaagcggaaatggaggatcttgtctcgtccaaggacgatgtcggcaagaacgtgcacgagctggagaaaagcaagagggctctggagacccagatggaggagatgaagacccagctggaagagctcgaagatgaactgcaagcaactgaggatgccaaactcaggctcgaagttaacatgcaggcactgaaaggacaatttgaaagagatctccaagcacgcgatgaacagaacgaggagaagcggcggcaactccagagacagctccatgagtatgagacagagcttgaagacgaacgaaagcagcgcgcactcgctgcagctgctaagaaaaaactggaaggtgaccttaaggatcttgagctgcaggccgactcagcaatcaaaggaagagaggaggccattaaacagctaaggaagcttcaggctcagatgaaggacttccagagagaactcgaggacgcgcgcgcgtcacgtgatgagatcttcgccacggcaaaagagaacgagaaaaaagccaaatctttagaggcagatcttatgcaactgcaggaggaccttgctgctgctgaacgggcccgcaaacaagcagatctggaaaaggaagagcttgcagaggagctggcaagttcccttagcggtcgcaacgcgcttcaggacgaaaaaagaaggctggaagcacgaatcgcccaactggaggaagagcttgaggaggaacagggcaacatggaggctatgtctgatagggttaggaaggcgacacagcaggccgagcagctcagcaacgagctggctactgagaggagcactgcccagaaaaatgagagcgcccggcagcaactggaacgccagaataaggagcttcggagcaaattacacgaaatggagggagcggtgaaatctaaattcaaaagcaccattgctgccctggaagccaaaatagcacagcttgaggaacaggtggagcaggaagcccgtgaaaaacaggctgctacaaaaagtctcaagcagaaggataagaaattgaaagagatcctgctgcaggtagaagacgagcgaaagatggccgaacaatacaaagaacaggccgaaaaggggaacgcccgggtcaaacaactgaagaggcaactggaggaggctgaagaagaatcccaacgaattaatgccaaccgccggaagttgcagagagagcttgacgaagcaacagagtccaacgaggccatgggacgcgaggtgaatgctctaaagtccaaattacgtcgaggcaacgagactagttttgtaccatcgcgtaggagcggagggcgcagggttattgaaaatgcagacgggagcgaagaggagaccgacacacgcgatgctgacttcaatggtacaaaggcgtcggagtag

SEQ ID NO: 196291 - DNA, 5817 bp, synthetic construct
  misc_feature 1..5817: note = Description of Artificial Sequence: Synthetic coding sequence
  source 1..5817: mol_type = other DNA
atggcccagaagggccagctgagcgacgacgagaagttcctgttcgtggataaaaacttcatcaatagtcccgtggcccaggccgattgggcagccaagaggctggtgtgggtgccgtccgagaaacagggttttgaagcagcttcaatcaaggaagaaaaaggcgacgaagtggtggtcgaactcgttgaaaatggcaagaaagtgacagtgggaaaagatgacatccagaagatgaatcccccgaagttcagcaaggtggaagacatggcagagcttacatgtctcaacgaggcctccgtgctccacaaccttcgtgagcgctacttctcgggactcatttatacttacagcggtctgttttgcgtggtggtcaatccctacaaacacctgccgatctattctgaaaagatagtggacatgtataagggcaaaaaacggcacgagatgcctccccatatttatgccatcgctgataccgcttaccgatctatgcttcaagaccgagaagatcagtctatcctgtgcacaggagagagtggagccggaaagacggaaaatactaaaaaagtcattcaataccttgcagttgtcgccagttcacacaagggaaagaaggatacatccattactggtgaactggagaaacagctcttgcaagccaatcctatacttgaagcttttggcaacgccaaaaccgtcaagaacgataattcttcacgcttcgggaaattcatccggatcaacttcgatgtaactggttacattgttggcgccaacattgaaacgtacctcctggaaaaaagccgagctattaggcaggctcgcgatgagagaaccttccatatcttctactacatgatcgccggcgccaaggagaagatgaggtccgatcttttgcttgaaggatttaataattacaccttcctctctaacggttttgtgcccattcctgccgcccaggatgatgaaatgttccaggaaacagtggaagccatggccattatgggctttagtgaagaagagcagctctctatcctcaaggttgtgagcagcgtgctccagctggggaatattgtttttaagaaggagcggaataccgaccaggcttcaatgcccgacaatacagcggcacagaaagtgtgccacttgatgggtattaatgtaacagatttcaccagatctatccttacaccacggataaaggtggggagggacgtcgtgcagaaggcgcagactaaggagcaggcagatttcgccgtagaagctctggccaaggccacgtacgagaggctgtttaggtggattctcacgagggtgaacaaagctcttgataaaacacacagacaaggcgcctcattcctgggaatactggatatagccggattcgaaatctttgaagttaacagcttcgaacagctgtgcattaattacacgaacgagaagttgcaacagctatttaatcatacaatgttcattctggagcaggaggagtatcagagggagggcatcgagtggaacttcatcgatttcgggcttgatcttcaaccatgtatcgagctcatagagagacccaacaaccccccaggggtgttggctcttttagacgaggaatgttggttcccgaaggcaactgacaagagctttgtggagaaactctgcacggagcagggctctcatccgaagttccaaaaacccaaacagttgaaggacaagactgaattctccatcattcattatgctggcaaggttgattataatgcgtctgcttggttgacaaagaacatggatccgctgaatgacaacgtaactagcctgctcaatgcgtcgtcagataagtttgtagccgacttgtggaaggacgtggaccgcattgtcggtctggaccagatggcaaaaatgacggaatcatcgttgccctctgccagcaaaactaagaaagggatgttcagaaccgtgggccagctttataaagaacagcttggaaagctgatgacaacactacgaaataccacccctaactttgtgagatgtatcatacccaaccacgagaagcgttcaggcaagctcgacgccttcttggtgcttgagcaacttcggtgtaatggtgttttggagggaataagaatttgccgacaaggctttcctaatcggatcgtgttccaggaattccgccagagatacgaaatcctggccgccaacgcgattcccaagggatttatggacggcaaacaagcttgtattcttatgattaaggccttagagctggatcctaacctttatcgcattgggcaaagtaagatattcttcagaactggggtgctggctcatttagaagaagagagggatcttaagatcactgacgtcatcatggcgtttcaagcaatgtgtagaggctatctggcgagaaaggcattcgccaaaaggcagcaacagctgaccgctatgaaggttatacagcgtaactgcgccgcctacttgaagctccgtaattggcaatggtggaggctctttactaaggtcaagccattactacaggtcacacggcaggaagaggaaatgcaggcaaaggaagatgagctccaaaagaccaaggagcggcagcaaaaagccgagaatgagctcaaggagctggagcagaagcacagccagcttacagaagaaaagaacctccttcaggagcagctgcaggctgagactgaattatatgcagaagctgaggagatgagagtgcgtttggcggcaaaaaaacaagaattagaagaaatactgcatgagatggaagcccgactggaagaggaggaagaccggggacagcagctgcaggccgagcggaagaaaatggcgcagcagatgctcgacctggaggagcagctggaagaggaggaagccgcacgtcagaaactgcagcttgagaaagtcacagcggaagccaaaattaagaaactggaagacgaaatattggtgatggacgaccagaataataaattatccaaagaaagaaagctacttgaagagcgtatttcagacctcacaaccaatctggctgaggaagaggaaaaagcaaaaaacttgacaaaactgaaaaataagcacgagagcatgatcagtgaattggaagtgcgtttgaagaaggaagaaaagtcaagacaagagctcgagaagctcaagcggaagcttgagggagatgcctctgatttccatgaacagatcgccgatctgcaagcacagattgctgaactcaaaatgcaactggccaagaaagaggaagagctgcaggccgccctcgccagactcgatgacgaaattgcccagaaaaacaacgcgctaaagaaaattagggaactggaggggcacatttccgacttacaggaagatctggatagtgagcgcgcggctcgtaataaagcagagaaacaaaagagggacctgggggaagagctggaggccctgaagaccgagttggaggataccctcgacagcacagctactcagcaggagttgcgcgccaaacgcgagcaggaagtgacagtcctaaaaaaagccctggacgaggaaacccgaagccatgaggcccaggttcaagagatgcgacagaagcatgctcaagcagtggaagagttgaccgagcagttagagcagttcaaaagagcgaaggccaacttagataagaacaagcagactctggaaaaggagaacgccgatctggccggagagcttagagtgctcggccaggccaagcaggaagttgaacacaagaaaaagaaactagaagctcaagtgcaggaattacagtctaagtgctctgatggtgagcgcgcgcgtgccgagctaaatgataaggtccacaagctgcagaatgaagtggagtccgtgacgggaatgcttaacgaggctgaaggcaaagctatcaaacttgccaaggatgtggcctcactgtcatcccagttgcaggatacgcaggaactgctgcaagaggagacccggcagaagctgaacgtgtctactaagttgagacagttagaggaggagcgaaattcactgcaagaccagcttgatgaggagatggaggctaagcagaacctggagaggcatatctccactttgaatatccaactaagcgattccaaaaagaagctgcaggactttgcctctacggttgaggccttggaagaaggcaagaagcggtttcagaaggaaatcgagaacctgactcagcagtatgaagagaaagccgctgcttatgataagctggagaagacgaagaatagactgcagcaggaacttgatgatctcgtggttgatctggataatcagaggcagttagtgagtaacctggagaagaagcaacggaaatttgatcagttgctggctgaggagaaaaatatttcttctaaatatgcggacgagagggaccgcgctgaagcagaagctagagagaaggagacaaaagctctatcattagcccgggcattagaagaggcactggaggccaaggaggaactcgagcgcaccaataaaatgctaaaggccgaaatggaggacctggtctccagtaaggacgatgtaggcaaaaacgtccatgaacttgaaaagagtaagcgtgccctcgaaacgcaaatggaagaaatgaagactcagcttgaggaacttgaagacgagcttcaggccacagaggacgccaagctgagacttgaggtgaatatgcaggccctcaaaggccagttcgaacgagacttacaagcacgagacgagcagaatgaagagaagagacggcagctgcaaagacagcttcatgaatatgagacggagctcgaggacgagcgtaagcagcgggctctagcagccgccgctaaaaagaagcttgaaggagatctgaaagatctggagctgcaggctgacagcgctataaaggggagggaagaggctatcaaacagcttaggaaattacaggctcagatgaaggatttccagcgggagttggaagatgctcgagcttcacgggacgagatattcgctacagcaaaggaaaatgaaaaaaaagcaaagtctctggaggcagacctcatgcagcttcaagaggatctcgccgccgctgaacgagctagaaagcaggcggatctggagaaagaagagctggctgaagaactggcgagtagtctatccggaaggaacgccctgcaggatgaaaaacggcgtctggaagcgcggatagcccagctggaagaggaactggaggaagagcaggggaatatggaagcgatgagtgatagggtacgcaaagcgactcaacaagctgagcagttaagtaacgagttggccaccgaacggtcaactgctcagaaaaacgagagcgcgcgtcagcagctcgagaggcagaacaaggaattgcggtctaaacttcacgaaatggagggagccgtgaaatcaaaattcaaatcaacaatcgcggcactagaggcaaaaatcgcgcagctcgaggaacaagtggaacaggaagcaagagagaagcaggcagccacgaagtccctgaaacagaaggacaaaaagcttaaagagattcttctgcaggtggaggacgagcgaaaaatggccgaacaatacaaggaacaggccgaaaaaggcaatgcccgtgttaagcagcttaagaggcagcttgaggaggcagaggaggaatcacaaagaattaacgctaacagacgcaaactccagagggaattggacgaggcgaccgaatcaaacgaagctatggggcgcgaggtgaacgctctaaaatccaaattacgtggtccgccgccccaggagacaagtcaatag

SEQ ID NO: 196292 - DNA, 6090 bp, synthetic construct
  misc_feature 1..6090: note = Description of Artificial Sequence: Synthetic coding sequence
  source 1..6090: mol_type = other DNA
atggcccagaagggccagctgagcgacgacgagaagttcctgttcgttgacaagaattttataaacagcccggtggctcaggctgactgggccgcaaagcgtctcgtatgggttcccagtgagaaacaagggttcgaagctgcctctattaaggaggaaaagggggacgaagtcgtggtggaactggtagaaaacggcaagaaagtgacagtaggtaaggacgatatccagaagatgaatcctcctaagttctcaaaagtagaggacatggcggagttaacttgtctgaacgaagctagcgtactgcataatctccgcgagaggtacttctccggactcatctacacctacagtggcctgttttgcgtcgtagtgaacccgtacaaacacctgccaatttactcagagaaaatagtagacatgtataagggcaagaagaggcacgagatgcctcctcacatttatgctatagccgataccgcgtaccgctctatgctgcaggatcgcgaggatcagtcgatactgtgtacaggggaaagcggggccggaaaaactgaaaacactaaaaaggttatccagtatctcgcagtcgttgcctcatctcacaagggtaagaaagacacctccattactgagggtcctagcttctggcggggcgaattggaaaagcagctcctgcaagcaaatcccattctggaggcattcggaaatgcgaagacggtgaagaacgacaactcaagccgatttgggaaattcatcagaattaatttcgatgtcaccggctacattgtaggcgccaacattgagacgtacctgcttgaaaagtccagggcgataaggcaggctcgggatgagaggacattccatatcttttactacatgatagcaggcgcaaaggagaagatgaggtcagatttattactggaaggctttaacaactatacttttctgtctaacgggttcgtgccgattcccgccgcccaggatgacgaaatgttccaggaaactgtcgaagccatggcaatcatgggtttctcagaagaagaacaattgagcatcctgaaggtcgtttcctctgtgttgcaactggggaacatagtgtttaaaaaggaacggaacacagatcaggctagcatgccagacaataccgccgcgcagaaggtctgtcatctgatgggaattaacgtgacagactttactagatctattcttactccgcggattaaagtgggaagggacgtggtgcagaaggcccagacaaaggagcaggcagacttcgccgttgaggccctggctaaggccacgtatgagagactttttcggtggatcctcacccgtgtgaacaaagcactggataagacccatagacaaggcgcctccttcttggggattctcgatatcgctgggttcgagatctttgaggtaaactcctttgagcagctatgtattaattatacaaacgagaagttgcagcagttgttcaaccacacgatgtttatcctagagcaagaggagtaccagagagaggggattgagtggaacttcatcgatttcggcttggacctgcagccatgcattgaactgatcgagagaccaaataacccacctggtgtgctcgccctgctggatgaggaatgctggttccccaaggctacagataaatcattcgtggagaagctgtgtacggagcagggctctcaccccaaatttcagaaacccaagcaacttaaggataagacagagttctctatcattcactacgccggcaaggtggattacaacgctagcgcatggctcacgaaaaatatggatcccttaaacgacaatgtgacctccctgttgaacgctagcagcgacaaatttgtagccgacctgtggaaggacgtagatcggattgtgggtcttgatcagatggctaagatgaccgaaagcagcctgcctagcgcctcaaagaccaagaaaggcatgtttcgaactgttggccaactttacaaagaacaactcggcaagctaatgacaacacttcgtaacactaccccaaattttgttagatgtattatcccgaatcacgaaaaacgatctgggaagctagacgctttcttggtattagagcagcttaggtgcaacggagtcctcgagggaatccgcatctgcaggcaagggttccctaatcgcattgtatttcaggaatttaggcagcggtatgagatactggcagctaatgccattcctaaggggttcatggacggcaagcaggcttgcatcctaatgattaaggccctggagcttgacccgaacctctatagaataggacagagtaagatatttttccggaccggtgtgctggctcacctcgaggaagagcgagacctcaaaattaccgatgtgatcatggcttttcaagctatgtgcagggggtacctggctcgcaaggcctttgcaaagcgccaacagcaactgaccgctatgaaagttattcaacgcaattgcgccgcctacttgaagctgaggaattggcaatggtggaggctctttacgaaggtaaaacccctgctccaagtcactagacaagaagaagagatgcaggctaaggaagatgaacttcagaaaacaaaagaaaggcaacagaaggccgaaaacgagctgaaggagctggagcagaaacatagccagctgactgaagaaaagaacttgctgcaagaacaactgcaggctgaaacagaactgtatgctgaggctgaagagatgcgggtgcgcctagcagccaaaaaacaagagctcgaggaaatactgcatgagatggaggcccgcctcgaagaggaagaagaccgtggacagcagttgcaagccgaacggaagaagatggctcagcagatgcttgatctagaagaacagctggaggaagaggaggccgctcgccaaaagttacagctggagaaggtcacggccgaggccaaaatcaagaaactggaggacgagatcctcgttatggacgaccagaacaataagctgtccaaagaaaggaaactgttggaggagcgcatcagcgatctgaccaccaacctggccgaggaggaagagaaagctaaaaacctcacaaaactgaaaaataagcacgagagcatgatcagcgaactggaagtaaggctgaagaaggaagaaaagagtaggcaggaattagaaaaactcaaaagaaagctggaaggtgacgcctcagactttcatgagcagattgctgacttacaagctcagatcgctgagctgaagatgcaactggccaagaaggaggaggagcttcaggccgctctagcccggctggacgacgaaatagcacaaaagaataatgctttgaagaaaattcgcgaactggagggccacattagcgatcttcaggaggacctcgattctgaacgggccgcaaggaacaaagccgagaagcaaaaaagagatctgggcgaggagctcgaagcccttaagaccgagctggaggacaccctcgactccacagctactcagcaggagctccgggcaaagagagagcaggaggttacagtactgaaaaaggcactggacgaggagaccaggtctcatgaggcacaggtgcaagagatgcgccagaagcatgcacaagcagtcgaggaactgacagagcagttggaacagtttaaacgcgccaaggctaacttagacaagaacaagcagactctcgagaaggaaaatgcagaccttgccggcgaacttagggtgttggggcaggccaaacaggaagtagaacacaagaaaaagaagcttgaggctcaagtgcaggagctccagagcaagtgctccgacggtgaaagggctcgcgccgagcttaatgataaggtgcataagctccagaacgaggtagagtctgtgactggaatgttgaacgaggctgaaggaaaggcaatcaagctcgcaaaggatgtggcaagcttaagcagtcagttgcaggatacccaggagctgttgcaggaggagacgcggcagaagctgaacgtgtccactaagctgaggcagctggaggaggaaagaaattccttgcaagatcagctggacgaagaaatggaagccaagcagaatttagaacgccacatctccacccttaatatccagctgtctgattccaaaaagaaactgcaggactttgcctccacagtggaagccttggaggaagggaaaaaaagatttcagaaggagattgaaaacctcacgcagcaatatgaagaaaaggctgccgcgtatgacaaactggagaaaaccaagaaccggctgcagcaggaactcgatgacctggtagtcgatttagataaccagcggcagttggtttcaaaccttgaaaaaaagcagcgtaagttcgatcaactgctcgcggaagagaaaaatatctcctctaagtacgctgatgagcgggaccgagccgaggcggaggcgagggagaaagagaccaaggctctgtcgttggctcgggcgcttgaggaggcgttggaagccaaagaggagctagaacgcactaacaaaatgctaaaggctgaaatggaggacctggttagctctaaggacgacgtgggcaagaacgtgcacgaactcgagaaatcaaaaagggcattagaaacacaaatggaagaaatgaagactcaattggaggagctcgaagacgagctccaggctacggaggacgccaaattacggctggaggtcaacatgcaagccctaaagggacagttcgaaagggacctccaagcacgagatgaacagaatgaagagaagagaagacagttacaaagacagctgcatgagtacgaaactgagttggaagatgaacgaaagcaacgggcgcttgcagctgcagcaaaaaaaaagctggagggggacctgaaagatctggagttgcaggctgacagcgcaataaagggacgggaggaggccattaagcagcttcgaaagcttcaggcccagatgaaagatttccagcgggaattggaagatgcccgggcgtcacgcgatgaaatctttgccaccgctaaggagaatgagaagaaggcgaagagtttggaagccgacctgatgcagttgcaagaggacctggccgctgccgagagagcgcgcaagcaggcggacctggagaaggaagagctggcagaagagctggctagtagcctgagcggtagaaacgctctacaggacgagaagaggagactagaagcccgaatcgcacaactcgaagaagaactggaagaggagcaaggaaatatggaagcgatgtccgaccgggtaaggaaagctacacagcaggccgagcagttgtccaatgagctcgcaaccgagcggtccacggcacagaaaaacgaaagcgcaagacagcaactcgagagacagaacaaggagctcagatctaagctgcatgaaatggaaggtgccgtaaagtctaaattcaagagcacaatcgctgcactggaagccaaaattgcccagctagaggagcaagttgaacaggaagcgcgggaaaagcaggctgcaacaaaaagcttgaagcagaaggataagaaacttaaagaaatcttgctccaggtggaggatgagcgcaaaatggccgaacagtacaaggaacaggctgaaaagggcaacgcgagagtgaaacagttgaaacgccagctagaggaggcagaagaagagtcacaaaggatcaatgcaaatcgcaggaagctccagagagagctcgacgaagccacagaaagtaacgaagccatggggcgcgaagtcaacgctctgaagtcaaagttaagagggcctcctcatcggaagctccggagcgatgctccaggggaagagactcggcctctgagttttctgctcgagggactagaggacgtggagcttctgaaaatgcaaatggtgctgcggcgcaaaagaaccctggaaacacaaaccagtatggagccccgaccagtcaataagcagctgagcacagtgctgcaccatgggaagaagacaaagaatcagaacaagcagaccaaaaaaactcagcagcagccacggactaagcagaacccggctgactgtacttag

SEQ ID NO: 196293 - DNA, 5940 bp, synthetic construct
  misc_feature 1..5940: note = Description of Artificial Sequence: Synthetic coding sequence
  source 1..5940: mol_type = other DNA
atggcccagaagggccagctgagcgacgacgagaagttcctgttcgtagataagaatttcatcaacagcccagtggcacaggccgactgggcagccaagcggctcgtctgggttcctagcgagaagcagggctttgaagcagctagtatcaaggaggagaagggtgacgaggtggtggttgagctggtggaaaatgggaaaaaggtgactgtagggaaagatgacattcaaaaaatgaaccccccgaagttcagcaaagtggaagatatggcagaattgacctgtctcaatgaggccagcgtgctgcacaacctgagagagcggtatttcagcggactaatctacacttattcgggcctgttttgtgtagtcgtgaatccctacaaacacctgccaatctacagcgaaaagatcgtagacatgtataaaggaaagaagcgccacgagatgccaccccatatctacgccatcgccgacaccgcctataggagcatgcttcaagatcgtgaggaccagagtatcctttgtactggcgaaagcggcgccggaaagaccgagaacactaagaaggtcatacagtacctggccgttgtcgcctcttctcacaagggcaaaaaagacacgagtatcacacagggccccagcttcgcatacggagaactagagaaacagctcctccaggcaaaccctatcctggaagcgttcggtaacgctaaaaccgtcaagaatgacaattccagtaggtttgggaagttcattaggatcaacttcgatgtgacgggctacattgtcggtgcaaacatcgaaacttatttgctagagaaaagccgggcaatccggcaggctcgcgacgagcggacattccatattttttactatatgatcgcaggagccaaagaaaagatgagatccgacctgctgctcgaaggttttaataattacacgttcctgtctaatggattcgtcccaataccggcagcccaggatgacgagatgttccaagagacagtggaagcaatggcaatcatggggttctccgaggaggagcaactatctatactcaaagtggtatcttccgttcttcagctcggcaatatcgtgtttaaaaaagagcgaaatacggaccaggcgtctatgcccgataataccgccgcccagaaagtgtgtcacctgatgggtatcaacgttacggattttacccgtagtatcctgaccccaagaattaaggtgggtcgggacgtagtgcagaaagcccagacgaaagaacaggctgactttgccgtggaagctttggccaaagctacatacgaacggctgttccggtggatcctcacccgtgttaataaagccctggataaaacgcaccgacagggggcctcttttttgggtatcctggatatagctggcttcgaaattttcgaagtgaactcattcgaacagctttgtatcaactacaccaatgagaaactgcagcagttattcaatcataccatgtttatacttgaacaagaggagtatcagagggaaggaatagagtggaactttatagacttcggattagacctccagccctgtatcgagctgattgaaaggcctaataatccccccggcgtgctggccctcctggacgaggagtgctggtttcccaaggccaccgacaaatcatttgtggaaaaactttgtaccgaacagggaagccatcctaaattccagaagccaaagcagctgaaggataagacagagttttccataattcattatgccggcaaagttgactacaatgcttcggcatggttaaccaagaacatggatccattaaacgataacgtaacaagccttcttaacgccagttctgacaagttcgtggctgacctgtggaaggatgtagatcgcattgtggggctcgatcagatggcgaagatgactgagtcctccctgccatccgcaagcaagacgaaaaaagggatgtttcggacagttggtcagctgtataaagagcaattgggcaaattgatgactacattgaggaatacaacacctaatttcgtgaggtgcatcatcccgaaccatgaaaaacggtcgggcaaactagacgcgttcctcgttcttgaacagctgcgatgcaacggcgtgctcgaagggattcgcatttgtcggcagggctttcctaatcgtatagtttttcaggaatttcggcagcgatacgaaatcctggccgctaacgcaatcccaaaaggtttcatggacggaaagcaggcctgtatcctcatgatcaaagctttggagctagaccccaatctctacagaatcggtcaatccaaaatcttcttccgaacgggcgtgctggcccatcttgaagaggagcgagatctgaagatcaccgacgtcattatggcatttcaagccatgtgccgagggtacctagctcgcaaagccttcgcaaagaggcaacagcaactgaccgccatgaaagtgatccaacgcaactgcgctgcctacctcaaactccgaaactggcagtggtggagactgttcactaaagtgaagcccttgctccaggtgactaggcaggaagaggagatgcaggctaaagaggacgaactgcaaaagacaaaagaacggcagcaaaaagccgagaatgagctgaaggaactcgaacagaagcactctcagcttaccgaggagaagaacctgcttcaggagcaactacaggccgagaccgagttgtatgcagaggcggaggaaatgcgggtgcggttagccgccaaaaagcaggaactcgaggaaatcctccatgagatggaggctaggctcgaggaggaggaggaccggggacagcagttacaggccgagaggaagaaaatggctcaacagatgctggacctggaggagcagttggaggaggaagaggctgcgcgccagaaactccaactagagaaggtgacggcagaagctaaaatcaaaaagctggaggacgagattctagtgatggacgaccagaacaacaagctcagcaaggaaaggaagctgctagaagaacgcatctctgacctgaccaccaacctagccgaggaggaggaaaaagctaagaaccttaccaagctgaaaaacaaacacgagagcatgatttcagaactggaggtgcgcctgaaaaaagaggagaaatcccgccaggagctggagaaactcaagcggaagctggagggggacgcgtccgattttcatgagcagattgccgatctgcaggcccagatagccgaactgaaaatgcagctcgcgaagaaagaagaagaactccaggccgcgcttgcccgactggacgacgagatagctcagaagaataatgctctgaagaagattcgcgaacttgaggggcatatctctgatcttcaagaggacctggacagtgagcgtgccgctcgaaataaagccgagaagcaaaagagagatctgggcgaagagctcgaggcccttaaaactgagctggaagacacactcgacagtaccgcaacccagcaagagctgcgagctaagcgggaacaggaagtgacagtcctcaaaaaggctctggatgaggagacccgctcccacgaagctcaggtacaggagatgcgtcagaaacatgctcaggccgtggaagaactgactgagcaactcgagcagttcaagcgcgccaaggccaacctggataagaataaacagacacttgagaaagagaatgcggacctcgctggagaactgcgggtgcttgggcaggcgaaacaggaggtagaacataaaaagaaaaagttggaggcacaggtccaggagctccaaagtaaatgcagcgatggcgagagagccagggccgagttgaatgacaaagtacacaaacttcagaacgaagtcgaatccgtcaccggaatgctgaatgaggctgagggcaaagctatcaaactggctaaggacgtggcctcactgagttcccagctgcaggatactcaggagctgctgcaggaggaaactaggcagaaacttaatgttagcacaaagctcagacagttagaagaggagagaaatagcctgcaagaccagcttgacgaggaaatggaggcaaaacagaacctagaacggcatatctccacacttaatatccaacttagcgacagcaagaagaagctgcaggattttgcatccacggtggaagccttggaagagggaaagaagcgcttccagaaggaaatcgagaatctgactcagcaatacgaggaaaaagctgcggcttacgataagcttgagaagacgaagaatcgccttcaacaggagctggacgatctggtggtggacctcgataatcaacgccaactggtgagcaacctcgagaaaaaacagagaaaatttgaccagcttctggccgaggaaaaaaatattagttctaagtacgctgacgaaagagatagagccgaagctgaggccagagagaaagaaaccaaagctctgtccctggcgcgcgcactggaggaagccctggaggctaaagaggaactggaaaggacgaacaagatgctaaaagctgagatggaggatctagtgtcttccaaggacgatgtggggaagaacgttcatgagctcgagaagtctaagagagcactagagacccagatggaggagatgaaaacacaactggaggaattggaggatgagctgcaggcaactgaagatgccaaacttaggctggaagtgaatatgcaggcccttaaggggcagttcgaacgcgaccttcaagctcgggacgagcagaatgaggagaaaaggcggcagctgcaaagacagttgcacgaatacgaaacagagctggaggacgagcgtaaacaaagagcccttgcagcggcggccaagaagaagcttgagggcgatttaaaagatctggagctccaagcagatagcgccatcaagggtcgggaggaggccatcaaacaactccggaagctacaggctcaaatgaaggactttcagcgcgaattagaggatgcccgggccagcagagacgagatcttcgctacggcaaaggagaatgaaaagaaggccaagtcccttgaagccgacctaatgcagctgcaagaagatctcgctgcagccgaaagggcccgcaaacaagccgacctcgagaaggaggagctggccgaagaactcgcatcatctttgagtggcagaaatgctctgcaggatgagaaaagacgcctagaggcccgcatcgctcagctggaggaggaacttgaggaagaacaggggaacatggaagccatgagcgacagagtaagaaaggcaactcagcaggccgagcagctgtcgaacgagcttgcaaccgaacggtcaactgcacagaaaaacgagagtgcgagacaacagctagagcggcagaataaggagctccgcagtaagttgcacgaaatggagggggcagtcaagtcgaagttcaaaagcaccattgccgcattggaagcaaagattgcacagctcgaggagcaggtcgagcaggaagcccgcgagaagcaagcagcaactaagtccttaaagcagaaggataaaaaactcaaggagatcttactccaggtcgaagacgagcgaaagatggccgaacagtacaaagagcaagccgagaaaggtaatgcacgagttaaacagctgaaaaggcagctggaggaggcggaggaggaatctcaacgaatcaacgcaaatcgtagaaaactgcagagggaattggacgaagccactgaatccaacgaagcaatgggacgcgaagtcaatgcgcttaagagtaagctgcgcaggggaaacgagacttccttcgtaccttcccgtagaagtggagggcgaagggtgatagagaatgcagatggctctgaggaagaaactgatacccgcgatgccgatttcaatggaaccaaggcgagcgaatag

SEQ ID NO: 196294 - DNA, 5838 bp, synthetic construct
  misc_feature 1..5838: note = Description of Artificial Sequence: Synthetic coding sequence
  source 1..5838: mol_type = other DNA
atggcccagaagggccagctgagcgacgacgagaagttcctgttcgtggacaaaaactttattaattctcccgtcgcccaagccgactgggccgcgaaaagactggtgtgggtgccatcagaaaagcaaggttttgaagccgcttctataaaagaggagaagggagacgaagtggtggtcgaacttgttgaaaacgggaaaaaagttaccgtgggtaaggacgatatccagaagatgaatcccccgaagttttccaaggtggaggatatggccgaattaacttgtctcaatgaggcatcagttctccataatctgagagagcggtacttctctggtctgatttatacctatagcggactgttctgcgttgtcgtcaatccctataagcatctcccaatatactccgaaaagatcgtggacatgtataagggcaaaaagaggcacgagatgcctccccacatttacgccatcgcagacacagcatatcgaagcatgcttcaagatcgcgaggaccagagcattctatgtactggtgagtcaggcgcaggcaaaacggagaatacgaaaaaggtgattcaatacctcgctgtagttgcatcatcccacaagggcaaaaaggataccagcatcactcaagggccctcctttgcatacggcgagctggaaaagcagctgctccaggctaaccccatcctggaagcatttgggaacgctaaaactgtcaaaaatgataactcttctcgctttgggaaattcattcggatcaatttcgacgttactggctacatcgtaggagccaacatcgaaacttatctcctggaaaaatcaagggccatccgtcaggctagggatgagaggacctttcatatattctactatatgatcgctggagcaaaagaaaagatgcgtagcgaccttctgctcgaaggtttcaacaattacactttcttaagtaacggctttgtgcccatcccagctgcgcaggacgatgagatgtttcaagagaccgtcgaggctatggctatcatgggatttagcgaagaggaacaactgtccattctgaaagtggtgtcttcggtcctccagctgggaaatatcgtgttcaaaaaagagcgcaatacagatcaggcatcaatgccagacaacacagcagcacagaaggtgtgccacttaatgggtatcaatgtcaccgactttactcggagtatactcactcctagaatcaaggtgggccgggacgtagtccagaaagctcagaccaaggagcaggcagattttgcagttgaagcgctagcaaaagccacgtacgagcgcctgttccgctggattctaacccgggtgaataaagccctagacaagacacatcggcaaggagcatcttttttgggtatcttagacatagcaggcttcgaaatcttcgaggtgaactccttcgagcagctctgcatcaactacaccaacgagaaactgcaacagttatttaaccatacaatgttcatcttagagcaggaagagtaccagagagagggcattgaatggaacttcattgacttcggtctggatctgcaaccctgcatagaactgattgaacgacctaacaacccgcctggcgtgttagccctgctcgatgaagagtgctggttcccaaaggccacggataagagcttcgtggaaaagctgtgcacagaacaaggctcgcatcctaagtttcaaaaacctaagcagctgaaggataagaccgaattttctatcatccactacgctggtaaggtcgattacaacgcctcagcttggttgaccaaaaatatggatccattaaacgacaatgtgaccagtttattgaacgcctcctctgataagtttgtggccgacctgtggaaggatgtggatcggattgtcggcttggatcagatggcaaaaatgacagagtcatccctcccatccgcatctaagacgaagaaggggatgttcagaacggtaggccagctgtacaaggaacagcttggtaagctgatgactacgctgaggaacaccactcctaacttcgtgaggtgcattatccctaatcatgaaaaaagatccggcaagttggacgccttcctggtgctcgaacaattgcggtgtaacggggtgctcgaaggaataagaatttgtcgacagggtttccccaatagaatcgtttttcaggagttcaggcagagatatgaaatcctcgctgcaaatgccatccctaaaggatttatggatgggaagcaggcctgcatactcatgatcaaagcgctcgagctggaccccaacctgtatagaataggtcaatccaagatattctttagaaccggagtgctggcgcatctggaagaggagcgggatctaaagatcacggatgtgattatggctttccaggccatgtgtcgaggatacctcgccagaaaagccttcgcaaagagacagcagcagcttaccgccatgaaggtgatccagcggaactgcgctgcttatctaaaactgcgaaattggcaatggtggcgcttgttcaccaaagtgaagcctctcttgcaggtaacccgtcaggaggaggagatgcaggctaaggaggacgagctccagaagaccaaggaaagacagcagaaggcagaaaacgagcttaaggagctagaacagaaacacagccagctgactgaggaaaaaaacctcctccaggagcagttgcaggccgagacagaactctatgccgaagccgaagaaatgagagtaaggctggctgctaaaaaacaggaattggaagagatacttcacgagatggaagcccggctggaggaagaagaagaccggggacaacaactgcaggctgagcgcaaaaagatggctcagcaaatgttagacttggaggaacagttggaagaagaggaggctgctcgacagaagcttcaattggagaaggtgactgcagaggccaagattaagaaactcgaagacgagattctcgtcatggacgatcaaaacaataagctgtccaaagaaaggaagctgcttgaggaacgcatctctgatctgacaacaaatctggccgaagaagaagaaaaggccaagaatctaacaaagctgaaaaacaagcacgagtccatgatctctgagttagaggttcgcctgaagaaggaggaaaagtcaaggcaggagctcgaaaagctgaagcggaaactggagggagacgcgtctgattttcacgaacagatagccgacctgcaagcccaaatcgctgagctcaagatgcagttggccaagaaggaggaagagctgcaggctgcattggcacgtcttgacgacgaaattgctcagaagaacaacgccctgaaaaagattcgagaactggagggacacatatccgatctgcaggaggaccttgattcagagcgggccgcccgtaataaagccgagaagcagaaacgcgacctgggcgaggaactggaggctctgaagacagaattagaagacactctggatagcacggctacccagcaggaactgcgggccaagagagaacaggaagtgacggtgcttaaaaaagctctggatgaggagactaggtcccatgaggctcaggtgcaggagatgcgccaaaagcacgcccaggcagtagaggagctgactgagcagcttgagcagtttaaacgagccaaggccaacttggacaagaacaagcagaccctggaaaaggaaaatgcagatctcgcgggcgagctgagagtgcttggtcaagccaagcaagaggtcgaacataagaagaagaaattggaagcccaggtgcaagaactccagagtaaatgctcagatggagagcgcgcacgggctgaactaaatgataaggtacataaactgcagaatgaggtagaaagtgtcaccgggatgctcaacgaggctgagggtaaggccataaagcttgcaaaggatgtggcctctctcagctcccaattacaggatacacaggagcttctgcaagaagagacccgacagaagctgaatgtcagcaccaaactacgacaattagaggaagagcgaaactcgctacaggaccagctggacgaggaaatggaagccaagcaaaatctggaaagacatatatccacactgaatattcaactgtcagactcaaaaaaaaagctgcaagatttcgcttctaccgtcgaagctctagaggaagggaagaagcgctttcagaaagaaattgagaacttgacccaacagtatgaagaaaaggctgctgcatacgacaagctcgaaaaaactaaaaaccggctacagcaggagctggatgatctcgttgttgatctggacaaccagcggcagctggtctcaaacctggagaaaaagcagcgtaagttcgaccagctcctggcagaagagaaaaatatctcttccaaatacgccgacgaaagggaccgagccgaggccgaggcgcgcgaaaaagagactaaggctctgtcactagcccgcgcccttgaagaggccctggaggctaaagaggagctcgaacgaacaaataagatgctgaaagcggagatggaggatctggtttctagtaaagatgacgtcggcaaaaacgtgcacgagttggagaagtctaagcgcgcgctcgagactcagatggaagaaatgaagacacagctcgaagagttggaggacgagttgcaggctacagaggacgccaaactccgactggaagtaaatatgcaggctcttaaggggcagttcgagagggatctgcaagcaagagacgagcagaacgaagagaagcgcagacagttgcagcgacaactccatgaatacgagaccgaactggaggatgaaaggaagcaaagagctctcgccgcagcagctaagaaaaaactcgaaggagaccttaaagacctggagttgcaggctgattccgccataaaaggcagggaagaggcgatcaagcagctgaggaaactccaggctcaaatgaaagatttccagcgggaactggaagacgcaagggcctcacgggatgaaatctttgctactgctaaagaaaacgaaaagaaggcaaaaagtttagaggccgatcttatgcagctacaggaagaccttgcagccgcggagcgggcgaggaaacaggcagacctcgagaaggaagaacttgctgaagagctagcgtcttcactcagcgggagaaacgcacttcaggatgaaaaacgtagactggaagcccgcatcgcacaactggaagaagagttggaggaggaacagggcaacatggaagccatgtcggacagggttcggaaggccacacagcaagctgaacagctcagcaacgagttggccacagagaggagcactgcacaaaaaaatgagtctgccaggcagcagctggaaagacagaacaaggagttgcgcagtaaactccacgagatggaaggcgcagtcaagtccaagtttaagagcaccattgccgcgctcgaggcaaaaatagctcagcttgaagagcaggtggagcaggaagctcgggagaagcaagcggctactaaatcactgaaacagaaggacaaaaagttgaaagaaattttgctccaggtcgaggatgagagaaagatggcagaacagtacaaagagcaggccgaaaagggtaacgccagagtcaagcagctaaagcgacagctcgaggaggccgaagaggagtcacaacggataaacgcgaacagacgcaagttgcaaagagagcttgatgaggctactgagtccaatgaggcgatggggagagaagtgaatgctctcaagagcaaattgcggggtcctccaccacaggagacgtcacagtag

SEQ ID NO: 196295 - DNA, 5817 bp, synthetic construct
  misc_feature 1..5817: note = Description of Artificial Sequence: Synthetic coding sequence
  source 1..5817: mol_type = other DNA
atgagcagcgacgccgagatggccatcttcggcgaggccgccccctacctgcggaagcctgagaaagaaagaattgaggctcaaaatcgcccattcgactcaaagaaagcttgctttgtagctgacaacaaggagatgtacgtgaagggaatgattcaaacacgagagaatgacaaagtgatcgtgaaaacccttgatgataggatgctgacgcttaacaatgatcaggtctttccgatgaaccctcctaaattcgataaaatagaggatatggccatgatgacgcatctgcatgagccagccgtactctacaatcttaaggaacgttatgcagcctggatgatctatacatacagtggactgttctgcgttaccgtaaatccttacaagtggctccctgtttacaaaccagaggtcgtggccgcctataggggaaaaaagcgccaggaagcacctccacatatcttttctatctcagacaatgcatatcaattcatgctcaccgaccgggacaaccaatcaatcctaataaccggcgaaagcggcgctggcaagactgtcaacacaaagcgggtgatacaatacttcgccactattgctgtcaccggagacaaaaagaaggagacacagccggggaagatgcagggaacactggaagatcagatcattcaggcaaaccccttactggaagctttcggtaacgccaagacagtgagaaacgataacagcagccgcttcggcaagtttattcgtattcacttcggagctacaggcaaattggcctcggccgatatagaaacttacctgctcgaaaagtctcgcgtgacctttcagctttctagcgagagatcttatcatatcttttaccagattatgagtaataaaaaaccggagctgatagatctcttgttgatcagtaccaacccttttgatttcccatttgtcagccagggcgaagtcacagtagctagcattgatgactctgaggagttgctggccacagacaatgccatagatattttaggattttctagcgaggagaaagtgggtatatacaagctcactggcgctgtgatgcattatggaaatatgaaattcaaacagaagcagagggaggaacaggctgaacctgacggtaccgaggtggccgacaaagccgggtatctaatgggacttaatagtgccgagatgctgaaggggctgtgttgcccacgggtcaaagtgggcaatgagtacgtgaccaaggggcagaacgtgcagcaagttactaatagcgtgggtgcactcgccaaggccgtatacgagaaaatgttcttgtggatggtgacacgaatcaaccaacagttggataccaaacaaccaagacaatacttcattggagtactcgatatcgccggtttcgagatcttcgacttcaactccctcgaacagttatgtatcaactttacgaatgagaaattgcagcagttctttaaccatcacatgtttgtactggagcaagaggagtataagaaggaaggaattgagtgggagttcatcgacttcgggatggatctggcagcatgcatcgagctgattgaaaagcccatggggattttcagtatactagaggaggagtgtatgtttccaaaggctaccgacacttccttcaagaacaaactgtacgaccaacacctcggcaagtccaataatttccagaaaccaaagccggccaagggtaaagcggaagcccattttagcctcgttcactatgcaggaacagtggattacaacattgccggctggctggacaagaacaaagacccactcaacgagacagtagtgggcctctaccagaaaagctcgctgaaattattgagtttcttattttccaactatgcgggggccgagactggtgactctgggggaagcaaaaagggtggcaagaaaaagggcagcagcttccagaccgtcagcgccgtttttagagagaatctgaataagctcatgaccaacctgagatccactcacccccatttcgtgagatgcctgatccctaacgagacgaagactcctggtgtaatggatcactacctggtgatgcatcagttgcgttgcaatggggtgctcgaagggatccggatttgcagaaaaggattcccttcccgcatcctgtacgcagattttaaacaacgctatcgtatccttaacgcctcagctatccccgagggccagttcattgactctaaaaacgccagtgaaaagcttcttaactcgattgacgttgatagagagcagttcagatttgggaacacaaaggtgttcttcaaggcagggcttctgggcttgctggaggagatgagggatgagaaattagtcactctgatgacatcgacgcaggccgtgtgccggggttacctcatgagggtggaattcaagaaaatgatggagcgtcgtgattctattttttgtatccagtacaatataagatctttcatgaacgttaaacattggccctggatgaacttgttctttaaaataaagccacttttgaaatctgccgaggccgaaaaggaaatggctacaatgaaagaggactttgagcggacaaaggaagagctcgctaggtcagaagcacgccgtaaagagctggaggagaagatggtgtccctgttgcaggagaagaacgatctccagctacaggtgcagagtgagactgagaatctcatggacgcggaggaacgttgcgaagggctcatcaaaagtaagattttgctggaagctaaagtgaaggaactgaccgaacggctcgaggaagaggaagagatgaacagcgagctggtagctaaaaagcgcaacctggaggacaaatgtagtagtctgaagcgagacatagatgacttggagttaacactgacgaaagtggagaaggagaagcacgctaccgagaacaaggtgaaaaatctgagcgaagaaatgaccgcactggaagagaatatatcaaagctgaccaaagaaaaaaaaagcctgcaggaggcccaccagcagaccctggatgatctgcaggtcgaagaagataaggtgaacgggctgatcaaaataaatgcaaagctggaacagcaaactgatgacttagaggggagcctggagcaagaaaaaaagctgagagctgacttagaaagagcaaaaagaaagctggagggggacctgaaaatgtcacaggagtccatcatggatctggaaaatgataagcagcaaatagaggaaaagctcaagaaaaaggaattcgagctgtcccaactccaggcgaagattgacgatgagcaggtccactccctgcaattccaaaaaaagattaaggagctgcaggcacggatcgaagagctcgaggaagagatcgaggccgaacacacgctgcgggccaagattgaaaaacaaagaagtgacctggctagggaacttgaggagatcagtgagcgcttagaggaagctagcggcgcaacatcggctcaaatagaaatgaataaaaagagagaggccgaattccagaagatgaggagagacctagaagaagctaccctgcagcacgaggcgacagcggccaccctgcgcaaaaagcaagcagattctgtggcagaacttggcgagcagatagataatcttcaacgcgtgaaacagaagctggagaaagaaaagagcgaactgaaaatggagatcgacgacatggcaagcaatatcgaggcccttagtaagagtaagtccaatatagagagaacatgcagaaccgtggaagaccagttctctgaaatcaaagccaaagacgagcagcagacccaactgatacacgatttgaatatgcagaaggcgcgtctccagacccagaacggagaactatcacatagggtcgaagagaaagaatccctgatcagtcagctcactaaatcaaaacaagctctgactcagcaattagaagaactgaaacgccagatggaggaagagacaaaggcaaagaacgcaatggctcacgctctgcagtccagccggcatgattgtgacctgctgagggagcagtatgaagaagaacaggaggctaaagcagagctgcagagagccttgtccaaagctaactcagaagtcgcccagtggaggacgaagtatgaaacggatgcaattcagaggaccgaggagctggaggaggcaaagaagaagctggcacaacgtctgcaggaagccgaggagaacaccgaaaccgctaacagtaagtgcgcatcccttgagaagacgaagcagcgccttcagggggaagtggaggacctgatgagagacttggagaggtcacatacagcctgtgcaaccctggacaagaaacagcggaactttgacaaggtgcttgcagaatggaagcagaagcttgatgaatcgcaggccgagctggaggccgcccaaaaagagagtagaagtctctccactgagcttttcaaaatgaggaatgcatatgaggaggtcgttgatcagctggagacgttgcggagagaaaataagaatttacaggaagaaatttctgatctcactgagcagattgccgagaccggaaagaacttgcaggaggcggaaaaaacaaagaaactggtggagcaggagaaatccgatttgcaggttgcgctggaagaggtggaaggttctctcgagcacgaagaatcgaagattctccgggtgcaactggaattaagtcaggtgaagtcagaattagatcggaaggtcattgagaaggatgaagagatcgagcagttaaagcggaattctcaaagggcagctgaggccctgcaaagtgtcttggatgccgaaattagaagccggaacgacgctctcagattaaagaaaaagatggagggtgaccttaatgaaatggaaatacaactggggcacagcaatcggcaaatggcggagacacagaaacaccttcgtaccgtccaaggacagctgaaggacagccagctgcacctcgatgatgctctgcggtctaatgaagatctaaaagagcagcttgccatcgtggagaggcgtaacggattgctgctcgaggagctggaagaaatgaaggttgccctcgagcagaccgaacgcactcgcaggctgtctgaacaggagctgctagacgccagtgatagggtccagctcctccatagccagaatacttcacttattaataccaagaaaaagctggaagctgatattgctcagtgtcaggctgaggttgagaacagtattcaagagtcacgaaatgccgaggagaaagccaagaaagcaatcacagacgcagccatgatggcagaggagctcaagaaagaacaagatacaagcgcccatctcgagcggatgaagaagaatcttgagcagactgtgaaggacctccagcaccggttggatgaggccgagcagctagcgctcaaaggggggaaaaaacagatacagaagctagagaatcgcgtgagagagctcgagaacgagcttgatgtggagcagaaacgtggcgctgaggccctgaagggcgctcacaaatacgagcgtaaggttaaggagatgacataccaagcagaggaggatcacaagaacatactcagacttcaggacctagtggataagctacaggccaaggtaaagagctacaagaggcaggctgaagaagccgaggagcaagctaacacacaactctcccgctgtaggcgggttcagcatgagctggaagaggccgctgagcgggccgacatcgccgagagccaggtgaataagctacgtgccaaatccagggatgtgggaagtcagaaaatggaggagtag

SEQ ID NO: 196296 - DNA, 2001 bp, synthetic construct
  misc_feature 1..2001: note = Description of Artificial Sequence: Synthetic coding sequence
  source 1..2001: mol_type = other DNA
atgctgagccacatgctgtacaagaaggagaacgccatcgacatcttaggatttagtagcgaagagaaagtcggcatttacaaactgacgggcgctgtcatgcattacgggaacatgaaatttaagcagaaacagcgggaagaacaagcagagccagacggcaccgaggtggccgataaagccggatatcttatggggttaaacagcgcagaaatgctcaaaggactatgctgcccgagggtcaaggtggggaacgagtacgtaaccaaaggtcagaacgtgcagcaggtcactaacagtgttggcgctctggctaaggcagtctatgaaaagatgttcctatggatggtgacacgtattaatcagcagctggacacaaagcagcctcggcaatacttcatcggcgtgctggacatcgcaggcttcgaaatttttgactttaactcgctggaacagttgtgtatcaattttaccaacgagaagctacagcagttttttaatcatcacatgtttgtcttggagcaggaagagtacaagaaagaaggtatcgaatgggaatttatcgacttcggaatggatctggcagcctgcattgaactgattgagaaacccatgggtattttcagcattctcgaagaggagtgcatgtttcccaaggctaccgacactagtttcaagaataagctgtatgatcagcacctaggtaaatccaataacttccaaaagcccaaaccggccaagggcaaagcagaagcccacttctcacttgtgcattatgcgggcacagttgattataacatcgcaggatggctcgacaagaacaaagatcccctgaacgagaccgtagtggggctctaccaaaaatccagcttgaaactgctttcctttctattcagcaactacgccggcgcagaaactggcgactcgggggggtctaaaaagggcggaaaaaagaaaggcagcagttttcaaacagtaagcgctgtcttcagagagaacttgaataaactcatgaccaatctccgaagcacacacccacactttgtgcggtgtctaattcccaatgaaaccaaaacaccgggcgttatggatcattatcttgtgatgcatcaactgagatgcaatggagtgttggaaggcatccggatttgcaggaagggcttcccatcacgcatattatacgctgacttcaagcagcgataccggatactaaacgccagcgctattccggaaggacagttcattgattcaaagaatgcatccgaaaagttgctgaacagcatcgatgtggacagggaacagttccggttcggaaacaccaaggtgttctttaaagcggggttgctagggctcttggaggaaatgcgcgacgagaagctggttacactgatgactagcacacaggccgtgtgtaggggatacctgatgagggtggaattcaaaaagatgatggagagacgggattctatcttttgcatccaatacaatatcagatctttcatgaatgttaagcactggccgtggatgaatctgtttttcaaaatcaaacccctattaaaatccgcagaggcagaaaaggagatggcaacgatgaaagaggacttcgaacgtacgaaagaagagttagccaggtcggaagccagacgtaaggagcttaccgaaagactcgaagaggaagaagaaatgaactctgaactggtggccaagaaacgaaatctcgaggacaagtgttcaagtctcaagcgcgatatcgatgatcttgagctcactctgaccaaggtggaaaaagagaagcacgccaccgagaataaagtgaaaaacttgagtgaagagatgacagccctggaggaaaatatttcgaaattaactaaggagaaaaagagtcttcaggaagcacatcagcagactctcgatgacctgcaggtagaggaggataaagtgaacgggctgataaaaattaacgctaaactggagcaacagacggacgacgagggcgtttag

SEQ ID NO: 196297 - DNA, 6111 bp, synthetic construct
  misc_feature 1..6111: note = Description of Artificial Sequence: Synthetic coding sequence
  source 1..6111: mol_type = other DNA
atggccgccgtgaccatgagcgtgcccggccggaaggcccccccccgcccaggaccggttcctgaggcggcacagcccttcctcttcactccgagaggcccctcagctggcggtggaccgggctcaggcacaagtccgcaggtcgagtggaccgcacgaaggttagtatgggtgccaagcgagctgcatggctttgaagccgccgccttaagggatgagggggaggaggaggctgaggtggagctggcagagagtgggagaagactaaggttacctcgggatcaaattcagaggatgaacccccctaaattctctaaggccgaggacatggctgagttgacctgtctcaacgaagcgagcgtgttacacaacttgcgagagcgatactatagtgggctgatttacacttacagtggactattctgcgtcgtcatcaatccctacaagcaactgccaatttatactgaagccatagtggagatgtaccgtggaaagaagaggcacgaagtgccgcctcacgtgtacgcagtgactgagggggcgtatcgcagtatgctgcaggaccgtgaagaccagtctattctgtgcaccggggagtcaggggcaggaaaaacagaaaataccaagaaggtcattcaatacctggcccacgttgcgagcagcccaaaaggacgaaaagaacctggtgtgcctgcgtctgtttctactgttagctacggtgaactggaaaggcagcttctccaggccaacccaatcctggaggccttcgggaatgcgaaaaccgtaaaaaatgacaattcatctagatttggcaaatttattcggatcaatttcgatgtggccgggtacatcgtgggagccaacatcgaaacgtaccttttggaaaagtccagagctattcgacaggccaaggacgaatgctcatttcacatcttctaccagcttctgggcggagccggagagcagttaaaggcagacttattactcgagccctgcagccattaccggtttctcacaaacggcccaagttccagtcccggtcaggagagggagctttttcaggaaaccttggagtccctgcgcgtcctcggattctcccacgaggaaatcatatctatgctgcggatggtctctgcggtgctacagtttgggaatatcgctcttaaacgggagagaaacaccgaccaggcgaccatgcccgataacaccgcagcccagaagttgtgccgattgctgggcctgggtgtgaccgacttctcaagggccctcctgactccccgcataaaagtgggccgggactacgttcagaaagcccagactaaagaacaggccgatttcgcactggaagcgctagcaaaggcgacctacgaaagactgttccgctggttagtcctgagactcaacagggccctggatagatcgccccgccagggcgccagtttccttggcatcttggacatcgcaggtttcgagatcttccagctgaactcattcgagcagctctgcataaactatacgaatgaaaaactgcagcagctattcaatcacacaatgttcgtgctagagcaagaggagtatcagagggaagggattccgtggacattcctggattttggcttagatctgcagccatgtatagatctgatcgagagaccggctaacccccccggcctgctagctttgttggatgaggagtgctggttccctaaggccactgacaagagttttgtagagaaggtggcccaggaacaggggggccatcctaagttccaacgaccccggcatctgagagaccaggctgactttagcgtcttgcattacgccggaaaagttgactacaaggctaacgagtggctgatgaaaaacatggaccctctgaatgataatgttgctgctctgctgcaccagtcaaccgataggctaacagcagaaatctggaaggatgaacacggcgggttccaacagtttagttttttggggtccttcccgccatctccaccgggtagcgctgagcggtgctccagcgccatctccccacctggagtcgaagggatcgtgggcctggaacaggtgtcatctttgggcgacggaccacccggtggtaggcctagacgcgggatgttccggacagtgggccagctgtacaaagaaagcctgagccggctgatggcaacactgagcaacaccaatccctccttcgtccgttgcatagtccccaaccatgagaagagggctggaaagcttgagcccagactggttctagaccaacttagatgtaatggagttcttgaaggcattagaatctgcagacaggggttcccaaaccgaattctgtttcaggagttcaggcaaaggtacgagattctcacccccaatgcaatccctaagggatttatggacgggaagcaggcctgcgagaagatgattcaggcactggagctcgaccccaacctctatagggtgggacagagcaagatcttcttccgcgccggagtcctggctcagctggaggaggaacgggatctcaaagtcactgatattattgtgtcgtttcaggccgccgccaggggttacctggcccgtcgtgcctttcagaaacgccagcagcagcagtcggctctaagggtgatgcagcggaattgcgccgcttacctgaaactgagacattggcaatggtggcgcctgttcactaaggtaaaaccgctgttgcaggtcaccagacaggatgaagtgttacaggccagagcgcaggagctccagaaagtccaagaactgcaacagcaatcagctagagaggtcggcgaactgcagggcagagttgcacaactggaggaagaaagggcccgcctggcagagcagttgcgcgctgaggctgagctatgtgcggaggctgaagaaacccgaggacgccttgcagcgcgaaaacaagaactggagcttgttgtatctgagctcgaagcgcgggtgggagaggaagaagagtgcagtcgccagatgcaaaccgagaaaaaacgcctccagcagcacatccaagagctggaggcgcaccttgaggccgaggagggggctaggcagaaactgcagctcgagaaagtcacaaccgaggctaagatgaagaagtttgaagaagacttactgctccttgaggaccaaaattctaagctttccaaggaacggaaattgttagaagaccgcctggcagaattcagtagccaggccgcagaagaagaggaaaaggtaaagtctctcaataagctccgcctgaaatatgaggccacaatcgctgacatggaagaccggttaagaaaggaagagaagggaagacaggaactcgagaagctcaagagacgcctagacggtgaaagcagcgagctgcaagagcaaatggtggaacagcagcaaagggcggaagagttaagagcacagttaggtcgcaaagaagaggaactccaagctgccttggcaagagctgaagacgaaggcggcgcaagagctcaactgcttaagtcattacgggaggcacaggccgccctggcggaggcgcaggaggacttagaaagcgaaagagtggcccggactaaagcagaaaagcaaagacgggaccttggggaggaactcgaagctctgagaggggagcttgaggatacactcgactccactaacgcccagcaagaattgcgatctaaacgcgaacaggaggtgaccgaacttaagaaaacactagaggaggagacccggatccacgaggccgcggtgcaggagctcagacagcgccacggacaggccctgggtgagttggcagaacaactagaacaagcaagaagagggaagggtgcttgggaaaagacaaggcttgcactcgaagcagaggtgtctgaacttcgagccgaactttccagtctccagactgctcgacaggagggcgagcagcggcgccgccgcttggaactgcaattacaggaagtacagggacgagctggagatggcgagagagcccgagcggaggcggctgaaaaactccagagagcgcaagccgagttagagaatgtgagcggggccctcaatgaagcagaatcaaaaactatacggcttagcaaggaactgagctcaactgaagcccagctccacgacgcccaggaactgctccaggaagagaccagggccaagctggcccttgggagtcgggtgcgcgccatggaagccgaggcggccggcttgagagaacagttagaagaagaagccgcagctagagagcgcgctggcagagagctccaaaccgctcaggctcaacttagcgagtggcgacggagacaggaggaggaggcgggagccctcgaagcaggcgaggaagcaaggcgacgcgcagcccgggaagctgaggccctaacccagaggttagcggaaaagaccgagaccgtcgatagactcgagagaggtaggagacgactgcagcaggagctagacgatgccactatggacctagagcagcagcgacagctggtgtccacgctggagaaaaaacagagaaagtttgaccagttgctcgcagaagaaaaagccgcagtattgcgtgcggtagaggagcgcgaaagggccgaagccgagggacgcgagcgggaagcacgagccctctctctgacgagagctctggaggaagaacaagaggcacgcgaggagcttgagcgccaaaaccgagccctgagggccgaattggaggcgctcctcagttccaaagacgacgtcgggaagagtgtccacgaattagagagggcttgtcgtgtggcggaacaggcggcaaatgacctgagggcacaggtgactgagctggaggacgagctcaccgccgctgaggatgcaaagctgaggcttgaagttacagttcaggccctcaagacccagcacgagcgcgatctccaggggagggatgaggccggcgaagaacgccgacggcagttagcaaagcagctgcgggatgccgaagttgagagagatgaagaacgcaagcagcgaacgctcgcagttgctgcacgcaaaaagttagaaggcgagctagaggaactgaaggcgcagatggcgtccgcggggcaagggaaagaggaggcagtgaagcagctccggaaaatgcaggcccaaatgaaagaactgtggagggaggtcgaagagactaggacctctcgggaagagatcttctctcaaaacagggaaagcgagaaacgccttaaaggcctagaggccgaggtcctccgcctccaggaagagctggcggcctccgatagggcgcgtcgacaggctcagcaggacagggatgaaatggcagatgaagtggctaatgggaatctatctaaggcagcaatccttgaggaaaagaggcaattagaaggcaggttgggtcagctggaggaggagctggaggaagagcagtcgaactcagagttactaaacgaccggtataggaagctgttgctgcaggtagagagcctaacaactgagttatccgcagaaagatcttttagtgctaaggcagaatccggcaggcagcagcttgaaaggcagattcaggaattgcgcggcaggttgggggaggaagatgctggagcacgcgctcgacataagatgacaattgccgcactagagtccaagttagctcaggccgaggagcagctggagcaagagactagagagcggattttgagcggaaaactggtccgccgtgctgagaagcgattgaaagaagttgtgcttcaagtagaggaagaaaggagagtcgcagatcagttaagagaccagttagagaaagggaatctgcgggtcaagcagctgaagcgccaattggaagaggcagaagaggaggcttccagagctcaggctggacgacgacgactgcagcgggagctggaggacgtcaccgagtccgccgagagcatgaacagagaagtgactactctacgcaaccggcttaggcggggtccccttacattcactacgcgaacagtcagacaggtattcaggcttgaagagggcgtggcctctgatgaggaagctgaagaagcccagcccggttccggaccctcgcctgagccggaagggagtccccctgcccacccacagtag

SEQ ID NO: 196298 - DNA, 4437 bp, synthetic construct
  misc_feature 1..4437: note = Description of Artificial Sequence: Synthetic coding sequence
  source 1..4437: mol_type = other DNA
atggccgccgtgaccatgagcgtgcccggccggaaggcccccccccggccgggccccgttccagaggctgctcagcctttcctgtttactccaaggggtccgtcggccgggggcggaccagggtccggcacctctcctcaggtggagtggaccgccaggcgcctggtctgggtgccttctgaactgcacggtttcgaagcagcggctctacgagacgaaggtgaggaggaggcagaggtcgagcttgcagagtctggacgccgtctgcggctcccccgtgatcaaatccagcggatgaaccccccaaagttttctaaagccgaagatatggctgagcttacctgcttaaatgaagcctccgtgcttcacaacctgcgtgagcgctactatagcgggcttatttacacgtattctggcttgttctgcgtcgtgattaacccttataagcaacttcccatttatacggaagccatcgttgagatgtaccgtgggaaaaagcgccatgaggtgccccctcatgtgtacgcagtcacagaaggtgcctaccggtctatgttacaggacagagaggatcagtccattctctgtactggcgagtctggagcaggcaagaccgagaatacaaagaaggtgatccagtacctggcccacgtcgcctcatctccgaaagggagaaaagagcctggagtccccggtgaactggagaggcaactccttcaagccaatccaatccttgaggcatttgggaacgcaaagaccgtaaaaaatgacaacagctccagattcgggaaatttattaggatcaatttcgacgtagccgggtacattgtaggcgccaatattgaaacatatctgttggaaaaaagtcgcgccatacggcaagctaaggatgaatgctcgttccatatcttctatcaactgttgggaggggccggggaacaactaaaagctgatctcctactcgaaccctgtagccactaccgctttttgacaaacggtccgtcttcgagtccgggacaggaacgcgagttattccaggaaactctcgaatcgcttcgagttctggggtttagtcacgaggagatcatttcaatgcttagaatggtgtcagctgttctgcagtttggcaacatcgccctcaagagggaacgcaacactgaccaggcgaccatgccagacaatacagctgctcagaaattatgcagacttctgggcttgggggtcacagatttcagccgggccctgcttacacccagaatcaaagtgggaagagactatgtgcagaaggcccagactaaagagcaggcggactttgccctggaggcgttagctaaggccacctacgaaaggctgttccgatggttggttttgcgcctgaacagagcactggaccgatcccctcgtcaaggggccagtttcctaggaatactggatattgctgggtttgagatttttcaactcaactctttcgaacaactctgtattaactatacaaatgaaaaactgcagcagttgtttaatcatactatgtttgtactggagcaggaagagtatcaacgagaaggtattccatggacattccttgacttcggactggacctgcaaccatgcatagacctgatcgagcgacccgccaatcctcctgggctactagcccttctggatgaggaatgttggtttccgaaggcaaccgataaatcattcgtcgagaaggtggcccaggagcagggcggtcacccaaagttccagcggccaagacacttacgggaccaggccgatttttcggtattacactatgctgggaaggtggattacaaggctaacgagtggctaatgaaaaatatggaccctttgaacgacaatgtggccgcactcttacatcagagcaccgaccgcctgacagcagaaatttggaaggacgttgagggaatcgtgggactggagcaggttagctctttgggcgatggacctcctggaggcaggcccaggcggggaatgtttcggactgttggacagctgtacaaagaaagtctgagtaggctgatggcaacattgagtaataccaatccaagctttgtacggtgcattgttcctaaccatgagaagcgggccggtaagctggaacctcgactcgtgcttgatcaactccgctgcaatggggtgttagaaggcattagaatctgcagacagggctttccaaatcggatcctgttccaggagttccgacagaggtatgagattctcacgcccaacgctattcctaaaggctttatggatggcaagcaggcatgcgagaagatgattcaggccctcgaattagatcctaacctgtatcgcgtgggacagtcaaagatcttcttcagggccggggtgcttgcgcagctcgaagaggagagggacttgaaagttactgacattatagtgtccttccaggccgccgctcgagggtatctcgctagacgcgcctttcagaagaggcaacagcagcaaagtgccctgagagtgatgcagaggaactgcgcggcctatctgaaactgcgtcactggcagtggtggcggctattcactaaagttaaacctttactgcaggttacgagacaggatgaggtccttcaggctcgggctcaggaactccaaaaagtacaagaactccagcagcagtccgctagagaagtaggagaactgcaaggcagagtcgcccagctggaagaggagagagctcgcctcgctgagcaactgcgggctgaggcagagctctgcgccgaggctgaggagacacggggccggttagcagcgcgcaagcaggagctcgaattggttgtgagcgaactggaggcacgggtgggggaggaagaggagtgtagtcgccagatgcagactgaaaaaaagaggttacagcagcacattcaggagctcgaggctcatctcgaggctgaggagggagctcgccaaaaactccaactcgagaaagtaacgactgaggcaaagatgaaaaagtttgaagaagacctgctgttgctcgaggatcagaattccaaactcagcaagtccggctcttgttggaaaatcgtatggcccagtagccaccccaggcagctgcgtaggaggaggcgttctcgggcaagtatttcatacgggtctaacatgcggccccaatctcagacctggagagacaggctgagaaaagaagagaagggccgccaagagctggagaaactcaaaagacgtctcgacggggagtcatccgagctccaggaacagatggttgagcagcagcagagagccgaagagcttcgcgcacagcttggaaggaaggaagaagaactccaggctgcactggcccgggctgaggacgaaggcggtgctagggcccagttactaaaatcgctccgagaggcccaggccgccttggccgaggcacaggaggacctcgaaagcgagagggttgccaggacaaaggctgagaagcagcgaagggatcttggagaagagctggaggctcttcggggagaactggaggataccctggactccactaatgcccagcaggaattgagaagcaagcgggagcaggaagtaacggaactgaagaaaactcttgaagaggaaacacggatccatgaagctgcagtgcaagaacttcgacagcgccacgggcaggcacttggtgagttggcagagcagctcgagcaggcaagaaggggcaagggagcatgggagaagacccggttggccctggaagcggaggtatcggaactccgagcagagctcagtagcctgcagaccgcgcggcaagagggtgaacagagaaggaggaggctcgagctacagctccaagaggtccagggaagggcaggcgatggtgagagagcccgggcagaagctgctgagaaactccagcgggctcaagccgagctcgagaacgtgagcggtgccctgaatgaggcagagtcaaagacaatccgcctgtcaaaggagctgagcagcaccgaggcgcaactgcacgacgcccaggaacttctgcaggaggagactcgggccaagctggcactagggtcccgtgtgcgcgcaatggaggctgaggccgccggactaagggagcagctggaagaagaggctgccgcccgcgagcgggccggtcgcgaactgcaaacagcccaagcacagctttccgagtggcgccgacgacaggaggaggaagcaggcgctctggaggctggtgaggaggcccgcaggcgcgctgctcgcgaggctgaggcacttacacagagactggctgagaagacagagaccgtcgatagactggaacgaggacgacgccgcctgcagcaggaactcgatgatgccaccctgtcacctgatgccctcacagatggggcgcagccaccctccagcctggatcccactggaccatgcccacggaatcccgcgttatag

SEQ ID NO: 196299 - DNA, 5340 bp, synthetic construct
  misc_feature 1..5340: note = Description of Artificial Sequence: Synthetic coding sequence
  source 1..5340: mol_type = other DNA
atggccgccgtgaccatgagcgtgcccggccggaaggccccccccaggcccggaccagtcccggaagctgcccagccattcctgttcaccccaagaggcccatctgcgggcgggggccccggctccggcacatctccgcaggtggagtggacggcccgcaggttggtatgggtgccatctgagcttcatggattcgaggctgccgctctcagagatgagggcgaagaggaagctgaggttgagctggccgagagcggaaggcgcctgaggctgcctcgcgaccagatacagagaatgaacccccctaagttctccaaagcagaagatatggcagaactcacatgtttgaacgaagcatccgtccttcataatctgagggaacggtactacagcgggctcatctacacttatagtggtctgttttgcgtggtcatcaacccttacaagcagctacccatctacacggaagccatcgtggaaatgtatagaggcaagaaaagacatgaggtgcctccccatgtgtacgcagtgaccgagggagcttacagatctatgctgcaggatagggaagatcagtcaatattatgcacgggcgagagtggcgcaggcaagactgagaacacgaaaaaggtgatccagtatctagctcatgttgcttcttcgccaaaaggccgaaaggaacctggggtgcctggggagctcgaaaggcagcttctccaggcgaaccccattttagaggcattcggcaatgccaaaaccgtaaagaacgacaactccagcagatttggcaagtttatccgtatcaacttcgacgtcgcaggatacattgttggggccaatatcgaaacatacctgctggagaaaagccgtgctataaggcaggcaaaggacgagtgctccttccacatcttctatcaactgctggggggcgccggagaacagctgaaggccgacctgctcttggagccctgcagccactacagatttctcacaaatggcccttcatccagtccgggacaagaacgagagctatttcaggaaaccctggaatcacttagagttctcggcttctcacacgaggaaattatctctatgctaaggatggtgtccgcagtcctccagttcggaaatattgccctcaagagggagcggaacacggatcaggccacaatgccggacaacacagctgcccagaagttgtgccggctgctgggattgggtgtgaccgatttctcccgggcattgctcacgccccgtattaaggtgggcagagactacgtgcagaaagctcagacgaaggaacaggcggattttgccctggaggctctggcaaaggccacctatgaaagactgttccgatggttagttctgaggcttaaccgtgctctggacaggtccccacggcagggggcctccttcctgggaatattagacatcgccggatttgaaatcttccagttgaacagcttcgaacagttatgtattaactacaccaacgagaagctccaacagcttttcaatcataccatgtttgtacttgaacaggaggaataccagagagagggcattccctggaccttcttagacttcggtctggacctgcaaccttgtatcgacctcatagaacgccctgccaatccacctggcctccttgcgcttctcgacgaagagtgctggtttcccaaggctacagataagtctttcgttgaaaaggtggctcaggagcaggggggccaccctaagtttcaaaggccacgccacctgcgtgatcaagccgatttctctgtgctccactatgccggaaaggtagactacaaagccaacgagtggttgatgaagaatatggatcctctcaacgataatgtcgctgcactcttacatcaatcgactgaccgactgacggctgaaatatggaaggacgtggaggggatcgtaggactagagcaggtctcttcactgggcgacggaccaccagggggtcgtccgaggcgaggaatgtttcgaacagtggggcagctttataaagagtcattatcaaggctcatggcgactctgagtaacaccaatccctcttttgtccgctgtatcgtgcccaatcatgaaaaacgcgccgggaaactggagcccagattggtactcgaccagctcagatgtaatggcgttcttgaaggaatccgcatctgcagacagggtttcccaaaccgcatactctttcaagagttcaggcagcgttatgagatccttacccccaatgcgattccaaagggcttcatggacggtaaacaagcctgtgagaagatgatccaagctttggagctcgatccaaacctgtaccgtgttgggcagagtaaaatttttttccgcgctggggtactggcacagttggaagaggagagggaccttaaggttaccgatataattgtgagctttcaggcagccgctagagggtaccttgcccgccgcgctttccagaagaggcagcagcagcagtctgccctccgtgtgatgcagagaaattgtgccgcatatctgaagcttaggcactggcagtggtggagattattcacgaaggtgaagcctctgctgcaggtgactaggcaggatgaagtcctgcaggctcgtgctcaagaactccagaaggtgcaggaattgcagcagcagtccgcccgtgaggtcggcgagttgcaggggcgggtggctcagctggaagaggagagggcgcgactcgctgaacagcttagggcagaagccgaattgtgcgctgaagccgaagagaccagaggcaggttggctgctcggaagcaggaacttgaactggtcgtgtcagaattagaggcaagggtaggagaggaggaggagtgctctcgccagatgcagaccgagaagaagaggctacaacagcatattcaggagcttgaagcccacctggaagcggaggagggtgctcgccagaaactgcagctcgaaaaagtgaccacggaggcgaaaatgaagaagttcgaggaagatctgttgctgcttgaggaccagaactcaaaactgtccaaaagtggaagctgttggaagattgtgtggcctagctcccaccctcgacagctgagacggcgcagaagatcacgcgcttccatcagctacggctccaacatgaggccacagagccagacatggcgtgatagactcaggaaagaggaaaaaggccgacaggagttggaaaaactcaaaagacggctggatggagaatcctcagagctccaggagcagatggtggaacagcagcaaagagcagaagaacttagggcccagctggggaggaaggaggaggaactacaggccgctctggctagagctgaggacgagggtggcgctcgggctcagctgcttaagtcacttcgcgaagcacaggcagccttggccgaagcccaggaagacctcgagtcagaacgtgtggcccgcactaaggcagaaaagcaacggcgcgacctaggcgaggaactcgaggccctgcggggggagctagaggatacactggacagtaccaacgcgcagcaagaattacgctcaaaaagggagcaggaggtgacagagttgaaaaaaactctggaggaagagaccaggatccacgaggcagccgtccaggagctgcggcagcgacacgggcaggctttgggagagctggcagagcaacttgaacaggcccgtcgtggcaaaggtgcttgggagaaaaccaggcttgccctagaggcagaagtgtccgagttgcgagctgaattgtcttcactacagacagctaggcaggaaggagagcagaggagaagacgacttgaattacaactgcaggaggtgcagggcagggccggtgatggagaacgagcccgcgcagaggccgctgaaaaacttcagagggctcaggccgaactggaaaacgtgagcggcgcccttaacgaagccctgttatccagtaaggatgatgtgggcaagagtgtccacgagctggagcgagcgtgtagggtggctgaacaggctgctaatgatcttcgggcgcaggtgacggaattggaggatgaactgactgccgccgaagacgccaagttgcggctggaggtgaccgtacaggccctgaaaacccaacatgaaagggaccttcagggccgcgacgaggccggtgaagaaagacgccggcagctggcgaagcagctacgtgacgccgaggtggaaagggacgaagagaggaagcagcgcaccttagctgtcgccgcccgcaagaagttagagggagaattggaggaactgaaagcccagatggctagcgccgggcaggggaaagaggaagcagtgaagcaactccgcaagatgcaagcacagatgaaggaactctggcgcgaagtagaggagactcgaaccagtagagaggaaatcttttcacaaaatcgagagtctgagaagcgcttgaaaggcttggaggcagaagttctcagactgcaagaggagcttgccgcttcagacagagccagacggcaagcccagcaggatcgcgatgagatggctgacgaggtagccaacgggaacctctctaaggccgccattctggaagagaaacggcagctggaggggcgactgggacagctagaggaagaactggaggaggagcagtccaatagtgagctgttgaacgatcggtatagaaagcttctcttacaggtagaatccctcactacggaactgtcagcagagcgttctttctctgccaaagctgagagtggacgacagcagctcgagcggcagattcaggaactgcggggtagacttggagaagaggatgccggcgcacgcgcccgccataagatgaccattgccgccctcgaaagcaagctggcacaggcggaggagcaacttgaacaagagactagggaaaggatcttatcgggtaagctcgtccggcgagcagagaagcgactgaaggaagttgtcctgcaagttgaggaagagaggagggtggcggatcaactgagagatcagctggaaaaaggaaatttacgagttaaacaattgaagcggcagctcgaggaagccgaagaggaggcatcccgggcacaagccgggcgtcgccggctccagcgggaactcgaggatgtaactgaaagtgctgagtcaatgaatcgcgaggttactactctcaggaaccgccttcggcggggtccactcacgttcacaactaggaccgtgaggcaagtctttagactggaggagggcgtcgcaagcgatgaagaagccgaagaagcccagcccggatctggcccctccccagaacctgaagggtccccccccgcccatccccagtag

SEQ ID NO: 196300 - DNA, 6087 bp, synthetic construct
  misc_feature 1..6087: note = Description of Artificial Sequence: Synthetic coding sequence
  source 1..6087: mol_type = other DNA
atggccgccgtgaccatgagcgtgcccggccggaaggccccccccaggcccggccccgtgcccgaggcagctcagccattcttattcactccccgcggccccagcgccgggggaggaccaggaagcggcacatccccccaagtcgagtggaccgcgcggcggttagtctgggttccgagtgagctccacggtttcgaagccgctgctctgcgggacgagggcgaagaggaggctgaggtggaactggccgagtccggccgcaggctgcggctgccacgagaccagattcagcgcatgaacccgccaaagtttagcaaagccgaagacatggccgaactaacatgccttaacgaggcctcagttctgcataacttgagagaaaggtactactccggccttatctacacttattcaggcctgttttgtgtggtgatcaacccatacaaacagctgcctatctatacagaagctattgtcgaaatgtacaggggtaagaagaggcacgaagtgccaccgcatgtgtacgccgtaaccgagggggcatacaggtcgatgctgcaggacagggaagatcagtctattctctgtactggggagtccggtgcagggaagactgaaaacacaaagaaagtgattcagtatttagctcatgtggctagcagtccaaaaggcaggaaggagcctggagtgcctggggagttagaaaggcagctgcttcaggctaacccaatcctggaagctttcggcaacgctaagaccgttaagaatgataacagctcccggttcggcaagttcatacgcataaattttgacgttgctggttatatagtcggcgcaaacattgaaacgtacctgctcgaaaagagtcgagcaatacgccaggctaaagacgagtgctcattccatatcttctatcaacttctgggaggagctggcgagcaattgaaggctgatctgctgctggagccctgctcccactacaggtttctgactaacggaccctcctcaagccccgggcaggaacgcgagctttttcaggaaacactggagtcactgcgcgtgctgggcttctctcatgaagagattatctctatgctgaggatggtttcagccgtgctgcagtttggaaacatcgccctgaaaagggagcgtaacactgatcaagcaacaatgccagacaacactgccgcacaaaagctgtgtcgcttactcggcctgggggtgactgactttagccgcgcacttctgacacctagaatcaaagtgggcagggactacgtccaaaaagcccagacgaaagagcaggctgactttgccttggaagcccttgccaaggctacttacgagaggttattccgctggttagtgctcaggctgaacagggcccttgaccgttcaccccggcagggcgctagctttctggggatcctggacatcgcaggttttgagatatttcagttaaatagtttcgaacagctgtgtatcaattatacaaacgagaaattgcagcaactatttaatcataccatgttcgtcttggagcaagaagaatatcagcgtgaaggaataccatggaccttcttggattttggcttggacctgcagccctgtattgatctgatcgagagacctgctaatcctccaggcctgttagcactgctcgacgaagagtgctggtttccaaaggctaccgacaaatcctttgttgaaaaagtcgcccaggaacaaggagggcaccccaaatttcagcggcccagacacctacgagatcaggctgatttttctgtgttgcactatgccgggaaggttgattacaaagcgaacgagtggctgatgaagaatatggatccgctgaatgataacgtcgcagcgctgttacaccagtccacagatcgcttgaccgcagagatatggaaggatgaacacggtggcttccagcaatttagcttcctcggaagctttcccccttccccacccgggagcgctgaacggtgtagcagtgccatctcccccccaggggtggaaggtatcgtgggcctcgaacaggtcagctccttaggcgacggtcctccaggtggccgccccagaaggggcatgtttcggactgttggccaactatacaaggagagcttgtccagattgatggccaccctcagcaacacgaatcctagctttgtcagatgcattgttccgaaccacgagaagcgggcggggaaactcgagccacgcctggtcttggatcagctcaggtgtaatggtgtcctcgagggcattaggatctgtaggcagggcttccctaatcgcatcctatttcaggagtttaggcaaagatacgaaattctgactcctaacgcaataccgaaaggcttcatggacggaaagcaggcttgtgaaaagatgattcaggcactggaattagaccccaacctctaccgggtgggccagagcaaaatcttcttccgagctggcgtgctcgcgcagctggaagaggagagagatctaaaagtgaccgacattatcgtgagctttcaggccgccgccagggggtatctcgcccgacgcgctttccagaaaaggcaacaacaacagtctgccttgagggtcatgcagaggaactgcgctgcatatctcaagttaagacactggcagtggtggcggctttttaccaaggtcaagcccctgctgcaggtcactcgccaagatgaagtgctccaggcccgtgcacaagagcttcagaaggttcaagagttgcagcagcagagtgcgagggaagtcggagaattacaggggagagtagcacagttggaagaagagagggcgagactagcggaacagctccgtgcagaagcggagctttgcgcagaggctgaggagaccaggggacggttggcagcacgcaagcaggagctggagctggtcgtgagtgaactcgaggccagagtgggggaagaggaggagtgctctaggcagatgcagaccgaaaagaagcgactacagcagcacatccaggagctcgaagcccacctggaggctgaggagggtgctcgacagaagctgcagctggaaaaagtgacaacagaggctaaaatgaagaagtttgaagaggatctgctcctgctcgaggaccaaaattcaaagttatccaaagagaggaaattgctggaggatcgcctcgccgagttttccagtcaggccgcagaggaggaggaaaaggtaaagtcattgaacaagttgaggctcaagtacgaagctacaatagctgatatggaggatagactgcggaaggaggagaagggcaggcaggaactagagaagcttaaaagacggttggacggcgaatcaagcgaactgcaagagcagatggtcgagcaacaacaacgtgccgaagagttgcgagcccagctaggccgcaaggaagaagaactgcaggccgccctggcgagagcagaggacgaaggtggagccagggcacagcttctaaagtccttgcgggaagctcaggcagccctggcggaggcccaagaggaccttgaatcagagcgtgtggctaggaccaaagctgagaaacagcgacgagacctgggagaggagttggaagctctgcgaggcgagttggaagataccctggacagcacaaacgctcagcaggagctgcggagcaagagagaacaggaagttactgaattaaagaaaacattggaagaagagacacgtattcacgaagcagccgtgcaggaactccggcagcgacacggacaagctttgggtgagctcgccgaacaattagagcaggctcgaagaggcaagggagcttgggagaagacacggctagctctggaggctgaggtttcagagctcagagccgaactatcgtctctccagaccgcaagacaggaaggggaacagcgccgcaggcggctggaactgcagctgcaagaggtccagggaagagccggggacggcgaacgcgcacgcgctgaagctgccgaaaagctgcagcgcgcccaggctgaattggaaaatgtttcaggggccctcaacgaagcggaatccaagacaattagactgagtaaggagctttcttccacagaggcccagcttcacgatgcacaggaacttttgcaagaggaaactcgggctaagctggcattaggaagccgcgtgagagcaatggaggcagaagctgcaggactccgggagcagctagaggaggaggccgcggcgcgggagcgcgccggacgggaactgcagacggcccaggctcagctatcagagtggaggaggcgacaggaggaagaagccggagctctcgaggctggggaagaagccaggaggagggccgccagggaggctgaagcgttgacccaaaggttggccgagaagactgaaaccgtggatagattggagagagggagacggaggcttcagcaggagctcgacgacgccactatggaccttgaacaacagcgccagctggtctcgacattggaaaagaagcagcgaaagtttgaccagcttttggccgaagagaaggccgcggtcctgagggccgtggaagagcgggagagagctgaggccgagggacgagaacgtgaggcccgcgccttgagtcttaccagagccttagaggaagagcaggaggctagggaggaactggagcgccagaatcgcgccttgagagccgaattagaagctctgctgtccagtaaagatgatgtgggcaaaagtgtccatgagctggaaagagcgtgtcgggttgcagaacaggctgcaaacgatcttagagctcaggtcaccgagctggaagatgagttgaccgcggctgaagatgctaagctgagacttgaggtaacggttcaggcattaaagacacagcacgaacgcgacctccagggacgcgacgaagccggcgaggagaggcgccggcaactcgccaagcaactgcgggatgctgaggtcgaacgcgatgaagagcggaaacaaagaactttggctgtagccgcccgaaagaagttggagggagaacttgaagaacttaaggcacagatggcttctgcaggtcagggaaaggaagaagctgtcaagcagcttcgcaagatgcaggcccagatgaaggaactttggagggaggtagaagaaacccgaacctctagggaggaaatattcagtcagaacagggagagtgagaagaggctgaaagggctcgaagccgaggtccttcgtctgcaggaggaactagcagcctctgatagagcgcgacgccaagcccagcaggatagggacgagatggccgacgaggttgcgaacggaaacctgtcaaaagccgcgatacttgaggaaaaacggcagctagagggacgtctgggtcagctggaggaagaactggaagaggaacagtcaaatagcgagctgctgaacgacaggtaccggaaactgttgctgcaagttgaatcgctgaccaccgagctgagcgcggaaaggtcattctccgccaaggctgagtccggtaggcagcaactggagcgacaaatacaggagttaagaggacggctgggagaagaggacgccggggctagggccagacacaagatgacaatcgccgccctggaaagtaaattggcacaggctgaagagcaattagaacaagagaccagagagagaatcctctctggcaagctggtgagacgcgccgagaaaagactaaaggaggtagtgctgcaggttgaggaggaacgccgagtagcagatcagctgagagaccagcttgaaaaaggcaacctccgggtgaagcagctgaaacggcagctggaggaagcagaggaggaagcatctagagcccaggctgggcgtagaaggctgcagagagaactcgaagacgtgactgaatctgcagaatccatgaacagagaggtcaccaccttgagaaaccggctgagacggggcccactgacatttactaccaggactgtaagacaggtttttagactagaggagggcgtcgcttcggacgaggaagcagaagaagcccaacctggcagtgggccttctcctgaacctgagggatctcctcccgcccatccacagtag

SEQ ID NO: 196301 - DNA, 6012 bp, synthetic construct
  misc_feature 1..6012: note = Description of Artificial Sequence: Synthetic coding sequence
  source 1..6012: mol_type = other DNA
atggccgccgtgaccatgagcgtgcccggccggaaggcccccccccggccaggccctgtccccgaagctgctcagccttttctgtttacgccccgcggaccttccgctgggggtggccctggttccggcacaagtcctcaggtggaatggactgcccgccgattggtctgggtgccctccgagctgcacgggtttgaggccgcggcactcagggatgagggcgaagaagaagccgaagtcgagctggcggaaagcggacgaagattgagattacccagggatcagatccagcggatgaatccgcccaaattttcaaaggccgaagacatggccgaactaacctgcttaaatgaagccagtgtgctacacaacctgcgtgaaagatattactcaggtctgatatatacttactccggtctgttctgcgtcgtgataaacccatataagcaactgcctatttataccgaggctattgtcgagatgtacaggggtaaaaaacgacatgaggtcccccctcatgtctacgcagtgactgagggtgcataccgcagtatgctccaggacagggaagaccaaagcatcctgtgcaccggtgagtccggcgcaggcaagactgagaacaccaaaaaggtgatccagtatctcgcccatgttgcatcctctccaaaggggaggaaggagccgggcgtgccagcttccgtctccaccgtttcttacggtgaacttgaacgtcagctgttgcaggctaaccctatactcgaggcgttcgggaatgcaaagacagtcaaaaacgacaattctagtcggttcggtaagtttattaggatcaacttcgatgtcgcggggtacatcgtcggggccaatatagaaacttacctgttagaaaagtctcgggcaatcaggcaggcaaaagacgaatgcagttttcacattttctaccagttgctgggtggggcaggagagcaactcaaagcagatctgctcttagaaccatgttctcactacaggtttctgactaacggcccaagcagtagccccggacaggagcgggaactctttcaggaaactctagagtcgcttagggtcctcgggttttcgcatgaggaaatcatctccatgttgcggatggttagtgccgtgctacaatttggcaatattgcccttaaaagagagcgaaacactgaccaggccaccatgcctgacaatacagccgctcagaagttgtgccgattacttggtttgggcgtgactgatttctctcgagcacttctgacccctcggataaaggtgggcagggactacgtgcagaaagcgcaaaccaaggaacaagcagactttgccctcgaggccttagcaaaggctacatatgaacggctttttcgctggttggtactgagactgaatagggctctggacaggtctcctcgccagggggccagtttcctggggattctggacattgcaggttttgagatcttccagcttaactccttcgagcagctgtgcattaactatacaaacgaaaagctccagcaactttttaaccatacaatgtttgttcttgaacaagaggaatatcagagagaaggcatcccttggactttcctcgacttcgggctggatctgcagccctgcattgatttgatagaacgtcctgcaaatcctcctggcctgttagcattgttagatgaagagtgctggttcccgaaagcaacagacaagtcttttgtcgaaaaggttgctcaggaacagggcggccaccccaaattccagagaccccgccacctgagggaccaggccgacttttctgtgcttcactacgctggtaaggttgactacaaagccaacgagtggctaatgaagaatatggatccactgaatgataatgtggccgccttgcttcatcagtcaaccgatcggcttaccgcggaaatttggaaggacgtggagggaattgttgggctggagcaggtctcaagcttgggcgacggaccgcccggtggcaggcccagaaggggaatgttcagaacggtggggcagctctataaggagtccctgtcaaggctgatggcaacactgtcaaataccaacccatcgtttgtccggtgcattgttcccaaccacgagaagagagctggcaaactggaacctcgcttagtgctggaccagcttcgctgtaacggtgtgcttgaaggcatacgcatttgccggcagggcttccctaatcggatcctgtttcaggagttcagacagaggtacgagatcctaaccccgaacgctataccaaagggctttatggatggcaagcaggcctgcgaaaaaatgattcaggcattggagctggacccaaacctgtaccgtgtggggcagagtaaaatattcttccgggccggggtcctagctcagttagaagaagaaagggatctgaaagtaactgacatcatcgtcagtttccaggccgccgctagaggttatcttgctcgaagggccttccagaaacgccagcagcagcagagtgccctgcgagtgatgcagcgcaactgtgccgcctacctcaaactgcgccactggcagtggtggcgtctgttcaccaaagtgaagcctctgttacaggtgacacgtcaggacgaagtgctccaggctagggcacaggagcttcaaaaagttcaagaactgcaacagcagtccgcaagagaggtaggtgagctgcaaggacgggtggctcagctggaggaagagcgggcacgactggcggaacagctgcgggccgaagccgaattgtgtgccgaggccgaagaaacacgtggacggctcgcagcgcggaagcaggaacttgaactggtggtgtccgagttggaagcgcgcgtgggcgaagaagaggaatgcagtcgacagatgcagactgagaagaaacgcctccaacagcatattcaggaactcgaggcccacctggaggcagaagaaggagctaggcagaagctgcagctcgagaaagtgactaccgaagcaaaaatgaagaagtttgaggaggatctgcttttgcttgaagatcagaactcgaagctttctaaagagcgcaagctcttagaggacaggttggccgaattctcaagccaagcagccgaggaagaggagaaggtcaagtcccttaacaaactgcgcctcaaatacgaggctactattgctgacatggaggaccgcctaagaaaagaagagaaaggcaggcaggagcttgagaaactgaagaggagattggacggcgagtcaagcgaactgcaagaacaaatggtagagcagcagcagagggccgaagaactgcgggcgcagttaggacgcaaagaggaagaactccaggctgcgcttgcccgggcagaggatgagggcggcgcccgggctcagttgctaaagagtctgcgcgaggcgcaggccgcccttgccgaggctcaagaagacttggaatcagaacgtgtcgcccgaactaaagcggaaaaacagaggagggatctgggcgaggagctggaagcactccgtggagagctggaagatacccttgactccactaatgcacagcaagagctgcgcagcaagcgagagcaggaagtgaccgagctgaaaaagaccctggaagaagaaactcggatccacgaagccgcagtgcaggagttgaggcagcgacatgggcaggcccttggcgagctggcagagcagctagagcaggctcgcaggggcaagggcgcctgggaaaagacccgattggccctggaagccgaggtgagcgaattgcgcgccgaactgtcttcacttcaaaccgcgcggcaggagggagaacagcgacgccgacgcctggaactgcagttgcaagaagtccaaggcagggcaggagatggcgagcgagcgcgagcggaagccgctgaaaagctgcagagagctcaggccgagctggagaacgtgtcaggcgcactcaatgaagctgagagtaagacaattagactttctaaggagctgtcaagtactgaggctcagttgcacgatgcccaggagcttctgcaggaagaaaccagggcaaaactcgctcttggttcccgcgtcagggcaatggaggcggaagccgctggattgcgcgagcagttggaagaagaagcagccgcccgagagcgagccggacgggagctccagacagcccaagcacagctaagcgaatggcgccgccggcaagaggaggaggccggtgctcttgaagcaggcgaggaagctagacggcgagccgcccgagaagccgaggcattaacccagcggttagccgagaagaccgagaccgtggatcgactcgagagagggcggcgccgcctgcagcaagaactggacgacgcgaccatggatttggagcagcaaagacagttggtcagtacccttgagaaaaagcagagaaagtttgaccagctgcttgcagaggaaaaggctgctgtcctgagagccgtggaggagcgtgagcgggcggaggcagaaggtcgggaaagggaagcgagggcgctgtcgcttactcgtgcccttgaggaagaacaggaggcccgtgaggaactggaaaggcagaaccgggctctgcgtgcagaactggaggcccttctttctagtaaagatgatgtgggcaaatccgtgcatgagcttgagagggcctgcagagtggccgagcaggctgccaatgacctgcgagcccaagtgaccgaactcgaggacgaattaacagctgccgaggatgccaaactgcgactggaggtcaccgtgcaggccttaaaaacacagcatgagagagacctgcagggtagagatgaagccggcgaagagaggcgacgacagctggccaagcagctgagggatgcagaggtggagcgagatgaggagcgcaagcagcgcactctcgccgtggcagctcggaagaagcttgagggcgaactggaggagctaaaagcgcaaatggcctcagccggccagggaaaagaagaggcagtgaaacagctgagaaaaatgcaagcgcagatgaaggagttgtggagagaagtggaagagactaggacatcgagagaggagattttcagtcagaatagagaatcagaaaagagattgaaaggtcttgaggcagaagtgctgcggctgcaggaagagctagctgcaagcgaccgggcccgcagacaggcacagcaggatcgggacgaaatggctgatgaagtggcgaacggcaatctgagcaaggctgccattttagaggaaaagcggcagctggagggcaggctcggccagctagaggaagagctggaagaggagcagagcaattccgagcttctcaatgacagataccggaagcttcttttacaggtggaatcactgaccaccgagctttcagccgaaaggagtttctctgctaaggctgaatctgggcgccagcagctggagaggcagattcaagagctgcgcggacgactcggcgaggaggacgccggggctcgagccaggcataagatgacaatagcggctctcgagagtaaattagctcaagcagaagagcagctggaacaagagacgcgtgaacggatcctttcagggaagctcgtgaggcgggcagaaaagcggctgaaggaggtggtcctgcaggttgaagaagaaagacgggtcgccgaccagcttagagaccagctggagaaaggcaacctgagggtgaagcagttaaaacgccaactcgaggaagccgaggaggaagcctctcgcgcacaggccgggcgccgacgactgcagcgagagttggaagatgtgaccgagtcagccgagagcatgaatcgcgaagttaccactcttcggaatagacttcgccggggtcccttgacttttaccacaaggactgtccgacaggttttccgcctggaggaaggagtggcaagcgatgaggaggccgaggaggcgcagcccggctcaggaccatcacctgagccggagggcagcccgcccgcccaccctcaatag

SEQ ID NO: 196302 - DNA, 6111 bp, synthetic construct
  misc_feature 1..6111: note = Description of Artificial Sequence: Synthetic coding sequence
  source 1..6111: mol_type = other DNA
atggccgccgtgaccatgagcgtgcccggccggaaggcccccccccgacccgggccagtaccggaagctgctcagccctttctgttcacgccccgcggtccctctgccggcggaggtcctggtagtgggacctcacctcaggtcgagtggacagccagaaggttggtatgggttccaagcgagttacacggctttgaggccgcagccttgagggatgagggagaggaagaggctgaggtggagcttgccgaaagtggccgaagactccgcttaccccgggatcagatccagagaatgaatccccctaaattttccaaggccgaggacatggcggaactgacctgtctgaacgaagctagcgttctccacaatttaagggaaagatactacagtggactgatctacacatattctggcctgttctgtgttgtgatcaacccctataagcagctgcccatctacacagaggccattgtggaaatgtacaggggcaagaaaaggcatgaagtgcctccacatgtttacgccgtcactgaaggcgcatatcggtcaatgctgcaggacagagaagaccagtctattttgtgcacaggggagtccggagccggtaaaactgagaacaccaagaaagtgattcagtatcttgcacacgtggcttccagcccgaaggggcgcaaagaacccggtgtgccggtaagtaacccagccctgggttggggcgagctggaaaggcagctcctgcaggccaaccccatcctggaggcctttggcaacgcaaaaacagtgaaaaacgataatagttccagattcgggaagttcatcaggattaacttcgatgtggcaggctatatcgtgggcgccaacatcgaaacctacctgctagagaagtcccgggcaattagacaggccaaagacgaatgttcattccacattttttaccaacttttgggcggggctggcgaacagctgaaagcagatttgctgttggaaccatgctcccattatagattcctaactaatggcccgagctccagccccggccaggagcgcgagctgttccaggagacactggaatccctgcgggtgttgggattttcacatgaagaaattatctcaatgttacgcatggtttccgcagtcttacagtttggcaacattgcccttaagcgcgagcgcaacactgaccaggccacaatgccggataacactgcggcacaaaaactgtgccggctcttgggcttgggcgtgactgacttctcacgtgctctattgactcctaggatcaaggtaggaagggactatgttcagaaagcccaaaccaaagagcaggcggactttgccctcgaggccctggccaaggctacctacgagaggttgttcagatggttggtgcttcggcttaatcgtgcgctggataggagtcctcggcaaggcgccagcttcctcggaatcctggacatagctgggttcgagatttttcagcttaactcattcgagcaactgtgcattaactataccaacgaaaaacttcagcagctgttcaaccacaccatgtttgttctcgagcaggaggagtatcagagggagggaattccatggacatttctggactttggtcttgatcttcagccttgtattgacctcatcgaacgaccagctaatcctccgggcttactcgctctgctcgatgaggaatgctggtttcctaaggccaccgacaagtctttcgtggaaaaggtcgcacaggaacagggcgggcaccctaaattccagcgcccaagacatttgcgcgatcaagccgacttctccgtcctacattacgccggtaaggttgattataaggctaacgagtggttgatgaaaaatatggatcctctcaatgacaatgttgccgcattactacaccagtctacggacagactgacagccgagatctggaaagatgaacacggggggtttcagcagttcagcttcctaggaagctttcctcctagtcccccaggctccgcagaacggtgttctagcgctatcagcccacctggagtggaagggatcgtgggactggaacaggtgtcctccctgggcgatggaccacctggagggcggcctcgccggggcatgtttcggacagtgggccagctgtacaaggaatctctgtctcgcctgatggctaccttatctaacactaatcccagctttgtcaggtgcattgtgccaaaccatgaaaaaagggccggtaaactcgagcctcgactggtgttggatcagttgcggtgcaatggggttctggaaggaatccgcatttgccgccagggtttcccaaatagaatcttgttccaggaattccgacagcgatatgaaattctgacacccaatgccattccaaaagggttcatggacggtaagcaagcctgcgaaaaaatgatccaggccctggaacttgatcccaacctatatagagttggtcagagtaagatcttttttcgcgctggagtactggcccagctcgaagaggagcgggatctgaaagtcaccgatattattgtttctttccaggctgctgcgagaggttacctggccagaagagcattccagaagcgccagcagcaacagagtgctctcagagtcatgcagcgaaactgtgctgcgtacctgaaactccgccactggcagtggtggcggttatttacaaaggtcaagcctctgcttcaggtgacacggcaagatgaggtcctacaagcacgcgctcaggaattgcagaaggtccaagaactccagcagcaatctgcgcgggaagtgggggagctccagggcagggttgcacagctggaagaagaacgggcccggctggctgagcagctgagggccgaagccgaactctgcgccgaagcagaggagactcgcggaaggttggccgcccggaagcaggaattggaactcgtggtgtccgagctggaggctagagtgggcgaggaggaagagtgtagccggcagatgcagacagagaaaaagcgcttacagcagcacattcaggaactggaggctcacctggaggccgaagaaggcgctcgccagaagttgcaactggaaaaggttacgactgaagccaaaatgaaaaaatttgaggaggatctgctgctcctcgaagatcagaatagcaagctatcaaaggagagaaagctgctggaagacagactggctgaattttcaagccaggccgctgaagaggaggagaaggttaaaagtctgaataaactgagactcaaatatgaagcaaccattgccgacatggaggatcggctccgcaaggaggaaaaaggacgccaggaactggagaaactgaaaaggcgtttggatggggagtcttcagagctgcaggagcagatggtcgaacagcagcagagggctgaggagttgcgagcgcagctcggacgcaaagaggaggaattacaggctgcgctcgcccgggcggaggatgagggtggcgctagagcccagttgcttaaatcccttcgggaagcccaggctgccttggccgaagcacaagaagacctggagtccgagcgggtggcccggacaaaggccgagaagcagcggagagacctgggcgaggaactcgaggcccttcggggtgaactcgaagatactctagacagcacaaatgcccagcaagaactgcgctccaagagagagcaagaggtaaccgagctgaaaaaaaccctagaagaagagacccgcatccacgaagctgccgttcaagaattgcggcagcgacacggacaggccctgggagagctcgcagagcaactagagcaagcccgaaggggaaaaggggcctgggagaagactcggctggcccttgaagccgaggttagcgagctgagggcagaactatctagcctacagactgcgaggcaggagggcgagcaaaggcgccggagactggagctgcagctgcaggaagtgcaaggacgggctggggatggtgagagagcaagagcagaggctgccgagaagctgcaaagggcccaagccgaactagagaatgtttctggagccctgaacgaagcggaatctaagaccattcggctgtccaaggagctgtcgtccactgaggcccagctacacgacgctcaggaactgttacaggaggagacccgcgcaaagttagcactggggtcaagggtgagagccatggaagctgaagcagccggactgcgggagcagctagaggaggaggccgcagccagggaacgcgcaggtagagaactgcagactgctcaggcccagctgagcgagtggcgacgtcgacaagaggaggaggccggagccctcgaggccggagaggaggccaggagacgcgctgccagggaggctgaggcattgacacagcggctggcggagaagacagagacggttgaccgcttggaacgcggtcgacgaaggttgcagcaggagttagacgatgccacaatggatttggaacagcagaggcagttggtgagtacgctggaaaagaagcaaagaaagttcgatcagctgctggccgaggaaaaggcagccgtgctaagagccgttgaagaacgcgaaagggctgaagccgagggaagagaacgggaagcgcgggcactcagcttgaccagagcgttagaggaggaacaggaggctagggaggagttggaacgacagaacagggccttaagagcagagcttgaagccctcctatcttctaaagatgatgttggtaaatcggttcatgaattggagcgggcttgcagggtcgcagaacaagccgctaatgatctgcgcgcacaggtcacagaactggaggatgagttgaccgccgccgaagatgcgaagctccggcttgaggttactgttcaagctcttaagactcagcacgaacgagatcttcaggggcgggacgaggccggggaggagcggcgacgtcagctcgcaaagcaactgagagatgctgaagtggaaagagatgaagagaggaaacagagaactctagcagtcgccgccaggaaaaagcttgagggagaactggaagaactgaaggctcaaatggcctccgccggccagggtaaggaagaggccgtgaagcagctgaggaagatgcaggctcagatgaaagaactgtggagagaagttgaggagactcgcacttcacgcgaggaaatattcagccagaaccgagagtcggagaaaagacttaaaggcctggaggccgaggtgctgaggctccaggaggaattagctgcgtccgatcgcgctagaaggcaggctcagcaggatcgagatgagatggcagatgaagtggctaatggcaacctgagtaaggcagctatcctagaagagaagcgacagttggaaggtcgtctcggccaactggaggaggagcttgaggaggagcaatctaatagtgaattgttgaacgatcgataccggaagctcttgctacaggtggaaagcctgacaaccgagctttccgcggagcgctcattctctgccaaagccgagagcggacgccagcagcttgaaagacagatacaggagctgcgcgggcgccttggcgaagaagatgctggagccagggcccgacataagatgacgatcgcagctctggagtcaaagctggcacaggcggaggagcagctcgaacaggagacaagggaaagaatccttagtgggaagctggtccggcgtgcagaaaaaagactgaaggaagtggtgcttcaggtagaagaagagcggcgagtggcagaccagctgcgtgaccagctggaaaagggtaatctaagggtgaaacaactgaagcgacagttggaggaggctgaagaggaggcgtcgagagcacaggcaggccgtcgacggctgcagcgggagcttgaggacgtgaccgaaagcgccgagtcaatgaaccgggaggtgactacactccggaatcgtttgcgcagggggcctctgacgtttaccacacgaacagtacgccaggtcttccggctcgaggagggcgtggcctctgacgaagaggcagaggaggctcagccaggctcaggaccctccccagagccagaggggtctccacccgcgcatccacagtag

SEQ ID NO: 196303 - DNA, 5841 bp, synthetic construct
  misc_feature 1..5841: note = Description of Artificial Sequence: Synthetic coding sequence
  source 1..5841: mol_type = other DNA
atggtggagagctgcctgctgaccttccgggccttcttctggtggattgcactcattaagatggacctgtccgatctcggggaggcggccgccttcttgcgacgatcagaagcagagttactgctcctgcaagctaccgctctggacgggaagaagaagtgctggatcccagacggagagaatgcgtacattgaggccgaggtgaaaggcagcgaagacgatggcactgtgattgtcgaaacagcggacggagaatcgctttcaattaaggaagataaaattcagcagatgaacccaccagagttcgagatgatcgaagacatggcaatgctcacccacctcaacgaggccagcgtactgcacactctaaagaggcggtacggccagtggatgatctacacatatagtggacttttctgcgttaccatcaatccttataaatggctgcctgtgtaccagaaagaggtcatggccgcctataagggtaagagaaggagcgaagctccaccacacatcttcgccgtggccaacaatgcttttcaagacatgctccacaaccgtgagaatcagtcaattctcttcacaggagaatccggtgcaggcaagactgttaactcaaagcacattatacaatattttgcaaccatcgcagcgatgatcgagtccaggaaaaaacagggagccctcgaggatcaaattatgcaagcaaataccattctggaagcatttggcaatgccaaaacactgcgcaatgacaactcatcgagatttggcaagtttatcagaatgcacttcggagccagaggcatgctttctagcgtggacatcgacatctacctcttggaaaaaagtcgggtgatattccagcaagccggtgaaaggaattaccatatcttttaccagatccttagcggccaaaaggaactccacgatctcttactcgtttccgctaatcctagcgacttccacttctgttcttgtggcgcagtaactgtcgagagcctcgacgacgcagaagagctgctggcaacagagcaggctatggatattctggggttcctaccagatgaaaaatacggctgttataagttaactggtgccataatgcacttcggaaatatgaagtttaaacaaaaaccccgggaggaacaacttgaggccgacggcaccgaaaatgccgacaaagcagcatttttgatgggcatcaattccagcgaactggtgaagtgtttaatccaccctcgcattaaagtgggtaatgaatatgtcactaggggacagacaatagaacaggtcacatgcgcagtgggcgccctgtccaagtctatgtacgagcgcatgtttaagtggctggtggcacggattaaccgtgccctggacgctaagttaagtcgtcaattcttcatcggaatcttggacattactggattcgagatcctggagtacaattcactggagcagctgtgcatcaactttaccaatgagaagctgcagcaattctttaactggcatatgtttgtgctggagcaggaagagtacaaaaaagaatccatcgagtgggtgtcaatcggatttggactcgacctccaggcatgcatagacctgattgagaaacctatgggtatcctgagcatactcgaggaggaatgcatgttccccaaggccacagacctcacatttaaaactaaactgtttgataaccattttggtaagtccgtgcatctgcagaagccgaaaccggataagaaaaaattcgaggctcacttcgaactcgtgcactatgcaggagtagtgccatacaatattagcggatggctcgagaagaataaggacttgttaaacgagactgtggtggccgtctttcaaaaaagcagtaatcgcctgttggcaagtctgttcgagaactacatgagcactgattcggccatcccattcggcgaaaaaaagaggaagaaaggcgcctcttttcagactgtcgccagtcttcataaggaaaacctcaataaactgatgaccaatctcaaatctaccgcccctcattttgtgcggtgcatcaacccaaacgtgaataagatccctgggattcttgatccgtacctggttcttcagcagctcagatgtaacggagttctggaaggaacacgtatatgcagagaaggattcccgaatcgactccaatacgcagatttcaagcagcgctactgtatcctaaatccccggacattccccaagtctaaattcgttagctccagaaaggccgcagaagaactccttgggagcctggaaatagaccacactcagtatcggttcggaatcactaaggtatttttcaaagcaggcttcttaggtcagctcgaggcgattagggatgagcggctgtccaaggtattcacgcttttccaggctcgagctcagggtaagctaatgcgtatcaaattccaaaaaatactcgaagagcgggatgccttgatcctgatccagtggaacatccgagcatttatggcagtgaaaaactggccctggatgcggcttttctttaagatcaagcccctagtcaagtctagtgaggttggtgaagaggtcgctggtctcaaagaggagtgtgcgcagctccagaaagcgctcgagaaaagcgagttccagcgcgaggaattgaaggcgaagcaggtttccctgactcaggaaaagaacgacctgatccttcagctgcaggcagaacaggagaccttagcaaatgtggaggagcagtgtgagtggttgatcaaaagcaaaattcagttggaagctagggtaaaggaactcagcgaacgtgtcgaagaggaggaggagatcaacagcgagctgaccgctagaggcaggaagctggaagacgaatgcttcgagctgaagaaagagatagatgatcttgagacgatgctcgtcaagtccgaaaaagagaagcgcacaaccgagcataaagtgaaaaacctcaccgaggaagtagaattcctgaatgaggatatctccaagctcaatcgggccgctaaagttgtgcaggaggctcatcagcaaactttagacgatctgcacatggaagaggaaaagctgtcctccttatctaaggcgaacctgaaactcgaacagcaagtcgacgaactcgaaggggccctagaacaggagagaaaggcccgaatgaattgtgagagggaactccataagctggaggggaatctgaagctcaacagggaatctatggagaatttggaaagctcccagcggcacttggccgaagaactgaggaaaaaagagctggaactgtcccagatgaactccaaagttgaaaacgagaagggcctggttgcacagctgcagaaaacagtcaaggagctgcagacccagattaaggatctgaaggaaaagctggaggccgaacgcactacaagggccaagatggaaagggagcgagctgatctgacacaggacctggccgatctcaacgaacgcctcgaggaggtgggaggcagttccctggctcaactagagatcacgaagaagcaggagacaaagtttcagaagctgcacagggatatggaggaagctaccctccatttcgaaacaaccagcgcctctttaaagaaacgccacgccgacagcctagcagaactcgagggccaggtggaaaaccttcaacaggtgaagcagaagctggagaaagacaagtctgatttgcagctggaggtggatgatctactcactcgggtggaacaaatgacacgggccaaggcaaacgctgagaaactttgtacattatatgaagagcgcctccatgaagccactgccaagctcgacaaggtcacccaactcgcaaacgacctggcggcacagaaaacgaaattatggtcagaatccggggagtttctcaggaggctggaggaaaaggaggctctcattaaccaattgtcgagggaaaagtctaattttacaagacagattgaggatcttcgaggtcagctggaaaaagagactaagtctcagtccgctcttgcgcatgctcttcaaaaggcacaaagagactgtgatctcttgagggagcagtacgaggaggagcaggaggtcaaagcagagctgcataggactctgtctaaggtcaacgcggaaatggtgcaatggaggatgaaatacgagaacaatgttattcagcggacagaagatctcgaagatgcgaagaaagagctggctatcaggctccaagaagccgctgaggccatgggggtggcaaacgctcgaaacgccagtctggaacgtgctcgccatcagctccagctcgaacttggcgacgccctttccgacctggggaaagttcggagcgccgccgctcgactggaccagaagcaactgcaatctggtaaagctctcgctgactggaagcaaaaacacgaggagagtcaggccttactggacgcctcacagaaggaagtgcaggctctgtctacggagctactgaaattgaagaacacttatgaagaatctatcgttggacaggagactctgcgtagggagaacaagaacctgcaagaagagatcagtaacctgaccaatcaagtcagagaaggcacgaaaaacctcaccgagatggaaaaggttaaaaaactgatcgaggaggaaaagaccgaagtgcaggtaactctggaggagaccgaaggtgcactcgagcgtaatgaatcgaagattttgcacttccagctggagctgctagaggctaaagccgaattggagaggaagttaagcgaaaaggatgaggaaattgagaattttaggagaaaacagcagtgtacaatagacagcttacagtccagcttagattccgaagctaagagcagaatagaagtcactagacttaagaagaaaatggaagaggacttgaacgaaatggagctgcagctcagctgtgctaaccggcaggtgtctgaagcaacgaaatccttaggtcagttgcaaatacagatcaaagatctgcagatgcagctggatgacagcactcagcttaattctgacctgaaggaacaggttgctgtggcagaaaggcgtaactcactcctacaaagcgaactggaagatctaagaagccttcaggagcagacagagcggggccggcgattgtcggaagaggagttgttggaggccaccgagagaatcaacttgttctatacccaaaacaccagcctcctgtcccagaaaaaaaagctcgaggccgacgtggccaggatgcagaaagaagccgaagaagtggtgcaagagtgccagaatgctgaagagaaggcaaagaaagcagccatcgaagcagctaatctgagcgaggagctcaagaagaaacaggacacaattgcccatctggaaagaactcgcgaaaatatggagcagacaattactgacctccaaaagagattggcagaagccgagcagatggctctcatggggtccaggaaacaaatacagaaacttgagagccgggttagggagttggagggagagctggagggagaaattcggaggtccgcggaggctcagagaggagcccgcaggttagagcggtgcataaaagagctcacatatcaggccgaagaagataaaaaaaatctctccagaatgcaaacccagatggacaaattacagctgaaggtccagaactacaagcagcaggtcgaggtggctgagactcaggctaatcagtacttgtcgaaatacaagaaacaacaacacgagctgaatgaagttaaggaaagagctgaggtggcggagtcccaggttaacaagctgaagataaaggcgagggagtttggcaagaaagtccaggaagagtag

SEQ ID NO: 196304 - DNA, 5826 bp, synthetic construct
  misc_feature 1..5826: note = Description of Artificial Sequence: Synthetic coding sequence
  source 1..5826: mol_type = other DNA
atgagcagcgacagcgagctggccgtgttcggcgaggccgccccctttctgaggaagtccgaacgggaacgcattgaggcgcagaataggccatttgacgccaaaacctctgtgttcgtggccgagccgaaagaatccttcgtgaaaggtacaatccagtcccgggaaggcggcaaggttaccgttaagacagaaggcggggccaccttaactgttaaggacgaccaggtgttccctatgaacccccctaaatacgacaaaattgaggacatggccatgatgactcatttgcatgaaccagctgttctttataacctgaaagagcgatacgctgcctggatgatttacacatattcagggttattttgcgtgacggtgaatccatataaatggctgccggtctacaagcccgaagttgttaccgcctaccgcggtaagaaaaggcaggaagcaccaccacacatcttctccataagcgacaacgcttaccagtttatgctaacagatcgcgagaaccagagtatcctgatcactggcgagagcggagctggcaagaccgtgaacacaaaacgcgtgatccagtattttgccactatcgctgtaaccggcgagaagaaaaaagaagaaattactagtggtaagattcagggtacgttggaggatcaaataatctcggcaaaccccctgctggaagcgttcggaaatgccaagaccgttcggaacgacaatagcagcaggtttgggaagttcattcgaatccattttggtacaacaggaaagctcgcttccgcagatattgagacgtacctgttggaaaagagtcgggtggtgtttcaactgaaagccgagcgtagttaccatattttttaccaaatcacatccaataagaaacccgagctgatcgagatgctgctgataacaaccaacccctatgactatccctttgtctctcagggagagatctcagtggccagcattgacgaccaggaggaacttatggctaccgacagtgcgattgacatattgggttttaccaatgaggagaaagtctcgatctataaacttaccggagctgtgatgcattacggcaatctcaagttcaagcaaaagcagcgggaagagcaggctgaacctgacggaacagaagtcgcggataaagccgcgtatctacagagtctaaattcagctgacctcctgaaggcactctgttaccccagagtaaaggtgggcaatgagtatgtgacaaagggacagactgtggagcaagtgagcaacgctgttggtgcactcgctaaggccgtctacgaaaagatgttcctttggatggtagctcgcattaaccagcaactcgataccaaacagcctaggcagtatttcatcggggtgctggatattgccggctttgagatcttcgattttaattcgctggaacagctctgcattaactttaccaatgagaaactgcaacagtttttcaaccaccacatgttcgtgctggagcaggaagagtacaaaaaagagggtatcgagtggacattcatagactttggcatggacctcgcagcctgcatcgagcttattgaaaagcccatgggaatattttcaatactggaagaagagtgcatgtttccaaaggcaacagatacaagctttaaaaacaaactttacgatcaacatctgggaaaatccgctaactttcaaaaaccaaaggtggtgaagggaaaagctgaggcccacttcgcactgatacactacgcaggcgtggtggactacaatattactggctggctcgagaagaacaaagatcccctgaatgaaactgttgtgggactgtatcaaaagagcgctatgaaaacgcttgctcagctcttctcgggcgcgcagaccgcggagggggagggcgctgggggcggtgccaaaaaaggggggaagaagaaagggtctagcttccaaaccgtgtccgccctcttccgcgaaaatctgaacaagctgatgacaaatctgcgatccacacacccccactttgtccgatgcattatccctaacgagacaaaaacccccggcgcaatggagcacgagttagtcctgcaccagctcagatgcaatggtgtcctcgaaggaataaggatctgccggaagggtttcccctctcgcatcctatatgctgatttcaagcagcgatataaagtcctgaacgcttccgctatccctgagggccagtttatagacagcaaaaaggcatccgagaaactcttggcgtcaatcgacatcgatcatacccagtacaaatttggccataccaaagttttcttcaaagccggcttgcttgggctgctggaggagatgagagacgataaattggctcagctgattactagaacacaagctagatgtcgcggattcctcgcaagggttgagtatcagcgcatggtggagcggcgagaggccatcttttgtatccagtacaacatcagatcattcatgaacgttaagcactggccatggatgaaactgttttttaaaattaagccactgcttaagtccgccgaaactgagaaggagatggcaacaatgaaggaagaattccaaaagatcaaagatgagctcgccaaaagtgaagcaaagaggaaagaactcgaggaaaaaatggttaccctgctgaaggaaaagaatgacttgcaacttcaggtacaggccgaagcagagggcctcgccgacgccgaggagcggtgtgaccagctcattaagacaaagatccagttggaggccaaaatcaaagaagtgaccgaacgggcagaagatgaggaagagatcaacgcagagctcaccgccaagaaacgaaagcttgaggatgagtgctccgagcttaagaaggatattgacgacctggaattaactctggctaaggtggagaaggaaaagcatgccaccgagaataaggttaagaatctgaccgaggaaatggctggcctggacgagaccatcgcgaaactaactaaagagaaaaaagccctgcaagaggcacatcaacagacactcgacgacctgcaagcggaggaggacaaagtaaacaccctcaccaaggcgaaaattaagctggaacagcaggtggacgatcttgagggctctcttgaacaggagaaaaagctcaggatggatcttgaacgggctaagcgcaaactggagggggatctgaagctggctcaagaatcaatcatggacattgagaacgaaaaacagcaactggacgagaagctgaagaagaaagaatttgaaatctctaaccttcagagcaaaatcgaggatgaacaggccttaggcatccagttacagaaaaaaatcaaggagctgcaggctcggatcgaggaactagaggaggaaatagaggccgagagggcatcccgagccaaggcagagaaacaaagatccgatttgtcacgggagctggaggagatttctgaacggctggaagaggcgggcggtgccacatctgctcagatagagatgaataaaaaacgggaagcagaatttcagaagatgcggcgggacctggaggaggccactttacagcacgaggcaacggctgcgaccctcagaaagaagcacgccgattcggtggccgagctgggtgagcagattgataacctacaaagggttaagcagaagctcgagaaggaaaagagcgagatgaagatggagatcgatgacctggcctccaatgttgagactgttagcaaggcgaaaggcaatctggagaaaatgtgtagaaccctggaggaccagctcagcgaactgaagtcaaaagaggaggagcagcaaaggttaatcaatgatcttaccgcccagagggggagactccagaccgagtccggcgagttctctcgccaactcgacgagaaggaggcactcgtatcccagctctctcgaggtaaacaggccttcacccagcagattgaggagctaaaaaggcagttagaagaagagattaaagccaagaacgcgctggctcatgccctccaatcctcaagacacgattgtgatctcctgagagaacagtatgaagaagaacaggaatccaaggccgagctccagagggccctctcaaaggccaacacggaagtagcccagtggcgcaccaagtacgagactgacgcaatccagaggacagaagaattggaggaagcgaagaaaaagttggctcagagacttcaggctgccgaagagcatgtcgaggccgtgaacgcgaagtgtgcgtctctggagaagaccaagcagcggctccagaacgaagttgaggatctaatgctggatgtggagcgcacaaatgccgcttgtgccgcactcgataagaagcaacgaaacttcgataagatcctggcagaatggaagcagaagtgcgaggaaacccatgctgaacttgaggcttcacaaaaagaagccagaagtttaggcactgaactcttcaaaatcaagaacgcttacgaagaatctctggaccaactggagacactgaagagggagaacaaaaatctacagcaagaaataagtgacctcactgaacagatcgcggaagggggtaagagaatccacgagcttgaaaagattaagaagcaggtggaacaggagaaatgcgaattgcaggccgcattagaagaagctgaagcctcattggagcatgaagagggaaagatcttaagaatccaacttgaacttaatcaagtgaaatccgaagtggaccgaaagattgcggaaaaagatgaagagatcgatcagttgaaaaggaaccatatccggatcgtggaaagcatgcagtctacactggatgccgaaattcgaagccgaaatgatgccattcggttaaagaagaaaatggaaggggatctgaatgagatggagatccagttgaaccatgcaaatcgcatggctgctgaagctcttaggaattaccggaatacgcagggaatcctgaaagacacgcagatacacttggatgacgccctaagatcccaagaagacttgaaggaacaactggcaatggttgagcggcgcgccaacctgctccaggcggagattgaggaacttcgagccaccctagaacagaccgaacggagcagaaaaatcgcagagcaagagctcttagatgcgagcgagagggtgcagttgctccacacccaaaatacaagtctgattaatactaagaaaaagctggagacggatattagtcagatgcagggagagatggaggatattctccaggaagctagaaacgcagaggagaaagccaaaaaagcgatcaccgatgccgcaatgatggcagaggagctcaagaaagagcaggatacttctgcacacctggaacggatgaagaagaacatggagcaaaccgtgaaggacctgcagttgcgcttggacgaggctgaacagctggcactgaaggggggaaagaaacagatccagaagctcgaagcgagagtccgtgagctagagggggaggttgaaagcgagcagaagagaaatgctgaggcggtcaagggactcagaaaacatgaaaggcgagtgaaggagctgacctaccagacagaggaagatcggaagaacatccttagactgcaggacctggtcgataaactgcaggcaaaagtcaagagctataaaaggcaggcagaagaggcagaggaacagagcaacaccaatcttgccaagttcagaaagctacagcatgagttggaggaggcagaagaacgcgcagatattgctgaatcccaggttaataagctgagggtgaagagcagagaggttcacacaaaagtgatctccgaggagtag

SEQ ID NO: 196305 - DNA, 5826 bp, synthetic construct
  misc_feature 1..5826: note = Description of Artificial Sequence: Synthetic coding sequence
  source 1..5826: mol_type = other DNA
atgagcagcgacagcgagctggccgtgttcggcgaggccgccccctttctacggaaatcagagcgggagaggatcgaggctcagaacaggcccttcgacgcaaagacatccgtgtttgttgccgagccaaaggagtccttcgtcaagggcaccatacagagtagagagggtggaaaggtgaccgtaaaaacagagggcggagcgaccctgacagtgaaagacgaccaagtgttccccatgaatcctcccaagtatgataagattgaggacatggccatgatgacccatctgcacgaaccagctgtcctgtacaacctaaaggagcggtacgccgcctggatgatatacacctacagtggactgttctgtgtgacggtgaatccctataaatggttaccagtttacaagcctgaggtggttaccgcctatcgcggcaagaaacggcaggaggctcctccgcacatcttctctataagcgacaatgcttatcagttcatgctgactgatcgagaaaaccagagcattttgatcacaggggaaagtggggctggaaaaacagtgaacacaaaacgcgttatccaatattttgctaccatcgcagttacaggtgagaagaagaaagaggaaataacatcggggaagatccaaggtactttggaggatcagattattagcgcaaacccccttctggaagcctttggtaacgcgaaaacagtgcgaaacgataattctagcagatttggcaagtttatcaggattcactttgggacaaccggaaagctggcgtcggccgacattgagacctatctgctcgagaagtcccgagtcgtattccaactgaaagcagagcgcagttatcacattttctatcagattaccagtaataagaagcccgaactgattgaaatgctgttgatcacaactaacccatatgactaccccttcgtttctcagggcgaaatctctgtagcttccattgacgaccaagaagaattgatggccacagatagtgcaattgatatcctggggtttaccaatgaggagaaggtctcaatttataaactcaccggtgcggttatgcactatggaaacctgaaatttaagcagaaacagagagaggaacaggccgagcctgacggaaccgaggtggcagataaggccgcttacctccagtctttgaactccgctgatctcttgaaggctttatgttaccctcgtgtcaaggtggggaatgagtatgttaccaaggggcagactgttgagcaggtgagtaacgccgtcggtgcgcttgctaaagccgtgtatgaaaagatgttcctctggatggtggctaggataaatcagcagcttgataccaaacaaccgcggcagtactttataggtgtcctggatatcgctgggttcgaaatattcgattttaacagcctggagcaattatgtatcaacttcaccaacgagaaattgcagcagtttttcaatcaccacatgtttgtgctagagcaggaagagtacaagaaggagggcatcgagtggacgtttattgatttcggcatggatctggctgcatgtatcgagctaatagagaagcccatggggatcttttcaattctcgaggaggaatgcatgtttcccaaggcgacagatacttcatttaagaacaaactatatgatcagcacctcggaaaaagcgctaactttcagaaaccaaaagtggttaagggaaaggccgaggcacattttgccctcattcactacgctggcgtcgtcgattacaatatcaccggatggctggaaaagaacaaggaccctcttaacgagaccgtggtaggactctaccagaaatctgccatgaaaactctcgctcagctctttagcggtgctcagacagcagagggggagggtgccggaggcggagcaaagaagggcggcaagaaaaagggtagcagtttccagactgtcagtgctcttttccgcgagaatctgaacaaactcatgaccaatttgcggtccacgcacccacatttcgtccggtgcatcatcccaaacgagacaaaaactccaggcgccatggagcatgagctagtgcttcatcagctgcgctgcaacggtgttctggaggggattcgcatttgtcgcaaggggtttccatcaagaatcttgtatgcagacttcaagcaaagatataaagtgctcaacgcctccgcgattcccgagggtcaatttatcgacagcaaaaaggcctccgaaaagctcctggcatcgatcgacatcgatcacactcaatataagtttggccacacaaaagtcttctttaaagctggtctcctcgggctactcgaggaaatgcgggatgataagctggcccaactgatcacacgcacccaagcgcggtgtagaggcttccttgcccgcgttgaatatcagcggatggtggaacgaagagaagccattttttgtatacagtacaacatcaggtctttcatgaacgtgaagcactggccctggatgaagctcttctttaagattaaaccccttctgaaaagtgccgagacagagaaggaaatggctactatgaaggaggagtttcagaaaataaaagacgagttggctaagtccgaggcaaagcgaaaggaactggaggagaaaatggtgaccctcctcaaggaaaaaaatgatctgcagttgcaggtccaggccgaggcggaagggcttgcagacgcggaagagaggtgcgatcaactcataaaaactaaaatacaactggaggccaaaatcaaggaggtgacagaaagggctgaagatgaggaggagatcaacgccgagctgactgcaaaaaaacgaaagttagaagatgagtgcagtgagctgaagaaagacattgatgatctggagcttactcttgcgaaagtagaaaaagaaaagcatgccactgaaaacaaagtgaagaatctgactgaggagatggccggtctcgatgagaccatagcgaagctcacaaaagagaagaaagccctccaagaggctcaccagcagacattagatgaccttcaagctgaggaggacaaagtaaatacgctcaccaaagcgaagataaagcttgaacaacaagtcgatgatctagagggatccctggagcaggagaaaaaattaaggatggatcttgaaagagctaaaaggaagttggagggggacttaaaactggcccaagagagcatcatggacatcgagaatgagaaacaacagctagatgagaagctgaaaaagaaagaattcgagatcagcaaccttcaatcaaagatcgaggatgaacaggcgctggggattcagctgcagaaaaagataaaggagttacaggcacgaatagaagagcttgaggaagagatagaagccgagcgcgcatctcgggctaaggccgaaaagcagcgctccgacctgagtagagagttagaagaaatctcagaaaggcttgaggaagcaggtggggcaactagcgctcagatcgaaatgaacaaaaaacgggaagccgagttccagaaaatgcgccgcgatctagaggaggctaccttacagcatgaagctacggcggccactctcagaaaaaagcacgccgactccgtcgctgaacttggtgaacaaatagacaacttgcaaagagttaagcagaagttggagaaggagaaatcagagatgaagatggagatcgacgacctcgcctccaatgtcgaaaccgtttcaaaagccaaaggcaacctggagaagatgtgccggaccctcgaggatcaactttcagaattgaagtccaaagaagaggaacaacagagattaattaatgaccttactgcccaaaggggcagactgcagaccgagagcggcgagttcagccggcagctggatgaaaaagaggcactggtcagtcagctttcgagaggaaaacaggcgtttactcagcagattgaagagctgaagagacagctggaggaggagattaaggccaagaatgccctggcccatgcacttcaatcttctaggcatgattgcgatctgctgagagagcagtacgaagaggagcaagagagcaaagccgagttgcagcgggctctgtcaaaggccaatacagaagtcgcccagtggagaactaaatacgagaccgatgcaatccagcgcacagaggagctcgaggaagctaaaaaaaagttagcacagaggctccaagcggctgaagagcacgtggaagccgtcaacgccaagtgtgcttctctcgaaaagaccaagcagcgcttgcagaacgaggtggaagatctgatgttagatgtagaacgtactaatgccgcatgcgcagctctggacaagaagcagaggaactttgacaagatcttagcggaatggaagcagaagtgcgaggagactcacgctgagttggaggcttcccagaaagaagcaagatcgctgggcactgagctgttcaagattaaaaacgcatacgaagagtctcttgatcaactggaaaccctgaaaagagagaacaaaaatctgcagcaggagatcagcgacctgaccgaacagatagcagaggggggaaagcgcatccatgaacttgaaaaaatcaaaaagcaggttgaacaggagaagtgtgaactgcaggcagcactagaggaggccgaggcgtctctggagcacgaggagggcaagattttaaggattcagctggagcttaaccaagtgaagtccgaagtggatcgcaagatagctgagaaagacgaggaaatcgatcagctcaagcgcaatcacattaggatcgttgaatccatgcagtctacactcgacgccgagatccgatccagaaacgatgcgatacgcctgaagaaaaaaatggagggcgatttgaacgagatggagatccagctcaatcacgctaataggatggctgctgaagcactgcgaaactaccgaaatacccaaggcattctgaaggacacccagattcatcttgatgatgctctgcgcagccaagaggatcttaaagaacagctggctatggtagagcgccgcgccaatctgctgcaggccgagattgaagaactccgggccaccttagagcagactgagcgcagtaggaaaatcgccgagcaggagctcctggatgcttctgagcgcgtccagttactgcacacccaaaacacctctttaatcaacacgaaaaagaagctggaaaccgatatatcccaaatgcagggagagatggaggacattctccaagaagccaggaatgccgaggagaaggcaaaaaaagctatcacagacgcggccatgatggccgaggagttaaaaaaggaacaggacacgtccgcccacctcgaacgcatgaaaaaaaacatggagcagacagtgaaggatctgcagctccggctggacgaggcagagcaattggctctaaagggggggaagaaacagatccaaaagttggaggcacgggtccgtgaactcgaaggcgaggtagaatccgaacagaaacgcaacgctgaggccgttaagggccttcggaagcacgagagaagagtcaaggaactcacctatcaaacagaagaagacagaaagaacattttgagattacaagacttggtggacaaactgcaagccaaagtaaagagttacaagaggcaagccgaggaggccgaggagcaatccaacacaaacctggctaagtttcgcaagctacagcacgaactcgaagaggccgaggagagggctgatattgctgagtcgcaggttaacaaactgcgggtcaagtcacgagaggtccacaccaaggttatcagtgaggaatag

SEQ ID NO: 196306 - DNA, 549 bp, synthetic construct
  misc_feature 1..549: note = Description of Artificial Sequence: Synthetic coding sequence
  source 1..549: mol_type = other DNA
atgagcagcgacagcgagctggccgtgttcggcgaggccgcccccttcctccgaaagtcagagcgggagcgaattgaggcccaaaacagaccatttgacgcaaagacatcggttttcgtcgctgaacccaaagaaagttttgtgaaaggaaccatacaatctcgtgagggcggaaaggttacagttaaaactgaggggggcgcaacccttaccgtgaaagatgatcaggtgttcccaatgaaccctccaaagtatgacaagatcgaagatatggcaatgatgacccacctgcacgaaccagcggtgctctacaatctcaaagagcgatatgctgcttggatgatttacacttactctggacttttttgtgtcaccgtaaatccttacaagtggcttcccgtttacaagcctgaggtggtcaccgcttatagggggaagaaacgacaggaagccccacctcacattttcagtatcagtgacaatgcctatcaattcatgttgaccgatagagagaaccaaagtattttgatcaccggggagtctggctag

SEQ ID NO: 196307 - DNA, 405 bp, synthetic construct
  misc_feature 1..405: note = Description of Artificial Sequence: Synthetic coding sequence
  source 1..405: mol_type = other DNA
atgagcagcgacagcgagctggccgtgttcggcgaggccgccccctttttgcgcaaatctgagcgggaaaggattgaagcccagaatcgacctttcgatgcgaagacatcagtgtttgtcgccgaacccaaagaaagcttcgttaagggcaccattcaaagcagggaaggaggaaaggtcacagttaagaccgaaggcggggccacacttactgtgaaggacgaccaagttttccccatgaaccctccaaaatacgataaaatagaagatatggccatgatgacgcatcttcacgaacccgcagtgttatacaatctgaaagaaagatacgccgcatggatgatctatacctatagcggcctgttttgcgtgaccgtgaacccatataagtggctgccagtctag

SEQ ID NO: 196308 - DNA, 2127 bp, synthetic construct
  misc_feature 1..2127: note = Description of Artificial Sequence: Synthetic coding sequence
  source 1..2127: mol_type = other DNA
atgagcagcgacagcgagctggccgtgttcggcgaggccgccccctttttgcgcaaaagcgaaagggaacgtatcgaagcgcaaaaccgccccttcgatgcaaagacttccgtgttcgtggccgagcccaaggaatcattcgtgaaggggacaatccagagccgcgagggagggaaagtgactgtgaagaccgagggcggcgccacccttacagtgaaggacgatcaggtcttcccaatgaaccctcccaagtatgataagattgaggacatggctatgatgacccacctgcatgaacccgctgtgctgtacaatcttaaggaacgatacgccgcctggatgatttatacatactcggggctattttgcgtgactgtgaacccctataaatggctgccagtttataagcctgaggttgtgaccgcgtataggggcaaaaaaagacaagaggcccccccccacatctttagcatctctgataacgcctaccagttcatgctcaccgacagagagaatcaaagcattctgattacaggggagtcaggggccggcaaaactgtaaacaccaagcgggttatccagtacttcgccacaatagcggttacaggggagaagaaaaaggaggaaattacaagtggcaaaatccaagggacccttgaagatcagataataagcgccaacccacttttagaggcctttggtaacgccaagacggtccgaaatgataactcctctcggtttggcaagtttataaggatacactttggtaccactgggaagttggcaagcgcagacatcgaaacctacctgttggagaagtcccgagtggtgttccagctcaaggccgaacgatcttaccacattttctaccaaatcacatccaataaaaagcccgagctgatcgaaatgctgctgataacaacaaatccgtacgattatccttttgtatcccagggagagatttctgtggcgtcaatcgacgatcaggaggagctcatggcgacagattcggccattgatatcctgggattcaccaacgaggaaaaagtatctatatacaagctgacgggagccgtcatgcattatggcaatctgaaattcaaacagaagcagagggaagaacaggcagaaccagacggaactgaggtagcagacaaagccgcctacttacaaagcctcaacagcgcagatctactgaaagcactctgctacccccgggttaaggtggggaatgaatatgtgactaaaggccagaccgtcgagcaggtgtctaacgctgtgggagccctggctaaggcagtgtacgagaaaatgttcctttggatggtggcgcgcataaatcagcagctagacactaagcagccacgtcagtactttattggcgttttggatatcgcaggtttcgaaatttttgattttaattcactcgagcagctatgtattaactttacaaacgaaaaattacaacagttctttaaccaccacatgttcgttctggaacaggaagaatacaaaaaggagggcattgaatggactttcatcgattttggaatggacctggcagcctgtatcgaattgatcgagaagccaatggggattttttctattctggaggaagagtgcatgttcccaaaggccaccgatacatcctttaagaataagctatatgaccagcatctaggtaagtctgccaacttccagaagcccaaggttgtgaagggaaaagccgaggcacattttgccctgatccattatgccggggtggtggattataatataaccggttggttagagaagaacaaggatcctttaaacgagactgttgtgggtctgtaccaaaagtcggcaatgaagacccttgcacaacttttcagtggtgcacagacggctgagggcgagggggccgggggaggagcaaagaaaggcggcaaaaaaaaaggctcttcctttcagactgtgtctgcacttttccgagaggagcagtccaacacaaacttggccaagtttagaaaactccaacatgagctagaagaggccgaagaacgtgctgacattgcagaatctcaggtgaacaaattgcgtgtgaaaagccgtgaggtccacacaaaagttatctctgaagaatag

SEQ ID NO: 196309 - DNA, 5820 bp, synthetic construct
  misc_feature 1..5820: note = Description of Artificial Sequence: Synthetic coding sequence
  source 1..5820: mol_type = other DNA
atgagcagcgacagcgagatggccatcttcggcgaggccgccccctttcttcggaaaagtgagagggaacggatagaagctcaaaataaaccatttgacgctaaaactagcgtgttcgtggttgacccgaaggagtccttcgttaaggccacagtgcagtcccgggagggtggaaaggttacagccaaaacagaggccggagccacggtcaccgtgaaagacgatcaggtctttccgatgaacccacctaaatatgacaaaattgaggatatggccatgatgactcacttacacgaaccagccgttctgtataacttgaaagagcgctacgcagcctggatgatttacacttactccggactgttttgcgtgactgttaatccatacaaatggctgccagtgtacaacgccgaggtcgtcacagcgtacaggggaaagaagagacaggaagcaccaccgcacatattcagcatttccgacaacgcgtatcaatttatgctcacagatcgggagaaccagtccattttaataaccggggaaagcggcgccgggaagaccgtgaacactaaacgagtaattcagtatttcgctaccatcgccgtcacgggcgagaagaagaaggaggaggtgacctccggcaagatgcagggcaccctagaggaccagattatatccgcgaatcctctgttggaagcatttgggaacgcaaaaactgttcggaacgataatagcagccgattcgggaagttcatccgcattcactttggtaccaccggaaagctggccagtgctgacattgaaacctatctactcgaaaaaagtagggtgacattccagctcaaagccgagagatcataccacatcttctaccaaattatgtccaacaagaagccggacctgattgagatgctgctgatcaccacaaacccctacgactacgcttttgtgtcgcagggtgaaattaccgtacccagcatcgacgatcaggaggagctgatggccacagatagcgccatcgagatcctcggattcactagcgacgagcgggtaagcatctataaactgacaggagccgtcatgcactacgggaacatgaaattcaaacaaaagcaaagggaagaacaggccgaacctgacggcaccgaggtggccgacaaggcagcgtatcttcagaatctgaacagtgccgatctccttaaggccctgtgttatccccgggtgaaggtaggtaacgagtacgtcactaaagggcagacagtacagcaggtctataacgctgtcggagctctggccaaagcggtctacgataagatgttcttgtggatggtgactcggattaatcagcagctggacaccaagcagcccagacagtattttattggtgtgcttgatatcgctggttttgaaatctttgatttcaattcactggagcaactttgcattaactttaccaatgaaaagttgcagcagttctttaatcaccatatgttcgtgttggaacaggaagaatataaaaaggagggcattgaatggacttttattgattttgggatggatttggccgcatgcatcgaactgatcgaaaagcctatgggcatattttccatcctggaggaagaatgcatgttccctaaggcaactgacacctctttcaaaaacaaactgtatgagcaacacctgggcaagagtaataatttccagaagcccaagccagcaaaaggcaaaccagaagcccatttttcacttattcactacgctggaacggtcgactataacattgcaggttggctcgacaaaaacaaggacccccttaacgagactgtagtcggcctctaccagaagtctgctatgaagactctggcattattgttcgtgggagccaccggcgcggaagcagaggctggtggcgggaagaagggtggaaagaagaaaggaagcagttttcagactgtgtccgcactcttccgggaaaacctaaataaactgatgaccaatttacggtctacacatccacacttcgtgaggtgcatcatcccaaatgaaaccaagacccccggagctatggagcatgaactagttcttcatcagcttcgctgcaacggtgtactggaagggataaggatttgtcggaaaggattccccagtagaattctgtacgctgatttcaagcaacgttacaaagtgctcaacgcatccgcgattccagaaggccagttcatcgatagtaagaaggctagcgagaagctcctggggtcaatcgacatcgaccacacacaatacaaatttgggcacacaaaggttttttttaaggccggcctcctggggctgcttgaggagatgcgggatgagaagctcgcccaattgatcacgaggacccaggcgatgtgcagaggtttcttggcccgggtcgagtaccagaagatggtggagcgacgcgagtcgatcttttgcatccagtataacgtgcgggctttcatgaacgtgaagcactggccatggatgaaattatactttaaaatcaagccactccttaagagcgctgagacagagaaagaaatggctaatatgaaggaggagttcgagaaaactaaagaggaactggccaaaactgaggctaagagaaaggaattggaggagaaaatggttaccctgatgcaggagaagaatgatcttcagctccaggttcaggcagaagcagattccctggcagatgcagaagaacgctgcgatcagctgattaagacaaaaatccaactcgaagctaaaattaaagaagtgaccgaaagggctgaggacgaagaggagatcaacgcggaacttacggctaagaagcggaagcttgaagacgaatgttcagagttgaaaaaggacatcgacgatctggagttgaccttggctaaagtcgaaaaggaaaagcacgctacagagaacaaggtgaagaatctcacagaggaaatggcgggcctcgacgaaaccatcgccaagctcactaaggagaagaaagcgctccaggaggcacaccagcaaacacttgatgacctgcaagccgaagaagacaaagttaatacgctgaccaaagcgaagattaagctagaacagcaagtggatgatttggaagggagcctggaacaggaaaaaaagatccgaatggatcttgagcgggcaaagagaaaactggagggggacctcaaactggcccaagagtccaccatggacatagaaaacgacaagcaacagctcgacgagaaactaaagaagaaagaatttgaaatgagcggtcttcagtccaagattgaagatgaacaggccctcggcatgcaactgcagaagaagataaaagaactgcaggcccggattgaagagttggaggaggaaatagaggctgagcgggccagccgtgccaaagctgaaaaacagagatctgaccttagccgagagttagaggagattagcgagcgcctcgaagaagctggcggggctacgtccgcccagatagagatgaataagaagagagaagcggagttccagaaaatgaggagggatcttgaagaggccaccttgcagcatgaggccacagcagccactctgcgaaagaagcacgctgatagcgtcgctgagttgggtgaacagatcgacaatttacagcgtgtgaaacaaaaactcgaaaaggagaaatccgagatgaagatggaaattgatgacctggcctcaaacatggagaccgtctcaaaggccaagggcaacctggaaaaaatgtgcagagccttggaggaccagctcagcgaaatcaagaccaaggaggaagagcagcaacggcttatcaacgaccttactgctcaaagggctcggctgcagactgagagtggtgagtattctcgacagctagatgaaaaagacaccttagtatctcagctcagcagagggaaacaggcgtttacgcagcagatcgaggaattgaagcgtcaactagaggaagagatcaaggcgaaaagcgccctcgcacacgccctgcagtcttcgaggcacgactgtgacttgctgcgcgagcaatatgaggaggagcaggaggcgaaagccgagcttcagagagctatgtcaaaagcgaattcggaggtggcacagtggagaaccaaatacgagacggacgccattcagcgcaccgaggagctagaggaggccaagaaaaaactggcccagcgcttgcaggacgcagaagagcatgttgaagccgtaaacgccaagtgcgcctcactggagaagaccaaacaacgacttcaaaacgaggtggaggatcttatgattgacgttgaaagaaccaatgccgcttgtgctgctcttgacaagaagcagaggaactttgacaagattttagctgaatggaagcagaaatgtgaagagacacatgccgagctggaagcctcccagaaggagtcccgtagcttgtctaccgaactattcaagataaaaaacgcatacgaagagtccctggatcaactggaaacccttaagagggagaataaaaacttgcaacaagaaatatccgacctgacggaacagatagcagagggcggcaagaggatacatgaactggaaaaaattaagaagcaggttgaacaggaaaaaagtgagttgcaagcagccctggaagaggctgaggctagtctagaacatgaggaggggaaaattctgagaatccagctggaattgaaccaagtaaaaagcgaggtagaccgaaaaatcgctgagaaggacgaggagattgatcagatgaaacgtaatcatatcaggattgtcgagtccatgcagtccacactggacgctgagatcaggagccggaatgatgccataagactcaaaaagaagatggaaggtgatcttaacgaaatggagatacaactgaaccacgccaatcggatggccgccgaagccctccgaaattacagaaacacacaggcgatcctgaaggatacacaattgcatctggatgacgcccttcggtcccaggaggatttgaaggagcaactggccatggtcgagagacgagccaatctgttgcaggcagagatagaggaactccgtgcaacattggagcagacagagagaagtcgtaagattgccgagcaggagctgctcgatgcctcagaacgcgtgcagttattacacacacagaacacgagccttattaacactaagaagaagcttgaaaccgatattagccagatacaaggcgaaatggaggacatcattcaggaggcaaggaacgctgaggagaaggctaaaaaagcgattactgacgctgctatgatggctgaggaactgaaaaaggagcaggatacttccgcccatctagagaggatgaagaaaaaccttgagcaaaccgttaaggacctgcagcacaggctggatgaggcagaacagcttgcactcaagggcggtaagaaacaaatacagaagctggaggcccgagtgcgggagttggaaggagaagtcgaatcagagcaaaagcgcaacgtggaggccgtgaagggcttgagaaaacatgagcggaaggttaaagagctgacctaccaaacagaggaagaccgaaagaatatcctgcggctccaggacctggtggacaaactgcaggcaaaagttaagtcgtataaacgccaggcagaagaggcggaggaacagagcaacgtgaacttatcgaaattcaggagaatacagcacgagctggaagaggccgaggagcgcgcggatattgcagagtctcaggtgaataaattaagagtgaaatcccgggaggtgcacactaaaattatttccgaagagtag

SEQ ID NO: 196310 - DNA, 5820 bp, synthetic construct
  misc_feature 1..5820: note = Description of Artificial Sequence: Synthetic coding sequence
  source 1..5820: mol_type = other DNA
atgagcagcgacagcgagatggccatcttcggcgaggccgccccctttctgaggaagtccgaaaaggagcgaattgaggctcagaacaagccctttgatgcgaaaactagtgtgttcgtggttgaccccaaggaatcatacgtcaaggcgatcgtgcagtcgcgggagggtggtaaggtgacggccaaaactgaagctggagccacagtcaccgtgaaagaggatcaagtcttcagtatgaacccccccaagtacgacaaaattgaggacatggccatgatgacccacttacacgaacccgccgtcttatacaatctgaaggagagatatgctgcgtggatgatctacacctacagtggactattctgtgtcacagtgaatccttataaatggctgccagtgtacaatcctgaagtggtcactgcgtatcgtggcaagaagcgacaggaagcccctccccatatcttttcaataagcgataacgcatatcaattcatgctgacggatcgggaaaatcaatcaattctcattacaggtgagtctggagcaggcaaaacagtgaacacaaaacgcgtgatacagtatttcgctactattgccgtcactggcgagaagaagaaggaagaacccgcgagtggaaagatgcagggtacgctggaagatcagataatctccgcaaatcctcttctcgaagcgttcggaaacgccaagacggttagaaatgacaactcaagtaggtttgggaagttcattcgaatccactttggtgcaacaggcaagcttgcatccgccgatattgaaacttatttgctggagaagtctagggtcaccttccagcttaaggcagagcgctcctaccacatattttaccagattctttcgaacaagaagccagagctgatcgaaatgctccttattacaactaacccatacgacttcgcgtttgtaagccagggcgagattacggttcccagtattgatgatcaggaggagctgatggctaccgactcagcggtggacatactaggttttacagctgacgaaaaggttgcaatctacaagttgactggcgccgtgatgcactatggcaatatgaagtttaagcagaagcagagagaggagcaggccgaaccagatggtactgaggtggctgataaggccgcctatcttacctccttgaattcagccgatctattgaaaagtctctgctatccccgagtcaaagttggtaatgaatttgtcaccaaaggacaaaccgttcagcaggtatataatgctgtcggcgccctggctaaggccatttatgagaagatgttcctgtggatggtgacccgaatcaatcagcaactggatacaaaacaaccccggcagtattttatcggggttctggacatcgctgggtttgagattttcgacttcaattcattagagcagctttgcatcaacttcaccaatgagaaactccaacagttctttaaccaccacatgtttgttctggaacaggaagagtataagaaagagggcatagaatgggagttcatcgacttcggtatggacctcgccgcctgcatcgaacttatcgagaaacctatggggatttttagcatcctggaagaggagtgtatgtttccaaaagcaactgacacgagctttaaaaataaactgtacgagcagcacctggggaaaagtaataattttcaaaaaccaaagccagccaaagggaagcccgaggcacactttagcctggtccactacgcgggtaccgtggattacaacatagcgggctggttagataagaacaaagatcctctaaacgagactgtagtcgggctgtaccagaaatccgctatgaaaacactggcgtttctgttttcgggtgcacagaccgcagaggcagaaggaggtggggggaaaaaaggggggaaaaaaaagggttctagctttcagaccgtgagcgcactctttcgagagaacctgaataaactgatgactaatttacgctctacacatccccactttgttaggtgtattattcctaatgaaacaaagacccctggtgctatggaacatgagctggtgcttcaccaattgagatgcaatggagtgcttgagggcatcaggatttgtcgcaaagggttcccatcgcggatcctgtacgcagatttcaaacagcgatataaagtgctcaacgcgtccgctatccccgaagggcagtttattgactctaagaaagctagcgaaaaactgctgggatccatcgaaatcgaccacacccagtataagttcggacatacaaaggtgttttttaaagccggtctactcgggaccctggaggagatgagggatgagaagttggcacagctgatcaccagaacccaagctatttgtcgcggttttctcatgagagtggagttccgcaaaatgatggagcgccgggaatctatcttctgcatacagtacaacattagagcctttatgaatgtcaagcattggccctggatgaaactgtactttaaaatcaagcctctcctaaagagcgccgaaaccgaaaaagagatggctaacatgaaagaggaattcgagaaaaccaaagaagagctggcaaaaacagaggccaagcgaaaagaactggaggagaagatggttacattaatgcaggaaaagaacgacttgcagctgcaggttcaagccgaggctgacgccttggcagacgcagaagagagatgcgaccaacttatcaagaccaaaatacaacttgaggctaagatcaaagaagtgaccgaacgggcagaagatgaagaagagatcaatgctgaactgactgcaaagaaacgcaaactggaagacgaatgctctgagctgaagaaggatattgatgacctggagctaacacttgccaaagtggagaaagagaagcacgctactgagaacaaggtgaagaatttgacagaagagatggcgggcctagacgaaactattgcgaagctgacaaaggaaaagaaagctctccaggaggcccaccagcaaacccttgatgacttgcaaatggaggaagacaaggtaaataccctgactaaagctaagacaaagcttgagcagcaggtggatgatctggagggcagtctcgaacaagagaagaagctctgtatggatctcgaaagggctaaaagaaaattggagggcgacttaaagttggcccaggagtccaccatggacactgagaatgacaagcaacagctgaatgaaaaactgaagaaaaaggagtttgagatgagcaatcttcagggaaaaattgaggacgaacaagccttggccatccaactccagaagaaaatcaaggaactccaggctcgcattgaagagctcgaggaagagatagaggcagagagagccagtagggctaaggcagagaaacagcggtctgacctgtctcgagagcttgaggaaatctcagagaggctcgaggaggcagggggagcgacctcggctcaaatcgagatgaacaaaaagcgggaggccgaattccaaaagatgagaagagacctcgaggagagcactctccaacacgaggcaactgcagccgccctgagaaaaaagcatgccgactccgtggcagagctgggggaacagatagattccctgcaacgcgtcaaacagaaactcgaaaaagagaagtcagaactcaagatggagattaatgacctggctagtaatatggagacggtcagcaaagccaaggccaactttgagaaaatgtgccgtactttagaagaccagctcagcgagatcaaaaccaaggaagaagaacagcaacgcctcattaacgagctgagtgcacagaaggcgagactgcataccgagtccggggagttttccagacagctggatgaaaaggacgcaatggtctcccaactcagccgtggcaaacaggccttcacccaacaaattgaagagctgaaaagacaacttgaggaagaaacaaaggctaagtccacactggctcacgctcttcagtctgcaagacacgactgcgacctgctccgagaacagtatgaggaagaacaggaggcgaaggccgagctccagagaggcatgtccaaggctaatagtgaggttgctcagtggcgaacaaagtatgaaaccgacgcaatacagcggaccgaggagctggaggaggcaaaaaagaagcttgcacagcgtctgcaagacgcagaagagcacgtggaggccgttaatagtaagtgtgcaagtctcgagaaaactaaacaacgactgcagaatgaagtggaagacctgatgatcgacgtggagcgcagcaacgcagcctgcatcgcattggacaaaaagcagaggaacttcgataaagttttggcggaatggaaacagaaatacgaggaaacccaggccgaactggaggcctcccagaaagagagtcggagtctatcaacagagctgtttaaagtgaagaatgcatatgaagagtccttagaccacctggaaaccttaaaaagggagaataagaaccttcagcaggagatcagtgatcttacagagcagatcgcagaaggtgggaagcatattcacgagctggagaaggtaaaaaagcagctagaccatgaaaaaagcgagctgcagacgtcgctcgaggaggcagaagcatccctcgaacacgaggagggcaagatcctgagaatacagttagaattgaatcaggtgaaatccgagatcgacagaaagattgccgagaaggatgaagagctggatcagctcaaacggaaccacttacgggtcgtggagtctatgcagtcaaccctagatgcagagatccgcagcaggaacgatgctttgagaatcaaaaagaagatggagggcgacttgaacgaaatggaaatacagttaaatcacgccaaccggcaggccgcggaagctttgagaaatctccgcaacactcaggggatcctaaaggacacccagttgcaccttgatgatgctatcagggggcaagacgacttaaaagaacagctggcaatggtcgaacgaagggcaaatttaatgcaggcagaggtcgaagagttgagagccagcctcgagcgcactgaacggggaaggaaaatggcagagcaagaacttctcgatgcttcagagcgcgttcagttactgcatactcagaacacttcactcatcaacaccaagaagaaattggagaccgacattagtcaaatccagggggaaatggaagacatcgtgcaggaggcacgaaacgccgaggaaaaggcaaaaaaagcaattactgacgccgccatgatggcggaggagctgaaaaaggaacaggacaccagtgcccatcttgagcgcatgaaaaaaaacatggagcagaccgtcaaggacctgcagctcagactggacgaagccgagcagctagctctgaaggggggaaaaaagcaaattcagaagctggaggccagagtgagggagctagagagtgaggttgagtctgaacagaaacacaatgtcgaggcagtgaagggtctacgaaagcacgagaggcgcgtgaaagagctgacctatcagaccgaggaagatagaaagaatatcctgaggctgcaggatctcgtggacaagctccagacaaaagttaaagcctataagagacaggcagaggaggcggaggaacaaagtaatgtaaacctggccaaattccggaagcttcaacatgagttagaggaggcgaaggaacgcgcagatattgcagagtctcaggtcaataaacttcgcgtgaaatcacgcgaggttcataccaaggtcatcagtgaagagtag

SEQ ID NO: 196311 - DNA, 5820 bp, synthetic construct
  misc_feature 1..5820: note = Description of Artificial Sequence: Synthetic coding sequence
  source 1..5820: mol_type = other DNA
atgaccgacgcccagatggccgacttcggcgccgccgcccagtacctgagaaaatctgaaaaggagaggttggaggctcagacaaggccctttgatattaggaccgagtgttttgttccagatgataaggaggagttcgtgaaggccaagatccttagtcgcgagggcggaaaggtgatcgccgaaactgagaatgggaagaccgtgaccgtgaaggaagaccaagttctgcaacagaacccacccaagttcgataagattgaggacatggccatgctcaccttcctacacgagccagcggtactgttcaatctgaaggagcggtatgctgcatggatgatctatacttattccggactattctgcgtgacagtcaacccttacaagtggctgcctgtctacaacgcggaagtggtggcagcttacaggggcaagaagcgctctgaggcacctccgcatatcttcagcatttcagacaatgcatatcagtatatgttgacagatagggaaaaccagtccatcctcatcactggtgagagtggagcaggcaagactgttaacacaaaaagagtgattcaatacttcgcctctatagcagccatcggagaccggggaaaaaaggataacgctaacgcaaacaaaggaactctagaggaccagatcattcaggcaaatcctgcgctcgaagctttcggcaacgctaagacagtgcgcaacgataattcttcaaggtttggcaagttcatacgaattcacttcggtgctacgggaaaactcgcctcggcagatattgaaacttacctattggaaaagtctcgagtgatctttcagctcaaggccgagcgcaactatcatatcttctatcagatcctttctaataaaaagcctgaactgttagacatgctcctggtgaccaacaacccttatgattacgcctttgtgagtcagggggaagtgagcgttgctagcattgacgacagcgaggaactaatggcaaccgactctgccttcgacgttttgggctttacgagtgaagagaaagccggcgtctataagttaaccggcgcaatcatgcattatggtaacatgaagtttaaacagaagcagcgtgaggaacaggctgaacctgatggcaccgaggatgccgataaatctgcctatttgatgggattaaactctgctgatcttctgaaagggctgtgccatccgcgagtcaaggtagggaatgagtatgtgacaaagggccagtcggtgcagcaggtctactactccattggcgccctcgctaaggccgtgtatgaaaagatgttcaattggatggtcactcggattaacgccaccctcgagaccaagcagccccgccagtacttcatcggggtcctcgacattgcgggattcgagattttcgacttcaatagctttgagcagctgtgtattaattttactaacgagaagctgcaacaattcttcaaccatcatatgtttgtgctggagcaggaggagtacaaaaaagagggaatcgaatggaccttcatcgactttgggatggacttacaggcttgtatagatctcattgaaaaacctatgggtattatgagcatcctggaagaagaatgcatgtttcctaaagccacggatatgactttcaaggcgaagttgtatgataatcacttaggtaaaagcaataatttccagaagccacgaaacatcaagggaaaacaggaggctcacttttccctgattcattacgccggtactgtggattataatatcttaggatggcttgagaaaaacaaagacccactgaatgaaactgtggtcgccctctaccagaagagtagcctgaaactcatggctacactcttttcttcctatgccacagccgacacaggggacagcggcaagtccaaaggggggaagaagaaaggcagttccttccagacagttagcgcactccacagagagaacctgaacaagctgatgaccaacctgaggactactcaccctcacttcgttaggtgcatcattcctaatgagcgcaaagcacccggagtgatggataatccactggttatgcaccaactccggtgcaacggcgtgctagaagggattcggatctgtaggaaagggttccctaacaggattctttatggcgatttccgtcaacgatacagaatattgaacccagtcgccatacctgaaggtcagttcatcgatagtcgcaaggggacggaaaaattgctgtcatccctggacattgaccataatcagtataaatttggccacaccaaggtcttctttaaagccggcctgctggggctgctagaagagatgcgggatgagcggctctcaagaattatcaccaggatgcaagcccaggcccgcggccagctcatgagaattgagttcaaaaagattgtcgagaggcgggatgccctattagtcatccaatggaatataagggcttttatgggcgtgaaaaattggccctggatgaagctttactttaaaataaagcccctgttaaaatccgctgaaactgaaaaggagatggctacaatgaaggaggagtttggccggataaaggagacgctggagaaaagcgaagcacgccgtaaggagctggaggagaagatggttagcctgctgcaggaaaagaacgatctgcaactacaggtccaggctgaacaggataatttaaatgatgctgaagagcggtgcgaccaattgatcaaaaataaaatacaactcgaggccaaagtcaaggagatgaatgaaagactggaagatgaagaagaaatgaacgcggagctcaccgcaaagaaaagaaagctggaggatgaatgttctgaactaaagaaagatattgatgacctcgagctgacactggcgaaagtggagaaggaaaagcacgccaccgagaacaaagtgaaaaacttgactgaagaaatggccggactggatgagatcattgcgaagctcactaaggagaaaaaagctctgcaggaggcccaccagcaggcactggatgacctgcaggtcgaagaggacaaggtgaattcactttcgaaaagtaaggttaaattggagcaacaagtggacgatcttgaaggatcgctggagcaagagaagaaggtcaggatggacttggaaagggccaaacgcaagttggaaggggacctcaagctaacccaggaaagcattatggacttggaaaacgacaagctgcagcttgaggaaaagcttaagaaaaaggagttcgacattaaccagcagaactctaagatagaagatgaacaggtgcttgccctgcaactgcaaaaaaaactgaaagaaaaccaagcccggatcgaagagttggaagaggagctggaagccgagagaacggctagggccaaagtggaaaagcttcggagcgacttaagccgcgaactggaggagatctcagagaggctggaggaagccggaggggccacctcggtgcagatcgagatgaacaaaaagagagaagcagagtttcagaagatgcggcgcgacctagaggaggccacacttcaacatgaagcaacagcagctgctctgaggaagaaacacgccgatagtgtggcggagctgggagagcagattgacaacctccagagagtcaagcagaagttggagaaggaaaagagcgagttcaagctcgagctggacgatgtgacctcaaatatggaacagatcattaaggcaaaagcaaatcttgagaaggtcagcagaactctagaagaccaagcaaacgagtacagagtcaaactggaagaggcgcaacggtctctcaacgattttactacgcagcgggccaaacttcagaccgagaacggtgagctggcaagacagctggaagaaaaggaagcactgatttcacagctaacaaggggaaagctgtcttacactcagcagatggaagacctaaagcgccagctcgaggaagagggaaaagccaagaacgcacttgcgcacgcattacagagtgctcgccatgattgtgacctcctgagagaacagtacgaggaagagacggaagctaaagcagaattgcagcgtgtgctgtcaaaggccaacagtgaagtcgcgcagtggcggactaaatacgagacagatgcgatccagcgtacggaggaactggaggaggcaaagaaaaaactggcccaacgtctccaggatgctgaagaggccgtcgaagcggttaatgcaaaatgctcaagtctcgagaagaccaagcatcgacttcagaatgaaatcgaggatctgatggtggacgtggaacggagtaacgccgcagccgccgctctggataagaaacagagaaactttgacaagatcctggcggaatggaaacagaaatatgaagaatctcagtcggagttggagagcagccagaaagaggccaggtcactctcgactgagctatttaagcttaagaatgcatatgaagagtcactcgagcacctggagacttttaaacgcgaaaacaaaaacctgcaggaggagatctccgatctcaccgagcagcttggtgagggtgggaagaacgtgcacgagctggaaaaagtcagaaagcagttagaagtcgaaaagctcgagctgcagtcggccttggaagaagcagaggcgtccttagaacacgaagagggcaagatcctgagagctcagcttgaatttaaccagataaaggcagagattgaacgcaagctcgccgaaaaggatgaagagatggagcaggccaaacggaaccatcaaagagtcgtggactctctccagacaagtctggacgctgaaacgcggtcgcgaaatgaagtgctcagggtgaaaaagaagatggaaggtgatctcaacgagatggagatccagctctcacacgctaaccgaatggcggccgaggcacagaagcaggtgaaatccctccagtccctccttaaagacacccagatccagctcgacgatgcagtccgcgcgaacgacgatctgaaagaaaatatcgctatagtcgagcgtagaaataacctcctgcaagccgaactggaggagttaagagccgtggtcgagcagactgaaaggtcacggaagctcgctgaacaggagctcattgaaactagtgagcgagtccagctcctgcacagccagaacacatccctgattaaccagaaaaagaaaatggagagcgatcttactcagctccagagcgaggtggaggaggctgttcaagagtgcaggaatgccgaagaaaaggccaagaaggctataacagacgcagccatgatggcggaggaactgaaaaaggagcaggatacctccgctcatcttgagcggatgaaaaaaaacatggagcagacaattaaagacctccaacacaggctggacgaggccgaacaaatcgccctgaagggtggcaagaaacagctgcagaaactggaggctcgagtccgcgaactcgaaggtgagctcgaagccgagcaaaaacggaatgccgagtcggtgaaaggaatgcggaagagcgaacgacggattaaggagttgacctaccagacggaggaagataagaaaaacttactacggcttcaggacctggttgacaaattgcagctcaaagtaaaggcctacaaacggcaggcagaagaggccgaggaacaagctaacactaatctgtccaagtttaggaaggtgcaacacgaactcgatgaagctgaggaacgtgcagatattgccgaatcacaggtcaataagctccgcgcaaagagccgggacatcggcgctaaacagaagatgcatgatgaagagtag

SEQ ID NO: 196312 - DNA, 5820 bp, synthetic construct
  misc_feature 1..5820: note = Description of Artificial Sequence: Synthetic coding sequence
  source 1..5820: mol_type = other DNA
atgaccgacgcccagatggccgacttcggcgccgccgcccagtacttgcgtaagtccgagaaagaacggttggaggcccaaacccggccctttgatatccgaactgagtgctttgtccctgatgacaaggaggagtttgtgaaagccaagatactatcacgcgaaggcggcaaagtcattgcagagactgaaaacgggaaaacagtaaccgtgaaggaagaccaggtgctccagcagaatcccccaaagttcgacaaaatagaagacatggccatgctgaccttcctgcatgagcctgcagtgcttttcaacctgaaggagcggtacgccgcatggatgatctacacctatagcgggctgttctgtgtgacggtcaacccttataaatggcttcccgtctacaacgccgaagtcgtcgccgcatatcgcgggaaaaagaggagcgaggccccgcctcatattttctcaatatccgataacgcgtatcagtatatgctcactgaccgagagaaccagagtatcctcatcaccggagagagcggcgcgggcaaaaccgtgaatactaaaagagtgattcaatattttgctagtatagccgccatcggcgatagaggaaaaaaagataacgccaacgcgaataaaggtaccctggaggatcagatcatccaagcaaatcccgcacttgaggcatttgggaatgcaaagacagttcgtaacgacaacagttcccggtttggaaagtttatcagaatacattttggcgccaccggcaaactggcttccgcggatatcgagacatatctactcgagaagtcacgggtgattttccagctgaaggctgagagaaactatcatatcttttaccagatcctgagcaataagaagcctgagttgctggacatgctgttagtgaccaacaatccctatgactatgcgtttgtttctcagggcgaagtgagtgtggccagcattgatgacagcgaggagctgatggccacggactctgcgtttgacgtgctgggctttaccagcgaggaaaaggcaggggtgtacaagctgacgggggcgatcatgcactatggaaatatgaagttcaaacagaaacagcgcgaggaacaggctgaacccgacgggacagaagacgctgataagagcgcctatttaatgggcctaaattccgccgatttattaaagggtctgtgtcacccaagagttaaagtcggcaatgaatatgtgactaagggccagtccgtgcaacaggtgtactactctatcggcgccctggcaaaagcagtgtacgagaaaatgtttaattggatggtcactaggatcaatgccaccctcgaaactaaacagccaaggcaatattttattggcgtgctcgacatcgcagggtttgagatcttcgactttaattcctttgagcaattatgcatcaacttcactaatgaaaagttgcagcagtttttcaaccaccacatgtttgtcctggagcaggaggaatacaagaaggaggggatcgagtggacatttattgactttggtatggaccttcaggcttgcatagatttaatagagaagcctatgggtatcatgtccatcttggaagaagagtgcatgtttcctaaggctaccgatatgacatttaaggccaagctctatgataaccacctgggtaagtccaataatttccagaagccccgcaatatcaagggtaaacaggaagctcatttctccttgattcattacgctgggacagtggattacaatatcctcggctggctcgaaaaaaacaaagaccctcttaacgagacagtggttgcactgtaccagaaatctagccttaaactcatggccacgctttttagcagctacgcaaccgcagataccggagactcaggcaaatcaaaagggggaaagaaaaaggggtcgtcttttcagacagtgtctgctctccatcgagagaaccttaataaactgatgacaaacctgagaaccacccatccccacttcgtgcgatgcattatccctaacgagcggaaggcgccaggggtgatggataacccgttggtgatgcatcaactgaggtgcaatggcgtgcttgaaggcataaggatatgccggaaagggttccctaacagaattctatacggggatttccgtcagcggtacagaatccttaacccagtcgcaattcctgagggccagttcattgatagcaggaagggaactgaaaaactgctgagtagcctagacatcgaccacaatcaatacaaatttggccataccaaggtgttcttcaaggcgggcttgttggggcttcttgaagaaatgcgggacgaacgcctcagccgcattattacccgaatgcaggcgcaggcgcggggccagcttatgcggattgaattcaagaagatcgttgagaggcgggatgccctcctggtcatccagtggaatattagggctttcatgggcgtcaagaactggccatggatgaaactctactttaagattaaaccccttcttaagagcgccgaaactgaaaaggaaatggcaacaatgaaggaagagtttggacgaataaaagagactcttgagaaaagcgaggcccgccgcaaagaacttgaggagaaaatggttagcctgctgcaggagaagaatgacctgcagctccaagttcaagctgaacaagacaacctcaacgacgcagaggaacggtgcgaccaactcatcaagaacaaaatccagcttgaggccaaggtaaaagagatgaacgagcggctggaagacgaggaggagatgaacgcggagcttaccgccaagaaacggaaattggaagacgaatgctcagaactgaagaaggatattgatgacctcgaactcactctggccaaagtggaaaaggaaaagcacgccacagaaaataaggtgaagaacctgacagaggaaatggctggcctggacgaaattattgccaagctgaccaaagagaaaaaggcactgcaagaagcacaccagcaggccctggatgatctccaggtcgaggaagataaggtcaatagcctttctaaatctaaggtgaagctcgagcagcaggttgacgatctcgagggctccctggagcaggagaaaaaagtgcggatggacctcgagcgcgcaaaacgtaagctggagggcgacctaaaacttacccaggagtccatcatggacttggaaaacgataagctgcagcttgaagagaagctgaagaaaaaggagtttgacattaaccagcaaaacagcaagattgaagacgaacaggtgctagccctgcagcttcaaaaaaagctcaaagagaaccaggcaagaatagaagaactggaggaggaattggaggcagaaagaaccgcgcgagcgaaggtggagaaactgagaagcgatttatcaagggagctggaggaaatctcagagcgactggaggaagctgggggagccacaagtgtgcagattgagatgaacaaaaaaagagaggcagagttccagaaaatgcggcgggacctggaggaggccaccctccagcatgaagccacagcagccgctctccgtaagaagcacgcagattcagtagccgagcttggcgaacagattgacaaccttcagagagtgaaacaaaagctggagaaggaaaagagcgagtttaaactggagctggatgatgtcaccagtaacatggagcaaatcattaaggcgaaggcaaacctggaaaaggtgagtcgcactctggaagaccaggctaacgagtaccgggttaagctcgaggaagctcagaggtctctgaatgacttcacaacacagagagcaaaattgcaaaccgaaaatggtgaactggcgcgacagctggaagaaaaagaagcactcatctcccagcttaccaggggtaaattaagctacactcaacagatggaagacttgaagcgccagttagaggaggagggaaaagccaagaatgccctggcacatgcgctacagtccgcacgccacgactgtgacctgctccgggagcaatatgaggaggagaccgaagccaaagccgagctgcaacgggtcctgtcaaaagcaaactctgaagtcgcccagtggagaacgaaatacgaaacagatgcaatccagaggactgaagagctggaagaggccaagaagaaactcgcccagaggcttcaggatgccgaggaagccgtggaggcagttaacgccaagtgtagctcactcgagaaaactaagcacagactgcagaacgaaattgaagacctcatggttgatgttgagagatccaacgccgcagctgccgcactggataagaagcagcgcaacttcgataagatcctagctgaatggaaacaaaaatacgaggagtcccagtcagaactcgagagcagtcagaaggaggctaggtcactaagtactgaactctttaaactcaaaaatgcatacgaagaaagtctcgaacacttagagacttttaaaagagaaaacaaaaacctgcaagaagagatctcagatctcactgagcagctgggcgaaggtggaaaaaacgtccatgaattagagaaggtgaggaaacagttggaggttgagaagctggagcttcagtctgctctggaagaagccgaagccagcctggaacacgaagagggcaaaattctacgcgcacaactcgaatttaaccagattaaggcagaaattgagcgcaagcttgccgaaaaagacgaggagatggagcaggcaaaacgcaatcaccagcgggttgtcgattcactgcagacctccctagacgccgaaacgaggagcaggaacgaagtcttgcgagttaaaaaaaagatggaaggagatttgaacgagatggaaattcagctctctcatgccaacaggatggctgccgaggctcagaagcaggtaaaaagcctgcagtccctcctgaaagatacgcagattcaactggatgacgcagtgcgagccaacgacgatcttaaggaaaacattgctatcgtggagcggcgaaataacctcctccaggcagaactggaagaactgagggctgtggtggaacagactgagagatcccgcaaattggctgagcaggagttaattgagacatctgaacgcgttcaactgctccactcccagaatactagcctcataaaccagaaaaaaaagatggaaagcgatcttacacagcttcagtcagaagttgaagaggcggtacaggaatgtcgcaatgctgaagagaaggctaaaaaagcgatcacagatgctgccatgatggcggaagaactgaagaaagaacaggatacgagcgcccatctcgagcgaatgaagaagaacatggagcagaccatcaaggatctccagcaccggctggatgaggccgaacagatcgctcttaagggcggcaaaaagcagctgcaaaaactggaagccagggtccgtgaactggagggagaactggaggccgagcaaaagcgaaacgccgaaagcgttaagggaatgagaaagtctgaaaggcgcattaaggaacttacatatcagaccgaggaggacaagaagaatctgctgcggttacaagacctggtggacaagctgcagctgaaggttaaagcctataagagacaagccgaggaagctgaggaacaggctaataccaatctcagcaagttcaggaaagtccagcacgaactggacgaagcagaagagcgtgctgacattgccgagagtcaggtaaacaagctccgcgcaaaatcacgcgacatcggcgccaagcagaagatgcacgatgaggagtag

SEQ ID NO: 196313 - DNA, 5808 bp, synthetic construct
  misc_feature 1..5808: note = Description of Artificial Sequence: Synthetic coding sequence
  source 1..5808: mol_type = other DNA
atgggcgacagcgagatggccgtgttcggcgccgccgccccctacctaaggaaaagtgagaaggagcgtctggaagcacagacccgccctttcgatctgaagaaggatgtgttcgttccagacgacaagcaggaatttgtgaaagcaaagatagtgtccagggaaggtgggaaggtgactgccgaaaccgagtacggcaagactgtaaccgtgaaagaggatcaagtgatgcaacagaacccacctaagtttgacaagatagaagacatggctatgctgacctttctccatgagcctgccgttctctataacctaaaagacaggtacgggagttggatgatctatacatattccggtctcttctgcgtgacggtgaacccatacaagtggctgcctgtctacacacctgaggtagttgccgcttatcggggcaaaaaacgaagtgaggccccccctcacatcttctcgatttccgataacgcatatcaatacatgctcaccgaccgcgagaaccagtcgatcctgatcactggggaatcgggagctggcaagacagtcaatactaaacgggttattcaatacttcgcagtgatcgccgcgatcggcgatcggagcaagaaggatcaaagccccggaaaaggcactctggaagatcagatcatccaagccaatcctgccctcgaagcgtttggcaacgccaaaaccgtacggaatgacaatagtagccgcttcggcaaattcattcggatccatttcggagcaacaggtaagctagcatctgcggatatagagacttatctgctggagaagtctagagttatctttcagctgaaagccgaaagggattaccatatcttctatcagattctgtccaacaagaagcccgagctgctggacatgttattaatcacaaacaacccctatgactatgcctttattagtcagggtgagacaacagtggccagtatcgacgacgctgaggagctcatggccacagataacgcgtttgacgtgctgggcttcacctccgaggagaagaacagcatgtacaaactcactggggctataatgcatttcggaaacatgaagttcaaactcaaacagcgtgaggagcaggcagaacccgacggcacagaggaagcggataagagcgcttatttgatgggcctcaatagtgctgatctgctgaagggattgtgtcaccctcgagtgaaggttggcaacgagtatgttaccaaaggacagaacgtgcagcaggtgatctatgccacaggggctctagccaaggccgtgtacgagaggatgttcaactggatggtcactcgaatcaacgcaacactggagacaaaacagcctagacagtacttcatcggtgtgctggacatagccggattcgagatcttcgatttcaacagcttcgagcagctgtgtatcaattttacaaacgagaaactccagcaattcttcaatcaccacatgtttgtccttgagcaggaggagtacaaaaaagagggaatcgaatggaccttcattgacttcgggatggacctccaggcatgtatcgacctcattgaaaagcctatgggaatcatgagcattttggaagaggaatgtatgttccccaaggctactgacatgactttcaaggccaaactttttgacaaccatctgggtaaaagcgctaacttccagaagccacggaatattaagggcaagcctgaggcccacttcagccttatccattacgcaggcattgtggattataatataatcgggtggctgcagaagaataaggatcccctaaacgagaccgtggttggcctgtaccagaaaagttcgctcaagctcttaagcacccttttcgcaaattacgccggtgcggacgctccaatagaaaagggcaaaggcaaagccaagaagggaagtagcttccagaccgtgtctgcactgcacagagagaatctgaacaagctgatgaccaacctcaggagcacgcatccacactttgtacgctgcattattccaaatgagaccaaatcccccggcgttatggacaatcccctggtgatgcaccagctccgatgcaatggagtgctggaggggattagaatatgcaggaaaggcttccccaaccggattttatacggtgatttcagacagcgatatcgcattcttaaccctgcagcaatcccagagggacagtttattgactcacgaaagggtgcagagaagctgctcagctcattggacatagaccacaaccaatataagttcggccataccaaggtgttttttaaggctggactgctgggcctgctcgaagagatgcgggatgagagactgagtagaatcattactcgcatccaggcacagtcccggggtgtcctcgctaggatggagtacaagaagctcctggagcggcgtgatagtctgttagttattcaatggaatattagggcctttatgggagtgaaaaattggccatggatgaagctgtactttaagattaagcccctcctcaagtccgccgagcgagaaaaagaaatggcatccatgaaggaagaatttacaagattgaaggaagctctcgagaaatccgaagcaaggcggaaggagctcgaagagaaaatggttagcctgctgcaagaaaaaaatgatttacagctccaggttcaggctgaacaggataacctggctgacgctgaggagaggtgcgaccagctcataaagaacaaaatccagctggaagctaaagtcaaagagatgaatgaaagactggaggacgaggaagagatgaatgcagaattaacagccaagaagagaaagctcgaggatgagtgcagtgagttgaaaagggatattgatgaccttgaacttacactcgccaaggtggagaaggaaaaacacgcgaccgaaaacaaagttaagaacctaacagaagaaatggccggcctggatgaaatcatcgctaagctgacaaaggagaaaaaagctctccaagaagctcaccagcaggccctcgacgacctgcaggctgaagaggacaaagttaacacccttaccaaggctaaagtcaagctggagcagcaggtcgacgacctggaggggagcttggagcaggagaagaaagtgcggatggatcttgagcgagccaagcggaagttagaaggagatctcaagctaacccaggagtccattatggacctcgaaaatgacaaacagcagctcgatgagcgactgaagaaaaaagactttgagctcaacgctctcaacgctcgtattgaggatgagcaggctctgggctcacagcttcagaagaagctgaaagaattgcaggcaagaatcgaagagctggaggaggaactggaggccgaacgcacagcccgcgcaaaggtagaaaagcttcggtcggaccttagcagggagctagaagaaatatctgagaggctagaggaggctggtggcgctacaagtgtgcagattgaaatgaataagaagcgggaggcagagtttcaaaagatgcgccgggatctcgaggaggcaaccctccaacatgaggcaacagccgccgcacttagaaagaaacatgctgactctgttgctgagctgggagaacaaattgacaacctgcagcgtgtgaagcagaagttggagaaggagaagagcgaatttaagttggagctggacgacgttacatcaaatatggaacagataattaaagccaaggcaaacttggagaagatgtgccgcaccctggaagatcaaatgaatgagcaccgtagcaaggccgaggagactcagaggtccgtgaatgatctaacctcccagcgcgctaagttgcagaccgaaaacggagagctgtccaggcagctggatgagaaggaagcattgatttcacagctgacgagaggaaagctgacgtacacgcagcaactagaagatctcaaacgtcagctggaggaagaagtgaaggctaagaacgctctggcacacgcactgcagtccgcacgtcacgattgtgacctcctgagagagcagtacgaggaagaaacagaggccaaggctgagttacaacgcgtcctctcaaaggcaaatagcgaggtcgctcagtggagaacgaaatacgaaaccgatgccatccaacgcaccgaggagctggaagaggccaaaaagaaattggctcaacgccttcaagaagctgaggaggccgtcgaagcagtgaatgccaaatgttccagcctggagaagactaaacatcggctccagaatgagatcgaggatttgatggtggatgtggagcgatctaacgcagcagcagcggctcttgacaaaaaacaacgcaactttgacaaaatattggcagagtggaagcagaagtacgaagaatcgcagtctgaactcgagagctcacagaaggaagcacggagcctctctaccgagctttttaagctgaagaacgcctatgaagagtctttggaacatctagaaacatttaagcgggagaacaagaacctgcaggaggagatttctgacttgaccgagcagttgggtagcagcggtaagacaatccacgagttagagaaggtgagaaagcagttggaggcagagaaaatggagctgcagagcgcgcttgaggaggcagaagcttcattggaacacgaggaaggtaaaattttacgtgcgcagcttgagttcaaccagattaaggccgaaatcgaacgcaagctcgccgaaaaagacgaagaaatggagcaagccaaaagaaatcatttacgcgtggtggacagcctgcagacttctctggacgcagagactcgtagccgaaatgaggccttaagggttaagaagaaaatggaaggggacctgaatgaaatggaaatccagttgagccacgcgaatcgtatggcagcagaggcgcagaagcaagtgaagtcgttgcagtctctgctgaaggatacacaaatccagctcgatgatgccgtccgcgctaacgatgatctaaaagaaaacatcgcgatcgtcgagcgcaggaataacttgctccaagccgaattggaagagctcagggcagtggtggaacagacagagcgcagccggaagttagccgaacaggagcttatcgaaacctcagagcgcgtgcaacttcttcacagtcaaaacactagcctcattaatcagaagaaaaagatggatgcggatctgtcgcagctgcaaacagaggtagaggaggccgtgcaggaatgccggaacgctgaagagaaagcaaagaaagccatcaccgacgccgctatgatggcagaagagctgaaaaaagaacaggacacctctgcacacctagaacggatgaagaagaatatggagcaaacaattaaggacctccaacatcgactggacgaggccgaacagattgccctgaaaggagggaaaaaacagctccagaagttggaggcccgggttagggaattagagaatgaactcgaagctgaacagaaacggaatgcagagtcagtgaagggaatgcgcaagtcagaacgacgcatcaaggagctcacataccagaccgaggaagaccggaaaaatctgctccgattgcaggatctggtggacaagctgcaacttaaagttaaagcttataagcgacaagctgaagaggcggaggaacaagcaaataccaatctctcaaaattccggaaggttcaacatgaactcgacgaggccgaagagagggctgacatcgcggaaagccaagttaacaagctccgggccaaatctagagatataggaacaaaggggcttaatgaggaatag

SEQ ID NO: 196314 - DNA, 5823 bp, synthetic construct
  misc_feature 1..5823: note = Description of Artificial Sequence: Synthetic coding sequence
  source 1..5823: mol_type = other DNA
atgggcgacagcgagatggccgtgttcggcgccgccgccccctaccttagaaagtccgagaaagagcggctggaagcccagaccagacccttcgacctcaagaaggatgtttttgtgcccgacgataagcaagagtttgtgaaagcgaaaattgtctcccgcgaggggggaaaggtgacggccgagactgagtatggcaaaacagttaccgtgaaggaggaccaggtgatgcaacagaaccccccgaaatttgacaagatcgaagatatggctatgctcacttttctgcacgaacccgccgttctctataacttaaaagatcgatatggatcgtggatgatctatacttactctggcttgttttgtgtgaccgtaaatccatataagtggctacccgtgtacaccccagaagtggttgcagcttatagaggtaagaagaggtctgaagcaccccctcacatcttctcaattagcgacaacgcataccaatatatgctaaccgatagggaaaatcagtcgatcctgatcaccggcgaaagcggcgccgggaaaaccgtgaataccaaaagggtgattcagtactttgcggtgatcgccgcgattggcgaccggtctaagaaagatcagtctccaggcaagggcacacttgaggaccaaatcatccaggctaatcccgcactggaagcatttggtaatgcgaaaactgtgagaaatgataacagctcacgcttcggaaaattcataagaatccactttggagccaccggaaagttggccagcgctgacattgaaacctatcttctggagaagtccagagtgatttttcagttgaaggctgagcgcgattatcacatattctaccaaattcttagcaacaaaaagcccgagctgctggacatgctgctgattaccaataatccatacgactacgcctttatctctcagggcgaaacaaccgtggctagcattgacgacgctgaagaacttatggccaccgacaatgcattcgatgtactgggattcacctccgaagagaagaattcgatgtacaagttgacaggcgctattatgcatttcggaaatatgaagttcaaactcaaacagagggaagaacaagcagaaccggatggcactgaggaggccgacaagtcagcataccttatggggctgaatagcgcagacctgctgaaggggttgtgtcaccccagggtgaaagttggaaacgagtatgttactaaagggcagaacgtgcagcaggttatctacgccacaggggcgctcgccaaagctgtgtacgaacggatgttcaattggatggtgacacgtatcaatgcaactttagaaacaaagcagccccgccagtattttatcggggttctagacatcgccggcttcgaaattttcgacttcaactcatttgagcagttatgtattaacttcacaaacgagaagctgcagcagttcttcaaccaccatatgttcgtgttagaacaggaagaatacaagaaggaaggaatcgaatggaccttcatcgacttcggaatggatctgcaggcgtgtattgatcttatcgagaaacccatggggatcatgagcatcctcgaggaggagtgtatgtttcctaaggccactgacatgactttcaaggctaaattattcgataaccacctaggaaagtctgccaattttcagaaaccccggaacatcaagggaaagccagaagctcatttttccttgatccactatgccgggattgtggattacaacattattggatggttacagaaaaataaggatcccctcaatgagaccgtggtgggtctgtatcagaagagcagcctcaagctgctcagtacactgttcgcaaattacgcaggggcagacgcaccaattgaaaaggggaaaggcaaggccaagaagggcagctcgttccagacggtgtcagcgctccatcgcgagaacctgaacaagctgatgacaaatctgcggtccacccacccccattttgttaggtgtattataccaaatgagactaagtcccctggggtgatggataacccactggtcatgcatcagttgcgttgtaacggcgttttggaggggatccggatctgcagaaagggcttcccgaaccggatcctgtacggcgacttcagacagcggtaccgcatcctaaatcctgcagctattccagaggggcaatttatcgactccaggaaaggagctgagaaactgctgtcatcgctggatatagaccacaaccaatacaaattcgggcataccaaagtttttttcaaagcaggcctgctgggattgttagaggaaatgcgggacgagcgactcagcagaataataacacggatccaagcacaatcgcgaggagtcctggccaggatggagtacaagaaactgctcgagcgcagagatagtttgttggtcattcagtggaacatccgcgctttcatgggcgtgaaaaactggccctggatgaagttgtatttcaagatcaagccgctgcttaaatctgccgagagggagaaagagatggcgagtatgaaagaggaattcacaaggcttaaggaagccctcgagaaatcggaggctcgacgcaaagaactcgaggaaaaaatggtgtccttactccaggagaaaaatgacctccaattgcaagtgcaggcagagcaggacaatctcgcagatgctgaggaacgctgtgaccagctaatcaagaacaagatacagctggaggctaaagttaaggagatgaatgaaagattagaagacgaagaggagatgaatgccgagctgaccgcgaagaagcgcaaactcgaagacgaatgctctgagctgaaaagggatatcgacgacttggagttaactctggccaaagtagagaaagagaaacatgcgaccgagaacaaggttaagaatctgactgaagagatggctgggctggatgagatcatcgccaaactgaccaaagagaagaaggctctgcaggaggctcatcagcaggccctggatgatctgcaagctgaagaagacaaggtgaacacactcaccaaggcaaaagtgaagctggagcagcaggtggatgacctggaaggatctctggaacaggagaaaaaggtacgcatggacttagagcgggccaagcgcaaacttgagggggatctgaagctgacacaggagtccataatggacctggagaatgataagcagcagctggacgaacggctgaaaaagaaagactttgaactgaacgccctgaatgctagaatcgaagacgagcaggctctgggttcccagctgcaaaagaagttgaaagaactgcaagcgcgcatcgaagaactggaggaagagttagaggcggagagaaccgcccgtgccaaagtggagaagttgcggtctgacttgtcacgtgagttggaggagatctcagagcggctggaagaggcagggggggccactagcgtgcagatcgagatgaataaaaagagagaggccgaatttcagaaaatgcggcgtgacctggaggaagctacattgcagcacgaggccaccgccgccgcacttcgcaaaaagcatgccgacagcgtggcagagctgggcgaacagatagataaccttcagagagtgaaacagaagctcgagaaagagaaaagtgagttcaaactggaactagatgacgcactgttgggactaccttcgagtaacttcctgcttccacccccactcagcgctaatctggaaaagatgtgtcgtaccctggaggatcagatgaacgagcaccggtcaaaggctgaggaaactcagaggtccgtaaatgatttaacgagtcagagagcaaagttgcagacagaaaacggcgaactgagccgccagcttgacgaaaaagaagcgcttatttcacagcttacgcggggcaaactcacgtatacccagcaactggaggatttgaagaggcagctggaagaggaggtcaaagccaagaatgcgttggctcacgcgctccagtctgcacgccacgattgtgacctgctacgtgagcagtacgaagaagagacggaagcaaaggctgaattacagcgcgtcctgagcaaggccaactccgaagtcgcacagtggaggacgaaatacgaaaccgatgctattcagagaactgaggagcttgaggaagccaagaaaaaactcgcccagagattgcaagaagccgaggaggccgtggaagctgttaatgctaaatgctcttccttggagaagacaaaacacaggctgcagaatgaaatagaggacctcatggttgacgtcgaacgatccaacgctgccgccgctgcactggacaagaaacagagaaactttgacaagatactggccgaatggaaacagaaatacgaggaatctcaatccgaactggaaagcagccaaaaggaggcacggtcccttagcactgaactctttaagctgaagaacgcctatgaagaaagcctcgagcacctcgaaacattcaagagggagaataagaacctccaggaggagatctcggatctcacagagcaactgggctcttcagggaagactatccacgagctcgaaaaagtcagaaaacagctcgaggcggagaagatggagcttcaatccgccctggaggaggctgaggcctcgctggagcatgaggaaggaaaaatattacgggcgcagctggaatttaaccagataaaggcagagatagaaagaaagcttgctgaaaaggacgaagagatggaacaggctaaacgtaatcatctgcgggtagttgactccctgcaaaccagccttgacgcagagacccggagtagaaacgaagctctacgtgtcaaaaagaagatggagggcgatctgaacgaaatggagatccaactgtcccacgccaataggatggctgctgaagcacagaaacaggtgaagagtctccagagcctgctgaaggatacccaaatacaactcgacgacgctgtgcgcgcaaacgacgacttgaaggaaaatatcgccatcgtggaacggagaaataatctgctgcaggcggaactcgaggaactgcgagcagtagtggaacaaacggaaagatccaggaaactggccgaacaggaattgattgagacctccgaaagggtgcagcttctgcattcacaaaacacttcgctcattaaccagaagaaaaagatggatgccgatctctcgcagttacagactgaggtggaggaggctgtgcaggaatgccggaacgctgaggagaaagcgaagaaggcaattaccgacgccgcaatgatggccgaggaactaaagaaggagcaagacacctccgctcacctcgagcggatgaagaaaaacatggaacaaactatcaaggatctgcagcatcgcctggacgaggccgagcagatagcattaaaagggggtaaaaaacagctgcaaaagttggaggctagggttcgtgaactggaaaatgaactcgaggccgagcagaagcgaaatgcggagtcggtgaaagggatgaggaagtctgaacggagaattaaagaactgacttatcagacagaagaagacaggaagaacctgctgcggctacaagacctggtggataaactacaacttaaagtgaaggcctataagagacaggcagaagaggccgaagagcaggccaacacgaatctgagtaagttcagaaaggtgcagcatgagctcgacgaggcagaggagcgagcagatatagccgagagtcaggtaaataagttgcgtgctaagagtcgtgacatcggcacaaagggccttaatgaggaatag

SEQ ID NO: 196315 - DNA, 5814 bp, synthetic construct
  misc_feature 1..5814: note = Description of Artificial Sequence: Synthetic coding sequence
  source 1..5814: mol_type = other DNA
atgagcgccagcagcgacgccgagatggccgtgttcggcgaggccgctccatatctcaggaagagtgagaaggagcggattgaggcccagaacaaaccattcgacgccaagacttctgtgttcgttgccgagcctaaggaatcatatgtgaagtccactatacaatcaaaagaggggggaaaagtaaccgtgaaaacggaggggggtgccaccctgaccgttagggaagatcaggtttttccaatgaacccccccaaatatgacaaaatcgaggacatggctatgatgacccatctgcatgaacccggcgtgctttacaacttgaaggagaggtacgccgcatggatgatttatacgtatagtggcctgttttgtgtgactgtgaacccatacaagtggctccctgtctacaaaccagaggtggtcgccgcttataggggtaaaaaacgacaggaggctccccctcatatcttcagcatctctgacaatgcttatcagttcatgctaacagatagggagaatcagagcattctcatcacaggtgagtccggagccgggaagacagtgaatacaaaaagggtcatccagtacttcgcgaccatcgccgttaccggggaaaagaaaaaggatgaaagcggcaagatgcaagggactctcgaggaccagattatctccgccaacccgttgctggaggcgttcggcaatgccaagacggttcgaaacgacaattcgtcacgctttggaaagtttatccggattcactttggtactacaggcaaactggcatcagccgacattgaaacctatctcttggagaagagtcgggtaacctttcagctgaaggccgaaagatcctaccacattttctatcaaatcactagcaataagaagccagatttgatcgagatgctcttgattactactaacccgtatgactacgccttcgtgagccagggcgagattactgttccaagtatcgatgaccaagaggaactgatggccacggactctgccattgatatcctgggattcacgcccgaggaaaaggtttccatttataaactgacaggcgccgtaatgcattacggtaacatgaagtttaaacagaagcagcgggaagaacaggctgaaccagatggtaccgaagtggccgataaggccgcttacctccagagtcttaatagcgctgacctactcaaagccctttgttatcccagagtcaaggttggaaacgagtatgtaaccaagggtcaaactgtccagcaggtgtacaacgcagtgggagccctggcgaaagccgtttacgaaaaaatgtttctttggatggtcacccgcatcaaccaacagctggacaccaaacaacctcgtcaatactttatcggagtcctcgatatagcaggatttgaaatctttgacttcaattcactggagcagctatgcatcaacttcactaacgaaaaactgcagcaatttttcaatcatcatatgtttgtgctggagcaggaggagtacaagaaggaaggaatcgagtggaccttcattgacttcggtatggatttagccgcctgtatcgaactaatcgaaaagccactcggaattttttccattcttgaggaggaatgcatgttccctaaagctaccgacacctccttcaaaaataaattgtacgatcagcacctgggaaaatcggccaacttccaaaagccgaaagttgtcaagggcaaggccgaggctcacttttcactgattcattacgccggtaccgttgactacaatatcacgggctggctggacaagaataaggacccccttaacgacacagtggtcggactataccagaagagtgctatgaagacactggcatcactgttctcgacgtatgcgtccgctgaagccgactcctccgccaaaaagggggccaagaaaaaaggctccagctttcagacagtgtctgcactgtttagagagaacctcaataagctaatgacaaacctgcgtagcacacatccacactttgttaggtgcattattcccaacgaaacaaagacccccggggccatggaacacgagctagtcttgcatcagttacgatgtaacggcgtgctcgaggggataaggatatgtcggaagggcttcccctccagaatattgtatggcgactttaagcagcgttataaagtcctgaatgctagtgctatccctgagggtcagttcatcgatagcaagaaggcctctgaaaaattacttgcttccatcgacatcgaccatacacagtataagtttggccacactaaagtgttcttcaaagcagggttgctgggactgctcgaggaaatgagggacgagaagctggcacagattatcacccgcacacaagcggtttgccgggggttccttatgagagtcgagtatcagaaaatgctgcaacggcgagaagccttgttctgtatacagtataatgtaagggccttcatgaacgtcaaacactggccatggatgaaattgttcttcaaaatcaaacccctgctcaagtcggccgagactgagaaagagatggcaacaatgaaagaagagtttcaaaagacaaaggatgagctggcgaaaagcgaagccaagaggaaggaattagaagaaaagatggtgactcttctaaaagaaaaaaatgatctgcaactgcaggtccagtctgaggctgattctctggcagacgctgaggagcgctgcgagcagctgattaaaaacaagatacaattagaggctaagattaaagaagtgaccgagagagcagaggaagaggaggaaattaacgccgagctaacagcaaagaagagaaagctggaagatgaatgcagtgagctgaagaaggacatcgatgatcttgaacttacattggccaaagtggaaaaagaaaagcatgcaaccgagaataaggtgaagaacttgacagaggaaatggccggcctcgacgaaacaatcgcgaaattgtcgaaggaaaagaaggccttacaagaaactcatcagcagaccctggatgacctacaggcggaggaggacaaagtaaacatcttaacaaaggccaagacgaaactggaacagcaggtggacgacctagagggatcattagagcaggagaaaaagcttcggatggacctggaacgggccaaacggaagctggaaggggatcttaagttggctcaggaaagcacaatggatatggagaacgataagcagcagctagatgaaaaactggagaagaaagagtttgagatttcaaacctaatttccaaaatcgaagatgaacaagctgtagaaattcaactgcagaagaagattaaagagctccaagccaggatcgaggaattaggagaagagatcgaggcagagagggcttcacgagcaaaagcagaaaagcagaggtctgatctttcacgtgaactggaagaaatatccgaaagactggaagaagctggaggcgccacctctgcacaggtggagctgaataagaagagagaagccgagttccagaagctgcggagagacttggaggaagccactctccaacatgaagccatggtggcagctctgcgaaagaaacatgccgattccatggccgaactgggtgagcagatcgataaccttcagagggttaagcaaaaactggagaaggagaaatcggagcttaagatggaaaccgatgacctgagctctaatgcagaggctattagtaaagccaaaggaaacttggaaaagatgtgcaggtccctcgaagaccaagtctccgaattgaaaacaaaggaagaagagcagcaacggcttatcaacgacctgacggcgcagagagcacgcctgcagacagaggccggcgagtactctagacagttggatgaaaaagacgccttggtgagccaattgagtagatccaagcaggcatccacacagcagatcgaagaactgaaacaccagctggaagaagaaacaaaggccaagaatgccctggctcacgcacttcagagttcccgacacgattgtgacctactccgagaacagtatgaagaggagcaggagggcaaggccgaactgcagcgggccttgagtaaggcaaacagcgaggtcgcacagtggcggacaaaatatgagaccgacgctatccagcgtacagaagagctggaagaggctaagaagaaactggctcagagactgcaggaggctgaggagcacgttgaggccgtcaatgccaagtgtgcatccctggagaaaacaaaacagcgcctgcaaaatgaagtggaagatctgatgctggatgtcgagaggtctaatgctgcttgcgccgccctcgacaagaagcaaaggaatttcgataaggtcctttccgagtggaaacagaagtacgaggagacacaggccgagctggaggcgtcgcagaaggaatcaagaagcctgagcaccgagctctttaaggttaaaaacgtttatgaagagagtctcgatcaactggagactcttcggagggaaaataagaacttgcagcaagagattagcgacttaactgaacaaatagccgaaggaggaaaacagatccacgagctggaaaagataaaaaaacaggtcgagcaagaaaagtgtgagatccaggccgccttggaagaggccgaagcctctttagaacacgaagagggcaagatcctaagaatccagctcgaactgaatcaggtgaaaagtgaagtggatcggaaaatagctgagaaagacgaggaaatagaccaactgaaacgcaatcacacccgcgttgtagaaaccatgcagtccacccttgacgccgagattcgctcccggaacgatgctctcagggttaaaaaaaaaatggaaggagatctgaatgaaatggagatccagctgaatcacgcgaaccgactggccgccgaatcattgagaaactatcgcaacacccaagggattttgaaagagacacagctccaccttgacgatgctctgaggggccaggaagatctgaaagaacagttggcaatagtagagcgaagagctaatctgctccaagcagagatcgaagaactctgggccacccttgagcagaccgagaggagcagaaagatcgcagagcaggaactgctggacgcttccgagagagttcaattgctccatacacagaacacaagccttattaatacaaagaagaaactggaaaatgacgtttcccagctgcaaagcgaagtcgaagaggtcattcaggagtccaggaacgccgaggagaaggcgaaaaaagctatcaccgacgctgccatgatggcagaagagctgaagaaggagcaagatacgtctgcacatctggagaggatgaaaaagaacctcgaacagaccgtgaaagatttgcagcatcggctggatgaggccgaacagctcgccttgaagggtgggaaaaaacagatccagaagctggaggccagagtccgcgagttagagggtgaagtcgagaatgagcagaaacgcaatgctgaagcagtcaaagggttgcgcaaacatgagaggagagtgaaagagttgacttaccagactgaagaagataggaaaaatgtgttgagactgcaggacctcgtcgacaaactgcaggctaaagttaagtcctataagcggcaggctgaggaggctgaggaacagtccaacgccaacctcagcaaatttagaaaactccagcacgagcttgaagaagccgaggagcgggcagacatcgccgagtcacaagtgaataaactccgggtgaagtctagagaggtccacacaaagatatctgcagaatag

SEQ ID NO: 196316 - DNA, 5814 bp, synthetic construct
  misc_feature 1..5814: note = Description of Artificial Sequence: Synthetic coding sequence
  source 1..5814: mol_type = other DNA
atgagcgccagcagcgacgccgagatggccgtgttcggcgaggccgccccatatctgaggaaatctgagaaggaacggattgaggctcagaacaagccatttgacgcgaaaacctcagtgttcgtcgcagagccaaaggagtcttatgtgaagtccacaatccagagtaaagagggaggcaaagtgaccgtgaagaccgaaggcggtgctacactcacagttcgagaggatcaggttttccccatgaatccaccgaagtacgataagatcgaggatatggcaatgatgacacacctgcatgagccgggagtactgtataaccttaaagaaagatacgcagcctggatgatctacacatactcgggccttttctgcgtaaccgtcaacccttataagtggttacctgtgtataagccagaggttgtcgctgcgtacaggggcaagaagcgacaggaggcacccccccatatcttttccatttccgataatgcataccaatttatgctgactgatcgcgaaaatcaaagtatcttgatcactggcgagtccggggccgggaagacagttaacaccaagcgcgtaatacaatacttcgccaccatcgccgtgaccggcgagaagaaaaaggacgagtctggcaaaatgcagggtaccctcgaggatcagatcatttctgctaatcccctgttggaggccttcggaaatgccaaaacagttaggaacgataatagtagccggttcggaaaattcatccgaatccactttggaaccactggcaaacttgcaagcgccgatatcgaaacatatcttctggaaaagtcccgtgttacgttccagctcaaggctgagagaagctaccacattttttaccagatcacttcaaataaaaagcccgatctgatcgagatgctacttattactacaaatccatatgattatgcctttgttagccagggggaaatcaccgtgccgtctatcgatgaccaggaagaactgatggccaccgacagcgcaatcgacattctgggctttacgccagaggagaaggtgtccatatacaagctaacgggggcagtcatgcactatggcaacatgaaattcaaacaaaagcagcgcgaagagcaggccgaaccggacggcactgaggtcgctgacaaagcggcatacctacagagccttaacagcgcagatctcctgaaagctctgtgctaccctcgagtgaaagtgggcaacgaatatgtgacaaaagggcaaaccgtccagcaggtgtacaacgctgtcggagccctggcaaaagccgtgtatgaaaagatgttcctgtggatggtgactcgcattaaccagcaattagatacaaagcagcccagacagtactttattggtgtgctggacattgctggtttcgaaattttcgacttcaattctttggaacaactctgcattaatttcacaaacgagaagctccagcagttcttcaaccaccacatgttcgttctggagcaagaagaatataagaaggaaggcattgagtggactttcatcgattttgggatggacctcgctgcctgtattgagctcatcgagaaaccactcggtatcttctctatccttgaggaagaatgcatgttccccaaggccaccgacacaagtttcaagaacaagctctatgaccagcatttgggtaaatccgctaacttccagaagcctaaagtcgtgaaagggaaagctgaggcccacttctcactcatccactacgctgggactgtcgattacaatattactggatggctggacaaaaataaggaccctctaaatgatacagttgtgggcttataccagaagtcagctatgaagacactggcctcacttttttccacctatgcttctgccgaggctgactcctcagcgaaaaaaggtgctaaaaaaaaaggttcaagcttccagaccgtgtctgccctcttcagagaaaatctaaacaagcttatgacaaaccttcggtctacacatccccacttcgtcagatgcattattccaaacgaaacaaagacaccgggagctatggaacacgaactcgtcctgcaccagcttaggtgcaatggcgtgctggaaggcatccgaatttgccgaaagggcttcccttctaggatcctctatggagatttcaaacaacggtataaagtgctgaatgcctctgcaattcccgagggacagttcatcgactcaaagaaggctagtgaaaagctactggccagcattgacatcgaccacacccaatacaaattcggccatactaaagtcttcttcaaagctggcctgctgggactcctggaggagatgcgcgacgaaaagctggcccagatcatcacccggacacaggctgtatgcagggggttccttatgagggtggagtaccagaagatgctgcagcggagagaagccctgttctgcatccagtacaacgtcagggctttcatgaacgtaaagcactggccttggatgaagttattcttcaagatcaagcccctgctcaagtctgcagaaaccgaaaaggaaatggctactatgaaggaggaatttcagaaaactaaagatgagctggccaagagcgaggccaagaggaaggagttggaagaaaagatggtgactctgctgaaggagaaaaatgacctgcagctccaggttcaaagcgaagccgattctctggcagacgccgaggaacgatgcgagcagctgatcaagaacaagatccagctcgaggctaaaattaaggaggtgactgaacgcgctgaagaggaagaggagataaacgccgagctgactgcgaagaagaggaaactggaagacgagtgcagcgagctgaaaaaagatattgacgatctggagcttacgttagccaaggtcgaaaaagaaaagcatgcaaccgaaaacaaagtgaagaatctgaccgaggagatggctggactagatgagaccattgccaagttaagtaaagagaaaaaagccttacaagaaacgcatcagcaaaccctcgacgacctccaagccgaggaagacaaggtgaacatcttgacaaaggccaagacaaaactcgagcagcaggtcgacgacctcgagggcagcctggaacaggaaaaaaagttacgtatggacctggagagggcaaaacgcaaactggaaggcgacctaaaactggcacaggaatctactatggatatggaaaatgataagcagcagctcgatgagaaactggagaaaaaagaatttgagattagcaatctgatcagtaagatcgaggatgaacaagctgtggagatacagttgcaaaaaaaaatcaaggagttgcaggcccggatcgaagaattaggtgaggagatcgaggctgaaagggctagtagagccaaagccgagaaacaaagaagtgacctttccagagagctcgaggaaatttcagaacggcttgaggaagccggaggagcgaccagcgcccaggtcgaactcaataaaaaaagagaagccgaattccagaagctcaggcgcgatctagaagaggctacattgcagcatgaggccatggtggctgcgttgaggaagaaacatgcagactcgatggccgagctgggagagcagatagataaccttcagcgagtgaagcagaaactcgaaaaagagaagtctgagttgaaaatggagacagacgatctgagctctaatgctgaagcgatctcgaaggcgaaggggaatctggaaaagatgtgccggtcactggaggatcaggtctccgagcttaaaacaaaggaggaagagcaacagcgcctgattaatgacttaaccgcccagagggcccgcctgcaaaccgaggccggtgaatactcccggcagttggacgaaaaagacgccctcgtgagccaactctcacggagcaagcaggccagcacccaacagattgaagagctaaagcatcaattagaagaagagaccaaagcaaaaaacgccctggctcatgctttacagtctagccggcacgactgcgacctcctcagggagcagtatgaggaggaacaggaaggcaaggccgaactccagcgggctctgagtaaggctaattctgaggtggctcagtggcgcactaaatatgagaccgacgctatccagagaaccgaggaattggaagaggccaaaaagaagctcgcgcaacgtttacaggaggctgaggagcacgtagaggcagtgaatgctaagtgcgcttcccttgagaaaacgaagcagcgcctgcagaacgaggtggaggatcttatgctcgacgttgaacgaagtaacgcggcatgtgcagcccttgacaagaaacagaggaacttcgacaaggtactttccgaatggaaacagaaatacgaggagacacaggccgagctggaagcatctcagaaagaaagcagatctctgtccactgagctgttcaaagtgaagaacgtctacgaggaatccctggatcagctggagaccctcaggcgcgaaaataaaaacctccagcaggaaatctctgacctcacggagcagatcgcagaaggaggcaagcaaattcatgaattggagaagattaaaaagcaggtcgaacaggagaagtgtgagatccaggccgccctcgaggaagctgaggcaagcctagagcacgaggaggggaaaattctccgcattcagcttgaactgaaccaggtgaaaagcgaagtggaccggaaaattgcggagaaagacgaggagatcgatcaactgaagcggaaccatactagggtcgttgagacaatgcaatcaaccctcgacgccgagattcgctccaggaatgatgccctgagagtcaagaagaagatggagggcgacctgaatgaaatggagatccagctgaaccatgcaaacaggctcgctgcagaatctttaagaaactatcgtaatacgcagggcatcctgaaagaaacccagctgcacttggatgatgctctccggggccaggaggacctgaaggagcagctcgcaatcgtggagaggcgcgccaatctgcttcaggctgagatagaggagctgtgggcaactctcgagcagacggagcggtcgaggaagatagctgagcaagagctcctcgatgcttccgagagggtccaactactgcacactcagaacacttcactgatcaataccaagaaaaagctggagaacgacgtcagccagttgcaaagtgaagtggaagaagttattcaagagagccggaatgccgaagaaaaagctaagaaggcgatcacagatgcggcaatgatggccgaggaactgaaaaaagaacaggataccagtgcccatctcgaacgcatgaagaagaatcttgaacagacggtgaaagatttacagcaccgtctggatgaggctgagcagctcgctctgaaaggagggaaaaaacaaattcagaaactcgaggcacgcgttagggagctggagggagaagtcgagaatgaacagaaacgcaatgcagaggctgtcaaaggcttgagaaaacatgaacgccgggtgaaagaattgacatatcagacagaggaagataggaaaaatgtcctgagattgcaggatctggtagacaagctacaggcaaaagtaaaatcctataagcgccaggctgaggaggccgaagaacagtcaaacgccaatctaagcaaattccggaagctgcagcatgaacttgaggaggctgaggagcgtgccgacatagccgagtcccaggtgaataaactgagggtaaaaagccgcgaagtgcatacaaaaatatcagctgagtag

SEQ ID NO: 196317 - DNA, 453 bp, synthetic construct
  misc_feature 1..453: note = Description of Artificial Sequence: Synthetic coding sequence
  source 1..453: mol_type = other DNA
atgagcttcagcgccgaccagatcgccgagttcaaggaggccttcttgctcttcgataggactggggatagtaaaataaccctctctcaggttggggatgtcctgagagcattgggtaccaaccccacaaacgccgaagtgaggaaggtgctgggtaacccttctaatgaagagctgaatgctaagaagatcgaattcgagcagtttcttccaatgatgcaggcaatttctaataacaaagatcaagcaacctatgaagattttgtcgagggccttcgggtgttcgataaggaaggcaatggaacagtgatgggggctgagctaagacatgtcttggccaccctgggcgagaagatgaaagaggaagaagtggaggccctgatggctggtcaggaggacagcaacggatgtattaattacgaggcatttgtgaagcacatcatgtccatttag

SEQ ID NO: 196318 - DNA, 585 bp, synthetic construct
  misc_feature 1..585: note = Description of Artificial Sequence: Synthetic coding sequence
  source 1..585: mol_type = other DNA
atggcccccaagaaggacgtgaagaagcccgtggccgccgccgccgcagctcccgccccagcaccggccccagctccagcccccgccccagccaagcccaaggaagaaaaaatcgatctgtctgccattaaaattgaattctcaaaagagcagcaggacgagttcaaagaggctttcctgctgttcgaccgaacaggtgattcaaagatcactctctctcaagtgggtgatgtgctgagggcgttaggcaccaatcccacgaatgcggaggttcgcaaagtgctgggtaatccttcgaacgaagagctaaatgccaagaagattgagttcgaacaatttctgcccatgatgcaggctatttccaataacaaagaccaggccacctacgaggatttcgttgagggccttcgtgtgttcgataaggaaggcaacgggacagtgatgggtgcagagcttaggcacgtgttagctacgttaggcgagaagatgaaggaggaagaggtggaggccttaatggccggacaagaggattccaatggctgcatcaactatgaagcattcgtgaagcatattatgtccatttag

SEQ ID NO: 196319 - DNA, 519 bp, synthetic construct
  misc_feature 1..519: note = Description of Artificial Sequence: Synthetic coding sequence
  source 1..519: mol_type = other DNA
atgagcagcaagaaggccaagaccaagaccaccaagaagcggccccagagggccacctcaaatgtgttcgccatgttcgatcagagtcagatccaggaattcaaagaagctttcaatatgatcgaccagaatcgagatggtttcatcgataaggaagacctacacgatatgctggcgtctctcggaaaaaaccccactgacgcctatctggacgcaatgatgaatgaggctcccggtcccatcaattttaccatgttcctgaccatgtttggggagaagctgaacggaacagaccctgaagatgtgatcagaaatgcgtttgcatgttttgatgaagaggcaactggaaccatacaggaggactaccttcgggaacttctgactaccatgggggacaggtttactgacgaggaggttgacgagttatatcgggaggcaccaatcgacaaaaaggggaactttaactatatcgagtttacaaggatcctgaagcacggcgctaaggataaggacgattag

SEQ ID NO: 196320 - DNA, 519 bp, synthetic construct
  misc_feature 1..519: note = Description of Artificial Sequence: Synthetic coding sequence
  source 1..519: mol_type = other DNA
atgagcagcaagaaggccaagaccaagaccaccaagaagcggccccagagagcgacctccaatgtttttgcaatgtttgaccagtcacagatacaagagttcaaagaggcatttaacatgatcgatcagaatagggacggatttatagacaaggaggatttacacgacatgctggctagtctggggaagaaccctacagacgcatacctggacgccatgatgaacgaagcccccggacccattaattttactatgttcctgacaatgttcggtgagaaactgaatggtaccgacccagaggacgtgattcgaaatgcgtttgcctgctttgatgaagaagccaccgggaccattcaggaagattacctgagggagctgctaacgactatgggcgacagatttaccgatgaggaagtagatgagttataccgagaggctcccatagataagaaggggaattttaattacatcgaattcacacggatcctaaagcatggagcaaaggataaagacgattag

SEQ ID NO: 196321 - DNA, 519 bp, synthetic construct
  misc_feature 1..519: note = Description of Artificial Sequence: Synthetic coding sequence
  source 1..519: mol_type = other DNA
atgagcagcaagaaggccaagaccaagaccaccaagaagcggccccagcgggcaacgtccaacgtgtttgcaatgttcgatcagtctcaaattcaggagttcaaagaggcctttaacatgatcgatcagaatcgggatggcttcattgacaaggaggaccttcacgatatgctggcctccctcggaaaaaatcccaccgacgcttacctggacgctatgatgaatgaagcgccgggaccaatcaacttcaccatgttccttacaatgtttggcgagaagttgaatggcaccgaccccgaggacgttatcaggaatgccttcgcctgttttgacgaggaagcaaccggaaccatccaagaggactacctgagggagttgctgaccactatgggggatcgcttcactgatgaagaagtagacgaactgtaccgggaagcacccatcgacaagaaggggaacttcaactacatcgaatttaccaggattctcaaacacggagctaaagacaaagacgactag

SEQ ID NO: 196322 - DNA, 519 bp, synthetic construct
  misc_feature 1..519: note = Description of Artificial Sequence: Synthetic coding sequence
  source 1..519: mol_type = other DNA
atgagcagcaagaaggccaagaccaagaccaccaagaagcggccccaacgagctacgtcaaatgtgttcgcaatgttcgaccaatctcagattcaagaattcaaagaggcatttaacatgattgaccaaaaccgagatggctttatagacaaagaggatcttcacgacatgctcgcctcactgggtaagaacccgaccgacgcttacttggacgcaatgatgaatgaggcacctggtcctattaactttaccatgtttctcaccatgttcggagaaaagctgaacggcacagaccccgaggatgtgatccgcaacgccttcgcctgttttgatgaagaggcgaccggaaccattcaggaagactatctgcgggaactgctaaccacaatgggagatcgctttacagatgaggaggttgacgagctgtacagagaggcccctatcgacaagaaagggaactttaattacattgagtttacacgcatcttgaaacacggtgcgaaggataaagatgattag

SEQ ID NO: 196323 - DNA, 627 bp, synthetic construct
  misc_feature 1..627: note = Description of Artificial Sequence: Synthetic coding sequence
  source 1..627: mol_type = other DNA
atggccctgggccagaagctgttcatcaccatgagccggggcgccgggagacttcagggcacattatgggctttggtgtttttaggaattctggtagggatggtggtgccgtccccggcagggaccagggccaataacacactgctagacagccgcggctgggggacattgctgtcaaggagtcgggcgggtctggcgggtgagattgccggcgtgaattgggaaagtggttatctggtcggcatcaaacggcagcgcaggctgtactgcaatgtcggaatcggattccacctccaggtgcttcccgatggccggattagtgggactcacgaggaaaacccctatagtctgcttgaaatctccacagtggagcgaggcgtggtcagtttgtttggcgtccgctcagctctgtttgtcgccatgaattctaagggacggctttatgccacaccttccttccaagaagaatgtaaatttcgtgagaccctactccccaataactataatgcttatgagtcggacctctaccagggcacttacatagcgctgtccaaatacgggagagttaagcggggctccaaggtgtcacccatcatgaccgtgacacactttctgcctcggatctag

SEQ ID NO: 196324 - DNA, 588 bp, synthetic construct
  misc_feature 1..588: note = Description of Artificial Sequence: Synthetic coding sequence
  source 1..588: mol_type = other DNA
atggcccccaagaagcccgagcccaagaaggacgacgccaaggccgctcccaaggctgcccccgctcccgctcctccacctgaaccagagcgcccaaaggaagtagagttcgacgcctccaagattaagatagagttcacacccgagcagatcgaagagttcaaggaggcctttatgctgtttgacaggactcccaagtgcgaaatgaagattacttatggacagtgtggtgatgtgcttcgcgcacttgggcagaaccctacgcaggctgaggtgttgcgggttctgggcaagccccgtcaagaggagctcaatacaaaaatgatggatttcgaaacatttcttcctatgctgcaacacatctctaaaaacaaggacactgggacttacgaggacttcgtggagggcctgcgcgtcttcgacaaagagggaaacggcacagtaatgggagccgagctgcgtcacgtactggccaccctgggtgagcggctcacagaggacgaagtcgagaaactcatggccggccaggaggattctaatggttgtattaactacgaagcgttcgtgaagcacataatgtcatcatag

SEQ ID NO: 196325 - DNA, 588 bp, synthetic construct
  misc_feature 1..588: note = Description of Artificial Sequence: Synthetic coding sequence
  source 1..588: mol_type = other DNA
atggcccccaagaagcccgagcccaagaaggacgacgccaaggccgccccgaaagctgcccctgcaccagcgccaccccctgagcctgaaagaccaaaagaggtggaattcgatgcttcaaaaattaaaattgaatttacaccggaacagattgaggaattcaaggaggccttcatgctctttgaccgcactcccaaatgtgaaatgaagattacttacgggcagtgcggcgacgtcctgcgcgcactcgggcagaatcctacccaggccgaggtgctaagagtgttggggaaaccacggcaagaagagttgaacaccaaaatgatggatttcgagacatttctccctatgttacagcatatctccaaaaacaaggatacagggacgtatgaagattttgtggagggcctgcgcgtcttcgacaaggaggggaatggcacagtcatgggggcagagctgcggcacgttctagcaacgctgggcgagcggctgacagaagatgaggtggaaaagctgatggccggccaagaagacagcaacggatgcatcaactatgaggcttttgtgaaacatatcatgtcctcctag

SEQ ID NO: 196326 - DNA, 141 bp, synthetic construct
  misc_feature 1..141: note = Description of Artificial Sequence: Synthetic coding sequence
  source 1..141: mol_type = other DNA
atggcccccaagaagcccgagcccaagaaggacgacgccaaggccgcacccaaggcagcaccggctccagctccaccgcccgagcccgaacgaccaaaggaggttgaattcgacgcgtcaaaaattaagattgagttctag

SEQ ID NO: 196327 - DNA, 594 bp, synthetic construct
  misc_feature 1..594: note = Description of Artificial Sequence: Synthetic coding sequence
  source 1..594: mol_type = other DNA
atggcccccaagaagcccgagcccaagaaggaggccgccaagcccgctccagccccagcaccggccccagctcccgccccagcgccggctcccgaagctcccaaggaaccagcattcgaccccaaaagtgtgaagatcgattttactgctgatcagatagaagaattcaaagaagccttttccctgtttgatcgtactcctactggcgagatgaaaatcacttacggtcagtgcggcgacgttttgagagcgctcgggcaaaacccaacaaatgccgaggtgctccgtgtgctgggtaagcccaagcctgaggaaatgaacgtcaaaatgctggatttcgagacttttctgcctatcctgcagcatatatcacggaacaaggaacaaggaacatacgaggattttgttgagggcctacgggttttcgataaagaatccaacgggacggtcatgggcgccgaacttcgccatgtcctggctactctgggagaaaagatgaccgaggctgaggtggagcagttgctggccgggcaggaggacgcaaatgggtgtatcaactatgaagccttcgtcaagcacatcatgtcgggctag

SEQ ID NO: 196328 - DNA, 594 bp, synthetic construct
  misc_feature 1..594: note = Description of Artificial Sequence: Synthetic coding sequence
  source 1..594: mol_type = other DNA
atggcccccaagaagcccgagcccaagaaggaggccgccaagcccgcgccggccccagcgccagcacccgcacctgccccggccccagcaccagaagcccctaaggagcctgcatttgacccgaagagcgtgaagatcgacttcactgcggaccagattgaggagtttaaggaagctttttcacttttcgaccggacgcctaccggagagatgaagatcacctatggtcagtgcggtgacgtgctacgagccctggggcagaatccaactaacgccgaggtgctgagagtgttgggcaagcccaagcctgaagaaatgaacgtgaagatgctggactttgagacgtttctccctatcctccaacatatctctcgcaacaaggaacaaggcacatatgaggatttcgtcgagggtctgcgcgtgttcgacaaagagagtaatgggaccgttatgggggcagaactgcggcatgtgctggccactctgggagagaagatgacagaagccgaagtggagcagctcctcgccggccaggaagatgccaacggatgtattaactacgaggccttcgttaaacacatcatgtccggctag

SEQ ID NO: 196329 - DNA, 264 bp, synthetic construct
  misc_feature 1..264: note = Description of Artificial Sequence: Synthetic coding sequence
  source 1..264: mol_type = other DNA
cccgaggcccccaaggagcccgccttcgaccccaagagcgtgaaggtcattgggtgcccttgtccccgttcacaatcgcacggggcagtcatcgactttacagccgaccagattgaagaattcaaggaagccttcatgggtgccgaactaagacacgtcctcgctactttagtgattaagagcgccccgccccccaaaccgacggcaggagagaaaatgacagaggccgaggtcgagcagctcctcgcagggcaagaggactag

SEQ ID NO: 196330 - DNA, 522 bp, synthetic construct
  misc_feature 1..522: note = Description of Artificial Sequence: Synthetic coding sequence
  source 1..522: mol_type = other DNA
atggccagccggaagaccaagaagaaggagggcggcgccctgcgggcccagcgggcctcttccaatgttttttccaattttgaacaaacccagattcaggagttcaaggaagcatttactctgatggaccaaaatagagatgggtttattgacaaggaggatctgaaagatacatacgccagcctgggtaaaacaaacgttaaggacgacgaactggacgctatgttaaaagaagcctcaggtcctatcaactttaccatgtttctgaacctgttcggagagaaactctccgggactgacgctgaagagaccatcctgaacgcctttaaaatgcttgatcccgacgggaagggcaagattaacaaagaatacatcaagaggctattaatgagtcaggcagataagatgaccgccgaggaggttgaccagatgtttcaattcgcatctatcgatgtagccgggaacctggattacaaggcactatcctacgtgattacgcacggcgaggagaaggaagaatag

SEQ ID NO: 196331 - DNA, 399 bp, synthetic construct
  misc_feature 1..399: note = Description of Artificial Sequence: Synthetic coding sequence
  source 1..399: mol_type = other DNA
atggaccagaaccgggacggcttcatcgacaaggaggacctgaaggacacctacgcttctcttggcaagactaatgtgaaggatgacgagcttgacgccatgctgaaggaagcatccggacccattaacttcactatgtttctcaatctttttggtgagaagctgagcggcactgacgcagaggagaccatcctgaatgcctttaagatgctcgaccccgatggaaaaggcaaaatcaataaggagtatataaaacggctgctgatgtcacaggcagacaagatgactgccgaggaagtggaccaaatgtttcagtttgcttccatcgatgtcgccggcaatcttgactacaaggcattgtcctatgtcatcacacacggtgaagaaaaggaagagtag

SEQ ID NO: 196332 - DNA, 399 bp, synthetic construct
  misc_feature 1..399: note = Description of Artificial Sequence: Synthetic coding sequence
  source 1..399: mol_type = other DNA
atggaccagaaccgggacggcttcatcgacaaggaggacctgaaggacacctatgcctcattgggcaaaaccaatgtcaaggacgacgaacttgacgctatgcttaaggaggcgagcggaccgattaattttacgatgttcctcaacttattcggtgaaaagctctctggtactgatgctgaagagaccatactgaatgccttcaaaatgttagacccagatggcaaaggtaaaatcaataaggagtatattaagagactgctcatgagtcaggccgataagatgacagccgaagaagtggaccagatgttccagttcgcaagcattgacgtcgccggtaacctggactacaaagccctttcatacgtgatcacccatggcgaagaaaaggaagagtag

SEQ ID NO: 196333 - DNA, 399 bp, synthetic construct
  misc_feature 1..399: note = Description of Artificial Sequence: Synthetic coding sequence
  source 1..399: mol_type = other DNA
atggaccagaaccgggacggcttcatcgacaaggaggacctgaaggatacgtacgcaagcttgggcaagacaaacgttaaggatgacgagctggacgccatgttgaaggaggcctccgggcctatcaacttcaccatgtttttgaatctgtttggcgaaaagttaagcggcacagacgccgaggagactattttgaatgcttttaagatgctcgatcctgacggcaaggggaagatcaataaagaatacatcaaaagactgctgatgagccaagcagataaaatgaccgccgaagaagttgatcagatgttccagtttgcgtcaatagacgtcgctggaaacctggactacaaagccttatcatatgttatcacccacggcgaagaaaaagaagagtag

SEQ ID NO: 196334 - DNA, 456 bp, synthetic construct
  misc_feature 1..456: note = Description of Artificial Sequence: Synthetic coding sequence
  source 1..456: mol_type = other DNA
atgtgcgacttcaccgaggaccagaccgccgagttcaaggaggcctttcagctgttcgataggacgggcgatggaaagatcttgtattctcagtgtggcgatgtcatgcgcgccctgggacaaaatccaaccaatgccgaagtgctaaaagtgctgggaaaccctaaaagcgatgaaatgaatgttaaggtcctggacttcgaacatttcctgccaatgcttcagacagtggccaaaaataaggatcagggtacatacgaagactacgttgagggtctcagggtctttgacaaagaagggaacgggacagtaatgggtgcggaaatccgtcatgtgctcgtcacactgggcgagaaaatgaccgaagaagaagtggagatgttggtggccggccatgaggatagcaatggttgtattaattacgaagaactggtcagaatggtactcaacggatag

SEQ ID NO: 196335 - DNA, 456 bp, synthetic construct
  misc_feature 1..456: note = Description of Artificial Sequence: Synthetic coding sequence
  source 1..456: mol_type = other DNA
atgtgcgacttcaccgaggaccagaccgccgagttcaaggaggccttccagctgtttgacagaaccggggacggcaaaattttatatagccagtgtggtgatgtgatgcgagccctggggcagaaccctaccaacgctgaggttctgaaggtgctaggtaatccgaagtcagatgagatgaatgtcaaagttttagattttgagcactttctgccaatgcttcagactgtcgccaaaaacaaagaccaaggcacctatgaagattatgtggaagggctccgtgtcttcgacaaagaaggtaacggaacggtgatgggcgcggaaattcgccatgtattggtaacgcttggggagaagatgactgaggaggaggtggaaatgctggtggccggacatgaggactctaatgggtgcatcaattatgaggccttcgtacggcatatcttgtccggctag

SEQ ID NO: 196336 - DNA, 456 bp, synthetic construct
  misc_feature 1..456: note = Description of Artificial Sequence: Synthetic coding sequence
  source 1..456: mol_type = other DNA
atgtgcgacttcaccgaggaccagaccgccgagttcaaggaggccttccagctgtttgaccgaacaggagatggcaaaattctgtactcacagtgtggagacgtgatgcgtgctctcggccagaaccccaccaatgcagaagttctgaaagttcttggaaacccgaaaagcgatgaaatgaacgtcaaggtgttagacttcgagcactttctgcccatgcttcagacggtggctaaaaacaaggaccagggcacatacgaggactacgtagagggcctgagagtgttcgacaaggagggaaacgggacagttatgggagctgagatacgccacgtcttggtgactctgggtgagaaaatgactgaggaggaagttgaaatgctggtggctggacatgaggactctaatgggtgcatcaactacgaagccttcgtgcggcatattctgtcaggatag

SEQ ID NO: 196337 - DNA, 1491 bp, synthetic construct
  misc_feature 1..1491: note = Description of Artificial Sequence: Synthetic coding sequence
  source 1..1491: mol_type = other DNA
atgagcagcatggaggagatccaggtggagctgcagtgcgccgacttatggaagagatttcacgacatcggcaccgagatgataatcacaaaggccggccgtcggatgttccctgctatgcgagtcaaaatcaccggcctcgatccacatcagcagtattacatcgccatggacatagtgcccgtggacaataagaggtaccggtatgtttatcattccagtaagtggatggtcgctggcaacgccgatagtcccgttccgcctagagtgtacatccatccagactccctcgctagcggggacacttggatgcgtcaagtcgtgtcttttgacaagctgaaactgacaaacaacgagcttgacgatcagggccatatcatcctgcacagtatgcataaatatcaacctagagttcacgttatcaggaaggatttctcatctgatctctctccaaccaaacctgtaccagtaggtgacggagtgaagacgttcaatttccccgaaactgtgtttaccacggtaacggcctatcaaaatcaacagatcacacggcttaagattgatcgcaaccctttcgccaagggtttccgcgattccgggcgcaataggacaggcctcgaagcgatcatggaaacatacgccttctggagaccgccggtgaggacgctcaccttcgaagactttacaactatgcagaagcagcagggaggtagcacaggaacgtcgcctacgacctcgagcacgggcacacctagtccatcagctagtagtcatctgttatcaccttcttgcagccctcccacatttcacctcgcgcctaataccttcaatgtgggatgccgtgaaagccagttgtgcaacctaaacctaagtgactatcccccttgcgcccggtccaatatggccgccctccagtcatatccagggctctccgattccgggtacaaccgcctccagtccgggactacctccgctacacaaccctcagagacattcatgccgcagcggaccccctccttgatcagtggaattccgaccccacctagccttcccggtaactctaagatggaagcctacgggggacagctgggttcttttcccacttctcagtttcagtatgtgatgcaggcaggaaacgcagcctcaagcagttcatctccacacatgtttggggggtcccatatgcaacagtcctcatataatgccttcagccttcataacccttataacttgtacggctacaattttcccacaagcccgaggctggcagctagtcccgagaagctttcagcttctcagtctacactcttatgctcttcccctagcaatggtgcctttggggagagacagtatctgccgtccggaatggaacactctatgcacatgatctctcctagcccaaacaatcagcaggccacaaatacctgtgacgggagacagtatggggctgtgcccggctctagtagccagatgtcagtccatatggtttag

SEQ ID NO: 196338 - DNA, 627 bp, synthetic construct
  misc_feature 1..627: note = Description of Artificial Sequence: Synthetic coding sequence
  source 1..627: mol_type = other DNA
atgccccccaagaaggacgtgcccgtgaagaagcccgccggcccctccattagcaaaccagccgccaagccagcagcagcgggagccccgccagccaaaacgaaagcagaaccagctgttccacaggcgccacagaaaacccaggagcctcccgtggaccttagcaaggtggtaatcgagtttaacaaggatcagctggaggaatttaaagaagcattcgagctgtttgacagagttggcgacggcaagatcctgtactcgcagtgtggtgacgtgatgcgggcactcggtcaaaatccaacaaacgcagaagtgctgaaagtgcttgggaatcccaaatccgacgaattgaagagtaggagagtcgactttgagacttttttaccgatgctgcaagcagtggccaaaaatcgtggacaggggacctatgaggattacctggagggtttcagagttttcgataaagaaggaaacgggaaagtaatgggggctgaactgcgccatgtcctgactacccttggtgaaaagatgacggaagaggaggtcgaaacagtgctggctggacacgaggactctaatgggtgtatcaactacgaggccttcctcaagcatattctgagtgtttag

SEQ ID NO: 196339 - DNA, 90 bp, synthetic construct
  misc_feature 1..90: note = Description of Artificial Sequence: Synthetic coding sequence
  source 1..90: mol_type = other DNA
atgccccccaagaaggacgtgcccgtgaagaagcccgccggcccctccatcagcaagcctgctgcgaaacccgcagccgctggtgcttag

SEQ ID NO: 196340 - DNA, 627 bp, synthetic construct
  misc_feature 1..627: note = Description of Artificial Sequence: Synthetic coding sequence
  source 1..627: mol_type = other DNA
atgccccccaagaaggacgtgcccgtgaagaagcccgccggccccagcataagcaagcctgctgccaagcccgcagccgcaggcgcaccaccagcaaagacgaaagccgagcctgctgttccgcaggcccctcaaaagactcaggaacccccggtcgatttgtcaaaagtggtcattgagtttaataaggatcagctggaggagtttaaagaagctttcgaactgtttgaccgtgtgggtgacggcaagatcttatactctcaatgcggtgatgtaatgcgcgcattaggccaaaatcctacaaatgccgaggtgctgaaggtccttggcaatccgaagtccgacgagctgaaaagcaggcgcgtcgatttcgagactttcctcccaatgttgcaggcggtggccaagaatcggggacagggaacgtatgaagattacttagagggattccgagtttttgataaggagggcaacggaaaggtgatgggggccgagctacggcatgtcttgacgactctgggggagaaaatgactgaggaggaagtggaaaccgttctggctggacatgaggacagcaacgggtgcatcaattatgaagcctttctgaagcacattctgagcgtgtag

SEQ ID NO: 196341 - DNA, 3477 bp, synthetic construct
  misc_feature 1..3477: note = Description of Artificial Sequence: Synthetic coding sequence
  source 1..3477: mol_type = other DNA
atggccgccgtgcggggcgcccccctgctgagctgcctgctggccctgctggctctttgcccgggtggccgtcctcagaccgtcctgactgacgatgaaatagaggaattcctcgaggggtttctgtcagagctggagcctgaaccacgggaggatgatgtcgaggcccctcctccccctgaacctacgccacgtgtgagaaaggcccaggccggtggaaaacccggcaagcggcccggcacagcagctgaggttcccccagaaaaaaccaaggataagggcaagaagggtaagaaggacaaaggacctaaggttcccaaggagtcattggaagggtcaccccggcctcccaagaaaggaaaagagaagccccctaaggccactaaaaagcccaaggaaaagcccccaaaagcaaccaagaagcccaaagaaaagcctcctaaggccaccaaaaagcccaaggagaaacctccaaaggcgactaaaaaacctccaagcgggaaacggccccctatcttggcccctagcgagaccttagaatggccattaccgccgcctcccagccccggcccagaggaactgccacaagagggaggcgcccccttgtcaaacaattggcagaatccaggagaggagacccacgttgaggcgcgggaacatcagcccgagcctgaggaggagaccgaacagcccaccctggattataacgaccaaatcgaacgtgaagactacgaggactttgagtacatccgtcgccagaagcaacctcgtccgcctccatcccgaagacgccgacccgaaagagtttggcctgagcctcctgaggagaaggccccggcccctgcacctgaggagcgcattgagccccccgtgaagccgctcttgccccccttgcctccagattatggagatggctacgtgataccgaactacgatgacatggattactactttggaccccctcctccccagaagcctgacgccgaacgtcagactgatgaagagaaagaagaactcaaaaagccaaaaaaagaggacagctcccccaaggaggaaaccgacaaatgggccgtcgagaaaggaaaggaccataaggagccacgaaagggcgaggagctggaggaggaatggacccccaccgagaaggtgaaatgtccacctatcggaatggaatcccaccgaatagaagacaaccagattcgggcctcctctatgttacgtcacggcctaggcgcacaaagggggcgtcttaacatgcagacaggggctactgaagacgattattacgatggagcctggtgtgcggaagacgacgcacgcacacaatggatcgaagtcgataccaggaggaccaccaggttcactggcgtgattacgcaggggcgagactcaagtattcacgacgactttgtaacaaccttttttgtgggcttcagcaatgactcccagacatgggtcatgtataccaacggttatgaggagatgacattccatggcaatgtagataaggacactcctgtcctgagcgaacttcctgagcccgtggtcgccaggttcattcggatttatcctctgacgtggaatgggtcactgtgcatgcggttagaggtactcggatgtagcgtcgcacccgtttacagttattacgctcagaatgaggtggtggcaactgacgatcttgactttaggcatcacagctacaaggacatgcgacagttgatgaaggtggtgaacgaagaatgccccacaatcacacgcacgtacagcctcggaaagagcagccgaggtctcaagatctacgccatggagataagtgataacccaggggaacacgagctgggcgaacccgagtttcgatacaccgccgggattcacggtaacgaagtgcttggaagagaacttctcctactactgatgcagtatctgtgtcgagagtaccgagacggtaatcctcgagtgaggtctctggtgcaggacacgcgcatacatttagtgccttctctcaatcccgatggttatgaagtggctgcccaaatggggtctgagttcgggaattgggccctcgggctatggacagaagaagggttcgatatttttgaggattttccagatttgaattctgtcttgtggggcgccgaagaaagaaaatgggtgccatatcgcgtcccaaataataacctgccaatacctgaaagatatttaagcccagatgccacggtgtctacagaagtgagggcaattatcgcctggatggaaaaaaatcctttcgtactgggcgccaacttgaacggcggggagaggcttgttagttatccctatgacatggcacggacaccgacccaagagcaactcctagcggccgccatggccgccgctcgcggcgaagatgaagacgaagtgagcgaagcccaggagacacctgatcatgctatttttcgttggctggctatttcattcgcctctgcacatttgactctgacagagccatatagagggggctgccaggctcaagactatactggaggcatgggaatcgtgaatggcgccaagtggaacccccgcaccggcaccatcaatgatttcagctatctgcacactaactgcctggagctgtccttctacctcggatgcgataagtttccccacgagagtgaactgccacgagagtgggagaacaacaaggaggcacttctgaccttcatggagcaggtgcacagaggaatcaaaggggtggtgaccgatgagcagggaatccccatcgccaacgccacaatcagcgtgagcggaatcaatcacggcgtaaaaacagcgtctgggggagactattggcgaattctcaaccccggtgagtaccgagttaccgcacacgccgaagggtatacgccaagcgccaagacttgtaacgttgattacgatattggagcaacccaatgcaacttcatactcgctagatctaattggaaacggattagggagatcatggcaatgaacggaaacagaccaattccgcacatcgacccgtctcggcctatgactcctcagcagcggcgcctacagcagaggcggctgcagcatcgtcttaggctccgagcacaaatgcgactgcgacggctcaatgcaacgaccaccctgggaccccacaccgttccccctacactgcctccggctcccgccactactttgtctacaacaatagagccttggggactcatcccccccaccaccgctggttgggaggaatccgagactgagacatacaccgaagtggtgacagagttcggaaccgaggtggagcctgagtttgggaccaaggtggagcccgaatttgagactcagctcgaacccgaattcgagacgcaactggaacctgagtttgaagaagaagaggaagaagagaaggaagaggaaatcgccacaggccaggctttccctttcactacggtggagacatatacggtcaatttcggtgacttttag

SEQ ID NO: 196342 - DNA, 447 bp, synthetic construct
  misc_feature 1..447: note = Description of Artificial Sequence: Synthetic coding sequence
  source 1..447: mol_type = other DNA
atgttcgagcaggcccagatccaggagttcaaggaggccttcagctgtattgatcagaatagggatgggatcatctgtaaggctgacctgcgggagacatacagccagcttggaaaggtcagtgtaccggaggaagaactggacgccatgctgcaagagggcaaagggccaatcaatttcacagtgttcctcacactgtttggagaaaaactgaatggcacagaccctgaggaggcaatactaagcgcattccggatgttcgatccctccggcaaaggagttgtaaacaaagatgaattcaaacagttactcttgacccaggccgataagtttagtcctgctgaagttgagcaaatgttcgcgctaaccccaatggacttagctggaaacatcgattataaaagcctgtgttatatcattactcatggcgacgaaaaggaggaatag

SEQ ID NO: 196343 - DNA, 1128 bp, synthetic construct
  misc_feature 1..1128: note = Description of Artificial Sequence: Synthetic coding sequence
  source 1..1128: mol_type = other DNA
atgcagaagctgcagctgtgcgtgtacatctacctgttcatgctgatagtagcaggtcctgtcgaccttaacgaaaactcagaacagaaggagaacgtggagaaggaagggctgtgtaatgcctgtacctggcggcagaataccaagtctagccggattgaggcaatcaaaatacaaatcctgtccaaactgagactcgagacggctccaaatatttctaaggacgtgattcggcagctgctgcccaaagctccaccactgcgggagctgatcgaccaatacgacgtacagagggatgatagctccgacggtagcttagaagacgacgattaccacgcaacaactgagaccatcatcaccatgccaacagagtcagactttctcatgcaggtggacggcaagccaaagtgctgtttctttaaattctccagcaaaatccagtacaataaggttgttaaggctcagctttggatctacctccggcctgtcgagacacccaccaccgtcttcgtccaaatactgcgtcttatcaagccaatgaaggatgggaccagatacactggaatacgcagccttaagctggatatgaaccccggaacgggcatctggcaatccatcgatgtgaagaccgtgctacaaaattggctgaaacagcccgaaagtaatctgggaattgagattaaggcgcttgacgagaatggccacgatctggccgtaacgttcccaggtcccggcgaagatggattgaaccctttcctggaagtgaaagttactgacactcccaaacgttctagacgggactttggtctggattgtgatgagcacagcactgagtcccggtgctgcagataccccttgactgtggatttcgaggcgtttggctgggactggataatcgctcccaaaagatataaagcaaactactgttctggtgagtgtgagtttgtgttcctgcagaaatatcctcatactcatctcgtgcaccaagcgaatccacgcggttcagccgggccctgttgcacacctacgaagatgagccccattaacatgctctactttaacggcaaggagcagataatatacggaaagatccctgctatggtggtcgatcgatgtgggtgttcctag

SEQ ID NO: 196344 - DNA, 1497 bp, synthetic construct
  misc_feature 1..1497: note = Description of Artificial Sequence: Synthetic coding sequence
  source 1..1497: mol_type = other DNA
atgttcaactacgagcggcccaagcacttcatccagagccagaacccctgtggatcccgcctgcagcctcccggccccgaaactagttccttcagctcacagaccaaacaatcatccataatcattcagccccgccaatgcacagaacaaagattttccgcgagctctaccctgtccagtcacattaccatgagctcttccgcattccccgcttccccgaaacagcatgctggatcaaaccctggccaaagggtgacaactacctacaatcagtcccctgctagtttcctgagtagcatcctgccctctcagcctgattacaactcatccaagattccaagtgctatggacagtaattaccaacaaagtagcgcgggtcagccaatcaacgccaaaccaagccaaactgccaatgctaaaccgatcccccggactcctgatcatgaaattcaggggagtaaagaagccctgatacaggacctggaacgtaagctgaaatgcaaggacaccctccttcataacggtaatcaaagactcacatacgaagaaaagatggcacggagactgctgggccctcagaacgctgccgcagttttccaggcgcaggacgacagcggcgcacaggactcgcagcagcataacagtgaacatgcccggctgcaggtgccaacctcccaagttcgtagcaggtccaccagcaggggggacgttaatgatcaggatgctatccaagagaaattttatcctccaaggtttatccaagtgccagagaacatgtctatcgatgagggacggttctgtcgtatggattttaaagtcagcggactgcctgcaccagacgtgtcgtggtacttgaatgggcggacagtgcagtctgatgacctgcacaaaatgatagtgtcggaaaagggccttcattcactgatctttgaagtcgtccgcgccagcgatgcgggggcctacgcctgcgtagctaagaaccgcgcaggcgaagcgaccttcactgttcaacttgatgtgttggcaaaagagcacaagagggcaccaatgtttatttataagcctcagagcaaaaaggttcttgaaggtgacagcgtgaaactggagtgtcaaataagcgcgatcccccctcctaaactgttctggaaaaggaataatgaaatggtgcagtttaatactgatcggatctccctttaccaggataataccggacgggtaactctgctaatcaaagacgtaaataaaaaggacgccgggtggtatacagttagcgccgtgaatgaggccggtgttacaacgtgcaatacccggttagatgtgactgcacgcccgaaccaaactctgccagccccaaagcaacttagggtgcgtccaacattctctaagtatttggcgttaaatggcaagggcctgaatgtgaagcaggctttcaaccccgagggcgagtttcaaaggctggcggcacagagtggcctgtacgagtcagaagagttatag

SEQ ID NO: 196345 - DNA, 945 bp, synthetic construct
  misc_feature 1..945: note = Description of Artificial Sequence: Synthetic coding sequence
  source 1..945: mol_type = other DNA
atggcccggcggctgctgggcccccagaacgccgccgccgtgttccaagcccaggacgacagcggggctcaggactcacagcagcacaattccgagcacgcccggctgcaagtgcctacatcacaggtaagaagccgctccacctcaagaggcgacgtcaatgaccaggacgcaatccaggagaagttctacccacctcgcttcatccaggtgcccgaaaacatgtcaattgatgagggccgattttgcaggatggactttaaagtatcgggcttaccagcccccgacgtgagttggtatttgaacggcagaacggtccaaagcgatgaccttcacaaaatgattgtctctgagaagggtctgcactctctaatttttgaagtggtgcgtgccagtgatgccggggcttatgcttgtgtggccaagaacagagctggagaagctaccttcacggtacagctggatgtgttggctaaagaacacaagcgggctccaatgttcatatacaaacctcagtcaaagaaagttcttgagggcgacagcgttaaactcgagtgtcagatttccgcaatccccccgcccaagctgttctggaagagaaacaacgaaatggtgcaattcaacaccgataggatttctctgtaccaggataataccggcagagttacattgctgatcaaggacgtcaataagaaagacgcaggatggtacaccgtgagtgccgtgaacgaggcaggcgtcacaacatgtaatacacggctcgacgtcacggccaggcccaatcaaaccttgccagcccccaagcaattgcgagttcgcccaaccttctctaagtaccttgccctcaacggtaagggcctgaacgttaagcaggctttcaacccagagggggagttccagaggctggccgcacagtcaggactgtacgagtcggaggaactctag

SEQ ID NO: 196346 - DNA, 357 bp, synthetic construct
  misc_feature 1..357: note = Description of Artificial Sequence: Synthetic coding sequence
  source 1..357: mol_type = other DNA
atgtgcgacaaggagttcatgtgggccctgaagaacggcgacctggacgaggtcaaggattatgtggctaagggagaagacgttaatcgcaccctggagggaggccggaagcctcttcactacgctgccgactgcggtcaactcgagattcttgagttccttctgctgaaaggcgccgacatcaacgcccccgataaacaccacataacgcccctgctcagcgccgtgtatgaaggtcatgtgtcctgtgtaaaactcctgttaagtaagggagccgacaaaactgtgaagggcccagatgggctgactgcgttcgaggcaactgacaaccaggcaattaaagcccttctccaatag

SEQ ID NO: 196347 - DNA, 1812 bp, synthetic construct
  misc_feature 1..1812: note = Description of Artificial Sequence: Synthetic coding sequence
  source 1..1812: mol_type = other DNA
atggccagcgccagcaccagcaagtacaacagccacagcctggagaatgagtcaatcaagagaacaagcagggacggggtaaaccgggacctgactgaagccgttccgcggctgcctggagagactctcatcactgataaggaggtgatatatatctgccctttcaatggtcccatcaaaggccgggtatacatcaccaactatcggctgtacctgcggagtttagaaactgacagctctctaatactggacgtgcccttgggcgtcatctcacggattgaaaagatgggcggtgcgacgtcccgaggtgagaattcatatggattggacatcacttgcaaagacatgcggaacctccgcttcgcacttaaacaagagggccactcccgccgagatatgtttgagatcctcacccgctatgcattcccactggcccacagcctccccttattcgcctttcttaatgaggagaaatttaacgtcgacggatggacagtgtataacccagtcgaagagtataggaggcaggggctgcccaaccaccattggcgaatcaccttcataaacaagtgttacgaactgtgcgacacctaccccgccctcctggtggttccgtacagggcctcagacgacgatctgcgccgtgtggcaactttcagaagccgcaatcgcatcccagtactgagttggatacacccagagaacaagacggtgatcgtccgctgcagccagccgttggtcgggatgtcaggtaaacgcaataaggacgatgaaaaatacctcgatgtcataagggaaactaacaagcaaatatccaagttaacaatctatgacgccagacccagtgtgaatgccgtggccaataaggcaacaggcggtggctacgaatccgatgacgcctaccataacgcagagctgttcttcttggacattcataacattcacgtcatgcgcgagagcttgaagaaagtgaaggatatagtgtacccgaatgtggaggaaagtcactggctgagcagcctcgagtcaacacactggctggaacacattaagctggttctgactggcgcaattcaagtggccgacaaagtgtcgtctgggaaaagctcagtgcttgtgcattgttccgacggctgggatcgtaccgcgcagctgacttccctggccatgctcatgctggactccttctatcggagcatagagggtttcgagatcctagtacagaaggaatggattagttttgggcacaaatttgcctcacgaattggccacggagacaaaaaccacacggatgcagatcgatcaccgatcttccttcagtttatcgattgcgtgtggcagatgagtaaacaatttcctaccgcatttgaattcaacgagcagttcctcatcatcattcttgaccacctctatagctgtcggtttgggacctttcttttcaattgcgaaagcgccagagaacggcaaaaagtgacggaacgaactgtgtctctgtggtcactaattaatagcaacaaagagaagtttaaaaaccctttttatacgaaggagatcaatagagtattatatccagtggccagcatgcgacacctggaattgtgggttaattactatatcaggtggaatccgcgaatcaaacaacagcaacctaaccctgtagaacaacggtatatggagctcttggccctccgtgacgagtacatcaagcggcttgaggagctacagctggcaaactctgctaagctttccgaccctccaacttctccaagctccccgagccaaatgatgccacacgtgcaaacgcatttttag

SEQ ID NO: 196348 - DNA, 1701 bp, synthetic construct
  misc_feature 1..1701: note = Description of Artificial Sequence: Synthetic coding sequence
  source 1..1701: mol_type = other DNA
atggccagcgccagcaccagcaagtacaacagccacagcctggagaacgaaagcattaaacgcacttcgagagacggggttaatcgtgatttgaccgaggctgtcccacgattacccggtgaaacccttatcaccgacaaagaggtcatttacatctgccccttcaatggacctataaaggggagggtctatattacaaattatagactctatctgcgaagtctggaaacagatatgaggaatttgcgtttcgcgttgaagcaagagggacattccaggcgggacatgtttgagattctcactcgctatgcctttccattggcccatagtttgccgctgttcgccttcctgaacgaagaaaagtttaatgtcgacgggtggaccgtctacaacccagtcgaggaatataggcggcagggactgcccaatcatcactggcgcattaccttcatcaataaatgctacgagctctgcgatacatatccggcactgcttgtggtgccttatagggctagcgacgacgatctgagacgcgtggctacttttaggtcacgtaataggatccccgtgttgtcttggatacatcccgagaacaagaccgtcatagtacgatgtagtcagcctttggtggggatgtccggaaaacggaacaaggatgatgaaaagtatctggacgtgatcagggaaaccaataaacagatcagtaaactgaccatttacgatgcccgcccaagcgtcaacgctgtggcaaacaaggctactgggggcgggtatgagtctgatgacgcataccataatgctgagctcttctttctggacattcataacattcacgtcatgagagagagcttgaaaaaggtgaaagacatagtatatccaaatgttgaggagtcccattggctgagttcgctggaatccacccactggttggagcatataaaactggtgctgactggtgcaatccaggtggccgacaaagtgagcagtggcaagtcttcagtgctggtgcactgttctgacggatgggataggaccgctcagctgactagcttggctatgctgatgctggacagtttttaccgcagcattgaaggatttgaaatcttagtgcagaaggaatggatcagcttcggccataaatttgcatctaggataggccacggcgataagaatcacacagatgctgacaggtcccccatattcctacagtttatcgactgtgtgtggcaaatgtccaagcagtttccaacagctttcgagtttaacgaacaattcctgatcattatcctggatcacctgtacagctgtcgctttggaacattcctgttcaactgcgaaagtgctcgcgagcgacagaaggtaacagagagaaccgtttcgctgtggtcactgattaacagtaataaggaaaagttcaagaacccgttctataccaaagagattaatagggtgttataccccgtcgcatcaatgagacacttggagctctgggtaaactattacattagatggaacccccgtatcaagcagcagcagccaaatccagtggaacaaaggtatatggagctgctcgcactgcgggatgagtacatcaaacgcctggaagagctgcagttggctaactccgccaaactgtcagatcctcccacttccccctctagcccctcgcaaatgatgccacatgtgcagacacacttctag

SEQ ID NO: 196349 - DNA, 1251 bp, synthetic construct
  misc_feature 1..1251: note = Description of Artificial Sequence: Synthetic coding sequence
  source 1..1251: mol_type = other DNA
atgggcggcgccaccagccggggcgagaacagctacggcctggacattacctgcaaagacatgcgcaatctccggttcgctctgaaacaggaaggacatagccgtcgggatatgtttgagatactgactcgatatgcgtttccactcgcccactctctgcctttatttgcatttctgaacgaggaaaaattcaacgtggatggttggacagtgtataaccccgtggaggagtaccgtaggcaagggttacccaaccatcactggaggatcaccttcataaacaagtgctatgaattgtgtgacacataccctgcccttttagtcgtcccctatcgcgcttccgatgatgacctgcgcagagtggctacatttcgctctaggaacaggatcccggtactatcctggatccaccccgagaacaagacagtgatcgttagatgcagccagccactggtgggaatgagcggaaaacgaaataaagacgatgagaaatacctggatgtcatcagggagactaacaagcaaatctccaagctaacaatttatgacgcacggcctagtgtaaacgcagtcgccaacaaggccaccggaggcggctatgagagtgacgacgcttaccacaatgctgaacttttcttcctagatatccacaacattcacgtgatgcgcgagtcgctaaagaaagtgaaagatatcgtgtacccgaacgtcgaagaaagccactggctgagcagcttagagagtacacactggctagagcacattaagctagtgctaacgggcgctatacaagtggccgataaggttagtagcggcaaaagctcggtcctggtgcattgtagcgacggatgggatagaaccgctcaattaacttcacttgcaatgttgatgctggattccttttatcgcagcatcgagggcttcgaaattctcgtgcagaaagagtggattagtttcggccacaagtttgcaagccggattggccatggagacaagaaccacacagacgcagatcgatcgccgatcttccttcagttcatagattgtgtctggcagatgagcaagcagttcccgacggccttcgaattcaacgaacaattcctgattataattctcgaccacttatatagctgtcggttcggaaccttcttgttcaattgtgaaagcgcgagagaacgtcaagcgctgcactttctgtccctgtcactgtgtcggcgccttcagaagggcttgttcctttatggacactag

SEQ ID NO: 196350 - DNA, 1467 bp, synthetic construct
  misc_feature 1..1467: note = Description of Artificial Sequence: Synthetic coding sequence
  source 1..1467: mol_type = other DNA
atgcggaacctgcggttcgccctgaagcaggagggccacagccggcgtgacatgttcgaaatccttactaggtacgcttttcccctcgcccattctctacccctgttcgcctttctgaacgaagagaagttcaacgttgacggctggacagtctacaaccccgtggaggaataccgccggcagggactgcctaaccaccattggagaatcaccttcatcaacaagtgctatgaactctgtgatacataccccgccttactggtggttccctacagggcaagcgacgacgatttaagacgggttgcaaccttcaggtcgcggaacaggatccccgtcctttcatggatacatcccgagaataagaccgtgatcgtgcggtgctcacagccactcgtaggcatgtctgggaaacgcaacaaggatgacgagaagtatcttgatgtaatccgggaaacaaataaacagatttcaaagctgaccatctatgatgcgcggcccagcgttaacgctgtcgccaacaaggccacagggggcggatacgaaagtgacgacgcataccataatgccgaactgttcttcttagacatccacaatatacacgtgatgcgcgagagcctgaagaaggtgaaggacatcgtgtaccccaacgtcgaagaatcccattggttgtccagccttgaaagtacccattggttagaacacattaagctggtccttactggcgccatccaggttgctgacaaggtgtccagtggaaagagctcggttttggtccactgttcagacgggtgggacagaactgctcaactcaccagcctcgccatgcttatgctggactcattctaccgctctattgaaggtttcgagatcctggtgcagaaagaatggatatccttcgggcacaaattcgcttctcggatcggacatggcgacaaaaatcataccgacgcagaccggtcccccatctttctgcagttcatcgattgcgtgtggcagatgtcaaaacaatttccgactgccttcgagttcaacgaacagttcttaattatcatactcgatcacctctactcatgtagatttggaacatttctattcaactgtgaatcagcccgcgagagacagaaggtgacagagcgcactgtgtcgctgtggtcgctgattaattcaaacaaggagaaatttaagaaccctttctataccaaagaaattaatcgtgtgttgtaccctgtcgccagcatgcgacatctggaactgtgggtcaattactatatcaggtggaaccctcgcatcaaacagcagcaaccaaacccagtggagcagcgatacatggaactactcgccctacgagatgagtacatcaaacgcctggaggagctacaactggctaattccgccaagctttccgacccccctacaagccccagttctcctagccaaatgatgccccacgtccagacacacttctag

SEQ ID NO: 196351 - DNA, 1998 bp, synthetic construct
  misc_feature 1..1998: note = Description of Artificial Sequence: Synthetic coding sequence
  source 1..1998: mol_type = other DNA
atggaccggcccgccgccgccgccgccgccggctgcgagggcggcggcggcccaaatccaggaccagccgggggaagacggccgcctagagccgcaggaggcgcaaccgctggatcacgtcagcctagtgttgaaacactggacagccccaccggcagccacgtggaatggtgtaagcagctcatcgccgcaaccatcagcagtcaaatttccggatctgtgaccagcgaaaatgtttcccgagactacaaagcacttcgggacgggaacaagttagcccagatggaggaagcccccctgtttcccggtgagtcaatcaaagctatcgtcaaagacgtgatgtatatctgcccgtttatgggagccgtgtcgggcacactgaccgttactgacttcaaactgtactttaagaacgtcgagagagaccctcacttcattctcgatgtccctcttggcgtgatctccagggttgaaaagatcggagcccagtctcacggcgataattcctgtggaatcgaaatcgtgtgcaaggacatgcgtaacttaagactggcgtacaaacaggaagaacaatccaagttaggcatcttcgagaatctgaataaacacgcctttccattgagcaacgggcaggcactgtttgcgttctcttacaaggaaaaatttcctattaacggatggaaagtttatgaccctgtatctgaatacaaacgccaagggcttcctaatgaaagctggaaaattagcaagattaactcaaattacgaattttgtgacacctatcccgcaataatcgtggtgcccactagcgtcaaagatgatgacctttctaaagtggccgccttccgcgcgaaaggaagagttccagtactgtcctggatccaccctgagtcgcaagctacaataacgaggtgttctcagcccttagtgggaccaaatgacaagcgctgcaaggaggatgagaaatatttacagacaatcatggatgccaatgctcagtcacataaactaatcatctttgatgcacgacaaaactctgtggctgacaccaataaaaccaagggagggggatacgagagtgagtcagcctatcctaatgctgaattagtttttctagagatccacaacatccacgtgatgagagagagcttaaggaagctgaaggaaatcgtctaccccagcatagacgaggctcggtggctgagcaatgtcgacggcactcactggctggaatatattaggatgctgctggccggagcggtccggatcgccgacaaaatcgaaagcggcaagacaagcgttgtggtgcactgctccgacggctgggatcgcaccgctcagctcacatcactggccatgctgatgttggattcctattaccggactatcaagggtttcgagaccctagtcgagaaggaatggatttcctttggacaccggttcgccctccgagtgggtcatgggaacgataatcacgctgacgctgataggtcaccaattttcctgcagttcgttgactgcgtttggcagatgacccgccagtttccctcggcttttgagttcaatgaactgttccttatcacaatcctggatcacctctattcatgcctgttcggcactttcctttgcaattgcgagcagcaaagattcaaagaggatgtttacacgaagaccatctctttatggtcctatattaacagtcaactggatgagttttccaatcctttttttgttaattacgaaaaccacgttctgtaccccgtggcgtccttgagtcacctggagctgtgggtgaattattacgtgagatggaatcctcgaatgcggccacagatgccaatacaccagaaccttaaggaactgttggccgttcgcgctgaactgcagaagagagtggagggcttgcagagggaggtggctactcgggccgtgtccagttcatctgagcgggggagcagcccaagccatagcgccacgtccgtgcatacgagtgtatag

SEQ ID NO: 196352 - DNA, 264 bp, synthetic construct
  misc_feature 1..264: note = Description of Artificial Sequence: Synthetic coding sequence
  source 1..264: mol_type = other DNA
atggaggaggcccccctgttccccggcgagagcatcaaggccatcgtcaaagacgttatgtatatatgtccgttcatgggcgccgtgtctggcaccctgaccgtgaccgattttaaactctacttcaaaaacgtcgagcgggatccacattttattttagacgtgcctctgggcgtcatctcccgggtcgaaaagatcggggctcaaagtcacggagacaattcctgcgggatagagattgtgtgtaaggacatgcggaactag

SEQ ID NO: 196353 - DNA, 264 bp, synthetic construct
  misc_feature 1..264: note = Description of Artificial Sequence: Synthetic coding sequence
  source 1..264: mol_type = other DNA
atggaggaggcccccctgttccccggcgagagcatcaaggccatcgtgaaggatgttatgtatatctgcccttttatgggggcggtctctgggacccttaccgtcaccgatttcaaactgtattttaaaaacgtggagcgcgatccacacttcatactggatgtgccgttaggcgttatttcccgcgtcgagaaaatcggggcccaatcccatggcgacaattcgtgcggcatcgagattgtatgtaaagacatgcggaactag

SEQ ID NO: 196354 - DNA, 273 bp, synthetic construct
  misc_feature 1..273: note = Description of Artificial Sequence: Synthetic coding sequence
  source 1..273: mol_type = other DNA
atggaggaggcccccctgttccccggcgagagcatcaaggccatcgtcaaagacgtcatgtatatatgcccgttcatgggcgctgtgagtggaacactcactgtcaccgatttcaaactgtatttcaaaaatgttgaaagggatcctcacttcatactggacgtgcctttgggtgtgatctcccgcgtagagaagatcggtgctcagtcacacggagataatagctgcggcattgagatcgtctgcaaggatatgcgcaatctgaggttgtag

SEQ ID NO: 196355 - DNA, 2022 bp, synthetic construct
  misc_feature 1..2022: note = Description of Artificial Sequence: Synthetic coding sequence
  source 1..2022: mol_type = other DNA
atggaccggcccgccgccgccgccgccgccggctgcgagggcggcggcggtcctaacccaggccctgcaggggggaggagacctccacgggccgcgggcggcgctacagctgggagtagacagccaagcgtggagaccctggacagtccaaccgggagccacgtagagtggtgcaagcagctgatagccgcaacaataagtagccagatctcggggagcgtcacaagtgaaaatgtttcccgggattacaaagtgtttcgacgaccagatcttagagccctgagggacggcaataagcttgcacaaatggaagaggctcccctgttccccggcgagtctatcaaagcaatcgttaaggacgtgatgtacatctgtcctttcatgggagccgtgtctggcaccctgaccgttacagattttaaattatactttaaaaacgtggaaagggatccacactttatcctcgacgtacccttgggcgtgatcagccgggtggagaaaatcggagcccaaagccacggtgataatagttgcggaattgaaatcgtctgcaaggacatgcgtaacctcagacttgcctataagcaagaagaacaaagcaaattagggatctttgaaaatcttaacaaacatgcgtttccactgtccaacggacaggccttattcgcgtttagctacaaggaaaaattccccatcaatggatggaaggtttatgacccagtgagtgaatataaacgacagggcctccccaatgaaagctggaaaatttcaaaaattaactcaaactatgagttctgtgatacatatcccgccattatcgtagtcccgaccagcgtgaaggacgatgacctcagcaaagttgccgcttttcgggccaaggggagagtgcctgtcctgtcctggattcatcccgagtcccaggccacaattaccagatgcagccagccattggtcgggcccaacgataaaaggtgcaaagaggacgagaagtacctgcaaacgatcatggacgcgaacgcacaaagccacaaattgattattttcgatgcaaggcagaactcagtggccgataccaataaaaccaaaggcggcgggtacgagtcggagagcgcatacccaaacgcagagctggtctttcttgaaatccataacatccacgtgatgcgggaaagcctccgcaagctcaaggaaatcgtttaccctagcatcgacgaagctaggtggctgagcaacgtggatggcactcactggctagagtatatccggatgctactcgccggggcggtccgcattgcagacaaaatagagagcggcaagacaagtgtggtggtccactgttccgatgggtgggataggactgcccagttgacctccctggctatgcttatgcttgatagctattaccggaccattaaaggcttcgagacactcgtggagaaggagtggatttcctttggccacaggttcgccctacgcgttggacacggcaatgataatcacgcggacgccgacagaagtccaatcttcttgcagttcgtcgactgtgtgtggcaaatgaccagacagttcccttcggccttcgagttcaatgaattgttccttattaccatcctagaccacctttactcctgcctgtttggcaccttcttgtgcaattgtgaacagcaacggttcaaggaagacgtgtacactaagaccatcagtctgtggtcttacataaatagtcagttggatgagttttctaatccattcttcgtgaattatgaaaatcatgtgctgtacccggtggcttctttgagtcatcttgaactgtgggtaaactattatgttagatggaatccccgcatgcgaccacagatgcccattcaccaaaatctaaaagagctcctggctgtgcgggccgagctgcagaaaagggtggaaggtctccaaagagaagtggccactagagctgtgtcgagcagtagcgaacgggggtccagtccttcacattctgctaccagtgtgcacacatccgtgtag

SEQ ID NO: 196356 - DNA, 1707 bp, synthetic construct
  misc_feature 1..1707: note = Description of Artificial Sequence: Synthetic coding sequence
  source 1..1707: mol_type = other DNA
atggaccggcccgccgccgccgccgccgccggctgcgagggcggcggcggccccaatcctgggccagcgggaggtaggagacctcccagagcagctggcggcgcgacagccggcagccggcagccgtccgtcgagacccttgattcccccacaggaagtcatgttgaatggtgtaaacagctgatcgctgccaccatcagcagtcagatctctgggtctgtcacctctgaaaatgtttcaagagattacaaagctttgcgagacggcaataaacttgctcagatggaagaggcccctctgtttccgggcgagtccatcaaggcgattgtgaaggatgtaatgtacatttgtccgttcatgggcgcagtctccggaacactgacggttactgacttcaagttatatttcaagaacgtagagagagaccctcacttcatcctcgatgttcccctgggggtgattagccgcgtggaaaagattggcgcccaatcccatggcgataactcatgtgggatcgaaatcgtgtgcaaggacatgcgcaacctgcggctggcgtacaagcaggaagagcaatcaaaactcggcatcttcgagaacctcaataaacacgccttccctttgtctaatgggcaggccctgttcgctttctcttacaaggagaagttcccaattaatggctggaaggtgtatgaccccgtctccgagtacaaaagacaggggctaccaaatgagagttggaagatctctaaaatcaactccaattacgaattttgcgacacctaccctgcaattattgtagtgcccactagtgtgaaagatgatgacctatccaaagtggcggcctttagggctaagggccgggtgccagtcctcagctggatccacccggaatcccaggcaaccataactagatgcagccagcccctggtgggacccaacgacaagaggtgcaaagaagacgagaaatacctgcagaccatcatggatgccaatgcccagtcacataagctgataatcttcgatgcgcggcagaatagtgtggcagatacaaacaagacaaagggagggggctacgaaagcgagtcagcttatcccaatgcagaactggtcttcctggagatccacaatatacacgtcatgagagaaagcctccggaagctaaaagaaatagtgtatccttcaatcgacgaggcacggtggctgtcgaatgtcgatgggacacactggctggaatacatcaggatgctgctggccggggcagtcagaatcgccgacaaaattgagtcaggcaagactagcgtcgtggtgcactgctccgatgggtgggatcgcactgcccagctgacttcactggccatgctgatgctcgattcctattatcgcacgattaagggctttgaaacgctggtagaaaaagagtggatttcatttggccacagattcgctttgagagtaggacacggaaatgataatcatgccgatgcagacaggagcccaattttcttgcagtttgtcgattgtgtgtggcaaatgacccggcagttcccaagcgccttcgagtttaatgagctgttcctcattaccattctggaccacctctattcctgtctattcggcaccttcctgtgtaactgtgaacagcagagattcaaagaggcctggggagctggcacacagcgagcacggggttccctgagatcaaggtag

SEQ ID NO: 196357 - DNA, 444 bp, synthetic construct
  misc_feature 1..444: note = Description of Artificial Sequence: Synthetic coding sequence
  source 1..444: mol_type = other DNA
atggaggaggcccccctgttccccggcgagagcatcaaggccatcgtgaaagacgtaatgtacatttgtccctttatgggcgccgtaagcggcacactcacagtcacggacttcaaattatactttaagaacgtggagcgcgacccacacttcattctggatgtgcctctgggagtgatcagcagggtggagaaaattggcgcccagtctcatggtgataattcttgtggcattgaaatcgtgtgcaaggacatgagaaatctgcgactcgcttataaacaggaggagcaatctaagttagggatcttcgagaatctgaataagcacgcctttccgctcagtaatggacaggctctgtttgccttcagttataaagaaaagttcccgatcaatgggtggaaagtctatgatcccgtgagcgagtataagcgacaggggctttag

SEQ ID NO: 196358 - DNA, 1182 bp, synthetic construct
  misc_feature 1..1182: note = Description of Artificial Sequence: Synthetic coding sequence
  source 1..1182: mol_type = other DNA
atgtacatctgccccttcatgggcgccgtgagcggcaccctgaccgtgactgattttaaactgtattttaagaacgtggaacgagaccctcattttatcctagatgtccccctcggggtgattagccgtgtagagaaaatcggagcccaatcacacggagataattcttgtgggatcgaaatagtatgtaaagatatgcgcaacctgcgattagcctacaaacaggaggagcagagcaagcttggaatctttgaaaacctgaataagcatgcttttcccttatcgaacgggcaggcgctgttcgcattctcctacaaagagaaatttccaataaatgggtggaaggtctatgacccggtgtcagagtacaaaagacagggacttccaaacgagtcgtggaaaattagcaagatcaatagtaattacgaattctgtgacacttacccagcgatcatcgttgtgccaaccagtgttaaggacgacgatctgagtaaagtcgctgcttttcgtgcaaaggggcgagttcccgtgttatcctggattcaccccgaatcccaggcaactatcaccaggtgcagccagccgctagtaggtccgaatgataagagatgtaaagaggatgagaaatatctgcagactatcatggacgctaatgcccagagccataagttaatcatcttcgacgccagacaaaactccgttgccgacaccaacaaaatgctgctggctggagcagttaggatagcggacaaaatcgaaagcgggaagacctcagtggttgtccactgcagtgacgggtgggaccggactgcccagctgaccagcctcgcaatgttgatgctagactcctattaccgaactataaagggtttcgagacattagtggaaaaggagtggatctcatttggccacaggtttgcccttcgtgtgggacacgggaatgataaccatgccgatgctgaccgcagccccattttcctgcaattcgttgactgtgtgtggcagatgactagacagtttccttctgctttcgaatttaacgaactgttcctgatcacaatattggaccacctatactcatgcttgtttggtacattcctatgtaactgtgagcagcagcggtttaaagaggcctggggagcaggcactcaaagggcccggggaagtcttagatctaggtag

SEQ ID NO: 196359 - DNA, 1716 bp, synthetic construct
  misc_feature 1..1716: note = Description of Artificial Sequence: Synthetic coding sequence
  source 1..1716: mol_type = other DNA
atggaggaggcccccctgttccccggcgagagcatcaaggccatcgtcaaagatgtgatgtatatctgtccattcatgggtgccgtgtccggtacactgaccgtcaccgattttaagctgtacttcaagaatgtggagcgagatccgcattttatcctagatgtgcctctgggggtgatctcccgtgttgagaagatcggagcgcagtcacacggagataactcatgtgggatcgagatagtttgcaaggatatgagaaacctcagattagcatataagcaagaagagcagtctaagctggggatcttcgaaaacctgaacaagcacgcctttcccttatctaacggacaggcgctcttcgcgttttcgtataaagagaaattccctataaatggttggaaagtgtatgaccccgtgtccgaatacaaaagacagggcctgcccaacgagtcctggaagataagcaagatcaattcaaattacgagttctgtgatacttatcccgccatcatcgtagtccccacgagcgtaaaggatgatgatcttagcaaagtggctgctttcagggcgaagggcagagtcccagtgctgtcctggattcacccagaaagccaggccacaatcacccggtgttcccaaccattggtgggccccaatgacaaaagatgcaaggaagacgaaaagtacctgcagactataatggacgcaaacgcccagtctcacaaactcattatcttcgacgcacgccaaaacagcgtggccgatactaacaaaacaaagggagggggatatgaatctgagtcagcctatccaaacgcggaactggtgtttcttgagatccacaatattcatgttatgcgcgaatcactgaggaagttaaaggagatcgtttatccctcgattgatgaagcaaggtggttatccaatgtcgatggcacacactggctcgagtacatcaggatgcttcttgctggggccgtgcggatagccgacaaaatcgagtctggtaagacgtctgtcgtggtgcattgttctgatggttgggataggactgcacagctgaccagtctggcgatgcttatgctggactcctattaccggaccatcaaaggttttgaaactttggtggaaaaagagtggatttcctttggccaccgattcgctcttagagtgggccacggcaatgataatcatgccgacgctgaccgctctcccatattcctccagttcgttgactgcgtatggcagatgaccaggcaatttccctcagcttttgagttcaacgaactattcctgatcactattttggaccacttgtactcgtgcctgtttggtactttcctctgtaattgtgaacagcaacggtttaaggaagatgtgtacacaaagactatctccctgtggtcctacatcaattcacagttggatgagttttcgaatcccttcttcgtgaattatgaaaatcacgttctttatccggtggcttcattgagccacctcgagctgtgggtcaattattatgtccgctggaacccaagaatgaggccccagatgcccattcaccagaatcttaaggagctcctcgccgtcagagccgaactccagaagcgggtggaaggcttgcagcgggaagtggcgaccagggcagtttcttcctcaagtgaaagggggtcttcgcctagccacagcgctacctctgtgcacacctcggtttag

SEQ ID NO: 196360 - DNA, 1092 bp, synthetic construct
  misc_feature 1..1092: note = Description of Artificial Sequence: Synthetic coding sequence
  source 1..1092: mol_type = other DNA
atggaccggcccgccgccgccgccgccgccggctgcgagggcggcggcggaccaaacccagggcctgccgggggaagaaggccaccgagggccgctgggggggccacagcggggagccgtcaaccttcggttgagaccctggatagtccaactggcagccacgtagaatggtgcaaacagttgattgctgccacaatctccagccaaatctccggctctgtaacgagtgaaaatgtttcacgggactacaaagctttgcgagatggtaacaaactggcgcagatggaggaggcgccactctttccaggagaatctattaaggccatcgtaaaggatgtgatgtacatctgcccttttatgggtgcagtttctggcacactgaccgttacagatttcaagttatactttaagaatgtggagagggatccacattttatactggacgtgccacttggcgttatcagcagggtcgaaaagattggagcccagagccatggcgataattcgtgtggaatcgaaatcgtctgtaaggatatgcggaacctgaggctcgcctacaagcaagaggagcagtctaagttgggaatttttgagaatctcaataagcatgcttttccactgtccaacgggcaggctttgttcgcgttcagctacaaggagaaattcccaatcaacggatggaaggtgtacgaccctgtgagcgaatataaacgccaagggctgcctaacgagtcgtggaagatttctaagatcaactctaactacgagttctgcgacacctatcccgccattattgttgtgcccacgagtgtgaaggacgacgatctttccaaagtggcagcatttagagctaaaggaagggtgcctgtgctcagctggatccacccagagtctcaggctactattactcgctgctcgcagcccttggtggggccgaacgataaacggtgcaaagaagatgaaaagtatctgcagacaatcatggatgcaaacgctcagtcacacaaattaatcattttcgacgccaggcagaactcagtggctgatacgaataagctctggtaccaggacaccgctagcttgatggagtag

SEQ ID NO: 196361 - DNA, 1998 bp, synthetic construct
  misc_feature 1..1998: note = Description of Artificial Sequence: Synthetic coding sequence
  source 1..1998: mol_type = other DNA
atggaccggcccgccgccgccgccgccgccggctgcgagggcggcggcggtcccaaccccggtcctgcagggggacgccgcccaccgagagcggctgggggcgctaccgccgggagtaggcagccatcagtggaaacattggactcacccaccggtagccacgtcgagtggtgcaagcaactgattgcagccacaattagcagccagatcagcggctctgttacctctgagaacgtgtcccgagactacaaagccttgagagacggcaacaagctcgcacagatggaggaggcccccctctttccaggcgagtctattaaagcaatcgtcaaagatgtaatgtatatttgcccattcatgggcgctgtgtccgggactctaacagtcactgatttcaaattgtacttcaaaaatgtcgaaagagatccccatttcatcctggatgtgcctttgggagttatctccagagtggagaagatcggtgcccagtcacacggtgataacagctgcggaatagagattgtgtgcaaggacatgaggaatctacggctggcctataagcaggaggagcaaagtaagctgggcatctttgagaacttgaacaagcacgctttcccgctcagtaatggtcaggcgctgtttgcattttcctacaaggagaagttccctataaatggatggaaggtttatgatccagtatccgaatataagcgacagggtctgccaaatgagagctggaagattagcaagatcaatagtaattacgaattttgcgacacttaccccgccattattgtagtcccaacgtctgtcaaggacgacgacctgtctaaagtagcagccttcagggccaagggcagggtccccgtgctctcatggattcatcccgaaagtcaggccaccatcactcgctgttcgcagcctctcgtggggccaaatgacaagcgttgtaaagaagacgagaagtaccttcagacgattatggacgccaatgcccaaagtcataaacttatcatctttgacgcccgccaaaactccgtggccgacactaacaagaccaaaggggggggatacgaaagcgagtctgcataccctaacgcagaactagtcttcctcgagattcataatatccacgtaatgcgagagtccctgagaaagctcaaggagatagtttacccttccattgacgaggccaggtggttgtccaacgtggatggcacccattggctggaatacatccgaatgctgttggcaggagctgtgaggattgccgacaagattgagtcgggcaaaactagtgtcgtggtccattgttcagatggttgggatcgcactgctcagctaactagcctggccatgttaatgctggatagttactacaggaccataaaagggttcgaaacactggttgagaaagaatggattagctttggacaccgttttgccctcagggtgggacacggaaatgataaccacgccgacgctgacaggtcccccatctttctccaattcgtggattgcgtctggcagatgacaaggcaattcccatctgcctttgaattcaacgagctgttcctcatcaccatcttagaccacctgtacagttgcttatttggcacgttcttatgcaactgtgaacagcaacggttcaaggaggatgtatacactaagacgatcagcctgtggagctacatcaactcccagctcgacgaattctccaaccctttttttgttaactacgaaaatcacgttttgtatcctgtggccagcttatctcacttggagctctgggtgaactactatgtgcggtggaaccctaggatgagaccacagatgcctatccatcagaatcttaaggagctgttggctgtgcgcgccgaacttcagaaacgcgtggaggggctccagcgagaggtagcaacaagagctgtgtcctcatcctcagaaagagggagctcaccatcccattccgcaacctcagttcatacgtcggtgtag

SEQ ID NO: 196362 - DNA, 1914 bp, synthetic construct
  misc_feature 1..1914: note = Description of Artificial Sequence: Synthetic coding sequence
  source 1..1914: mol_type = other DNA
atgctgggcaagggcgtggtgggcggcggcggcggcaccaaggcccctaagccaagtttcgttagttacgtgcgccccgaggaaattcacactaatgagaaggaagtgacagagaaagaggtgactctccatttgttaccaggcgaacaactgctgtgcgaagcttctaccgtgctaaagtatgtgcaagaggattcttgccagcatggtgtttacgggcggctcgtatgtacagactttaaaattgcgttcctgggagatgacgagtctgctcttgacaatgatgaaacgcagttcaagaacaaagttatcggtgagaatgatatcacacttcattgcgtcgaccagatctacggagtgttcgatgagaaaaaaaagaccctttttggccaactgaaaaaataccctgagaaactcattatccactgcaaggacttgcgagtattccagttttgccttcggtatacaaaagaggaggaggtgaagcgtatcgtgtcaggaattattcaccatacacaggctccaaagttgttgaagcgactgtttctgttctcttacgcaacagctgcacagaataacacagttacagatcctaagaaccacaccgtaatgttcgacacgctgaaggactggtgctgggagctggaaagaacaaaagggaatatgaagtacaaagcagtttcagtcaacgagggttacaaagtttgcgaaagactgcccgcatacttcgtagtacctactcctctgcccgaagaaaacgttcaacgcttccagggtcatgggatccccatctggtgctggtcttgccataacggtagcgccctcctaaaaatgtcagctctgcctaaagaacaggacgacgggattctccagatccagaagtcatttttggacggaatctacaagaccattcataggccgccttacgagattgtgaagactgaagatttgagctccaatttcctctcccttcaggagatccagaccgcttacagtaaattcaaacagctgttcctaattgataacagcacagagttttgggataccgatatcaagtggttttcactgctggaatcatcttcatggctggacatcattaggcgctgtctgaagaaagccatcgaaattaccgaatgcatggaggcccagaacatgaatgtgctgctgctggaggaaaacgcttcagatctgtgctgcctgatttcaagtctggtccagctcatgatggacccccattgcagaacacggatcggtttccagtcactgatccagaaggagtgggtcatgggaggccactgttttttggaccgctgcaaccatcttcgccaaaacgacaaggaagaacaccagcgccagctgagcttgccattaacacagtccaaaagcagcccaaagcgcggcttctttcgggaggagaccgaccatctgatcaagaacctattgggaaagaggatttccaagctgatcaactccagcgacgagcttcaagacaactttcgggaattttacgattcgtggcactctaaaagcactgactatcacggactcctgctaccgcatatcgaaggacccgaaatcaaggtctgggcccagcgctatctgcggtggattcccgaggcacagatattgggaggaggtcaggtggctacacttagcaagttactagagatgatggaagaggttcagagccttcaagagaaaatcgacgagcggcatcacagtcagcaggcaccccaggccgaggcaccctgtctgctcagaaatagtgcacggttatctagtctcttccccttcgcgttactccagcgacatagtagcaagccggtgttgcccacctccggctggaaggcgctgggtgacgaggacgacctggcgaagagagaggatgagttcgtggacctcggagacgtttag

SEQ ID NO: 196363 - DNA, 2082 bp, synthetic construct
  misc_feature 1..2082: note = Description of Artificial Sequence: Synthetic coding sequence
  source 1..2082: mol_type = other DNA
atgctgggcaagggcgtggtgggcggcggcggcggcaccaaggcccccaaaccatcatttgtatcctatgtgcggcccgaggaaatacacacaaacgaaaaggaagtgaccgaaaaagaagttacactgcaccttctgcctggggaacaactgctgtgcgaggcttccactgtgctgaaatatgtgcaggaagactcgtgtcagcacggagtatacggccgcttggtgtgcacagatttcaaaatcgctttcctcggtgacgatgaatctgccctagataacgatgagacccaattcaagaataaagtgatcggtgagaacgacataactctgcactgtgtcgaccaaatttatggtgtgtttgacgagaaaaagaagactttgtttggccagcttaaaaagtaccccgagaagctaattattcattgtaaggacctaagagtatttcagttttgtctccgatatacaaaggaggaggaagtcaagcgcatcgtgagtggaattatacatcacacacaagcccctaaactcctgaagagattgtttctattttcctatgccacagcagcacaaaacaacaccgtgacagatcctaaaaaccatacagtgatgtttgacacgctcaaggactggtgttgggagctcgagcgcaccaaggggaatatgaaatacaaagccgtgtcagtgaatgagggctataaggtatgtgagcgtctgccggcttactttgtggtgccaacaccattgcctgaggagaatgtccagagattccagggccacggaatcccaatttggtgctggtcttgccacaatggaagcgctctgctcaaaatgtccgccctgccgaaggaacaggacgacggcatattgcaaatacaaaagtcttttctcgacgggatttataaaaccatccaccgaccaccgtacgaaattgtgaagactgaagacctgtctagtaattttctgagcctccaggaaatccagactgcttactctaagttcaaacaactcttcctcatcgacaactcaaccgagttctgggatactgatatcaagtggttttcattactggaaagttctagctggcttgacatcatccggcggtgtctgaagaaagcaatcgaaatcacagagtgcatggaagcacaaaatatgaacgtgcttctgcttgaggagaacgcctcagacctgtgttgccttattagcagtctcgtgcagctcatgatggatccccattgtcgcacccggataggattccaatctctgattcagaaggaatgggttatgggaggccattgcttcctggatcgctgcaatcacctgcgccagaatgacaaagaagaggtccctgtctttctcctctttttagactgcgtctggcagcttgtccatcagcaccctcctgcctttgaatttacagaaacctatttgactgttctatctgacagcctctacatcccaatctttagcacctttttcttcaactcacctcaccagaaggataccaacatgcaccagaggcagttaagcttaccgttgacgcaatcaaagtcgagccccaaacgcggctttttccgcgaggagaccgatcatttaataaagaatctcctgggtaagcgtatcagcaagctgatcaactcatcggatgagctacaggacaacttccgagaattctatgatagctggcattccaaaagcacagactaccatgggctgttactaccacacatcgaggggccagagatcaaggtttgggcccagagataccttagatggatccccgaggcccaaattctcggtggcggtcaagtggcgaccctttctaagttgttggagatgatggaggaagtacaatcactgcaggagaagattgacgaacgacaccactcccagcaggctccccaggcagaagccccttgcctgcttaggaattctgctcggctgtccagtctctttcccttcgctctcctccagcggcatagctcaaagccagtgcttcccactagtgggtggaaggcactgggagacgaggatgatctggctaagagagaagatgagttcgtcgatctgggcgacgtgtag

SEQ ID NO: 196364 - DNA, 2244 bp, synthetic construct
  misc_feature 1..2244: note = Description of Artificial Sequence: Synthetic coding sequence
  source 1..2244: mol_type = other DNA
atgctgggcaagggcgtggtgggcggcggcggcggcaccaaggccccaaaacccagctttgtgtcttacgtcagacctgaggagatccatacaaacgaaaaggaggtgactgagaaagaggtcacactgcacctgctgcccggcgagcaattgctgtgtgaggcttctacggtgctcaagtacgtgcaggaggattcatgccaacatggcgtttatggccggctggtttgcacagacttcaaaatcgcatttctgggcgacgatgagtccgctctggataatgacgaaacacaattcaaaaacaaagtgatcggcgagaacgacattactttgcactgtgtggaccagatatacggagtctttgatgagaagaaaaagacactctttggccagctcaaaaaataccccgagaaattaatcattcattgcaaggacctccgagtgttccagttttgcttgcggtataccaaagaggaggaagtgaaacggatcgtgagtgggataattcaccatacccaggcccccaaactcctcaaaaggttatttcttttttcttatgccactgctgcccaaaacaacaccgtcacagatcctaagaatcacaccgtgatgttcgacacactgaaggactggtgttgggagctggaacggacaaagggaaacatgaagtataaggccgtcagcgtcaacgaaggctacaaagtatgtgagaggctaccggcttacttcgtggttcctaccccactcccagaagaaaacgtgcagcgcttccagggtcacggcatccctatctggtgctggtcctgccataacggatccgcactgctaaagatgtctgctctgcctaaggagcaggatgacggcatcctgcaaattcagaagagcttcttggatggcatctacaagactatccatcgccctccctacgagattgtgaaaacagaagacttgtctagtaattttttgagtctccaagaaatccagacggcatatagtaagtttaagcagctattccttattgacaactctacagagttctgggatacagacataaagtggttttcgctgctggagtcctcttcttggcttgacatcatccggaggtgtttgaagaaggccattgaaatcacagagtgcatggaggcacaaaatatgaatgtcctcctgctggaagagaatgcctctgatctgtgctgtctcatctcctctctcgtccaacttatgatggacccccactgtcgcacacgcatcggattccagtctttgattcagaaagaatgggtcatgggaggccattgtttcctcgatcgctgtaatcacctccgccagaacgacaaggaagaggtaccagtctttctgcttttcctagactgcgtctggcagttagtacatcagcacccccctgcctttgagttcaccgagacctacttgaccgtgctttctgattccctatacatccccatcttttctacatttttcttcaattcccctcaccaaaaagacaccaacatgggccgggaaggccaggacacccaatccaagcccttaaatctattaacagtttgggactggtctgtccagtttgagcccaaggcacagaccttactgaagaacccactgtacgtggaaaagccaaaactcgataagggacagcgaaaaggcatgcgatttaagcaccagaggcagttatccctgccactcacccagtcgaagtccagccctaagcgcggcttctttagagaagaaaccgaccacctgatcaagaacctgctcggaaagcggattagcaagctcattaatagcagcgatgagttgcaagacaatttcagagaattctatgattcatggcacagcaaatcaacagattaccatggtcttttgctacctcacattgagggcccggagataaaggtgtgggcacagagatatcttcggtggattcccgaggctcagatcctgggtggaggacaagtcgctactttaagcaagctgctggaaatgatggaagaggtgcaatcactccaggagaagatcgatgaacgacatcactctcagcaggcccctcaggccgaggctccatgtctgttgcgcaacagcgcgcgcctcagctccttattcccttttgctctgctgcagcggcactccagcaaacctgtgctgcctacatcggggtggaaagctcttggcgatgaggatgacctcgccaagagagaagatgagtttgtcgacttaggagatgtatag

SEQ ID NO: 196365 - DNA, 1953 bp, synthetic construct
  misc_feature 1..1953: note = Description of Artificial Sequence: Synthetic coding sequence
  source 1..1953: mol_type = other DNA
atggccggcgcccgggccgccgccgccgccgccagcgccggcagctcggcctcgtctggcaatcaaccgccccaggaactgggtctcggcgagctgctagaggaattttctcggacccagtaccgtgccaaggatggtagcggaaccggaggaagcaaagtggagaggatagagaaaagatgcctggagctgtttgggagggactactgcttttcagtaatccccaacaccaatggagatatctgcggccactacccccgccacatagttttcttggagtatgaaagtagcgagaaggagaaggacacctttgagagcaccgtgcaggttagtaaacttcaagatttgatacacaggagcaaaatggcaaggtgcagaggtcgatttgtctgtcctgtcattctcttcaagggtaagcatatttgtcgcagcgcgacgctcgccggatggggcgaactgtatggcagatctggatataactactttttctccggcggcgctgatgacgcgtgggccgatgttgaggacgtgacggaagaggactgtgcactccgctcaggtgacacacacttgttcgataaagttcgaggatacgacatcaaattacttcgctaccttagcgtgaaatacatctgtgatctaatggtggagaacaagaaagttaagtttgggatgaacgtgacatcatccgaaaaagtggacaaagctcagaggtacgccgactttacactgttgtccattccctatccaggctgcgagttcttcaaagagtacaaagatcgcgactatatggccgagggccttatcttcaactggaagcaggactacgtggacgcgccgctcagcatccccgattttttaactcatagcctgaacatcgattggtcacagtaccagtgttgggatttagtacagcagacacagaactacctcaagttgctgctttccttggtaaacagcgacgacgatagcggcctgctggtacactgcataagcgggtgggaccgtacacctctcttcatttccttactgagactctccttgtgggccgatggactgattcacacgtctttgaaaccaacagagatcctgtaccttactgtggcctacgattggtttctgttcggccatatgctcgtggacaggttgtcaaaaggtgaggaaatctttttcttctgtttcaatttccttaagcacattacatctgaagagtttagcgcacttaagacacagcggcggaaaagccttcctgctcgcgatggtggattcactctggaggatatctgcatgctcagaaggaaggatcgaggctctacaacatccctgggcagtgatttctccttggtgatggagagctcacccggggcaaccgggtctttcacctacgaggccgtggagctagtccccgctggtgctcctacgcaagctgcgtggcgaaagagccacagctcttctcctcaatccgtactgtggaacaggcctcagcccagcgaggataggctccccagccagcagggcttagcggaggcaagaagcagttcctcctctagctcaaaccactccgacaatttttttcgtatgggctcctctcctctagaggtgccaaagcctagaagcgtagatcatcctcttcccgggagctccctctccaccgactatggttcctggcaaatggtcacaggatgtgggagcatccaggagagagcggttctgcataccgactccagcctgccatttagctttccggacgaattaccgaactcttgtcttctggccgcgctgagcgaccgggaaacgagactccaggaggtccgcagcgcttttctggccgcttattcttcaaccgtcggcctccgggccgttgcacctagcccatccggagccatcggggggctccttgaacagtttgcacgaggagtcgggttgaggtccatttctagcaacgccctgtag

SEQ ID NO: 196366 - DNA, 1617 bp, synthetic construct
  misc_feature 1..1617: note = Description of Artificial Sequence: Synthetic coding sequence
  source 1..1617: mol_type = other DNA
atggccggcgcccgggccgccgccgccgccgccagcgccggcagcagcgcatcctccggcaaccaacccccccaggaacttggccttggcgagctactggaagaattctctcggactcaatatagagcgaaagatggatctggaactgggggcagcaaagtggaacggattgagaagcgatgtctggaattgtttggccgagattactgtttttcagtgatccccaacaccaatggggacatctgtgggcactatcctaggcatatagttttcctggagtacgagtctagcgagaaagaaaaggatactttcgagtcgacagttcaagtgagtaagctccaagatctgattcaccgttccaaaatggcacgttgccgcggccgtttcgtctgccccgtgattctcttcaagggcaagcacatttgccgttctgcaacattggcagggtggggggagctctacggaagaagcggttacaactatttcttctcagggggcgctgatgacgcctgggcagatgtggaggatgtgaccgaggaagattgcgcccttcggagtggcgacactcatctgttcgacaaggttaggggatatgacatcaagctgttgaggtacctgtcagtaaagtacatttgcgacttgatggtcgagaacaagaaggtgaagtttgggatgaatgttactagctcagaaaaggtcgacaaagctcagaggtatgccgactttacattacttagtattccttatcccgggtgcgagttctttaaggagtataaggatagggactatatggccgaaggtttgatcttcaactggaaacaggattatgtagatgctccactgtcaatcccagattttttgacacattccctgaatatcgattggagccagtaccagtgctgggatctggtgcagcaaactcagaactatctgaaattgttactgagcctcgtaaactccgacgacgactcgggactcctcgtgcattgtatatctggatgggaccgcacccctctgtttatctcactgctgagactttcattgtgggcagatgggctgattcatactagtctgaagccaactgaaatcctgtacttgacagtcgcatatgattggttcctcttcggacacatgctcgttgacagactatcaaagggagaggagatcttctttttttgctttaatttcctcaaacatatcacgagtgaggagttttctgccctgaaaacccagcgtcggaagagtctgccagcaagggatggcgggtttactctggaggatatttgcatgctgaggaggaaggacaggggcagcaccacatctctcgggagtgattttagtctcgtaatggagtcctccccaggcgccactggttccttcacatacgaggcagtagaattagttccagcgggcgctccaacccaggcagcatggctggcagctctctccgacagggagaccagactgcaagaggtgaggtctgcttttctggccgcctacagttccactgtgggcctccgagccgtcgctccatccccaagcggcgcaatcggtggactgctggagcaatttgccaggggggtgggcttgcgttccatttcttccaacgcgttatag

SEQ ID NO: 196367 - DNA, 1797 bp, synthetic construct
  misc_feature 1..1797: note = Description of Artificial Sequence: Synthetic coding sequence
  source 1..1797: mol_type = other DNA
atggccggcgcccgggccgccgccgccgccgccagcgccggcagctccgcgtcctcaggaaatcagcccccacaggaattagggctcggagagcttctagaagaattctctagaactcaatatcgcgccaaggacggcagcgggaccggcgggagcaaggttgagcgaatcgagaagagatgcttagagcttttcggccgggactactgttttagcgtgattccaaatactaatggtgacatttgcggccattacccgcggcacatcgtattccttgagtacgaatcttcggaaaaagagaaggatacctttgagtcaactgtacaagtaagcaagcttcaggatctgatccacagatccaaaatggctcgctgccggggtaggtttgtttgcccggttattctgtttaaggggaagcacatttgccgctccgcaacgcttgctggctggggcgagctgtacggacgctccggttataactactttttttctggaggagccgatgatgcatgggctgacgttgaggacgtcacggaagaagattgtgctctgaggagcggtgatacccatctttttgacaaagtccgcggctacgatattaagttacttcgatatttatccgtgaaatatatatgcgatctgatggtggaaaacaaaaaagtcaagttcggtatgaacgtgacctcaagcgaaaaggtggataaagcccaacgttacgccgatttcactctgctttctattccataccccggctgtgaattcttcaaggagtacaaggatagagactacatggccgaggggctcatattcaactggaaacaggattacgtagatgcacccctttcgatcccagacttcctgactcacagtctgaatatcgactggagtcagtaccagtgctgggacttagttcagcagacccagaattatttaaagctactcctctccctagtgaacagcgacgatgacagcggcttgttagtgcactgcatttcgggatgggaccgtacccccctgttcatttctttactgcgccttagcctatgggccgatggcttaatccacacctccctgaagcccaccgagatcctgtatctcacggtcgcttacgattggttcctgtttggccacatgctggtagataggctttccaagggtgaggaaatcttttttttctgttttaacttcttaaaacatatcacctccgaagagtttagcgctctcaaaactcagcgccgtaagagcctgccagccagagatggaggattcacactggaagatatttgtatgctgaggcggaaggaccgcggttccacgacatctctgggcagtgatttctctctagtgatggaatcttcaccaggggccaccggatccttcacctacgaagcagtcgagcttgtgccggcaggagccccaacccaggctgcatggaggaaatctcacagctcgtcacctcagtccgtcctgtggaatcgcccccagccttcggaggacagactcccttcccagcaaggccttgccgaggcccggtccagcagcagttcgagctccaatcactctgataacttttttagaatgggtagctccccactggaagtgcccaaacccaggctggccgcgctcagcgaccgcgagacgagactgcaagaggtccgttctgctttcttggcagcttactcttccaccgtaggcctgagggccgttgcaccctctccaagtggcgccatcggaggattactggagcaattcgctcgcggggttggattaagatccatctccagtaacgccctgtag

SEQ ID NO: 196368 - DNA, 1563 bp, synthetic construct
  misc_feature 1..1563: note = Description of Artificial Sequence: Synthetic coding sequence
  source 1..1563: mol_type = other DNA
atggccggcgcccgggccgccgccgccgccgccagcgccggcagcagcgcctcttcaggcaaccagccaccccaggagttaggcctgggagaactgttagaggagttcagtcgaacacagtatagggcaaaggacggctcaggcaccggcggatccaaagtggagaggattgagaaacgatgcctggagctgtttggcagggactattgtttttccgtcattcctaacacaaatggcgacatttgtggccactatcctcgccacattgtattcctagaatacgagtccagcgagaaagagaaagacacatttgaatcgaccgtgcaggttagtaagttgcaggacctgattcataggtccaaaatggctcggtgtcgagggcgcttcgtatgccccgtaatcctgttcaaaggaaagcacatttgcaggtccgccacactagcaggatggggagaactatacggccggagcggctataattacttcttctccggtggggccgacgatgcctgggccgatgtagaggacgtgactgaagaggactgcgctttgcgcagcggtgacacccacttattcgataaagtgcgaggttatgacatcaaacttttgaggtatctgagtgtgaagtatatatgtgacctgatggtggaaaataaaaaggttaagtttggaatgaacgtaacgtcaagtgaaaaggtggataaggcccagaggtatgccgacttcaccctgctttctattccatatcctggttgtgaatttttcaaggagtacaaggatcgggattatatggcagagggcttaattttcaactggaagcaggactatgttgacgcacccctgtcaattcccgatttcctcacccattccttgaacatcgactggagtcagtatcaatgctgggatctggtgcagcagacacagaactacctcaaacttctgcttagcctggtgaacagcgatgatgattctggtttgttagttcactgtatctcgggatgggaccgcacacctctgtttataagtctgctgcggttgtcactctgggccgacggcctaatccatacctcacttaaaccgacagaaatcctgtatcttaccgtggcctatgactggttcctgttcgggcacatgctggtcgataggctttcgaaaggagaagagattttcttcttttgtttcaactttttaaagcatatcacatcggaagaatttagcgccctgaagacccagaggaggaagagcctgcctgcacgtgacggtggattcaccctggaagatatttgcatgctcagaaggaaagaccggggctctactaccagtctggggtcagacttctccctggtcatggaatctagccccggagctaccggctccttcacctatgaaagaggagcaggccctagccggagcgctaactccggtagcctcgaggaggagccgctcatcctgtcaactgaatgtcctttggagccagccactacgctgcgcgggcctctggcattccctgcaggggcgggcgggtctcaggtgttccaactgctctttcttaagcccttttag

SEQ ID NO: 196369 - DNA, 1932 bp, synthetic construct
  misc_feature 1..1932: note = Description of Artificial Sequence: Synthetic coding sequence
  source 1..1932: mol_type = other DNA
atggagaagagcagcagctgcgagagcctgggcagccagcccgccgccgcacgcccgccgtcagtcgacagcctctcatccgcctccacctcccattccgaaaattccgttcatactaagagcgcatccgtcgtgagcagtgactctatttcaacgagtgccgacaactttagccctgatctgcgcgtgctgcgcgagtcaaacaaattagctgaaatggaagagccccctttgttgccaggtgaaaacatcaaggacatggcaaaagacgtgacctacatttgtccgtttaccggcgccgtccggggcactttaacagtgaccaactaccgtctgtactttaaatccatggagcgtgaccccccattcgtgctagacgcctctttgggcgtaataaaccgcgtagagaaaatcggcggcgcctctagtagaggcgagaattcgtacggtcttgagactgtgtgtaaggatatccgcaacctcagattcgcacacaaaccagaaggtcgtacccggcgatccatattcgagaaccttatgaaatacgcctttcctgtaagcaataatcttcccttattcgcattcgaatacaaagaggtgttccccgagaacggctggaagttgtacgaccctcttctggagtatagaaggcagggcattcccaacgaatcttggcgcattactaaaataaacgagagatatgagttatgcgatacctatccagccctcctagttgtccctgctaacataccagacgaagaactgaaacgggtagccagcttcagatcgaggggtagaattccagttctgagctggatccaccccgaaagccaggccaccatcacgcgctgctcccagccgatggtcggtgtatccggtaagagaagcaaagaagatgaaaaatacctgcaggctatcatggactcaaatgctcagtctcacaaaattttcatctttgacgcacgaccttctgtgaacgcggtcgcaaataaagcaaagggtgggggctatgagtcggaggatgcctatcaaaatgccgagctggttttcctggacatccacaatattcatgtgatgagagagtccttgagaaagcttaaagaaattgtgtatcccaacattgaagaaacccactggctgtcgaatctcgagagtacccattggctggaacacatcaaactgatcctggccggagcccttcgcatcgctgacaaagtggagtccggtaagaccagcgtcgtggtgcactgctcagatgggtgggaccgcactgcccagttaacctctcttgctatgttaatgcttgacggatactataggacaatcaggggattcgaggtgctcgtagaaaaggaatggctgagttttgggcataggtttcaactgcgagttggtcatggagataaaaaccacgctgacgcagaccgcagccccgtgttcctccaattcattgactgtgtgtggcaaatgacgcgccagtttcctactgcctttgaatttaacgagtattttctgatcaccatcctggaccatttgtattcatgtctatttggaactttcctgtgcaattctgaacagcaacgggggaaagagaacctaccaaaaagaactgtctccctgtggtcttacattaattcccagctggaagacttcacgaacccgctctatggctcctatagcaatcacgtcctgtaccccgtggcttctatgaggcacctggaactctgggttgggtattatataagatggaatcctaggatgaagccccaagagccgattcacaatagatacaaggaactactggcaaagcgggccgagctccagaagaaagtggaggaactgcagagagagattagcaacagaagcacgtcctcttcagagcgcgccagttcacctgcccagtgcgttactcctgttcaaacggtggtgtag

SEQ ID NO: 196370 - DNA, 1716 bp, synthetic construct
  misc_feature 1..1716: note = Description of Artificial Sequence: Synthetic coding sequence
  source 1..1716: mol_type = other DNA
atggaggagccccccctgctgcccggcgagaacatcaaggacatggccaaggacgtaacctacatttgcccctttactggggccgtgcgcggcacactgaccgttacaaattatcgcctctacttcaagagcatggagagggacccccccttcgttctagacgcctctctgggagtgatcaacagggttgagaaaatcggcggggcatcctcacgaggtgagaacagctacgggttagaaaccgtatgcaaagacatccgaaatctgcggttcgcccataagccagagggccgaacgaggaggtcaattttcgaaaacctcatgaagtatgcctttccagtcagcaacaatctgccactgtttgcgttcgaatacaaggaagtgttccccgagaacggatggaaactgtatgacccactgctcgaatacaggcgacaaggcatccccaacgagagctggcgtattacaaagattaatgaacggtacgagctctgcgatacctaccctgccctgttagtcgttccggccaatattccagacgaggagttgaagcgtgtggcctcctttaggagccggggtagaataccagtactgtcctggatccaccctgaatcccaggccacaattacccgttgttctcagccaatggttggagtgagcggcaaacggtccaaggaggatgaaaagtatctccaagccattatggattcaaatgcccagtctcataaaatatttatttttgacgcaaggccctccgtaaacgctgtcgcaaacaaggccaagggaggcgggtacgaatctgaggacgcctatcagaatgccgaactggtgtttcttgacatccacaacattcatgtcatgcgcgagtctttacggaagctgaaagaaatagtctaccccaacattgaggagacgcactggctgtccaatcttgagagcacacattggctggagcatatcaagctcatcctggccggggctcttcgcattgctgacaaggtggagtcaggtaagaccagtgtggtcgtccattgctcagacggatgggatcgtactgctcagctcaccagccttgctatgctgatgctggacggctactaccgcaccatccgcggctttgaggttttagtcgaaaaggaatggctcagcttcgggcaccggtttcagctgcgcgttggccatggcgacaagaaccatgcagatgctgataggtctcccgtgtttcttcagttcatcgattgcgtctggcagatgacacgccaatttcctactgccttcgagtttaacgagtatttcctcatcacaattctggatcacctgtactcctgtctttttggaaccttcttgtgcaactcggagcagcagcgagggaaggaaaacttgccaaagcggacagtctcactgtggtcctatattaactctcagctggaggactttactaacccactgtatgggtcatatagcaatcatgttctgtaccccgtagccagtatgcgccatctggaactctgggtgggctattacattcgatggaatccacgtatgaaaccccaagagcccatacacaatcggtacaaagaactgctggccaagcgcgcagagctgcagaagaaggtcgaggagctccagcgtgaaatcagcaatagatctactagcagtagtgaacgcgcatcttcaccagcccagtgtgtgacccccgtccagaccgttgtatag

SEQ ID NO: 196371 - DNA, 1716 bp, synthetic construct
  misc_feature 1..1716: note = Description of Artificial Sequence: Synthetic coding sequence
  source 1..1716: mol_type = other DNA
atggaggagccccccctgctgcccggcgagaacatcaaggacatggcgaaggacgtcacgtatatatgtccattcactggagccgtacgaggcaccttgactgtgacaaattatcgcctttacttcaagagtatggagcgcgaccccccgtttgtgctcgatgctagcctgggcgtcattaaccgagtggagaagataggtggcgcttcgtctcggggagagaattcgtatggcctggaaacagtttgtaaagacatacggaatctcaggttcgcgcataagcctgaggggcggacccgacgctccatttttgaaaacctgatgaaatacgccttccccgtgtccaataatctcccgctgttcgcctttgagtacaaagaggttttccctgagaatgggtggaaactgtacgacccactcctggagtatcgaaggcaaggcatcccaaatgagtcctggcgcattactaaaatcaacgaacggtacgagctatgcgatacttatccagccctcctggtggtgcccgcaaacattccggacgaggaactgaagcgagttgcatccttcagaagtcgcggaagaattcccgtgctctcatggatccaccccgagtcccaggcaaccatcacccgatgcagtcagcctatggtgggagtgagcggcaagcggtctaaggaggatgaaaaatatctccaagcaatcatggattctaacgcccagtcacacaaaatttttatatttgatgcacgaccctctgtgaatgccgtggcaaacaaggctaagggtggcgggtacgagtccgaggacgcataccagaacgcagaactggtgtttctagacatccacaacatccatgtcatgcgggagagcttgagaaagctcaaggaaattgtttacccaaatatagaggagacccactggctgtcaaatctagagtccacacactggctggaacacatcaaactgattttagcaggtgcactgagaatcgcagacaaggtggaatctggcaaaacctccgtggtggtgcactgcagtgacggctgggaccgtaccgcacagctcacttccctcgccatgctgatgctggacgggtattaccggaccatacgtgggttcgaagttctcgttgagaaggagtggctgtctttcggtcacaggttccagttgagggtgggccatggcgacaaaaaccacgccgacgccgacagaagccctgtgttcttgcagtttattgactgtgtttggcaaatgacaaggcagtttcccacagctttcgaatttaatgagtactttctgatcaccatacttgatcacctctacagctgcttgttcggcacatttctatgcaattccgagcaacagagggggaaggaaaaccttccaaagcgcacagtctcgttgtggtcctacatcaactcacagctcgaggatttcactaaccctttatatggcagctattccaaccacgtactatatccagtcgcctcaatgcgacacttagagttgtgggtcggttactatattagatggaatccgcgtatgaagcctcaggagccgatccacaacaggtacaaggaactcctggcaaaacgagcggaacttcaaaagaaggtagaggaactgcagagggagatcagcaacagaagtacaagctcaagtgagcgcgcatcaagcccagcccaatgtgtgactcctgtgcagacagtagtctag

SEQ ID NO: 196372 - DNA, 1716 bp, synthetic construct
  misc_feature 1..1716: note = Description of Artificial Sequence: Synthetic coding sequence
  source 1..1716: mol_type = other DNA
atggaggagccccccctgctgcccggcgagaacatcaaggacatggctaaggatgtcacatacatatgccccttcacaggggctgtgaggggcactcttactgtcaccaattatcggctctactttaaatcaatggagagagacccgccttttgtactggatgctagcctgggagtaatcaaccgagttgaaaaaatcggaggcgcgagctcccgcggggaaaacagctatggcctggagaccgtgtgtaaggatatccggaatctccgctttgcgcacaagcctgagggacggacccggcggtcaattttcgagaacctgatgaaatacgcatttccggtctccaataacttgcctctctttgccttcgagtataaagaggtttttcccgagaacggatggaaattatatgatcctctgctggagtaccgccgtcaggggatacccaacgagagctggaggataacgaagatcaatgaacggtacgagttatgtgatacctatcccgcactgctggtggtaccagctaacatcccagatgaagagctgaaacgagttgcgagcttccgcagccgcggcagaatccctgtactctcctggatccatcctgaatcccaggctacgatcacccgctgctcccagccaatggtgggtgttagcggaaagcgcagcaaagaggacgaaaaatatttacaggctattatggattccaacgcccagtcccacaagatttttatctttgatgccaggccaagcgttaatgctgtggccaataaagcaaaaggaggtgggtatgagtccgaggacgcctaccagaatgcagagttggtgttcctggatatacacaatatccatgtgatgagagaaagtcttcggaagctcaaggagatcgtctaccccaacatagaagagacccattggttatccaacctggaatccactcactggctcgagcacattaaacttattcttgctggagcactgcgcatcgctgacaaggttgaatcagggaagacctccgttgtcgtgcactgtagcgatggctgggacaggacagctcagctcacttcactcgcaatgctgatgctggacggctactataggaccatcaggggattcgaagtgctggttgagaaagaatggctctcttttggacacaggttccagctccgagtgggacacggagataagaaccatgccgacgctgaccgctcccctgttttcttgcagtttatcgattgcgtgtggcagatgactcgacaattccctacagcctttgagtttaacgaatattttcttattacgatcctggatcatctgtacagttgcctgttcggcactttcttatgtaactctgagcagcagcgcggcaaagagaatcttcccaaacgcacagtgtccctttggagttacatcaactcccagctggaggattttacaaaccccctatatggttcttactctaaccatgttctctacccagtcgcttccatgcgtcatttagagctttgggttggctactatatccggtggaatcctagaatgaaaccccaggagccgatccataataggtataaagagctgctggcaaaaagggcggagctacagaagaaggtggaggaattgcagagagagatcagtaatcgctcgaccagctcttccgagagagcctcttcccctgcccaatgtgttaccccagtccagaccgtggtctag

SEQ ID NO: 196373 - DNA, 981 bp, synthetic construct
  misc_feature 1..981: note = Description of Artificial Sequence: Synthetic coding sequence
  source 1..981: mol_type = other DNA
atgctggccgtggccctgaccatcctgagcgccagcaccagccacagcgaaaatagcgtgcacaccaagtctgctagtgttgtgtcatccgattcaatttcgacatctgctgataacttctccccagacttgagagtgctgagagaaagcaacaagctggctgagatggaggagcccccattgttaccaggtgagaacatcaaagatatggctaaggacgtcacatacatttgcccattcacaggagctgtcagaggaacactgacggtcactaactacaggctctactttaaaagcatggaaagggatccacctttcgttctggacgcaagtctgggcgtgattaatcgcgtggaaaaaatcggcggtgcttcgtccagaggtgaaaactcatacggtctggagaccgtctgtaaagacatacgaaatctgagattcgcccacaaacccgaggggcgtactcgaagaagtatctttgaaaacttgatgaagtacgcctttcctgtatctaataaccttccattgtttgcctttgagtacaaggaagtgttccctgaaaacggttggaaactgtatgaccccctgttggaataccgccgccagggcatcccaaacgagagctggcgaatcacaaaaatcaacgaacgctacgagctctgcgatacgtatccggcacttttggtcgtgcccgccaacattcccgacgaagagctcaaacgtgttgctagttttcgcagcaggggccgcatcccggtgttgtcttggatacacccagaatcacaggccaccattactcgatgctcacaacccatggttggtgtcagcggtaaaagaagcaaagaagatgaaaagtacctacaggccataatggattctaatgcacaatcccataagattttcatcttcgacgccaggccttcagtcaacgccgtcgccaataaggcgaagggcgggggatatgagtcagaggacgcttactag

SEQ ID NO: 196374 - DNA, 3513 bp, synthetic construct
  misc_feature 1..3513: note = Description of Artificial Sequence: Synthetic coding sequence
  source 1..3513: mol_type = other DNA
atggacgaggagacccggcacagcctggagtgcatccaggccaaccaaatcttcccgaggaagcaactgatccgggaggatgagaacttacaagtgcctttcctggaacttcatggggaatctactgagtttgtgggacgcgcagaagacgcaattattgctctcagtaactaccgcttacacataaaatttaaagagtcacttgtgaatgtcccactccagctgatcgaaagcgtcgaatgcagggatattttccagcttcatctgacatgtaaggattgtaaggtgatccgttgtcaatttagtacctttgagcagtgtcaggaatggctcaaacgactgaataacgccatcaggcctccagcaaagatagaggatctcttctctttcgcttaccacgcctggtgtatggaagtctatgcgtctgagaaagaacagcatggcgatttatgtcgacctggagagcatgtcacttcgagattcaaaaatgaagttgaaaggatgggattcgacatgaataacgcctggcggatttccaacatcaacgaaaagtataagctgtgcggctcctatccacaagaattaatcgttccagcttggatcactgacaaggaactggagtcagtttccagctttcggtcttggaaacgaatcccagccgtaatttataggcatcaatccaatggggctgtaattgcgaggtgtggtcagccagaagtcagctggtgggggtggcggaacgcggacgacgagcatttggtccagagtgtcgctaaggcatgtgcctccgactctcgcagcagtggatctaaattaagtacaagaaatacctcgagggatttcccaaacggaggggacctgtcagacgtagagttcgactccagtctctccaatgcatcaggtgctgagtcactcgccattcaaccgcagaagcttttgatcttggatgcgaggtcatatgcagcggctgtggccaaccgcgccaaaggcgggggctgcgagtgtcctgaatattatccaaactgcgaggtagtgttcatgggtatggcaaatattcattccattaggcgcagctttcagagtctgcgcctgctgtgtacgcagatgcctgaccccggcaactggctgtccgccctggagagtaccaagtggctgcaccatctgagcgtcctgttgaagagcgccctgttggtggtccacgccgtggatcaagatcagcggccagttttggtgcactgcagtgacggctgggaccggactccccagattgttgccttggcaaagctgcttctcgacccctactaccgtaccattgagggatttcaggtcttggtggagatggaatggctcgatttcggacataaatttgccgaccggtgcggacatggcgagaattcagacgaccttaacgagcgctgccccgtttttctgcaatggttagactgtgtgcaccaactccagagacaatttccttgcagctttgagtttaacgaagcgtttctcgtaaaactcgttcagcacacttattcgtgtctattcggtacattcctgtgtaacaatgccaaagagagaggagagaaacacacacaagagaggacctgcagtgtgtggtctctgctacgggcggggaacaaggccttcaaaaacctgctgtactcaagccagagcgaagcggttctctacccagtgtgtcatgtgcgcaaccttatgctgtggagtgcggtgtacctgccatgcccaagcccaaccacaccagtggatgactcgtgtgcgccttatccagcacctggtacatctccggatgatcccccactgagccggctcccaaagacccgatcttacgacaacttgacaacggcctgcgacaacaccgtgcccttagcatctcgccgatgctcagacccatccctcaatgaaaagtggcaagaacatcggaggtctttggagctcagtagtttagccggccccggtgaggatccgctttcggccgacagccttggaaaaccgacgcgcgttcctgggggcgccgaactgagcgttgctgctggagtggctgaagggcaaatggagaacatactccaggaggcaaccaaggaggagtctggagtggaggagccggcccatagagctgggatcgagatacaggaagggaaggaggatcctcttctggaaaaggagtcgagacggaaaacccccgaagcgagcgcaatcgggttacatcaggaccccgaactcggagacgcagcgctgagaagtcacttggacatgtcctggccactgttctcccagggcatctccgaacagcagagcggcttatcggtgttactgagctcactgcaggtccccccccggggagaggattctctggaagtccccgttgagcagtttcgcattgaagagatcgcggagggcagagaggaggcggtgctcccaatccctgtggatgcaaaggtcgggtatggaacatctcaaagctgttccctgctcccctcacaggtacctttcgagactaggggacctaacgtcgatagcagcacggacatgctggtcgaggataaggtcaaatcggtgtctgggcctcagggccatcacagatcctgcctggtgaactccgggaaagatcgcctgccgcagaccatggaacccagcccttcagagactagtttagtggagcggccacaggtcggatcagttgttcatagaacttctttaggatcaacactaagtctgacaagatctccctgcgcgctgcctttagctgagtgcaaggagggactcgtctgcaatggggctcctgagaccgagaatcgggcctctgaacaacctcctggtctgagtaccctgcagatgtatccaactcccaacggacactgcgcgaacggcgaggcagggagatcgaaagatagtctatctcgtcagctttccgctatgagttgctcatcggcccacttgcatagccggaatctacaccataaatggttgcatagccactccggacgcccctctgccacatctagccctgaccagcctagcaggtcccacctggacgatgacggcatgtcggtatacactgacacaattcagcagcgcttgaggcagattgagtccggccatcaacaagaagtcgagaccctcaagaagcaagtgcaggaactgaagagcaggctagaaagccagtacctgacatcctccctgcattttaacggagattttggggacgaagttatgacacgatggctgcccgatcaccttgctgctcattgctatgcatgtgacagcgccttttggttagcatcgcgcaaacaccattgcagagataccgatagagtcgatcagacctggaattgtggaaatgtgttttgcagtagctgctgcaatcaaaaggttcctgtgccctcacagcagctgtttgaaccaagtcgggtgtgtaaaagctgttactcctccctgcatcccacgtcctcctctatcgacctcgaactggacaaacccattgccgcgacctctaactag

SEQ ID NO: 196375 - DNA, 3486 bp, synthetic construct
  misc_feature 1..3486: note = Description of Artificial Sequence: Synthetic coding sequence
  source 1..3486: mol_type = other DNA
atggacgaggagacccggcacagcctggagtgcatccaggccaaccagatcttcccaaggaagcagttgattcgggaagacgagaatcttcaggttccttttctggagctccacggtgagagcaccgagttcgttggccgagctgaggacgctatcattgcgctgagtaactaccgtcttcacatcaagtttaaggagtccctggtcaatgtgcctcttcagctcatcgagtcggtggaatgcagagatatcttccagcttcatctcacgtgtaaagactgtaaggtaatacggtgccaattttcaacctttgagcagtgtcaggagtggttgaaacgcctcaacaatgctatccgacctcccgcgaagattgaggaccttttctcttttgcctatcatgcttggtgtatggaagtctatgccagcgaaaaggaacagcacggagacttatgtcggcccggagagcacgtcacttctcggttcaagaatgaagttgagcgcatgggcttcgatatgaataatgcatggcgcatctccaatattaacgagaaatataagctgtgtgggtcttatcctcaggagctgatcgttcccgcatggatcacagataaagaattggagagcgtcagttccttccgctcctggaaacgtattcccgccgtcatctacaggcatcagagcaacggcgctgtgatagccaggtgtgggcagcccgaagtatcatggtggggttggaggaacgcagatgatgagcacctggttcagtctgtcgccaaagcatgcgcaagcgactcccgcagttccgggagcaagctcagcacccgcaacacctccagggatttcccgaatggaggggatctaagtgatgtggaatttgatagctccttgagcaatgctagcggcgccgagagtctggcaattcagcctcagaagctgctcattctagacgcacggagttatgccgctgctgtggccaatcgggccaaaggcggaggttgtgaatgccctgagtactaccccaattgcgaggttgtatttatgggaatggccaacatccattcgatccgccggagcttccagtcattgcgactactttgtacgcagatgcctgaccctggcaattggttatctgctctggagtctactaagtggcttcatcatctgtccgtgttgctgaaatccgcactattggtggtgcatgcggtggaccaagatcagcggcccgtgctggttcactgtagcgacggatgggatcgaacccctcagatcgtcgcgctggcgaagctgctgttagatccgtattaccgtacaatcgaaggctttcaggtcttggtcgaaatggagtggttggatttcggtcataagtttgccgacagatgtggacacggtgaaaattctgacgacctaaacgagcgatgtcccgtgttcctgcaatggctggattgtgtacaccagctgcagagacagttcccttgctcgttcgaattcaacgaagcatttcttgtgaagctggtgcagcacacttactcctgcctttttggtacctttctgtgcaacaacgcaaaggagcgtggcgagaaacacacccaggaacggacgtgcagcgtctggagcctgcttagagcgggaaacaaggcctttaagaatctgctgtattcatctcagagtgaggctgttctctatcctgtttgccatgtaaggaacctgatgctttggagtgccgtatatctcccttgcccctctcccaccacgcccgtagacgacagctgtgccccgtatcccgctccaggaacctcccccgatgatccaccactgtcccggctccctaagactcgctcttatgacaacctgaccacggcttgcgataatacagttccccttgcgtcacgccgttgtagcgacccaagtctgaatgagaaatggcaggaacacaggagatcactagagttgtccagcttggcgggacctggcgaggatcctctgtcagctgacagcctcggcaagccaacccgggttccaggcggggccgagctaagcgttgccgctggagtagctgaaggtcagatggagaacatccttcaggaggccaccaaggaggagtccggcgtcgaagagcccgcccatagagcagggatcgagatccaggagggaaaagaggatcccctgctggaaaaggagtccaggaggaagacccccgaagcttctgcaattggcttgcatcaggacccagaactgggtgatgcagcgctccgtagccatttagatatgtcctggcctctgtttagccagggcatcagcgaacagcaatcagggctgtcggtgctgctgtcttctctgcaggtccctccacgcggcgaggattctctggaggtacccgtggaacaattccgcattgaagaaatcgcagaggggcgggaggaagccgttctccctataccagtagacgctaaagtgggatatggtacatcccagagctgttctcttcttccgtcacaggtgccgttcgagacccgcggtcccaacgtggactccagcacggatatgctagtcgaagacaaggttaagtccgtgtcgggccctcagggacatcaccgatcctgcttggtaaactctggaaaggaccggcttccacagactatggagccaagcccctcagagacatccttggtagaaaggcctcaggtcggatcagtggtgcataggaccagcctgggcagcactctgtcactcacgcgtagcccgtgtgcactcccactggctgagtgtaaagagggtctagtgtgcaacggcgcccctgagaccgagaaccgggcttccgaacaacctccaggacttagcactctgcagatgtatcccaccccaaacgggcattgtgctaatggcgaggccggcagatctaaggactcactgtctcggcagctctccgccatgtcttgtagctctgctcatttgcactcacgaaatctgcatcacaaatggcttcacagtcatagcggcaggcccagtgctacgagttccccagaccagcctagcaggtctcacttggacgacgatgggatgtccgtgtacaccgataccatccagcagcgactgcggcaaatagaaagtggccatcaacaagaggtggagactttgaagaaacaggtgcaggaactcaaatcccggctggagagccagtacctcacatcctcattgcacttcaatggagatttcggcgacgaagtgatgacaagatggcttcctgaccatttagctgcacactgctatgcgtgcgacagcgcattttggctagcctcacgaaagcatcactgtcgaaattgtggaaatgtcttttgcagttcatgttgtaatcagaaggtccccgtcccctctcagcagctcttcgaacccagtagggtgtgtaagagctgctattcttcactacacccgacttctagtagcattgatttggagctagataagcctatcgctgctacctccaattag

SEQ ID NO: 196376 - DNA, 3597 bp, synthetic construct
  misc_feature 1..3597: note = Description of Artificial Sequence: Synthetic coding sequence
  source 1..3597: mol_type = other DNA
atggacgaggagacccggcacagcctggagtgcatccaggccaaccagatcttcccgcggaagcagctgatcagggaagatgagaacctgcaggtcccttttctggagctgcacggtgaatctacagagttcgtgggtagggccgaggacgcaattattgctttgagcaactacagactgcatattaagttcaaagagtcactggtcaatgtgccactacagctgatcgaaagcgttgagtgccgggacatctttcagctgcacctgacttgcaaggattgcaaggtgattagatgtcagttcagcactttcgagcagtgccaggaatggctgaagcggttaaataatgccatacgaccacctgcaaaaatcgaagacttgttttcttttgcctatcacgcttggtgcatggaggtctacgctagtgaaaaagaacagcacggggatctgtgtcgccccggcgaacacgtgactagccgcttcaaaaatgaggtagaacgaatgggctttgatatgaacaatgcctggcggatatccaacattaatgaaaagtacaagttgtgcggctcctatccacaggaactcatcgtgcctgcctggatcacggacaaagagcttgaaagtgtgtcttctttccgcagctggaaacggattccggccgttatttataggcaccaaagcaatggagccgttattgcacgctgtggccagccggaggtatcctggtggggatggcgcaatgctgacgacgagcaccttgttcaatccgtggccaaggcgtgtgcatccgactctcgatcctctgggagtaaactatctacaaggaacacaagtagagatttccctaacggaggggacttgtccgatgtcgaatttgactcaagcctatccaacgcaagtggtgctgagtcgttggccatacagcctcagaaattgctcattcttgatgcccgatcctacgctgcagcagtggcaaatagagccaaaggtggagggtgtgagtgtccggaatactaccccaattgtgaggtagtgttcatgggtatggctaatattcatagcattagacggagcttccaatctctgaggctgttatgcacacagatgccagatcctggcaattggttgagcgccctggaatccacaaaatggctgcatcatttgagtgtgcttctgaaaagtgctctgttggtggtacatgccgtcgaccaggaccaaagaccagtcttggtgcattgctccgatggatgggatcggacaccacagattgttgctctggccaagttgctccttgatccctattataggaccattgagggctttcaggtgctcgtcgagatggagtggctggattttgggcataaattcgctgaccgatgcggtcatggggagaactcagatgacctcaacgaacggtgccctgtgtttcttcaatggctagactgtgtccaccagctccaacgccagttcccctgcagttttgagttcaacgaagcttttctggtcaaactcgtacagcatacgtatagttgcctgttcggcaccttcctgtgcaataacgccaaggaaaggggtgaaaagcacacccaagagcggacgtgcagcgtgtggtctctgctccgagcaggtaataaggctttcaaaaacctgctgtactctagccagagtgaggccgtcctctacccagtgtgtcacgtgcgaaacctcatgctctggtcagccgtgtacctgccatgcccgtctccaacaacaccggtagatgactcttgtgcaccgtatcctgctcccggtacgtctcccgacgacccacctttgagccgtctgcctaagacacgttcctacgataatctgacaacagcgtgcgataatactgtgccactggcttccaggagatgcagcgaccctagcctcaatgaaaagtggcaggaacaccggcgatcccttgagctgtctagcctcgcggggcccggtgaagaccctctgtccgcagatagcctggggaaaccgactagagtccccggcggcgccgagctttccgtagctgccggcgtggccgaaggccagatggagaacatactacaggaagcgaccaaagaggagtccggtgtcgaggagcctgctcatcgtgccggcattgagattcaggagggaaaggaggatcccctcctcgagaaagagagtagaagaaaaacccctgaagcttcagctatcggactgcaccaggatcccgaactgggtgatgctgcgttaaggagtcatcttgatatgtcctggccgcttttttcacaaggcatttcagaacagcagtcaggcctgagcgttttgcttagctctctgcaggttccaccaagaggagaagattcactggaggtgccagtagagcagtttcgaatcgaagagattgcagaggggcgagaagaagccgtactgccaatacccgtcgatgcgaaagtcgggtatggtacatcccaaagttgctcactccttccatcacaggtgccgttcgagacacgcggacctaacgttgactcgtctaccgacatgctggtggaagacaaggtgaagagcgtgtcaggtccgcaaggacaccaccggtcctgcctcgtcaactctggtaaagacaggctcccccaaacaatggagcctagcccaagtgagactagtctggtggagagaccccaggtggggagtgtggtccacaggacctcgctcggaagcaccctcagtctgacccggtccccatgtgcgctgcccctcgcagagtgtaaagagggcctggtctgtaatggggcccccgagactgaaaatcgcgcttccgagcagccccctggactgtccacattgcagatgtacccaaccccaaacggtcactgtgcaaacggagaggccggaagatcaaaggactccctgagccggcagctcagtgccatgtcctgctcatccgcccacctacactcccgcaacctccatcataaatggctacactcgcatagtggtagacccagcgccacaagctcacctgatcagccaagtcgcagccacttagatgacgacgggatgtcagtttatactgacaccatccaacagcggctgcgacagatcgaaagcggacaccagcaagaagtcgagactttgaaaaaacaggtgcaagagctaaaatctcggctggagtcccaatacttgacaagtagtctgcatttcaatggcgactttggcgacgaggtaacaagtattcccgattccgaatcaaatctggaccaaaactgcctgtctagatgcagtaccgaaattttcagtgaggcatcctgggagcaagtggataagcaggacacggagatgacccgctggctgccagaccatctggcagctcattgttacgcctgtgacagcgccttttggctggctagtagaaagcaccactgtaggaactgtggcaatgtgttttgcagttcctgttgcaatcagaaggttccagtaccaagccagcagttattcgagccaagccgcgtttgtaaatcttgttactccagtctgcatcctacgtcctcttcaattgacttggaactagacaaaccgattgctgctacgtcgaattag

SEQ ID NO: 196377 - DNA, 3513 bp, synthetic construct
  misc_feature 1..3513: note = Description of Artificial Sequence: Synthetic coding sequence
  source 1..3513: mol_type = other DNA
atggacgaggagacccggcacagcctggagtgcatccaggccaaccaaatcttccctaggaagcaattaattcgagaagatgagaacctgcaagtgccctttctcgagctccatggggaatctacagaatttgtcggccgcgccgaggatgctatcatcgctttgtcaaactaccgcctgcacataaaattcaaggagtccctcgtgaacgtgcccctgcagcttatcgaaagtgtggagtgccgagatatctttcaactgcaccttacatgcaaggattgtaaggtgatacggtgccaattctctacatttgagcaatgccaggagtggctcaagaggctcaataatgcgatccggcctcccgcaaagatcgaagacctcttcagctttgcctatcatgcgtggtgcatggaggtgtacgcatcagaaaaggaacagcatggtgacctgtgtcggccgggcgaacacgtgaccagtagatttaaaaatgaagtcgaacggatgggtttcgacatgaataatgcttggagaatttcaaacatcaatgaaaagtataagctgtgtggatcttaccctcaggagttaattgttcctgcctggattacggataaagaactggagtccgttagcagcttcagatcttggaaacgcatccccgccgtgatttatagacaccagagcaatggcgccgtcatcgctagatgtggccagcctgaggtgtcatggtggggctggagaaatgccgacgatgaacacctggtccagtctgttgccaaggcctgcgcctcggacagcagatccagcggaagcaagttgtctacccggaatacctcgagggacttcccgaacgggggggatctttcggatgtggagtttgattcttcactgtctaacgcaagcggagctgagtccctggccattcagccacagaagcttctgattctggacgccagatcttacgctgccgcagtggcaaaccgcgcgaaaggagggggatgcgagtgtcccgaatattatccgaattgcgaagtggtatttatgggaatggcaaacatccactctattcggcgctctttccaaagtctccgcttgctgtgtacccaaatgccagatccaggcaattggctgtccgcactggaaagcacaaaatggctgcaccacttaagcgtgcttctgaaatcagccctcctagttgtgcatgccgtggaccaggaccagcgccctgtgctggtgcattgttcagatggctgggatcgaaccccccaaattgtcgccctagctaaactgcttctagacccctactataggacgattgagggcttccaggtccttgtggagatggaatggctcgactttggacacaaattcgccgataggtgcggacacggggaaaattccgatgacctgaacgaacggtgcccagtgttcctccaatggctcgattgtgttcaccaactgcagcgccagtttccttgctcctttgagttcaatgaggcctttttggttaagctcgtgcagcatacgtacagttgcttgttcggaacattcctgtgcaataatgccaaggagcgcggagaaaagcacacacaagagcgcacctgtagcgtctggagtctgctgagagccggtaacaaagcctttaagaacctgttatactctagccagtcggaagcagtactgtatccagtgtgtcacgtgaggaaccttatgctgtggagcgccgtatacctgccctgtccatcacccacaactccggttgatgattcatgcgcaccctatcccgctccagggacaagtcccgacgaccctcctctctctcggctaccaaaaactcgctcatatgataacctcacaaccgcttgcgacaatacagtacctctggcctctcgaaggtgcagcgacccaagtctgaatgagaaatggcaagaacacaggcgctctctcgaactcagttccctggccggaccaggtgaagatccacttagcgctgactcgctgggcaagccgactcgggtccctggcggcgcggagctgtctgtcgccgccggagttgctgaagggcaaatggaaaacattttgcaagaggccacaaaagaggagtccggcgtggaggaaccagcccatcgcgccgggatcgaaatacaggaggggaaggaggatccactcctggagaaggaatcccgtcgaaagactcccgaagcctctgccatcggcttacaccaagatcctgagctgggcgacgcagctctgaggtctcatttagacatgagttggccactcttctctcagggaatatcggagcagcagagcggactcagcgtgctgctctctagccttcaggtgcctccaaggggagaggattctctggaagtccccgtagaacagttccgcattgaagagatcgctgagggccgcgaggaggctgtattacccattccagtcgacgcaaaggtcggctacggaacttcccaatcctgctccctgttgccttcacaggtaccattcgagacacgcggaccaaatgtggactcaagcaccgatatgctcgtcgaagataaagttaagagcgtatctggcccacaagggcaccatcgctcttgtctggtcaatagtggcaaggaccgcttgcctcaaactatggagccatcaccgtccgagacgtccctcgtggagcgccctcaggtcggaagcgttgtccaccggacaagcctcggctccaccctaagcttgacgcgaagcccttgcgctctgcctctggccgagtgcaaggaaggcctcgtgtgcaacggagcgcctgagacagagaacagggcttccgaacaaccacccggcctgtctacgctgcaaatgtatcctactcccaatggacactgcgccaatggagaagccggcaggagcaaagattccctatccaggcagttaagcgctatgagctgtagcagtgcacatctgcactccaggaacctacaccataagtggctgcattcccacagcggcaggccctcagcaacatctagcccagatcagccatcccgaagccacctggatgatgacgggatgtccgtttatactgatacgatccagcagcgattaaggcagattgagtctggacaccagcaggaagtggagactctgaaaaagcaggtgcaggaacttaagtcgaggctggagtctcagtacctgacttcctcgctgcacttcaatggcgattttggagacgaagtgatgacccgctggttgccggatcacctcgcggcccactgttacgcctgcgacagcgccttctggctcgcctctagaaaacatcactgtcgcgacactgaccgtgtggaccagacttggaactgcggcaatgtattttgtagctcttgctgtaaccaaaaagttccagtgccatctcagcagctctttgaaccctcccgcgtatgtaagtcatgctactcatctttgcacccaacctcatcgtccatcgaccttgagctcgacaagcctatagctgccactagcaattag

SEQ ID NO: 196378 - DNA, 420 bp, synthetic construct
  misc_feature 1..420: note = Description of Artificial Sequence: Synthetic coding sequence
  source 1..420: mol_type = other DNA
atggacgaggagacccggcacagcctggagtgcatccaggccaaccagatttttccacgcaagcagctgatccgggaggatgagaacctgcaggtcccctttttagaattgcatggcgagtctactgagttcgtcggacgagccgaagatgccattatagcactgagcaactacagattgcatatcaaatttaaggaatctctcgtgaacgttcccctccaactgattgagtccgtggagtgccgagacatctttcaactgcacctcacctgcaaggattgtaaggtgattagatgccagttctcaacattcgagcagtgccaggagtggctgaaaagactgaataacgccatacgccctccggctaaaattgaagacttgttcagctttgcttaccacgcttggtgcatggaggtttag

SEQ ID NO: 196379 - DNA, 3588 bp, synthetic construct
  misc_feature 1..3588: note = Description of Artificial Sequence: Synthetic coding sequence
  source 1..3588: mol_type = other DNA
atgggcgaggagggcccccccagcctggagtacatccaggccaaggaccttttcccacctaaagagctggtcaaggaggaggagaacctgcaggttcccttcactgtccttcagggggaaggggttgagttcctcgggcgtgccgctgacgcactgattgccatcagcaattatagattgcatatcaaattcaaggattcggttataaacgtcccgttgaggatgatcgattccgtggagtcgcgggatatgtttcagctgcatatctcttgcaaagacagcaaggtggtccggtgtcatttcagtacctttaaacagtgccaagaatggttgagtcgtcttagtcgagcgacagccagacccgcaaagcctgaggacctgtttgcttttgcctaccatgcatggtgtcttggccttacagaggaggaccaacacactcacctgtgccagccaggtgagcacatccggtgccggcaagaggccgaactggcgcgcatgggatttgatctccagaatgtgtggcgagtctcccacattaacagcaactacaaactgtgcccgtcttatccacagaaattactggtcccagtctggattactgataaggaactggaaaatgtggcaagctttaggagttggaagcgtatcccggttgtggtgtacagacacctacgtaatggcgctgccattgcacgatgttcccaaccagagatcagctggtggggctggaggaatgccgatgatgagtatctggtgacctctatcgccaaagcctgcgctctggaccccggcacccgtgcaaccggcggttccctctccaccggcaataatgatacctccgaggcctgcgatgcggattttgatagctcactgaccgcctgctccggtgtggaaagcactgctgcaccccagaagcttctgatcctggatgcaaggagttacaccgcggctgtcgctaaccgagctaaagggggagggtgcgagtgcgaggaatattatcctaattgtgaagtcgtttttatgggaatggctaacatccacgcgattcgcaatagctttcagtacttacgggccgtgtgctcgcagatgcctgacccatcaaactggcttagtgccctagaatccaccaaatggctgcagcacttatcagtaatgctgaaagctgccgttcttgtcgcaaacacagtggatagggaagggaggcccgtgctggtgcattgtagcgacggctgggacagaaccccccagattgtggctttggccaagatcctgctggacccttattatagaactctggaaggctttcaggtgttggtagagtccgactggctggatttcggccataagtttggagacagatgcggtcaccaggaaaatgttgaggatcagaatgagcagtgtcccgtatttctgcagtggctggattccgtccaccagctactaaaacaattcccatgcctattcgagtttaatgaagcttttctggtaaagctcgtgcagcatacttatagctgtctctacggcacctttctggctaataacccatgcgagcgcgagaaaagaaacatttataagcgcacctgttctgtgtgggccctgctccgagccggaaataagaattttcataatttcctatatacaccttcatctgacatggttctgcatcctgtttgtcatgttcgggccttacacctgtggactgcagtgtacctgcccgcttctagtccctgcacacttggggaagagaatatggatctgtacctttcacctgtcgctcaaagtcaggagttcagcggtcgcagtctggacaggctacctaagacccgctccatggacgacctgctgtctgcctgcgatacatccagcccattgacaaggacatcatcagaccccaatcttaacaaccactgccaggaggttagggtgggccttgaaccatggcattctaaccccgagggaagcgagacctcgttcgtggactctggcgttggcgggccccaacagacggtgggagaagttggtctcccacctcccctcccatcatcacaaaaggactacctgtcgaacaaacccttcaagagccacaaaagttgtagcccaagctataaactgctgaatacggccgtccctcgggagatgaaatcgaatactagcgacccggaaatcaaagtgcttgaggagactaaggggcctgccccagacccaagtgcacaagacgagttgggacggactcttgacggtatcggcgagcctcctgaacactgtccagagacggaagccgtgagtgccctgtcgaaagtcatcagcaacaaatgcgatggtgtttgtaactttccagaaagctcccagaattctccaacaggaacacctcagcaggcccaaccggacagtatgctgggagtgcctagcaaatgtgtcttagaccactcattgtcaaccgtgtgcaacccgccaagcgcagcctgccagacgccgctggatcccagtaccgactttctcaatcaggacccctccggtagtgtggcaagtatctcacaccaagagcagctgagctccgttccagaccttacacacggagaagaagacataggaaagcgcggcaataatcgaaatggccagctcctggaaaatccgaggtttggcaagatgcccttggagctcgtaaggaagcctatctctcagtcacagatcagtgagttttcctttctcggcagcaattgggacagcttccaggggatggtcacatctttccctagtggtgaggccaccccaaggagactcctgtcgtacggatgttgcagtaagcgacctaatagtaaacagatgagggccactggaccatgctttggggggcagtgggcccaacgggaaggcgtcaagtccccagtgtgctcttctcattccaatgggcactgcaccggtccaggcggcaagaatcagatgtggctgagctctcaccctaagcaggtatcttctaccaagccggtccctctgaactgtccctctcccgttcctcctctttatctggatgacgacgggcttcccttcccaacagatgtgatccagcacagactcagacagattgaggccggctacaaacaggaggtggaacagctgcgtagacaggtccgcgagctccaaatgaggcttgacataaggcattgttgtgctccaccagctgagccacccatggactacgaggacgactttacatgtctgaaagagtctgacggatcagacaccgaggattttggctctgatcactccgaagattgtctctccgaggcatcatgggagcccgtagataagaaggaaactgaagtcacccgctgggttcctgaccacatggcctcccactgttataactgtgattgcgaattttggctggctaaaagacggcaccattgcagaaattgcggcaacgtgttttgcgctggttgctgtcatctgaaactgcctataccggatcagcagctctacgaccccgtgctcgtctgtaactcttgctacgagcatatccaggtaagccgagccagagagctgatgtcccaacagctgaagaaacctatcgcaactgccagctcctag

SEQ ID NO: 196380 - DNA, 570 bp, synthetic construct
  misc_feature 1..570: note = Description of Artificial Sequence: Synthetic coding sequence
  source 1..570: mol_type = other DNA
atgcccgtgtggaagctgccctggaagctgagcgagggcaagcggagggcacaggtggagggggaggatctttttccggtagcgatctctttcggccggcccaaggaggtcctgccactttacagtagtgaatcccacaggttcacagttcttgaaccaaataccgtcagtttcaacttcaaattctggcgcaatatgtatcaccagtttgacagaaccctccatccgcggcagtctgtgttcaatatcattatgaatatgaacgaacagaacaaacaactggagaaggatatcaaggacctggagagtaaaataaagcagcggaaaaacaaacagaccgacggcatcctcactaaggaacttctgcacagcgtgcatccagagagcccaaatctgaaaacctctttatgcttcaaagagcagacactgttaccagtgaatgacgcccttaggactattgaagggtcttctcccgccgataacaggtactccgaatatgcagaggaattctcgaagtcagaacctgccgtagtctctttggagtacggcgtggcaagaatgacctgttag

SEQ ID NO: 196381 - DNA, 1866 bp, synthetic construct
  misc_feature 1..1866: note = Description of Artificial Sequence: Synthetic coding sequence
  source 1..1866: mol_type = other DNA
atggagcacatccggaccaccaaggtggagcaggtgaagctgctggatcgttttagtaccagtaataagtcacttaccggaacgctgtatctgactgccacccatctactctttatagacagtcaccagaaggaaacctggatcctccatcaccacatcgcctctgttgaaaaactcgcactcaccacctccggatgtcccctcgtgatccagtgtaagaatttcaggaccgtccatttcatcgttccgcgggagagggattgtcatgatatctacaacagcttgctccagctgtcaaaacaggccaagtacgaagacttatacgctttcagttataatcccaagcagaatgacagtgaacggctgcaaggatggcagctcatcgacctcgcggaggagtacaaaaggatgggcgtccccaattcgcattggcagttgagtgatgctaaccgcgactacaaaatatgtgaaacgtacccccgtgagctatacgtgccccggattgcgagcaaacccatcatcgttggcagttccaagttcagaagcaaaggaagatttccagtcctgtcctattaccatcaggataaggaggcagccatctgtaggtgtagccagccactgtctggctttagtgctcgctgcctcgaggacgaacatctgctgcaggcaatcagtaaagcgaatccggtgaatcgctatatgtatgtcatggacacaagaccgaagctaaacgccatggccaaccgggctgcaggcaaggggtacgagaacgaagacaactactctaacatccgcttccagtttgtagggattgagaatatacacgtcatgcgcagctcactgcagaagttgctcgaagttaacggtacaaagggcctaagtgtgaatgacttttatagtggattggaatcctccggttggttacgccatattaaggctgtgatggacgcagccatctttttggctaaagcgatcaccgtggaaaatgcgtctgtgttggtgcactgttccgacgggtgggatcggacttcccaggtgtgttcactcggcagtctactattagacagctactaccgtactattaagggattcatggtcttaattgaaaaagactggatctcttttgggcataagttctccgagaggtgcggacagctggacggagaccctaaggaagtatctccagtattcacccagtttctcgagtgtgtttggcacctcactgagcagttcccgcaggcatttgagttctcagaggccttcttgcttcagatccatgagcatatacatagctgccagtttggcaacttcctgggaaactgtcagaaggaaagagaggagctgaaactgaaagagaaaacctattccctctggcccttcttgctggaagaccagaagaaatacctgaatcccctgtactcaagcgagtcacaccgctttacagtgctggaacctaacactgttagcttcaatttcaagttttggagaaacatgtatcatcaatttgatcgaacattgcacccacggcaaagtgtcttcaatattattatgaacatgaatgaacagaataagcagctagagaaagatatcaaagacctggagtccaagattaagcaaagaaagaataagcagacagatgggatcctgacgaaggagttgcttcatagtgttcacccagagtctccgaatctaaagacttctctctgctttaaggaacagacactgttacctgtgaacgacgctctcaggactatcgaaggctccagtcctgccgacaatagatattcggagtacgctgaggaattctcgaaaagcgagccagctgttgtcagtttagaatatggcgtggcgcggatgacctgttag

SEQ ID NO: 196382 - DNA, 1647 bp, synthetic construct
  misc_feature 1..1647: note = Description of Artificial Sequence: Synthetic coding sequence
  source 1..1647: mol_type = other DNA
atggagcacatccggaccaccaaggtggagcaggtgaagctgctggaccgcttttccacttccaataaatccctcacaggcacactttatctgactgccacccatctgctctttatcgattcccatcaaaaggagacgtggatcctgcaccatcacatcgcctcagtggagaagctggcgcttactacgagcggatgtcctttggtgatacagtgcaagaacttcaggacagtgcacttcatcgtccctcgagaacgggattgtcacgacatttataactctctgctccagctctcgaaacaggccaaatatgaggatctgtatgccttttcatacaatcctaagcagaatgattcagagaggctccaagggtggcagctcatcgacctcgcagaggaatacaaacgtatgggagtcccaaactctcactggcaactgagcgatgcaaatagggattacaaaatatgcgagacataccctcgggaactttacgtcccaagaatcgcatctaagccaattattgttggatcaagcaagttccgctcaaagggtagattcccggtcttatcttactaccaccaggacaaagaggccgccatctgccggtgcagccagcctctgtctgggttcagcgcccgctgtctagaggacgagcatctcttgcaggccatctcaaaagccaatcccgtgaatcggtatatgtatgtcatggataccagacccaaactgaatgcaatggctaacagggccgccggcaaggggtatgagaatgaggataactatagcaacatcaggttccagttcgtaggcatcgaaaacattcatgtgatgcgtagttcattgcaaaagctcctggaagtgaatgggaccaaggggctcagtgtgaatgatttctactctggactggagtcttctggctggctgcggcatattaaggccgtcatggatgccgcaatatttttggctaaagccatcactgtcgagaacgccagcgttcttgtgcattgttcagacggttgggacagaacctcgcaggtgtgctctttggggagtctcctgctggattcctactaccgaactatcaaagggtttatggtacttatcgaaaaagattggatcagtttcggacacaaattttccgagcgctgcggccaactcgatggcgacccaaaggaggtgtctccagttttcacccaattcctggagtgcgtatggcacctcaccgaacagtttccacaggcatttgaattctctgaggccttcctcttgcaaatacacgagcatatccactcctgccagttcggaaattttttaggcaactgtcaaaaggagagggaagaattgaaattaaaggagaaaacttacagcctctggcctttcctgctcgaagatcagaaaaaatacctgaatcctctttatagcagtgagagccataggtttaccgtactggaacccaacaccgtcagcttcaacttcaagttctggagaaatatgtatcatcaattcgaccgaaccctgcatccccggcaaagcgttttcaacatcattatgaacatgaatgagcagaataaacagctggaaaaagatatcaaagaccttgaatcattaacatcttatagctctttcaagatcatcgtcgggcagtag

SEQ ID NO: 196383 - DNA, 1647 bp, synthetic construct
  misc_feature 1..1647: note = Description of Artificial Sequence: Synthetic coding sequence
  source 1..1647: mol_type = other DNA
atggagcacatccggaccaccaaggtggagcaggtgaagctgctggacagattcagcacgagcaacaagtccctcacggggacactgtacctgaccgccacccacttactctttatcgattctcaccagaaagagacctggatcctgcatcaccacatagcctccgttgagaaactcgccctcactacgtcagggtgccctctcgtgatccagtgcaaaaactttaggaccgtacactttattgtgccccgcgagagggattgccacgacatatacaattctttgctccagctcagtaagcaggcaaagtacgaagacctgtatgccttttcctataatcctaagcagaacgatagcgagaggctgcagggatggcagctgattgatcttgcggaagaatataagagaatgggcgttcccaacagccactggcaattgtctgacgccaacagagactacaaaatttgtgaaacctatccccgtgagctttatgtaccacggatcgcgtcaaagccaataattgtgggctcttccaagtttaggagtaagggccggttcccagttctgtcatattaccatcaagacaaagaggcggcaatctgtaggtgcagccaaccactgtctgggttcagtgccaggtgtctggaagatgaacacttactgcaggcaatctcaaaagcgaatccagtgaacaggtatatgtatgtgatggacactcgccctaaactgaatgccatggctaaccgcgctgccggcaaagggtatgaaaatgaggataactactctaatattcgctttcagttcgtcggaatcgagaacatccacgttatgcggtctagcttgcagaaactgttggaggtgaacggtaccaaaggcctgtcagtcaacgacttttatagcggtctcgagtctagcggttggctcaggcacatcaaagccgtcatggatgcggctatttttctagcaaaggccataactgtcgagaatgccagtgtgctcgtgcactgcagtgacggatgggacagaactagccaagtgtgctctctggggagcctgctcttagacagctattaccgcacaatcaagggcttcatggtgctgatcgagaaggactggatctcctttggccataagtttagtgagcgctgtggccagttggacggcgacccaaaggaagtgtctcccgtgttcactcagtttctggaatgtgtttggcatttgaccgagcagttccctcaagcctttgaattcagcgaagcgttcctcctgcaaattcacgaacacatacacagttgccagttcggcaacttcttaggcaactgtcagaaggaaagagaagaactaaagctgaaagagaaaacttatagtctctggcctttcctcctggaggatcagaaaaaatacctgaaccccctgtattcctcagaatctcaccggtttactgtccttgagcctaacaccgtttcattcaatttcaaattctggcgaaacatgtaccatcagtttgaccgaacactccacccccgccagagtgtgtttaacattattatgaacatgaacgaacagaataaacagctagaaaaggacattaaggacctcgaatcgtttacctccttcgccgcagccagagtgatacagggacagtag

SEQ ID NO: 196384 - DNA, 1983 bp, synthetic construct
  misc_feature 1..1983: note = Description of Artificial Sequence: Synthetic coding sequence
  source 1..1983: mol_type = other DNA
atggagcacatccggacccccaaggtggagaacgtgcggctggtggaccgcgtgagcccaaaaaaagctgctctgggtacactgtatttaaccgccactcacgtcatctttgtcgaaaattcccctgacccgagaaaggaaacgtggattttgcatagtcagatctccactattgagaaacaagccactacagcgaccgggtgcccccttctgatacggtgcaagaacttccaaattattcaactgatcatcccacaggaaagggactgccacgatgtttatatctccctcattcgactcgctagacccgttaaatatgaggagctgtactgcttttcgttcaacccaatgctggacaaggaagagcgagaacaaggctgggtactcattgacctgtcagaagaatatacacggatgggtctccctaatcattactggcagttatctgatgtgaaccgagactatagggtgtgtgactcctacccaaccgagctgtatgtccctaagagcgccacagctcacattattgtcgggagcagcaaattcaggtcacgcagacgattccctgtgttatcatactactacaaggataaccatgccagcatctgcagaagttcacagcccctttcagggttcagcgctaggtgcctggaggacgaacaaatgcttcaggctatacgcaaagcaaatccaggcagtgacttcgtgtatgtggtagatacacggccaaagcttaacgcaatggccaatagagccgccggtaaaggctacgaaaatgaggacaattactccaacataaaatttcaattcatcgggatcgaaaacattcacgttatgagaaattctctgcaaaagatgttggaggtgtgtgagctaaagagccccagcatgtcagatttcctatggggcctcgaaaactcaggctggctccgccacattaaagctatcatggatgccggcatcttcatcgccaaagcagtgtcagaggaaggggcttctgtcctggtgcattgtagtgacggttgggaccggacggctcaggtttgctcagtcgcatctttgctattggacccccactaccgcaccctaaaggggtttatggttctgattgagaaggactggatatccttcggtcacaagtttaaccatagatacgggaacctcgacggagaccccaaggagatttctccagttattgaccagtttattgagtgtgtttggcaactcatggagcagtttccctgcgccttcgaattcaatgagagatttctcattcatatccagcaccatatctactcttgtcagttcggaaacttcttatgcaactcccaaaaggaaagaagagagctgaagattcaggaaagaacgtatagcctgtgggctcatttatggaaaaacagggccgactatctgaatcctctttttcgagccgatcatagtcaaacccaaggtactctccatctgccgacaacaccttgcaatttcatgtacaagttctggagcggcatgtacaacaggtttgaaaaagggatgcagcccaggcagtctgtgaccgattacttgatggcagtcaaggaagagacgcagcaacttgaggaggaactcgaagctcttgaagagaggctggagaaaattcagaaggtccagctcaattgtaccaaggtcaagtctaagcagtctgagcccagcaagcactctggattttctacaagtgacaatagtatcgccaatacaccccaggattattctggcaatatgaagagttttccttctagatctccttcccagggcgatgaagatagtgccctgattttgactcaggataacctgaagtccagcgaccccgatctcagcgccaatagtgaccaggagagtggagtcgaagacctgtcatgcagatcacctagtggtggcgagcacgccccttccgaagatagcgggaaggaccgggactcagatgaagcggtgtttttgactgcctag

SEQ ID NO: 196385 - DNA, 756 bp, synthetic construct
  misc_feature 1..756: note = Description of Artificial Sequence: Synthetic coding sequence
  source 1..756: mol_type = other DNA
atggagcagttcccctgcgccttcgagttcaacgagcggttcctgatccatatccaacatcatatatattcttgtcagttcgggaatttcctgtgcaactcacagaaggaacgaagagaactcaaaattcaggagcgcacctattcattgtgggcgcatttatggaagaatagggcagactacctgaacccactctttagagccgaccattctcagacccaaggtacgttacacctgccgacaacaccgtgtaatttcatgtataaattttggagcggaatgtataaccgattcgagaagggtatgcagccacgacagagcgtgacagattacttgatggctgtgaaggaagagacccagcagctagaggaggagctggaagctctggaagagaggctggagaagattcagaaagtgcaactgaattgcaccaaggtcaagtctaagcagtctgagcccagtaaacactccgggtttagtacatcagacaacagtattgctaatactccccaggattattctggcaacatgaagagttttccatcccgttctcccagtcagggtgacgaggactctgctctgattctgactcaggacaacctgaaatccagcgaccctgatcttagcgccaactccgatcaggagtccggggtggaggatctgagctgtagaagcccatcaggtggtgaacacgccccgagtgaggatagcgggaaggacagagacagcgacgaagccgtctttttgaccgcctag

SEQ ID NO: 196386 - DNA, 1668 bp, synthetic construct
  misc_feature 1..1668: note = Description of Artificial Sequence: Synthetic coding sequence
  source 1..1668: mol_type = other DNA
atggagcacatccggacccccaaggtggagaacgtgcggctggtggacagagtgagtccgaaaaaagcagctctgggcaccctatatttaaccgccactcatgtcatattcgtggagaatagtcccgaccctcggaaagagacctggatcctgcactctcagattagcaccattgagaagcaagcaaccactgctactgggtgccccctccttatcagatgcaagaactttcaaatcattcagctgattatcccccaggagcgcgactgccatgacgtgtatatctccctgataaggctggctcgaccagtgaaatacgaagagctgtattgtttttcttttaatccaatgctggacaaggaggagcgcgagcagggatgggtattaatcgacttatctgaggagtacactagaatggggctcccgaaccactactggcaactgtctgatgtaaaccgggattatcgtgtttgcgattcctatcctaccgaactgtacgtcccgaaatccgccactgcccatataattgtggggtcttctaaattccgcagtagacgccgctttccagtcctaagctattattacaaagacaaccatgcatcaatatgtcgttcctctcagcctctgagcggcttcagtgcccggtgccttgaagatgaacagatgctgcaagctatccgcaaggccaatccaggatccgacttcgtgtacgtcgtcgacacccggccaaaactcaatgccatggccaacagggcagcaggaaaaggttatgaaaacgaggataactattccaatattaagttccagtttattggtattgaaaacattcacgtcatgaggaatagtcttcagaagatgctagaagtgtgtgaactgaagagtcctagcatgtcagatttcctttggggcctggaaaatagtggctggcttcgacatatcaaagccatcatggacgcggggattttcattgcaaaagcagtctcagaggaaggcgccagcgttctagtgcactgctcagacggctgggacagaaccgcccaggtctgttccgtggccagtctgctacttgatccacattacagaaccttaaaaggcttcatggtccttatcgagaaagactggatctcttttgggcacaaatttaaccataggtacggcaatctcgacggcgatcctaaggagatttcccctgtcattgatcaattcattgagtgcgtttggcagctgatggagcaatttccctgtgctttcgaattcaacgagagattcctcatacacatacaacatcatatatatagttgccagtttggcaacttcctgtgtaacagccagaaggaacggcgggaactgaagatccaggagagaacttactccctttgggctcacttgtggaaaaaccgggcagattatctgaaccctctctttagagcggatcattctcaaacgcagggcaccctgcaccttcccaccactccttgtaactttatgtacaagttctggtccggcatgtacaacaggtttgagaaaggaatgcagcctagacagtctgttactgattatcttatggccgttaaggaagaaacccagcaattggaagaagaactggaggctttggaagaggtccgacacacctgcttcgtgaacctcttctccgtgctcatctcgtag

SEQ ID NO: 196387 - DNA, 1773 bp, synthetic construct
  misc_feature 1..1773: note = Description of Artificial Sequence: Synthetic coding sequence
  source 1..1773: mol_type = other DNA
ctggacctgctggtgcccaaggtggagaacgtgaagctggtggacagatacgtgagtaagaagccggccaacggaatcctatatttgaccgccacccaccttatatatgtggaagctagcggcgctgcccgcaaggagacttggattgccctgcatcacatagctactgtggagaagctgcccatcacttctctcggctgcccactaactcttagatgtaagaattttagggtggctcatttcgttctggactcggacttggtgtgtcatgaagtgtatatctccctcctcaagctgagccagcccgccctccccgaggatttgtatgccttttcttacaaccctaaatcttctaaggaaatgcgtgagtctggctggaaactgattgaccccatcagcgactttgggcgcatggggataccaaatagaaactggaccatcacagatgccaacattcggttccggttcatgggcattgaaaatattcatgttatgcgctcgagcctccaaaagctgctcgaagtttgtgaactgaaaactcctactatgagtgaatttctatctgggctggagtcatccggatggctgaggcacattaaggccataatggatgcaggaatctttatcacaaaggctgtgaaagtggagaaagcgtcagtattggtgcactgtagcgacggctgggacagaaccgcacaagtctgctccgtcgccagcatcctgctggatcctttttacaggaccttcaaggggctcatgatcctaattgagaaggaatggatctctatgggacataagtttagccagagatgcgggcacctggacggcgactccaaggaggtttcacccatttttacccaattccttgattgcatttggcaactgatggaacagttcccctgtgcattcgagttcaacgagaattttctactggagatccacgatcatgtcttctcctgtcagtttgggaacttcttggggaattgtcaaaaggacagggaggacttgcgcgtctatgaaaaaacccatagcgtgtggccgttccttgtacagcgcaaacccgatttcagaaaccctctctacaaggggtttactatgtatggcgtcctgaacccctcaactgtcccgtacaatattcagttttggtgtggaatgtacaaccgcttcgataaggggctccagccgaaacagagtatgttggagagcctgctcgagattaaaaagcaacgggccatgctggagacagacgtacacgaactcgaaaaaaaattgaaggttagagacgagcctcccgaggaaatatgtacctgttcacaactgggcaacatcctatcccaacatctcgggtcccctcttactaatccactgggttttatgggcatcaatggggacttgaacacacttatggagaacggcactctgagtcgtgaggggggactgagagcccagatggatcaagtgaaatcccagggagctgaccttcaccacaactgctgtgaaatcgtgggctccctgcgtgccattaacattagcggagatgtggggatttccgaggctatgggtattagcggagatatgtgcacattcgaagctactggtttcagtaaagacctgggcatctgtggtgccatggacataagcgaggctacagggatctctgggaatttgggcatctctgaagcacgaggcttttccggcgacatgggcattctgggagacaccggaattagtaaggcgagcactaaggaggctgattactcgaagcatcagtag

SEQ ID NO: 196388 - DNA, 2115 bp, synthetic construct
  misc_feature 1..2115: note = Description of Artificial Sequence: Synthetic coding sequence
  source 1..2115: mol_type = other DNA
atggaccacatcaccgtgcccaaggtggagaacgtgaagctggtggatcgctacgttagcaagaaaccagctaacggcattctgtatttaacagccacccacttaatttatgtggaggcaagtggcgcggcgagaaaggaaacatggattgctctgcaccacatcgccactgtggaaaaactgcccatcaccagcctgggctgccctttaacactgcggtgtaagaacttccgggtggcccacttcgtcttagattcggacctcgtatgccacgaggtttatatctcactcttaaagttgtcacagcccgcactccccgaggacctgtacgccttcagctacaacccgaaatcgtcgaaggaaatgcgtgaatccggttggaagctgattgatcccatctctgactttggccgcatgggtattcctaacaggaattggaccataacggatgcgaaccggaactacgaaatctgcagtacataccctcccgaaatagtggttccaaagtctgtcactctgggcacagtggttggctccagcaaattcaggagtaaggagcgagtaccggtcctgtcctacctatataaagaaaataacgccgccatttgcaggtgcagtcaacctctgtctgggttctacacaaggtgcgtcgacgacgaacttctgttagaggccatttcccagactaaccccggctcccagttcatgtatgtcgtagacacaaggcccaaactaaatgctatggccaaccgagcagcaggtaaaggctacgaaaacgaggacaattatgcaaatataagattccggtttatgggcatagagaatatccacgtaatgcgctcttccttgcagaagctgttagaggtctgcgaactcaagaccccaaccatgtccgagttcctcagcggtcttgagagcagtggatggctccgtcatattaaggccataatggacgcaggcatctttataactaaggccgtgaaagtggaaaaggcttctgttttggtccattgtagcgatggatgggatcgcacggcacaggtctgcagcgttgccagcatcttgctcgatcccttctacagaacatttaagggtttaatgattctgattgaaaaggaatggatatccatgggccataaattctcgcagaggtgtggccacttagacggcgactccaaggaagtctcccctatctttacccaatttctggattgtatctggcagttgatggaacagtttccctgtgcattcgaattcaacgagaattttctgcttgaaattcacgaccacgttttcagctgccagttcgggaattttctgggcaactgccaaaaagatagggaagatttaagggtgtacgagaagacccactccgtgtggccctttctggttcagcgcaaaccggatttccgcaatcccttatacaaaggatttaccatgtacggtgtattaaacccttccaccgtcccatataatatccagttctggtgtggcatgtacaacagatttgataaaggcctgcagcctaagcaatccatgctggagtctctgctggaaatcaaaaagcagcgggcaatgctagagactgatgttcacgagctcgagaagaagttgaaggtacgggatgaaccgcccgaggaaatttgtacctgtagccagcttggcaacattctgtctcagcacctcgggagcccccttaccaatccactcggattcatgggcataaacggcgatctgaacaccttgatggagaatgggacgctctccagagaaggtggactgagggcacaaatggatcaagtgaagagtcagggggctgatctgcatcacaactgctgcgagatagtcggctccctccgggccattaatatttcaggtgatgtgggcatctccgaggccatgggcataagcggcgacatgtgtaccttcgaggccaccggctttagcaaggatttgggtatctgcggggccatggatattagcgaggctaccggaatttctggcaaccttggcatcagtgaggctcgaggattttctggcgatatgggcattctgggggatacaggcatctcaaaagcctctacaaaggaagcagactattcaaagcaccagtag

SEQ ID NO: 196389 - DNA, 1527 bp, synthetic construct
  misc_feature 1..1527: note = Description of Artificial Sequence: Synthetic coding sequence
  source 1..1527: mol_type = other DNA
tgagacagcgacctggtgtgccacgaggtgtacatcagcctgctgaaactctcacagcccgctctaccagaagacctttacgccttttcttacaacccgaagtcttccaaagagatgcgcgaatctggttggaaactgatcgaccccatcagtgactttgggcgcatgggcatcccaaaccgcaactggacaattactgacgctaatattagattcaggtttatggggatcgaaaacatccacgtaatgagatcctcgctgcaaaagctgctcgaagtctgtgaactgaagacaccaacgatgtcagaatttctcagcgggttggaatcgtccggctggctgagacatataaaagctatcatggacgccggaatttttattacaaaggccgtgaaagtggaaaaggccagcgttcttgtgcattgcagcgatggctgggatagaacagcccaggtatgctccgttgccagtatactactcgaccccttttaccggacctttaagggactgatgatactcatcgagaaggaatggattagcatggggcacaagttctcacagagatgtggacatctggatggcgacagcaaagaggtgtctccaatcttcacccagtttctggattgtatctggcagcttatggaacagttcccatgcgccttcgaattcaacgagaacttcctgctggagatacatgatcacgtatttagttgtcagtttggcaatttcctagggaactgccaaaaagaccgcgaagatctccgcgtatacgagaagacccacagcgtctggccttttttagtccagagaaaacccgacttccggaaccccctatacaaaggattcaccatgtatggcgttctgaatcctagtaccgtaccgtacaatatacagttctggtgtggcatgtacaataggttcgataagggtctacagcccaagcagtcaatgttagagtctctgttagagatcaagaagcagagagccatgttagaaactgatgtccacgaacttgaaaagaaactcaaagtgcgggacgaaccgcccgaagaaatatgtacctgttcgcagctgggcaatatactcagccagcacctgggctccccccttacgaacccactcggctttatgggtattaatggcgatcttaatacactgatggaaaatgggaccctgtctcgggagggagggctgcgcgcccagatggaccaggtgaagagccagggagcagacctgcaccacaactgttgtgagatagtggggagtcttcgcgcgattaacatttccggcgacgtagggatcagtgaggcaatggggatctccggcgacatgtgcaccttcgaagccacgggattctctaaagacctcggtatctgcggcgcgatggacatttccgaggccactgggattagcggcaacttaggcatctcagaggccaggggattctcaggtgacatggggattctgggtgacacagggatctccaaggctagcacaaaggaagctgactactcgaagcaccagtag

SEQ ID NO: 196390 - DNA, 2082 bp, synthetic construct
  misc_feature 1..2082: note = Description of Artificial Sequence: Synthetic coding sequence
  source 1..2082: mol_type = other DNA
atggaccacatcaccgtgcccaaggtggagaacgtgaagctggtggacaggtacgttagcaagaagccggcgaacggcatcctgtatctgacagctacgcatctgatttatgtcgaggcctctggcgccgcgcggaaagagacttggatcgccctccaccatatcgccaccgtggaaaaactgccgatcactagcctggggtgcccactaaccctccgctgcaaaaactttagagtggctcactttgtcctggacagcgatctcgtctgccacgaggtctatattagtctactgaagctgtcccagccagcattgccagaggatctgtacgccttctcttataaccccaagtcctctaaagagatgagggaatccggctggaagttaattgatcccatttctgacttcggcagaatgggcattcctaataggaattggacaatcacagatgctaatcgaaactacgagatttgttctacatatcctcccgagatcgtggtacccaagtctgttacactgggcacagtcgtcggcagtagtaaattccggagcaaggaaagggtccccgtgctttcttatctctacaaggagaacaacgcggccatttgtaggtgctcgcaacctctcagtggcttctatacccgctgtgtggacgatgagctgctccttgaggcaatcagccagactaatcctggtagtcagttcatgtacgtcgtggacacaagacccaaacttaacgctatggccaatcgtgcagcaggcaaaggctatgaaaatgaggacaactacgcgaatatccgttttcggttcatggggattgaaaacatccacgtcatgcgaagctccttgcagaagctgctagaagtctgcgagctgaagaccccaactatgtccgagttcctaagcggcttggagtcaagtgggtggttgcggcatattaaggcaattatggatgcgggaatatttataaccaaggccgtgaaggtcgagaaggcttccgttctggttcactgttcggacggatgggacaggaccgcccaggtttgtagcgtggcttccattctgctggatcccttttatagaacattcaaaggtctgatgatttggcacttcctggtcctgattatgcgaatcgtgctgcagcttgctaagatgaatcttatggacataaccaagatctttagtctgctgcagcccgataaggaagaggaggataccgatacagaagaaaagcaagcgctcaaccaggcagtatatgataatgactcctatactctggatcaactgctgcgacaagaaagatacaagcgttttatcaattcgaggtcaggctggggcgtgcctggtacccctctcaggttggcagcatcttatggacatctgtcgtgtctccaggtcttactggcgcatggagctgatgttgacagccttgatgtcaaggctcagacccctctctttaccgccgtgagccacgggcaccttgattgtgtgcgggttctcctcgaggctggcgcaagccctggtgggtccatctataacaattgcagcccggtgctgaccgctgccagagacggggccgttgctattttacaggaactgctagatcacggggctgaagccaacgtcaaagctaagctgccggtctgggcttctaacattgcatcttgctctgggccactttacttggctgccgtctacggtcatctggattgctttaggctgctgcttctacacggagcagaccccgactacaactgtactgatcagggactactggcgagggtccctcgcccacgcacgctgctggaaatctgcctgcaccataattgtgaacctgaatatatccagctgctgatcgacttcggcgctaacatctatctgccaagcctgagcctcgatcttaccagccaggatgataaaggaattgcactgttgctgcaggcccgcgcgacccctcgaagcctgctatcacaggtccgtctggtggtgagaagggccctgtgtcaggcaggacagccccaggccattaatcaactggatatccctccaatgttgatcagctatctcaaacaccagttgtag

SEQ ID NO: 196391 - DNA, 861 bp, synthetic construct
  misc_feature 1..861: note = Description of Artificial Sequence: Synthetic coding sequence
  source 1..861: mol_type = other DNA
atgggcggcgagcggagcggcgtgcggggcaacaagatggccgccgccgaaccctcaccacggcgcgtagggtttgtaggagcggggcgcatggctggcgctatcgcacaaggcctgatcagggccggcaaggtggaagcccagcatatactagcatccgcaccaaccgatcggaatctatgtcacttccaggctctcggctgcaggaccactcatagcaaccaggaggttctgcagtcttgtttgttggtgatattcgccactaagccccacgtgttaccagcagtcctggctgaggtggcccccgtagtaacaactgagcatatcctagttagcgtcgctgccggcgtatcactcagtaccttggaggagctgctacctcctaacacccgcgttctgcgcgttctgccaaatctgccgtgcgtggtacaagagggggctatcgtcatggcaagggggagacatgtcggcagctctgagaccaagctcctgcaacatctgcttgaggcctgtggcaggtgcgaggaggtcccagaagcctacgtggatattcacacgggcctatctggcagtggcgtggcttttgtgtgtgccttcagtgaggctttagcagaaggcgcagtgaagatgggcatgccctcttctttagcccatcgcattgcagcccagacactgctgggcaccgcaaagatgcttcttcacgaaggacaacatccagcgcagctgcgcagtgatgtttgcacccccggtggtactactatttacgggctccacgctctggagcagggcggtcttagggccgcaaccatgagtgcggtggaggctgcaacatgcagggctaaagagttatcgaggaaatag

SEQ ID NO: 196392 - DNA, 900 bp, synthetic construct
  misc_feature 1..900: note = Description of Artificial Sequence: Synthetic coding sequence
  source 1..900: mol_type = other DNA
atgcccctgagcggcacccccgcccccaacaagaagcggaagagctccaaattaattatggagctgactggaggagggcaggagtcaagcggcctcaatctcggtaagaagatcagcgtccctcgcgacgtgatgctagaggaactgagtttgctcactaacagaggctccaaaatgtttaagctgagacagatgcgtgtcgaaaaatttatctacgagaaccatcccgacgtattcagtgactctagtatggatcactttcagaagttcctccccacagttggcgggcagctgggcactgccggccaaggtttttcctattcaaagtccaacggacgtggaggttcccaggcgggcggatctggtagcgccggccaatatgggtctgaccagcagcatcatctggggtcaggcagcggggccggaggaaccgggggcccagccggccaggccggacgcggcggcgctgctggcacagcgggcgtgggcgagacaggtagcggtgatcaggctgggggagaagggaagcacataaccgtatttaaaacgtatatttccccatgggaacgggccatgggcgtcgacccacagcagaagatggaactgggtatcgacctgctcgcatacggggcaaaagcagagcttccaaagtataagtctttcaacagaaccgcaatgccgtacggcggatatgaaaaggcaagcaagcgcatgacttttcagatgccaaagtttgacctggggccccttcttagcgagccccttgttttgtataaccagaatctgtccaatcgtccaagcttcaataggacgccaatcccatggctgagcagcggggaacccgtcgactataacgtagatatagggatcccactcgacggcgaaacagaggagctgtag

SEQ ID NO: 196393 - DNA, 795 bp, synthetic construct
  misc_feature 1..795: note = Description of Artificial Sequence: Synthetic coding sequence
  source 1..795: mol_type = other DNA
atgctgagccacaacaccatgatgaagcagcggaagcagcaggccaccgccattatgaaagaggttcatggtaacgacgtggatggcatggatttgggtaaaaaagtgtcaattccacgcgatatcatgctcgaagagttgtcgcacttatccaacaggggggctagactgttcaagatgcggcaacgaagatctgacaaatacacattcgaaaactttcaatatcagtcccgcgctcagattaaccacagtatagccatgcagaatggaaaggtggacggctctaacctggagggcggttctcagcaggccccgctcactccacccaatacgcccgatccgagatctccccctaatcctgacaacatcgcgcctggatacagcggcccccttaaggagatcccccctgagaagtttaataccacagctgtccctaaatattaccagtccccttgggagcaagcaatctctaacgatcccgaactgctggaagcactgtaccccaagctcttcaagcctgagggcaaagccgagttgccagattaccgctccttcaaccgcgtagcaaccccattcggcggcttcgagaaggccagtaggatggtgaaatttaaagtgcctgattttgagttgcttctgctgaccgaccctcgttttatgtccttcgtcaacccactgtccggacgtcgctccttcaatcgcactccaaaaggctggataagtgagaacatccctatagtaattacgacggaacccactgatgatactaccgtacctgagtccgaggacttatag

SEQ ID NO: 196394 - DNA, 756 bp, synthetic construct
  misc_feature 1..756: note = Description of Artificial Sequence: Synthetic coding sequence
  source 1..756: mol_type = other DNA
atgatccccaaggagcagaagggccccgtgatggccgccatgggcgatctgaccgagcccgtacccacgctggatctcggaaagaaattgtccgtgccgcaagacctcatgatggaagaactctctctaagaaataatcggggctctctgctcttccagaagcgacagcgacgagtgcagaagtttaccttcgagctcgccgcctcgcagcgtgccatgttggcagggagcgctaggaggaaggtcactggtactgccgagtctgggacagtggctaatgccaacgggccagagggacccaattaccgttccgaattacacatcttccccgcttcccccggggcttcactgggcgggcccgaaggcgcacacccagcagccgctccagcaggctgtgtgccatccccaagcgcgctcgctcccggctacgccgagcccctaaagggggtgccccccgagaagttcaatcatacagccatcagcaaaggatacaggtgcccatggcaagagttcgtttcgtacagagattatcaatcggacggaaggtcccacactccaagcccaaatgactataggaacttcaataagactccagtgccttttggcggacccctggttggggggacttttccgcggccaggcacacctttcattccggagcccctgtcaggcctagagcttctgaggctgaggcctagctttaatagggtcgcgcaaggatgggtgcggaatctgcccgagtctgaagaactctag

SEQ ID NO: 196395 - DNA, 756 bp, synthetic construct
  misc_feature 1..756: note = Description of Artificial Sequence: Synthetic coding sequence
  source 1..756: mol_type = other DNA
atgatccccaaggagcagaagggccccgtgatggccgccatgggcgaccttaccgaacccgtgcccacgctcgacttaggtaagaagctatccgtcccccaggatctgatgatggaagagctgagcctgaggaataatcgcggtagcctgctgttccagaaaaggcagcgccgggtgcagaagttcaccttcgagttagcagcatcgcaacgcgctatgctggcaggctcagcaagacggaaagtgaccggcacagccgaatcaggcaccgtggccaatgcaaatgggcccgaaggccctaactacaggtccgaactacatatcttcccagctagccccggagccagcctaggtgggcccgagggtgcccacccagcagccgcgccggccggttgtgtgccatcccctagcgccctggcacccggatacgcagagcctttaaagggcgtccccccagaaaagtttaaccatactgctatttccaagggctatagatgcccatggcaggagttcgtgtcttatcgggattaccaaagtgatggtaggtcccatacaccctcccccaacgactatagaaatttcaacaaaactccagtgcccttcggcggaccccttgtcgggggaacttttccaaggcccggaactccatttatccctgagcctctctctgggctggaattactccggctgcgccctagcttcaacagggtcgcacagggctgggtgagaaacctccccgaatccgaggagctctag

SEQ ID NO: 196396 - DNA, 1989 bp, synthetic construct
  misc_feature 1..1989: note = Description of Artificial Sequence: Synthetic coding sequence
  source 1..1989: mol_type = other DNA
atggtggtgagcgaggtggacatcgccaaggccgaccccgccgccgcctctcatccgctcctgttaaacggggacgccaccgtggcccagaagaatccaggctcggtcgccgaaaacaacctgtgctcacagtacgaggaaaaggtcaggccttgcattgacctgatcgattcgctgcgggccctcggagtcgagcaggatcttgcgctgccagccattgctgtcatcggcgaccagagcagtggcaaatcaagcgtgttggaggccctgagcggggtggcactgccacgtgggtccggcattgttaccaggtgtcccctggttctgaagctcaaaaaattagtgaacgaagataaatggcgaggcaaggtcagctatcaagactatgagattgagatttccgatgcctccgaggttgagaaggagatcaataaggctcagaatgcaattgctggcgaggggatggggatttctcacgagcttattaccctggagatctcatcaagagatgtgcctgaccttactctaattgatctcccaggcataacccgggtagccgtgggaaaccagcccgccgacatcggttataagattaaaactttaatcaaaaagtacattcaacggcaggagactatttcactcgttgtggtcccctcaaatgtagatatagcaactactgaagccctgagcatggcccaagaggtcgatcccgaaggagaccgaacaattggcattctgactaaacccgatctagttgataagggcaccgaggataaggtggtggacgtggtccggaatctcgttttccatctgaaaaaaggctacatgatagtaaagtgcagaggccagcaggagattcaagaccagctttccctgagcgaagccctgcagcgcgagaagattttctttgaaaatcatccctatttccgtgacctgctggaggaaggcaaagccaccgttccatgtctggcagaaaaactcacctctgagttgatcactcacatttgtaagtccctgcctctgctggagaatcagatcaaagaaactcaccagcgcattaccgaggaactccagaaatacggggtggacatcccagaggacgaaaatgagaaaatgttcttcctgattgataaagtgaacgccttcaatcaagacataaccgctctgatgcagggggaggaaactgtcggcgaagaggacataagattgttcacacgactccggcatgaatttcataagtggtctactatcattgagaataattttcaggagggtcacaagattctgtcaagaaaaatacagaaatttgagaaccaataccggggtcgtgaattgccagggttcgtcaactaccgcacctttgagacaatagtcaaacagcaaattaaggcgctcgaggagcctgctgtcgatatgttgcacacagtcaccgatatggtcaggttggccttcaccgacgtctccattaagaacttcgaagagtttttcaacctgcatagaaccgctaagagtaagatcgaagacatcagggctgagcaggaacgagaaggagaaaagctcatacgattgcactttcaaatggaacagattgtgtattgccaggaccaggtatatcggggggctctccaaaaagtaagagaaaaggagttggaggaggaaaagaagaaaaagtcttgggattttggtgccttccagtccagctcagctactgacagcagtatggaggaaatattccagcacctgatggcatatcaccaggaagcctcaaagagaatctcctctcatatccctttaatcatccaattcttcatgcttcagacatatggtcagcagcttcagaaggccatgcttcaactgctgcaggataaggatacctattcttggctcctgaaagagcgctccgatacatcagataagcggaaattcctgaaagaacgtctggcaagactcacccaggcaagacgaagattggcccagttcccaggatag

SEQ ID NO: 196397 - DNA, 1989 bp, synthetic construct
  misc_feature 1..1989: note = Description of Artificial Sequence: Synthetic coding sequence
  source 1..1989: mol_type = other DNA
atggtggtgagcgaggtggacatcgccaaggccgaccccgccgccgctagtcatccgttgcttctgaatggtgatgccaccgtcgcccagaaaaatcccggtagcgtagccgagaacaacctctgctcacagtatgaggagaaagtacggccatgcatcgacctgatcgactccctgcgcgcactgggagtggaacaggatcttgccctcccagcgatcgccgtcatcggggaccagagttctggaaaaagttccgtattggaggccctcagcggggtcgcacttcctcgtggcagtggtattgtgacacggtgtccactcgtgctcaagttgaaaaaacttgtcaatgaggacaaatggcgtggcaaagtctcttaccaggactacgaaattgaaatatcagacgcaagcgaagtcgagaaagagataaacaaagcccaaaacgccattgccggcgagggcatgggtattagccatgaactgattactctggagatatcctctagagacgtacccgatctcaccctgatcgacctgccagggatcacaagagtggccgtaggaaaccagccggcagacattgggtataaaatcaaaacgctcatcaagaaatatatccagcggcaggagacaatatctctcgtggtagttccctccaatgttgacattgctactacagaagctctctcgatggcacaggaggttgatcccgagggcgaccgcacaatcgggattcttacgaagccggacttagtcgataagggcactgaagacaaagtggtcgacgtcgtgaggaatctggttttccacctcaaaaagggctatatgattgtgaagtgtaggggacagcaggagattcaagatcagttaagcttgtcagaggccctgcagcgcgagaagatcttttttgagaaccacccttattttcgggatcttctcgaagagggcaaggccaccgtcccgtgcttagccgaaaaactaacatcggaactcatcacccatatctgtaaatccctgccactgctcgagaatcagatcaaggagacccaccagaggattaccgaggaactgcagaaatacggagtcgacatccctgaggacgaaaacgagaaaatgtttttcctcatcgacaaggtgaatgccttcaatcaggacatcaccgctctgatgcagggcgaggaaaccgttggggaggaggacatacgcctgtttactaggcttagacacgagtttcataaatggagcacgataatcgagaataatttccaagagggccacaaaatcctgtcccggaaaatacagaagttcgagaatcagtatcggggaagggaactccctggcttcgttaattatcggaccttcgagacaatcgttaagcagcagataaaggccttagaagaaccagctgttgacatgctgcacaccgtcaccgatatggtgaggcttgccttcaccgacgtatctattaaaaacttcgaagagttcttcaacctgcatcgaacagccaaatctaaaatcgaggatataagagctgagcaggaacgtgaaggtgaaaaactgatcagactgcattttcaaatggaacagattgtgtactgtcaggaccaggtgtataggggggcactccaaaaggtaagagaaaaagaactagaagaggagaaaaagaagaagagctgggactttggtgcttttcaatcatctagtgccacagacagcagtatggaagagatattccagcacctgatggcgtaccaccaggaagcttctaaacggatttccagtcatatccccctcattatacagttctttatgctgcagacctacgggcaacaactgcaaaaggctatgctacaattgttacaagacaaagacacttactcttggctactcaaagagaggagcgacacttccgacaagagaaaattcttaaaggaaaggctcgcccggctgacccaggcccgcaggcggctggcccagttccccgggtag

SEQ ID NO: 196398 - DNA, 207 bp, synthetic construct
  misc_feature 1..207: note = Description of Artificial Sequence: Synthetic coding sequence
  source 1..207: mol_type = other DNA
atggtggtgagcgaggtggacatcgccaaggccgaccccgccgccgctagtcaccccctgctgttgaatggcgacgccacggtcgcccagaaaaaccccggatctgtggcagagaacaatctttgcagccagtatgaagaaaaagtgagaccttgtatcgatttgatagattccctgcgcgcattgggggtggaacaggacttatag

SEQ ID NO: 196399 - DNA, 606 bp, synthetic construct
  misc_feature 1..606: note = Description of Artificial Sequence: Synthetic coding sequence
  source 1..606: mol_type = other DNA
atggtggtgagcgaggtggacatcgccaaggccgaccccgccgccgcatcccatcctttgttgctgaatggagacgccacagtggctcaaaaaaatccgggctccgtagctgaaaacaatttatgttctcagtacgaggaaaaggtgcgcccatgtattgatctgattgattctttgcgtgcattgggcgtggaacaggacttagccctaccagcgatcgctgttattggagaccaaagctcgggtaagtcaagcgttctggaggccctgtccggagtagcactcccaagggggtcaggcattgtgacccggtgtccccttgttctgaaacttaagaaacttgtcaacgaagacaagtggaggggtaaagtctcttaccaggactacgaaatcgagatatcagacgcttccgaagtggaaaaggagataaacaaggcgcagaacgctattgcgggggagggcatgggtatctcccacgaactgattacccttgagatcagtagtagggatgtacccgacttaactctcatcgatttgcccggcatcacgcgcgtggctgtggggaatcagcctgctgacattggatataagatcaagactctctag

SEQ ID NO: 196400 - DNA, 81 bp, synthetic construct
  misc_feature 1..81: note = Description of Artificial Sequence: Synthetic coding sequence
  source 1..81: mol_type = other DNA
atggtggtgagcgaggtggacatcgccaaggccgaccccgccgccgctagccacccattgttgctaaatggcgatgcctag

SEQ ID NO: 196401 - DNA, 594 bp, synthetic construct
  misc_feature 1..594: note = Description of Artificial Sequence: Synthetic coding sequence
  source 1..594: mol_type = other DNA
atggtggtgagcgaggtggacatcgccaaggccgaccccgccgccgcttcacatcctctcttgctcaatggggacgccacggtggctcagaagaatcctggtagtgtcgcagaaaataatctgtgctcgcagtacgaagaaaaggtgaggccatgcattgacctgattgactccttgcgggccctgggcgtggaacaggatttggctttacctgcgatcgcggtaatcggggatcagtcgtctgggaaatcctcggtcctcgaagcgctgagcggcgtggccctgccgcgtgggtcagggatagtgactaggtgccctctcgtgctgaaattaaagaaactggtcaatgaggataagtggaggggaaaagtgagctatcaggattatgagatcgagatttctgatgcaagcgaggtcgaaaaggagataaataaggctcagaacgcaatcgccggagagggtatggggattagccacgagttgatcaccttagaaatttccagccgtgatgtgccggacctgactcttatcgacctgcccggcataacgcgtgtggctgtagggaaccaacctgcggatatcggttacaaatag

SEQ ID NO: 196402 - DNA, 108 bp, synthetic construct
  misc_feature 1..108: note = Description of Artificial Sequence: Synthetic coding sequence
  source 1..108: mol_type = other DNA
atggtggtgagcgaggtggacatcgccaaggccgaccccgccgccgcctcgcacccacttctgcttaacggggatgcaactgtggcccaaaagaaccccggttcctag

SEQ ID NO: 196403 - DNA, 234 bp, synthetic construct
  misc_feature 1..234: note = Description of Artificial Sequence: Synthetic coding sequence
  source 1..234: mol_type = other DNA
atggtggtgagcgaggtggacatcgccaaggccgaccccgccgccgccagccacccgctgctgctgaacggggacgccaccgtggcacaaaagaatccagggtctgtggccgaaaacaatctttgctcacagtatgaggaaaaggtgagaccctgtatcgacctgattgattctctgagagccctgggagtggagcaagacctggctctacctgcaatcgcagtgatcggctag

SEQ ID NO: 196404 - DNA, 1989 bp, synthetic construct
  misc_feature 1..1989: note = Description of Artificial Sequence: Synthetic coding sequence
  source 1..1989: mol_type = other DNA
atggtggtgagcgaggtggacatcgccaaggccgaccccgccgccgcttcccacccgctcttgctgaatggcgacgctactgtggcacaaaagaacccgggcagcgtggctgagaacaatctgtgttcccagtacgaagaaaaagtgaggccctgtatagacttgattgacagtctgagagcgcttggcgtcgagcaagatctcgccctccccgccattgctgttattggggaccagtcaagtgggaaatcttctgtgctcgaagcgctttcgggggtggcccttccacgcggaagcgggatcgtgactcgctgccccctagtgttgaagctaaagaagttagttaacgaagataaatggagagggaaagtttcttaccaggactatgagatcgagatcagcgacgcatctgaggtggagaaggaaattaacaaagctcagaacgctatcgctggcgaagggatgggaatcagccacgaacttatcaccctcgagatctcgtcccgagacgtcccagacttaaccctcatcgatctgccagggataacacgggtcgccgtgggcaaccaacccgctgacattggctacaagataaaaaccctcattaaaaaatacattcagagacaggagactataagtcttgtggtggtgcccagcaatgtagatatcgcaacgacggaggctctgtctatggctcaggaggtcgatcccgagggcgataggactattggaatacttacgaagccggaccttgttgacaaaggtaccgaagataaggttgttgatgttgttcgaaacctggtttttcacttgaaaaagggctacatgatcgtcaagtgtcgggggcaacaggaaatccaggatcaactctctctctctgaagcactgcagagggagaaaatttttttcgagaaccacccatacttccgggatttgcttgaggaagggaaggctaccgtgccgtgtctggcagagaagctgactagcgaacttatcacccacatttgtaaaagcctcccgcttctggaaaatcagattaaggagacgcatcaaagaatcaccgaagagctgcagaaatacggtgtggacattcccgaggatgagaatgaaaaaatgttcttcctaatcgacaaggtaaacgcctttaatcaagatataaccgccctgatgcagggcgaggaaactgtgggcgaagaagacattcggctgtttacaagactgagacacgagttccataagtggtcaactataattgaaaataactttcaggagggtcataagattttaagtcggaaaatccagaagttcgagaaccagtaccgcggacgggaactgcctggcttcgtgaactatagaaccttcgaaaccattgtgaagcaacaaattaaagccctcgaagagccagcagtagatatgctccacacagtcacagacatggtgcgattggccttcaccgacgtctctattaaaaactttgaggagttttttaacctgcaccgcactgctaagagtaagatagaggatatccgagccgaacaggaacgcgagggagaaaagctcattaggctgcacttccagatggaacagattgtgtactgccaggaccaggtgtatcgcggagctctgcaaaaagtcagggagaaagaactggaggaagaaaaaaagaagaagtcctgggacttcggcgcattccagtcgtcctccgcgacggacagcagtatggaggagatatttcagcaccttatggcttatcatcaggaggcaagcaagcggatatcaagccacataccactaattatacaatttttcatgctccagacatacggccagcagttacaaaaggctatgttgcagctattgcaggataaggatacctactcatggctactgaaagaacgaagtgatacttcagacaaacgtaaatttctgaaagagcggctggccaggcttacgcaggcccggcgacgtctggctcagttccccggctag

SEQ ID NO: 196405 - DNA, 2148 bp, synthetic construct
  misc_feature 1..2148: note = Description of Artificial Sequence: Synthetic coding sequence
  source 1..2148: mol_type = other DNA
atgagcaaggcccacaagccctggccctaccggcggcggagccagttcagctcccggaagtacctcaagaaagagatgaatagttttcagcagcaaccccctcctttcggcacagtaccgccccaaatgatgtttccaccaaactggcagggtgccgaaaaagatgcagccttcctggcaaaagattttaattttctgactttaaacaaccagcctcccccagggaaccgtagccaaccaagggcgatgggtcccgaaaacaacttatactctcagtacgagcaaaaggtccgtccttgcattgaccttattgattcactcagggcgctgggggtggagcaggatcttgccctgccagctatcgccgtgataggcgatcaaagcagtgggaagtcttccgttttggaagctctgagcggcgtcgcgttgccccgggggtctggaatcgtgacgcgttgtccgttggtcttgaagcttaaaaagcagccgtgtgaggcctgggccggacggatttcttaccgtaacacagagctagaactgcaggaccctggacaagtggaaaaagaaattcataaggcccagaacgtcatggccggcaacggacgtggaatcagtcacgagttaatcagccttgagatcacctcacccgaggttccagatctgacgatcattgacctccccgggattacacgcgttgcagttgacaatcagccacgtgacatcgggctacaaatcaaggccctcattaaaaaatacattcagagacagcagacaattaatttggtcgttgtaccttgtaacgtggatatagcaaccacggaggcattatctatggcacatgaggtggatcccgaaggagaccggaccatcggaatccttacgaaacccgatcttatggacagaggaacagagaagagcgtgatgaatgtggtaagaaacctgacatacccattgaagaaagggtacatgattgtgaagtgccggggccagcaggaaatcactaatcgtctgtccctcgcagaggccactaagaaggagattacatttttccagacacatccgtattttcgagtgctcctagaggagggctccgcaaccgtcccaagactggcagagcgactgacaacggagctgatcatgcacattcagaagtccctccccctattagaggggcagatcagggagtcccatcagaaggctactgaggagttgcgaagatgcggcgcggatatcccttcacaggaagcagataagatgttctttcttatcgaaaagatcaagatgttcaaccaggatatcgaaaaactggtggagggggaagaggtagtgcgggagaatgagaccagactttacaacaagatccgcgaagattttaaaaactgggtaggaatcttggccaccaatactcagaaagtcaagaatattatacacgaggaggtcgaaaagtatgaaaaacagtatcgagggaaagaactattggggttcgtcaattacaagacattcgaaatcatcgtgcaccaatatatccagcaactggtggaacctgcactgtccatgctgcagaaggctatggagattattcagcaggcatttatcaacgtcgccaagaagcatttcggtgagttttttaacctgaaccagaccgttcagagcacaatcgaagatatcaaagtgaagcataccgccaaagcggaaaatatgattcagttgcaatttagaatggaacaaatggtgttttgccaagatcaaatctactctgttgttctgaagaaggtccgggaagaaatctttaaccctttggggactccctctcagaatatgaagcttaatagccacttcccctctaacgaatctagcgtgagttctttcactgagattggcatacacctgaacgcttacttccttgaaacttctaaaaggctggcgaaccagatcccctttataatacaatactttatgttgcgcgagaatggtgatagcttacagaaggccatgatgcagatactccaggaaaagaacaggtactcatggctcctacaggagcagtccgaaaccgcaaccaagaggaggatactaaaggaacggatctacaggctgacacaggcacgacatgccctgtgtcagttttcttccaaggaaatccattag

SEQ ID NO: 196406 - DNA, 45 bp, synthetic construct
  misc_feature 1..45: note = Description of Artificial Sequence: Synthetic coding sequence
  source 1..45: mol_type = other DNA
atgagcaaggcccacaagccctggccctaccggcggcggagctag

SEQ ID NO: 196407 - DNA, 405 bp, synthetic construct
  misc_feature 1..405: note = Description of Artificial Sequence: Synthetic coding sequence
  source 1..405: mol_type = other DNA
atgagcaaggcccacaagccctggccctaccggcggcggagccagtttagctcacgtaaatatctgaagaaagagatgaacagttttcagcaacagccgccaccgtttggcacagtgcctccccagatgatgttccccccaaattggcaaggcgcggaaaaggacgccgccttcttagccaaggatttcaatttcctgacacttaataatcagcccccccccggcaatcgatcacagcctcgcgccatgggaccagagaataacctgtactcccaatacgaacaaaaagtacgcccctgtattgatctcattgatagcttacgcgccttgggagtcgagcaggatttggcacttcccgccatcgctgtgataggagaccagtccagcgggaagagcagtgtgtag

SEQ ID NO: 196408 - DNA, 378 bp, synthetic construct
  misc_feature 1..378: note = Description of Artificial Sequence: Synthetic coding sequence
  source 1..378: mol_type = other DNA
atgagcaaggcccacaagccctggccctaccggcggcggagccagttttctagtagaaaatatctgaaaaaggagatgaatagcttccagcaacagcccccaccgtttggtaccgtgcccccacagatgatgtttccacctaactggcagggggccgagaaggacgccgcatttctcgctaaagatttcaactttctgaccctgaacaatcagccacctccggggaatagatcccaaccacgtgcaatgggtccagagaacaatctctattcacaatatgagcagaaagtcaggccgtgcatcgatctcattgattcactgcgggcactcggtgtggagcaggacctcgccttgccagcaattgcagtgattggatag

SEQ ID NO: 196409 - DNA, 390 bp, synthetic construct
  misc_feature 1..390: note = Description of Artificial Sequence: Synthetic coding sequence
  source 1..390: mol_type = other DNA
atgagcaaggcccacaagccctggccctaccggcggcggagccagtttagcagtagaaagtacctgaaaaaagagatgaactctttccagcagcagccacctccatttggcaccgtccctcctcagatgatgtttcctccgaactggcaaggagcagaaaaagatgcagcatttctcgcgaaagatttcaattttctgacccttaacaaccaaccccctccagggaatagaagccaacccagggcaatgggcccagagaacaacctgtacagccagtacgaacaaaaggttaggccatgtattgatctcattgactccttgagggctctgggagtggagcaagatttggctttaccagcgatcgctgtgatcggcgatcagagtagctag

SEQ ID NO: 196410 - DNA, 606 bp, synthetic construct
  misc_feature 1..606: note = Description of Artificial Sequence: Synthetic coding sequence
  source 1..606: mol_type = other DNA
atgagcaaggcccacaagccctggccctaccggcggcggagccagttctctagtagaaagtacctcaagaaggagatgaattcattccagcaacagccacctccctttgggaccgttccaccacaaatgatgtttccaccaaattggcagggcgccgagaaggacgctgcttttctggcgaaggactttaactttctgactctcaacaaccagccaccgccaggcaataggtctcagccccgcgcaatgggcccagaaaataatctttattctcaatacgagcagaaggtgcgcccttgtatcgacctcatcgactctcttagagctctgggagtggaacaagatctcgcactgccggccatcgccgtgatcggggaccaatccagtggtaagagcagcgtcctcgaagccttatctggagttgccctgcctagaggatcggcgcagaacgttatggccggcaatggcagaggcattagccacgagctgatctctctcgagatcacttctcctgaggtccctgatcttaccatcatcgacctaccaggtatcacccgggttgccgtcgataatcagcctcgtgatattggcctgcaggtgagttag

SEQ ID NO: 196411 - DNA, 663 bp, synthetic construct
  misc_feature 1..663: note = Description of Artificial Sequence: Synthetic coding sequence
  source 1..663: mol_type = other DNA
atgaacatccggaacgcccggcccgaggacctgatgaacatgcagcattgtaatctgctgtgtctgcccgagaactatcagatgaaatactatttttatcacgggttaagctggccacagctgtcttatattgctgaagatgagaacggcaagatagtggggtatgtactggcaaagatggaggaggaccctgacgacgtccctcacggacacatcacatctttggcagttaagagatcccataggagactgggcctggcccagaaactcatggaccaagcttcccgagccatgattgagaatttcaatgccaaatacgtctcgctgcacgttcggaaaaggatttccgaagtggagccaaaatattacgctgatggggaggatgcttatgcaatgaaacgggacctgacccaaatggccgacgagctgcgccgccatctggaactaaaagaaaaggggcggcatgtggtgctgggcgcaatcgagaataaggtggagtcaaaagggaacagccctccttcaagtggagaggcttgtagggaggaaaaaggcctggctgctgaggatagcgggggggacagcaaggaccttagtgaggtgagcgagaccacagaaagcacggatgtgaaggacagctccgaagcttccgacagcgcctcatag

SEQ ID NO: 196412 - DNA, 708 bp, synthetic construct
  misc_feature 1..708: note = Description of Artificial Sequence: Synthetic coding sequence
  source 1..708: mol_type = other DNA
atgaacatccggaacgcccggcccgaggacctgatgaacatgcagcactgcaacctgctgtgcctgcctgagaattaccagatgaaatattacttttaccacggcctcagctggccacagcttagctatatcgccgaggatgaaaacggaaaaattgtcggctacgtattagctaagatggaggaggatcctgacgacgtgccacatggccacataacgagcctggccgtaaagcgcagccatagaaggctcggactggcccaaaaactgatggaccaggccagtcgcgccatgatcgagaatttcaacgccaagtatgtttctcttcacgtgcgcaagtctaaccgcgctgccttgcatctatactctaatacactcaacttccagataagcgaagtggaaccgaagtactacgccgacggagaggacgcatatgcgatgaagagggaccttactcaaatggccgatgagctgagaaggcacctagagctgaaggagaaaggccgtcatgtcgtgcttggagccatcgagaacaaggttgagagcaaaggcaacagtcctccaagctccggagaggcatgtcgggaggaaaaagggttggccgccgaggactccggaggggatagtaaggacctgtctgaggtctccgaaaccaccgagagcacagacgtaaaagattcgtctgaggcctctgactctgccagctag

SEQ ID NO: 196413 - DNA, 396 bp, synthetic construct
  misc_feature 1..396: note = Description of Artificial Sequence: Synthetic coding sequence
  source 1..396: mol_type = other DNA
atgaacatccggaacgcccggcccgaggacctgatgaacatgcagcactgcaacttgctctgcctccccgaaaactatcaaatgaagtactatttctaccacggactctcttggccacagctgagctatattgccgaagatgagaatggtaagatcgttggctatgtactggcaaaaatggaagaagacccggacgacgtcccccacgggcacatcacttccctggcagtgaaacgcagccaccggcgcttgggattggcccagaagctgatggaccaggcaagccgcgccatgattgagaattttaacgctaaatatgtcagtctgcacgtgagaaagaggagcgtaaaatggagccctaacaccatgcagatggggagaacgccaatgccgtag

SEQ ID NO: 196414 - DNA, 534 bp, synthetic construct
  misc_feature 1..534: note = Description of Artificial Sequence: Synthetic coding sequence
  source 1..534: mol_type = other DNA
atgatcgtggccgagatcaagaaccggaccaagatccacaaggaggacggggacatcctcgctagtaacttctctgtggacacgcaggttgcttacatcctctcattgggggttgtgaaagaatttcgaaaacatggcataggtagcctgctactggaatccctgaaggatcacatatctacaactgctcaagaccattgtaaggcaatatatctgcatgtgttgaccaccaacaataccgccataaacttttacgagaaccgcgatttcaagcagcaccactacttgccatattactattccatccggggcgtgctcaaggacggctttacgtatgtgttgtacataaatggaggtcaccccccgtggaccatcctagattacattcagcaccttggcagtgccctcgcctctctcagcccttgtagcatcccccaccgggtgtaccgtcaggcacactctctgctttgcagcttcctaccctggtcaggcatttctagcaaatctggtatcgaatacagcagaactatgtag

SEQ ID NO: 196415 - DNA, 729 bp, synthetic construct
  misc_feature 1..729: note = Description of Artificial Sequence: Synthetic coding sequence
  source 1..729: mol_type = other DNA
atgaccgaggtggtgcccagcagcgccctgagcgaggtgagcctgagattactctgccatgacgatatagatacagttaaacacctgtgtggtgactggttccccattgagtatcccgattcttggtacagagacattacaagcaacaaaaagtttttttccttagctgcgacctatagaggcgccatagtcggaatgatcgttgcagagataaagaatagaaccaaaatccataaagaggatggagacatacttgcatcgaacttcagtgtcgacacgcaggtggcctacatcctctctctgggtgtggtgaaagaattccgtaaacacggaatcggaagtctgttgttggagagcctgaaagaccacattagcaccactgctcaggatcattgcaaggctatctacctccacgtgctgactaccaataacacagccattaatttctacgagaatcgtgactttaagcagcaccattatcttccctactattatagcatccggggtgtccttaaagacggcttcacctacgtgctctacatcaatggggggcatccaccgtggacaattctggactacatacaacacctgggatccgccctggcatccctctccccatgtagcatcccccacagggtctacaggcaggcccactcactgctttgtagcttcctgccatggtccggcatttcatccaagtctgggatcgagtattcgcggacaatgtag

SEQ ID NO: 196416 - DNA, 729 bp, synthetic construct
  misc_feature 1..729: note = Description of Artificial Sequence: Synthetic coding sequence
  source 1..729: mol_type = other DNA
atgaccgaggtggtgcccagcagcgccctgagcgaggtgagcctgaggctactgtgccatgatgacattgacacagtgaaacatctgtgcggggattggtttccaatcgaatatccggacagctggtatcgagatatcacgtccaataaaaaattctttagcttggccgctacataccgaggagccatcgtggggatgatcgtggcagagatcaagaatcgcacaaagatccacaaggaagacggtgacatactagctagtaacttttccgtggatactcaggtcgcatatatcctctctttgggcgttgtgaaggagttccggaaacatggaattggaagtctgctcttagagtccctaaaagatcacatctctactacagcacaagatcactgtaaggccatttatcttcatgttttgaccacaaataatacggccattaatttttacgagaatcgggattttaaacagcaccattacctgccctactactactccattcgtggggtcttgaaggacggatttacctatgtgctttacatcaatggcgggcatcctccttggacaattctggattacattcaacaccttggcagtgccctagcatctctgtccccttgctcaataccacacagagtgtacagacaagctcattctcttttgtgctccttcctgccgtggagtggaatctcaagtaagtctggcatcgaatattcacgcactatgtag

SEQ ID NO: 196417 - DNA, 573 bp, synthetic construct
  misc_feature 1..573: note = Description of Artificial Sequence: Synthetic coding sequence
  source 1..573: mol_type = other DNA
atgaccgaggtggtgcccagcagcgccctgagcgaggtgagcctgagattgttgtgccacgatgatattgatacagtcaaacacctgtgtggagattggtttccgattgagtacccagatagctggtatagggatataacgtccaataagaaatttttttccctagccgccacatatcgcggcgccatagtcgggatgatcgtcgcagagatcaaaaatagaactaaaatccataaggaggacggcgacattcttgcaagtaacttcagcgttgacacccaagtcgcctacatcttaagccttggggtcgtcaaggaattccggaagcacggcattgagccccatggactgcaccctgcccccggcttatgtacttcccaacctgaaccacttttgcattcagctcaatccttaccccctggccctcagcctgctctccagctgcccgctatggttgggcacctgttccaagaatggcatagggtccagccagatcacgtgatgtcagccggtcagccacctcctggaccaactctgagaccacccgctgaacccgcattcctctccatttag

SEQ ID NO: 196418 - DNA, 750 bp, synthetic construct
  misc_feature 1..750: note = Description of Artificial Sequence: Synthetic coding sequence
  source 1..750: mol_type = other DNA
atgttcccccggcggcggaccgagcggcggctgggcgacaccggcactagaaaaaaaatcgcctaccgaaaagcagttcccggcggccgcaagtgcggagcctccctcagctgggaaaaatcaagtagagagtacccagattcttggtaccgggacatcaccagtaacaaaaaatttttctcactagcagccacctatcgcggcgctattgtgggtatgatcgtggccgaaataaaaaacaggacaaagatacacaaggaggacggcgacattttagcctccaacttcagcgtcgatacccaggtcgcctatatcctcagtctcggcgtggtcaaggagtttcggaagcatggcatagggagtctcctgctcgaatctttgaaggaccacatcagcacaaccgcacaggaccactgtaaggctatctacctacacgtcctgacaacaaacaatacagcgattaacttttacgagaatagagattttaagcagcaccattatctaccatactattacagcattcggggggtgctaaaagatggatttacctacgtgctgtacattaatggtgggcaccccccctggactatcctggattatattcaacatttgggctctgctctcgcaagcctgtctccatgttccataccccatcgtgtgtatcgccaggctcactctttactttgctcatttctgccctggtctggcatctcctctaagtctgggatcgaatattcgaggacaatgtag

SEQ ID NO: 196419 - DNA, 492 bp, synthetic construct
  misc_feature 1..492: note = Description of Artificial Sequence: Synthetic coding sequence
  source 1..492: mol_type = other DNA
atggccgtgatcctgggcatcttcggcaccgtgcagtaccggagcagatatttaatcctgtatgctgcatggctcgtgctttgggttggctggaatgctttcatcatttgcttctacctggaagtggggcagctgtcccaggatcgagacttcattatgacttttaacacaagtctgcacaggtcctggtggatggaaaacggcccagggtgtctggtaaccccggtgctgaactcccggctggcgcttgaggaccaccatgtgatatcagtaacgggctgcctgctcgactatccctatatagaggccctttcctccgcactgcagatattccttgctctgtttgggtttgtctttgcctgctacgtgagcaaagttttcttggaagaggaggacagttttgactttattggtggtttcgatagttacggctaccaggccccccagaagacctcccacctgcagctccagccgttatatacatcaggatag

SEQ ID NO: 196420 - DNA, 624 bp, synthetic construct
  misc_feature 1..624: note = Description of Artificial Sequence: Synthetic coding sequence
  source 1..624: mol_type = other DNA
atgggcaagtgcagcggccggtgcaccctggtggccttctgctgcctgcagctcgttgctgcattggaaaggcagattttcgattttcttgggtaccaatgggccccaatactcgctaactttctgcacatcatggccgtaatcctcggaatcttcgggactgttcaataccgctcccgatatctcatactgtacgctgcttggctggtgctgtgggtgggttggaacgcctttatcatatgcttctacctcgaagttgggcaactgtctcaggatcgggatttcatcatgacattcaatacttccctacaccgatcctggtggatggagaacggacctggttgtctggttactcccgttctaaactctcggctcgcgctcgaagaccatcacgtgatatctgtgactggatgtttattggactatccttacattgaagctttatccagtgccctacagatcttcctcgccttgtttggtttcgtgtttgcttgttacgtgtcaaaggtttttctggaagaagaggactcattcgattttattggtggcttcgacagttacggttaccaggctccccagaaaacaagccatctgcagctccaaccgctttacacgtctgggtag

SEQ ID NO: 196421 - DNA, 411 bp, synthetic construct
  misc_feature 1..411: note = Description of Artificial Sequence: Synthetic coding sequence
  source 1..411: mol_type = other DNA
atggccgtgatcctgggcatcttcggcaccgtgcagtaccggagcagatacctaattctggacagggacttcatcatgacattcaatacctccctccacagatcttggtggatggagaatggccccggctgcttggtgacgcctgtccttaatagtagacttgctctggaagatcaccatgttatcagcgttaccggctgtctcctggactacccatacatagaggccctgtctagtgccctccagatcttcctggctttattcggctttgtatttgcgtgttatgtgtctaaggtattccttgaggaggaggacagttttgacttcattggtgggtttgatagttatgggtatcaagcacctcagaagaccagccacttacagctgcagccactgtacacgagcggctag

SEQ ID NO: 196422 - DNA, 567 bp, synthetic construct
  misc_feature 1..567: note = Description of Artificial Sequence: Synthetic coding sequence
  source 1..567: mol_type = other DNA
atgggctactgcagcggccggtgcaccctgatcttcatctgcggcatgcaattggtgtgtgtcctcgagagacagatcttcgattttctaggttaccagtgggcccccatcctcgccaatttcgtgcatatcatcattgtcatcctggggctgtttggcactatccaatatcgcccgaggtatatcaccggctatgccgtgtggctggtgctgtgggttacctggaacgtatttgtgatttgcttctacctggaagccggagatctgtccaaggaaaccgatttgatcctcaccttcaacatctctatgcacaggagttggtggatggaaaatggccctggatgtactgtcacaagtgtgacacctgcccccgactgggcaccagaggaccaccggtacatcaccgtgtcaggttgcctcttagagtaccagtacatagaagtggcccattcttcgctgcagatcgtgttagccgtgtctgttggttcacagccacttctgcttgtccctctgggtctgttctacttctgcgctaatagcgtccacactaatggaatctgcgggtag

SEQ ID NO: 196423 - DNA, 627 bp, synthetic construct
  misc_feature 1..627: note = Description of Artificial Sequence: Synthetic coding sequence
  source 1..627: mol_type = other DNA
atgggctactgcagcggccggtgcaccctgatcttcatctgcggcatgcaattagtatgtgtgctcgaacgacagattttcgacttcctcggatatcagtgggctccaatccttgctaacttcgttcacattatcattgtgattttagggctgtttgggaccattcagtaccggcctaggtatatcacaggctatgcggtatggctagtcctgtgggtaacttggaatgtctttgtgatctgcttctacctcgaagcaggggacctgagtaaagagactgatctgatcctaaccttcaatatttctatgcatcgctcgtggtggatggagaatgggccaggatgtactgtcacgagtgtcacccctgcaccggactgggcccccgaggaccacagatatatcactgtgagcgggtgcctgcttgagtatcagtacatcgaagtcgctcactctagcctccagattgtgcttgccttggccggattcatttacgcatgttatgttgtaaagtgcattaccgaagaggaggatagcttcgactttatcgggggatttgattcgtacggctatcaggggccacaaaaaacctcacatcttcagctgcagcccatgtacatgagcaaatag

SEQ ID NO: 196424 - DNA, 624 bp, synthetic construct
  misc_feature 1..624: note = Description of Artificial Sequence: Synthetic coding sequence
  source 1..624: mol_type = other DNA
atgggcatcatccggttcctgctgctgtactgccccaccaacatccttaccgtgtgcgtactggagagacagatctttgattttctgggatatcagtgggctcctattcttgctaactttgtgcatatcatcatcgtgatcctaggactattcggtaccattcaataccggccaagatacatcaccgggtatgcagtgtggctggtgctgtgggtgacctggaacgtctttgtgatatgtttctatttagaggcaggagatctttcaaaggagactgacctgattctgacgttcaacatcagcatgcaccgaagctggtggatggaaaacggccccgggtgcaccgtaacaagcgtcacacctgctccagattgggcccccgaagaccaccgctacattaccgtgtccgggtgcctgttagagtatcaatacatcgaagtcgcccacagctctcttcaaatcgtcctggccctggctggcttcatctatgcctgctatgtggttaagtgcatcacagaggaggaggattcttttgattttattgggggcttcgacagttatgggtaccaaggaccgcagaaaacaagccatttacagctacagcccatgtatatgtcaaagtag

SEQ ID NO: 196425 - DNA, 576 bp, synthetic construct
  misc_feature 1..576: note = Description of Artificial Sequence: Synthetic coding sequence
  source 1..576: mol_type = other DNA
atgaagatcgtgtgcgtgctggagcggcagatcttcgacttcctgggttatcaatgggcccccatcctggcgaacttcgtgcatataattatagtgatcctggggctcttcggcaccatccagtatcgacctcgctatatcactggttacgccgtttggcttgtgctctgggttacatggaacgtttttgtcatctgcttctacctagaggctggcgacctcagcaaggaaactgacttgatcctaacattcaacattagtatgcatcggagttggtggatggagaacgggcccgggtgtactgtaacttctgtcactcccgcacctgactgggcacccgaagaccatcggtacatcactgttagcggctgtctgttagagtaccagtacatcgaggtggctcatagcagcctgcaaatcgtgctggccctggctggctttatctatgcctgttacgtggtgaaatgcattacagaggaagaagactcctttgactttatcgggggctttgacagctatggttatcaaggcccacagaaaacctctcacttacaactccagcccatgtacatgtag

SEQ ID NO: 196426 - DNA, 420 bp, synthetic construct
  misc_feature 1..420: note = Description of Artificial Sequence: Synthetic coding sequence
  source 1..420: mol_type = other DNA
atgggctactgcagcggccggtgcaccctgatcttcatctgcggcatgcagctggtctgtgtcctcgagaggcagatcttcgacttcctgggctaccagtgggcccccatcctggccaactttgtccatatcatcatcgtgatacttggtctctttggaaccattcagtatcggccccgctacataaccggctacgccgtgtggctagtgctctgggttacctggaatgttttcgtaatctgcttctacttggaagctggtgacctgtccaaactcgcaggctttatctacgcttgctacgtggtgaaatgtattactgaggaagaagatagctttgacttcattggcggatttgattcatacggatatcaaggcccccaaaagactagccatctgcaactgcagccgatgtatatgtag

SEQ ID NO: 196427 - DNA, 594 bp, synthetic construct
  misc_feature 1..594: note = Description of Artificial Sequence: Synthetic coding sequence
  source 1..594: mol_type = other DNA
atgggctgctgcaccggccggtgcagcctgatctgcctgtgcgccctgcagttggtttctgctctcgaacggcagattttcgactttcttggcttccaatgggccccaatcctggggaacttcctccatatcattgtagtgattctgggcctcttcggcacaatacagtacaggcccagatacataatggtctacaccgtttggaccgccttgtgggtgacctggaacgttttcatcatctgtttttatcttgaggttgggggcctgtccaaagataccgatttaatgaccttcaacatttccgtgcacagatcttggtggcgggaacacggaccaggctgtgttagaagagtgctgcccccctccgcacatgggatgatggacgattatacttacgtgtctgtgacgggatgtattgttgatttccagtacttagaggtgatccactctgcagtgcagatcctattatcactggtgggtttcgtgtatgcatgttatgtgatatccataagtatggaggaagaggacacatactcgtgtgacttgcaggtctgtaaacacctcttcattcagatgctgcagataatagagtag

SEQ ID NO: 196428 - DNA, 594 bp, synthetic construct
  misc_feature 1..594: note = Description of Artificial Sequence: Synthetic coding sequence
  source 1..594: mol_type = other DNA
atgggctgctgcaccggccggtgcagcctgatctgcctgtgcgccctgcaacttgtctccgctctggaacgccagatttttgatttcctgggctttcaatgggcacctattctcgggaatttcttacatattatcgtcgttatcctgggcctcttcggaacaatccagtacaggcctcggtatattatggtgtatacggtttggaccgccctttgggtgacatggaacgtttttatcatttgcttttaccttgaggtggggggcctcagcaaagacactgacttaatgaccttcaatattagcgtgcacaggtcttggtggcgggagcatgggcccggttgcgttaggcgagtgctcccacctagcgcacatggcatgatggatgattatacctacgtgtcagtgactggttgcatcgtggatttccaatacttggaggtgatccatagcgctgtacagatccttctgagtctcgtgggctttgtatatgcttgttacgtgatttccatttccatggaggaagaggacacatactcttgtgatcttcaggtatgtaaacacttgtttattcagatgctgcaaattatcgagtag

SEQ ID NO: 196429 - DNA, 486 bp, synthetic construct
  misc_feature 1..486: note = Description of Artificial Sequence: Synthetic coding sequence
  source 1..486: mol_type = other DNA
atgggctgctgcaccggccggtgcagcctgatctgcctgtgcgccctgcagctggtctcatgggtgttcgatcgtcagatcttcttactttcctttcagtgggcccctatattaggaaattttctgcacattatcgtggttatcctggggcttttcgggaccattcagtatagaccacgttacataatggtgtataccgtgtggaccgctctctgggtaacttggaatgtgtttattatctgtttctacctggaggttgggggactgtctaaggatacagatctcatgacgttcaacatttccgtgcatcgatcatggtggagagagcacggtccaggctgtgtgcggagagtgctgcccccttctgcacatgggatgatggacgactacacctacgtgtccgtgacaggctgcatagtcgacttccagtacctggaggtgatacattcggctgtccagatcctcttgagcattttcttcctgtag

SEQ ID NO: 196430 - DNA, 627 bp, synthetic construct
  misc_feature 1..627: note = Description of Artificial Sequence: Synthetic coding sequence
  source 1..627: mol_type = other DNA
atgggcagctgcagcggccggtgcgccctggtggtgctgtgcgccttccagctggtggcagccctggaaagacaggtctttgattttctgggatatcaatgggctccgatattagccaactttgtgcacatcatcatagtgatcttgggcctcttcggcaccattcagtacagactcaggtatgttatggtgtatacgctgtgggctgccgtgtgggtaacctggaatgttttcatcatctgcttctatctggaggtggggggcctcctgaaggacagcgagcttctgacgtttagcctttcccgccacaggtcttggtggcgggaaaggtggccgggatgcctgcacgaagaggtcccagcggttggcttgggcgccccacatgggcaggcactggtgagcggagccggatgcgcactcgaaccttcctatgtggaagccctgcactcttgcttacagatcctgattgccctgttgggctttgtctgcgggtgtcaggtggtttccgtcttcactgaggaagaggacagttttgacttcatcggcggttttgaccctttccccctttaccatgtcaacgaaaagcccagcagcctgttgtccaagcaggtttacctgcctgcctag

SEQ ID NO: 196431 - DNA, 267 bp, synthetic construct
  misc_feature 1..267: note = Description of Artificial Sequence: Synthetic coding sequence
  source 1..267: mol_type = other DNA
atggccgagagccggggccggctgtacctgtggatgtgcctggccgccgctctggcttcgttcctcatgggatttatggtcggctggtttatcaaaccactgaaggagacgacaacaagtgtgcgataccatcagtcgatcagatggaagctggttagcgagatgaaagcagagaatattaaatcattcttgcgatcttttacaaagctgccccatctcgctgggacagagcaaaacttcctcttggcaaagaagatccagacctag

SEQ ID NO: 196432 - DNA, 2223 bp, synthetic construct
  misc_feature 1..2223: note = Description of Artificial Sequence: Synthetic coding sequence
  source 1..2223: mol_type = other DNA
atggccgagagccggggccggctgtacctgtggatgtgcctggccgctgctctcgcgtccttcctgatggggtttatggtgggttggtttataaagcccctcaaagagaccactacgagcgtgcgttatcaccagtccataaggtggaagttggtgtccgagatgaaggccgaaaacatcaaatcattccttcgtagtttcaccaaattgcctcacttggccggcaccgaacagaattttctgcttgctaaaaagatccaaacccaatggaaaaaatttggcttggattccgctaagcttgttcactacgatgtccttctatcctatcctaatgagaccaatgccaattatatctcaatcgtggatgagcacgaaaccgagattttcaagacaagctatttagaaccacctcccgatgggtacgagaacgtgactaacatcgtacccccatacaacgctttcagtgctcaaggtatgcccgagggtgatctggtatacgttaactacgctcgcacagaagattttttcaagttggaacgggagatggggattaactgcactggaaaaattgtcattgctcggtatggtaagattttcaggggtaacaaggtgaaaaacgctatgctggccggggccattggaatcattctctactccgaccccgcggattactttgcaccggaggtgcagccctaccccaagggctggaatctgccaggcacggcagcccagagaggaaatgtcttaaacttaaatggagccggagatcctttgacaccagggtatcctgccaaggaatatacgttcagactggacgtagaagaaggcgtgggaattccgaggataccagtgcacccaatcggttataacgatgccgagatcctactccggtatctagggggcattgcacctcctgacaaatcctggaaaggcgctctcaacgtgagctactcaatcggccccggatttacggggagcgactcctttaggaaagtaagaatgcacgtctataatataaataagattacacgtatctacaacgtcgtgggcaccatcagaggctctgtggagccagaccggtacgtgatcctgggtggtcaccgcgacagctgggtgttcggggctatcgatcccacttccggtgtcgccgtcctccaggaaatcgcacgatcctttggcaaacttatgtcgaaaggatggcgacctcgccgtacaatcatcttcgcatcttgggacgcggaagaattcggcctgctcggatccactgagtgggcggaggagaatgtcaagatcctccaagagagaagcattgcctatataaacagtgactcaagcatcgaaggcaattacactctgcgcgtggactgtacaccccttctgtaccagctggtgtataaactcaccaaggaaatacctagccctgacgacggctttgagtccaaatccctctatgaatcctggctggagaaagacccttctcctgagaacaagaacctgcctcgtattaacaagctgggaagcggatcggacttcgaagcttacttccagagactgggcatcgcgtcaggtagagcaaggtacactaaaaacaagaagaccgacaagtactccagctatccagtctatcacaccatctacgagactttcgagctggtggagaagttctacgacccaaccttcaagaagcagctcagtgtcgctcagttgcggggcgccctggtgtacgaactggtggactcaaagatcatacccttcaatatccaggattacgccgaagctctgaaaaattatgcagctagcatctacaacctttcaaagaagcacgaccaacagctgaccgaccacggcgtgtcttttgattcccttttctctgctgttaagaacttctccgaggcagcaagcgattttcataagaggctgatacaggttgatctgaataacccaattgccgtgcgaatgatgaatgatcaactgatgctgcttgagcgagcattcatcgatcccctcgggctgcccggaaaattattttatcgacatattatctttgccccaagctctcacaacaagtacgctggggaatcttttccggggatatacgacgcgatatttgacatcgaaaataaggccaatagtcgcctggcttggaaggaagtgaaaaaacatatatccattgccgcattcaccatccaggccgcagctggcacccttaaagaggtcctgtag

SEQ ID NO: 196433 - DNA, 1635 bp, synthetic construct
  misc_feature 1..1635: note = Description of Artificial Sequence: Synthetic coding sequence
  source 1..1635: mol_type = other DNA
atgcagtggaccaaggtgctgggcctgggcctgggcgccgccgccctgctggggctgggtataatcctgggacactttgcgatcccaaagaaagctaacagcctggcacctcaagacttagacctggaaattctggagactgtcatggggcagctggatgcgcaccgtattagagaaaatctgagggaactgagccgggagccccatctggccagcagtccccgggacgaagacctcgtgcagctcctgttgcaaaggtggaaagacccagaatcaggactggactctgctgaggcatctacttacgaggtgttactgagctttccctcccaggaacagccaaatgttgtagatatcgtcggccccactggtgggatcatccatagttgccacaggacagaggagaacgtaacaggcgaacaggggggtcccgatgtggtccagccttacgcggcgtacgcccccagcgggaccccgcaagggctgctggtttacgcgaatcggggcgccgaagaagacttcaaggagttgcagacacaggggattaagctggagggcacgatagccctgaccagatacggaggcgtgggccgaggagctaaggcagtcaatgctgcaaaacacggggtggccggggtcctcgtgtacaccgacccagcagatattaacgacggattgtcttcacctgatgaaacattcccaaatagctggtacctgccaccatcaggcgtagaacgcggcagctactatgagtattttggggacccactcacaccttacctgcccgcggtgccttcatcattccgggtggatttagcaaatgtcagtggcttccctccaattcccacccaacctattggattccaggatgcccgtgacctgctgtgcaatttaaatggcaccctggcccccgcaacttggcagggagccctcggatgtcattacaggttggggcctggcttccgacccgatggagacttccccgcggacagccaagtgaacgtgagcgtgtataaccgcctagagctaaggaacagctccaatgtgctcggtatcattcggggcgctgtagaacccgaccgttacgtcctctacgggaatcacagagattcatgggtgcatggcgctgtggaccccagcagtgggaccgccgtgctgctggagctcagccgcgttcttggaaccttacttaaaaagggaacttggcgccctaggcgcagcatcgttttcgcatcctggggggccgaggagtttgggctgataggctccacggaatttactgaagagttcttcaacaagctgcaagagcggactgtcgcttatatcaacgtagatatttctgtgtttgctaacgctactctgcgtgtacagggcacaccaccagtccagtcagtggttttctccgcgacaaaggagattcgtagccccggccccggggacctgtctatttatgacaactggattcgatattttaacagatccagccccgtgtatgggctggtgcctcgtgctaggctgcagcctggtagcactccaccgaccacccagcccctgaccccgcttactatgtggaccagtttctggaccagagcctctgccgccattcggttatggccgggacagaggggtgtatag

SEQ ID NO: 196434 - DNA, 1569 bp, synthetic construct
  misc_feature 1..1569: note = Description of Artificial Sequence: Synthetic coding sequence
  source 1..1569: mol_type = other DNA
atgcagtggaccaaggtgctgggcctgggcctgggcgccgccgccctcttggggctgggcatcatccttggtcatttcgccatcccaaaaaaggccaactcactagcgcctcaggaccttgaccttgagattctggagaccgtaatgggccagttggacgcacatcggatccgagagaaccttagggaacttagcagggagccccacctcgcaagctcccccagggacgaggacctggtccaactattgctgcagcggtggaaggaccccgagtcaggcctggattctgccgaggcatccacctacgaggttttactgtcgttcccgtcccaggagcaacccaatgtggtcgatattgtgggtccaaccggcgggattattcactcttgccacagaactgaagaaaacgtcactggggagcaagggggacctgatgtcgtgcagccgtacgccgcctacgctccatccggaactccccagggcttgctcgtgtacgccaaccggggggcagaggaggacttcaaggagctccagacacaaggaataaagctagagggcactatcgctctgactaggtacgggggggttgggagaggcgctaaggctgttaatgctgccaaacatggagtggccggcgtgctggtgtacaccgacccagctgatataaacgacggcctcagctctcctgacgaaacatttccaaactcttggtatcttcccccgagtggagttgaacgaggttcctactacgaatacttcggtgaccctcttacgccttacctgcccgccgtgcccagctccttccgcgtcgatcttgccaatgtgagcgggttcccaccaatccccacacagccaatcggttttcaggacgctagagatctcctctgtaacctgaacggaacactcgcccccgcgacatggcagggggccctggggtgtcattataggctcgggcccgggttccgccctgacggagattttcccgcagatagccaagtcaacgtcagcgtgtacaataggctcgagctaagaaacagtagcaatgtgctgggcatcatccggggggcagtggaacccgacagatacgtgctttacggaaaccatcgagattcatgggtgcacggcgccgtggacccctctagtgggactgctgtcctcctcgagctgtcgcgcgtgctggggactttgttaaaaaaaggcacatggcgcccccgtcgtagcattgtgttcgcgagttggggagcagaggagtttgggctcatcgggagcacagagttcactgaagagttttttaataagctgcaggagaggactgtcgcctatataaacgtcgatattagcgtctttgccaatgcaaccctaagagtgcaaggaacccccccagtgcagtctgtggtatttagcgccaccaaggaaatcagatcaccaggccctggagacctgagcatttacgacaactggatcagatactttaaccgctcttcaccggtgtacggtttggtaccacggctccagcaaccatcgggttgcgggcccgacagcggggagtgcgacagccctgcccagtag

SEQ ID NO: 196435 - DNA, 2223 bp, synthetic construct
  misc_feature 1..2223: note = Description of Artificial Sequence: Synthetic coding sequence
  source 1..2223: mol_type = other DNA
atgcagtggaccaaggtgctgggcctgggcctgggcgccgccgccttgctcggacttggtataattctcggccacttcgcaatccccaaaaaagcaaattctctggcaccacaagacctagacttagaaattttggagacagtgatgggacaactggacgcccatcgcattagggagaaccttagggagctgagtcgtgagccccatctcgctagtagccctcgagacgaggatttggtgcagctgttactgcaacgctggaaggatccagagtccggcctagactccgccgaggcaagcacctatgaggtgctgttaagcttcccctcgcaggaacagcccaacgtggtggatattgtggggccaactggcggtattattcacagctgccaccgcaccgaagaaaatgtcactggcgagcaaggaggcccagatgtggtccaaccctacgcagcttatgctccaagcggaactccccagggactgttggtgtatgctaatagaggggcagaggaggattttaaggagctgcaaactcagggcattaaactggaggggactatcgcccttacccggtatggaggtgtcggacgtggcgcaaaagcagtaaacgcggccaaacacggagtcgctggcgttctcgtctacaccgatcctgccgacattaacgatgggctaagttctccagatgaaaccttcccgaacagttggtacctgcctccaagtggagtcgagaggggcagctactacgagtacttcggcgatccccttaccccttacctacctgcggtcccctctagtttcagggtagaccttgcgaatgtctctgggttcccaccgattcctacgcagccaattggatttcaggatgcaagggatctactgtgtaacttaaatgggaccttggccccagcgacatggcaaggggctctcgggtgtcactacaggctcggcccaggattccgacctgatggcgatttcccggcggacagccaggtgaatgtgagtgtgtataacagattggaattacgaaattcttctaacgttctcggcatcataagaggtgcagtcgagcctgatcgatacgtcctgtatggaaaccaccgagactcttgggttcatggcgcagttgatccatcctctggaactgccgtgctcttggagctgagccgcgtgttaggaaccctattgaaaaagggaacatggcggcctaggaggtccatcgtcttcgcctcttggggcgcagaagagttcggtcttatcggttcaactgagttcactgaagagttcttcaacaagttgcaggagcggaccgtcgcatatatcaacgttgacatcagcgtcttcgctaatgccactctgagagtacaggggacaccacccgtgcaatctgtggtattctccgccaccaaggaaatcagatcgccaggccccggcgacctctctatctatgacaactggattaggtattttaatcgcagttcgccagtctatggattggtcccttctcttggcagtctgggggccggaagtgactacgcccccttcgtgcacttcttaggaatttcaagcatggacatcgcatacacctacgataggagcaaaaccagcgcaagaatttaccctacataccatactgccttcgataccttcgactatgtggacaagtttctggatcccgggttcagcagccaccaggcagtagctaggacggccggatctgtcatcctgaggcttagcgacagctttttcctgccgctgaaggtaagtgactatagtgaaacacttagaagctttctgcaggctgcgcaacaagacctgggagccctgctcgagcaacattcaatttcgctgggaccgctagtcactgccgttgagaagttcgaagctgaagcagccgcattaggacagcggatttctactctacagaaaggatcacctgaccctcttcaggtgagaatgctgaacgatcagttgatgcttctagaacggacatttctaaatcctcgagcatttccggaagaaaggtattattctcatgtactttgggcacctcgtaccgggtcagtggtgacgtttcccggactaagcaatgcgtgttcacgggccagagacactgcctcaggatccgaagcctgggctgaagtccaaaggcagctgtccatagttgtgaccgcattggagggagccgctgccaccctgcgtccggtggcggatctctag

SEQ ID NO: 196436 - DNA, 2220 bp, synthetic construct
  misc_feature 1..2220: note = Description of Artificial Sequence: Synthetic coding sequence
  source 1..2220: mol_type = other DNA
atgcagtggaccaaggtgctgggcctgggcctgggcgccgccgccctattggggctggggatcattttgggtcacttcgcaatacccaaaaaagctaactcacttgctccccaggacttagacctcgagatcctcgagaccgtcatgggccagctggacgcacaccggattcgcgagaacctgcgcgaactcagccgggagcctcacctcgcttcatcccctagggatgaagatctggtgcagctcctcctccagagatggaaggaccccgagagcggcctggatagtgccgaggcaagcacatacgaggtgcttctgagctttcccagccaggagcagccaaatgtagtcgacatagttggcccaacaggaggtatcatccacagttgccataggaccgaagagaacgtcacaggtgagcaaggtggtcccgatgttgtgcagccatacgctgcgtacgctcccagcgggaccccccagggcttactcgtgtatgcaaataggggtgctgaggaggacttcaaagaactgcagacccagggcatcaagctcgaaggaacaatcgccctcacacgctatggcggcgtcggcaggggcgctaaggccgtcaacgcggccaagcacggagtcgcaggggtgttggtgtacaccgacccagcagatattaatgacggcctgtcctcaccggacgaaactttcccaaacagctggtatctccctccatctggagtagagcgtggctcttactatgagtactttggcgacccgctcaccccgtaccttcccgccgtcccttctagtttccgagtagacctggcaaacgtgtctggctttccccccatccccactcagcctatcggtttccaagatgctagagatctcctgtgcaatctgaatggcacactcgcccccgcgacctggcagggcgctctgggatgtcactataggttaggaccaggatttcggcccgatggggactttccagccgacagccaggtcaatgtctccgtttataaccgccttgagctacgcaacagctccaacgtgctcgggattattaggggcgcggtcgagccagatcgctacgtgctgtatgggaatcatagagattcctgggtgcatggagcagtcgacccctcatctggcactgccgtgctgctcgagttgagtagagtgttaggcactttgctcaaaaagggtacctggcggcccagaaggagcatcgtgtttgcctcctggggcgcagaagagttcggtctgatcgggtccactgaattcacagaggaattcttcaataagttgcaggaacgtaccgtagcctacattaatgtagacattagcgtgttcgccaacgccaccttaagagtccagggcactccgccggtgcagagcgtggtctttagcgctacaaaggagataaggtctcccggtccaggtgatctgtcgatttatgataattggattaggtactttaataggtcatcacccgtgtacggtctggtgccctcactgggcagcctcggggcgggcagtgattacgcaccctttgtccacttccttggaatctccagcatggatattgcttacacttatgatagatctaagacaagcgctagaatttacccaacctatcatactgcctttgatacttttgactacgtggacaagttcttagaccctgggttttcaagccaccaagccgtcgcccggacggccgggagtgtgattctgaggttgagtgactcttttttcttgcctcttaaggtgtccgactattccgagacattgcggagctttctacaagccgcacagcaggacctgggcgctctgctagagcaacacagtatatccctcggcccattggtgaccgcggtggagaaatttgaggcggaggccgccgccctcgggcaacgtatttctaccttgcagaaaggcagccccgatcccctccaggttcgcatgctgaatgaccagctcatgctgctggaaagaacctttctgaatcccagggcctttccagaggagagatattacagtcacgttctttgggcccctcgaggactacggtctcacatcccagggttatctaacgcctgctctagggcaagagatactgcctctggtagcgaggcatgggcggaggtgcagagacaattgtcaattgtggtgacggccctggagggtgcagccgccacactcagaccagtggccgatctttag

SEQ ID NO: 196437 - DNA, 405 bp, synthetic construct
  misc_feature 1..405: note = Description of Artificial Sequence: Synthetic coding sequence
  source 1..405: mol_type = other DNA
atggagatcagcaagaagatcaagacccagtggaccagcctgggccttgaggatgtccagtttgtcaactatagtgtgctacttgaccttcctggaccatcaccgtccaccgttactttgtcatccagcggccagtgcttccacccaaatggccagccctgtagtgaggaagctagaaaggactcttcccaggatcttctctattcgtatgctgcttatagcgctaagggtactctgaaagctgaagtcattgatgtgagctacggcatggccgatgacctaaaaaggatcagaaaaattaaaaatgtgaccaatcaaattgctctgctaaaacttggcaagctgccgctgctctacaaaatgaaggtcctggacaaggccgaccaaacgtcacctctctactag

SEQ ID NO: 196438 - DNA, 2388 bp, synthetic construct
  misc_feature 1..2388: note = Description of Artificial Sequence: Synthetic coding sequence
  source 1..2388: mol_type = other DNA
atgggcgagaacgaggccagcctgcccaacaccagcctgcagggcaaaaaaatggcttaccagaaggtgcatgcagaccagagagcgccgggccattcccagtatctggataatgatgacttgcaggcaactgctttggacctcgagtgggacatggagaaggaactggaggagagcggcttcgaccagtttcagctggacggcgccgaaaaccagaacttgggccattcagagactattgatcttaatttagatagcattcagcctgccacatctcccaagggccggttccagaggctccaggaagagtcagattatatcacacattacaccagatcagcccccaaaagcaatcggtgtaacttctgccacgtgctcaagatactgtgtaccgcaactattctgtttatctttgggatcttgatcggctactacgtgcatacaaattgtccctcagacgccccctcaagtggcaccgtggatccacaactgtaccaggagattctaaagaccatccaagccgaggatatcaaaaagagcttcaggaacttagtccagctgtataagaacgaagacgatatggagatctcaaaaaagattaaaactcagtggacctcccttggactggaggacgtgcagtttgtaaattatagcgtactcctcgacctgcccggccccagcccttctaccgtgacactctctagcagtggccagtgctttcaccccaatgggcagccttgttcagaggaagctaggaaggatagctcccaggatcttctgtactcctacgcagcttattccgcaaagggcacccttaaggctgaagtgatcgacgtttcttacggcatggccgacgacttaaagcgtatacgaaaaatcaagaacgtgacgaatcaaattgccctgctgaaactcggaaagctcccgctgctctataagctcagctctttggagaaagcagggtttggtggagtgctgctgtatatcgacccctgcgatctccccaagacggtgaatccctcacatgacacattcatggtgagtctgaatcctgggggtgatcctagcacacctggatatccctcagttgacgaatcgtttcggcagtcccggtcgaacttaacgtcactgctggtgcaaccgatctcagctcccttagttgccaagctcataagctctccgaaggcccgaaccaagaatgaggcttgcagctcactggagctgcccaataatgagattagggtcgtgtccatgcaggtgcagactgttaccaaacttaagactgtcaccaacgtcgtagggtttgtgatgggcctcacgtctccggatagatacataattgtggggagtcaccatcatacggctcattcgtataatggacaggagtgggcttcatcaaccgccattattaccgccttcataagggccctgatgtccaaggtgaagaggggttggcgtccagaccgtaccatcgtgttctgttcctgggggggcactgctttcgggaacatcgggtcttatgagtggggcgaagactttaagaaggtgcttcaaaaaaacgtggttgcttacatatccttacactctccgattcgcggaaacagttcgctgtaccctgtggcttcgccatccctgcagcagctagtggtagaaaagaataatttcaactgcacacgacgggcacagtgccctgagacaaatattagctctattcaaatccagggagacgccgactatttcatcaaccacctgggcgtgccgatcgtgcagttcgcctatgaggatattaagactttggagggtccctctttcctgagcgaagcccgatttagtactagggctacaaagatcgaggaaatggacccatcttttaatcttcatgaaaccataacaaagctctctggggaggtgatattacagattgcgaacgagccggtgttgccttttaatgcattagacatagcattagaggttcaaaataacctgaagggagatcaaccgaatacacatcagctgctggcaatggcgcttagacttcgcgagtcagcagagctgttccaaagtgacgagatgaggcctgctaatgaccccaaggagcgtgccccaattcggatccgaatgctgaacgatatccttcaggacatggaaaaatctttcctggtgaaacaggcccctccaggtttctaccgcaacatactttaccacctcgatgagaagacttctcgcttttctatcctgattgaagcctgggagcattgcaagccactcgcttctaacgagaccctgcaagaggcactcagtgaggtcctgaacagtattaattctgcgcaggtgtactttaaggctggtctggatgtgtttaagagcgtattggacggcaagaattag

SEQ ID NO: 196439 - DNA, 1236 bp, synthetic construct
  misc_feature 1..1236: note = Description of Artificial Sequence: Synthetic coding sequence
  source 1..1236: mol_type = other DNA
atgctgctgaagaccgtgctgctgctgggccacgtggcccaggtgctgatgctcgacaatgggcttctgcagaccccacccatgggatggctggcctgggaacgtttcaggtgtaatatcaactgcgatgaggaccccaaaaattgcatcagtgaacagctgtttatggagatggcagatcggatggcccaggatgggtggcgggacatgggctacacctacctgaatatcgatgactgttggataggaggaagagatgccagcggccgcctaatgccagacccaaagcgattcccacacggaattcctttcctggccgactatgtgcactcattgggtctgaagttgggaatctacgctgatatggggaattttacttgcatggggtacccaggcactaccctggacaaggtggtccaggacgctcaaacctttgcagagtggaaggtggatatgctcaaactggacgggtgttttagtaccccggaggaaagagctcagggataccctaagatggctgccgcactcaacgccaccggacgccctatcgctttttcttgtagttggcccgcatacgaagggggactgccgccacgggtgaactatagcctgctagcggacatatgtaatctatggcggaattacgacgatattcaagattcatggtggtcagtactctctatacttaactggttcgttgagcatcaagatattctccagcctgtagccggacccggacattggaatgaccccgacatgcttctcattggcaattttggactctccctggagcagagccgcgctcagatggctctgtggactgtgttggctgcgccactgcttatgtccaccgacctacggacaatcagcgcacagaacatggacattcttcagaatcctcttatgattaagattaaccaggatcccctggggattcaggggcgcaggatccacaaagagaagtcactgatcgaggtgtacatgcgcccactgtccaataaggctagtgcattggtttttttctcctgtaggacagatatgccataccgctaccactcaagcttgggacagctgaacttcacggggagcgtgatatatgaggcccaggacgtgtacagcggcgacattataagcggcctgagggacgagacgaatttcaccgtgattatcaacccgagtggagtcgtcatgtggtatctgtaccctatcaagaatttagagatgtcacagcaatag

SEQ ID NO: 196440 - DNA, 1236 bp, synthetic construct
  misc_feature 1..1236: note = Description of Artificial Sequence: Synthetic coding sequence
  source 1..1236: mol_type = other DNA
atgctgctgaagaccgtgctgctgctgggccacgtggcccaggtgctgatgctggacaatgggcttctacagaccccccctatgggctggcttgcttgggagaggttcagatgcaacataaactgcgacgaagatcccaagaattgcatttccgaacagctcttcatggagatggctgatcgaatggcgcaggatggttggagagacatggggtacacatatttaaatatcgatgattgctggatcggtggtcgcgacgcgtctggccggctgatgccagaccccaaacgatttccccatggcattccattcttagcagactatgttcactccctgggactgaaactgggtatttacgcagatatgggcaactttacatgcatgggataccctggaacaacgttagataaggtggttcaggacgcccagacctttgccgagtggaaggtggacatgctgaagctggatggctgcttctctacgccagaggaacgcgcccaggggtatcccaagatggccgccgccctgaacgcaaccgggcggcctatagccttctcttgtagctggcccgcttacgagggaggattgccccccagagtcaactactctttactcgccgacatctgtaatctgtggagaaattatgacgacattcaagacagctggtggagtgtcctgagtattttaaactggttcgtcgagcatcaggatattctgcagccagtcgccggcccgggccactggaatgacccagacatgttacttatcggtaacttcggtttatctttggagcaatcacgcgctcagatggcactgtggacagtgttggcagctcccttgctgatgagcaccgatttgcgcacaataagcgcgcagaacatggacatcctccagaaccctctgatgataaagatcaaccaggatccactgggcatacaggggaggcgcatacataaggaaaagtcactgatagaggtgtacatgcgccccctgtcgaacaaagcttcagctctggttttttttagttgtaggacagacatgccctatagatatcattcgtcccttggccagctaaatttcacaggaagcgttatttatgaggctcaagacgtgtactcaggcgatatcatatctggactgcgtgatgaaaccaacttcacagtcataataaacccctctggcgtggttatgtggtacctgtaccctataaagaatctggagatgtcgcaacagtag

SEQ ID NO: 196441 - DNA, 1236 bp, synthetic construct
  misc_feature 1..1236: note = Description of Artificial Sequence: Synthetic coding sequence
  source 1..1236: mol_type = other DNA
atgctgctgaagaccgtgctgctgctgggccacgtggcccaggtgctgatgctcgataacggactcctccagactcctcctatgggctggttagcgtgggagcggtttcggtgcaacattaactgtgatgaagaccctaaaaactgtatatccgagcaactgtttatggaaatggccgatcgaatggcccaagacggatggcgtgatatgggctatacatatctgaatatcgatgactgttggattggcgggcgagatgcatctggtagactaatgccagatcctaagaggttccctcacggaatccccttcttggctgactatgttcattccttgggattaaagctgggcatttacgcagatatgggaaactttacttgcatgggctaccccgggaccactttggataaggttgtgcaggacgcacaaacctttgccgaatggaaagtggacatgctgaagctcgacggatgtttcagcacccccgaggagcgggctcaggggtatcctaaaatggcggccgcccttaacgccaccggcagacccatcgcgttcagttgctcttggcccgcatatgaaggcggcctgccgccccgagtgaactactccctgctcgcagacatttgcaacctctggcgcaactacgatgatatccaggatagctggtggagcgtcctctcgatcctgaattggttcgtggagcaccaggatattttgcagccagtggcaggaccaggacactggaacgatccagatatgctgctgatcgggaattttggtctgtccctggagcagagcagagcacagatggctctgtggaccgtcctggccgccccgcttctaatgtctacggatctccgcaccattagtgctcagaatatggatattctgcagaaccccttgatgattaagatcaaccaagatcccctagggattcaaggccggagaattcacaaggaaaaaagtctgattgaagtctatatgagaccgttatcaaacaaggcttccgcccttgtgtttttctcttgccggacagacatgccttacagatatcattcgagccttggccagctaaacttcaccggtagcgtcatctatgaagcccaggacgtatattcaggcgatatcatctcaggcctgcgggacgagacgaactttacagtgatcatcaatccgtccggagtggttatgtggtatctgtacccaattaaaaacttggagatgagccagcagtag

SEQ ID NO: 196442 - DNA, 1035 bp, synthetic construct
  misc_feature 1..1035: note = Description of Artificial Sequence: Synthetic coding sequence
  source 1..1035: mol_type = other DNA
atggccgccatctacggcggcgtggagggcggcggcacccggagcgaagtactgctggtttcagaggacggcaagattctggctgaggccgacggactgagcaccaatcactggcttatcgggaccgacaagtgcgtggagaggattaacgagatggtcaaccgagcaaaacggaaggctggcgtcgatcccctggtccctctgagaagcctgggactctctctcagtggaggtgaccaggaggatgcaggcaggatcctgattgaggaactacgggatcgcttcccgtacctaagcgagtcctacttgatcacaactgacgccgctggttcgatcgccaccgctacacctgatggtggcgtcgtgctaatttctggaacggggtccaattgcagattgattaacccagacggaagcgaatccggatgcggtgggtggggccacatgatgggggatgagggctcagcatattggatagcacaccaagccgtgaaaatcgtctttgatagcattgataacctggaggctgccccacacgatattggatatgtgaagcaggccatgtttcactactttcaggtacccgacagactaggcatcctgacacatctttaccgagatttcgataagtgccgcttcgccggcttctgccgaaagattgcagagggcgcacagcaaggggatccattatcccggtacatctttaggaaggctggggaaatgttgggtcgccatatcgttgctgtgctgccagagattgaccctgtcctgtttcaaggcaagattggcttgcctattctctgtgtagggagcgtttggaagagctgggaattactgaaagaaggctttctgctggcccttacacaggggagggagatccaggcgcagaacttcttctccagcttcacactaatgaaactccgtcatagcagtgcccttggcggcgcatcactgggcgcccggcacattggacacctactgcccatggactacagcgcaaacgcgattgccttttattcctatactttcagctag

SEQ ID NO: 196443 - DNA, 1173 bp, synthetic construct
  misc_feature 1..1173: note = Description of Artificial Sequence: Synthetic coding sequence
  source 1..1173: mol_type = other DNA
atgcggacccggaccggcagccagctggccgcccgggaggtgaccgggtcaggtgctgtgcctcgccagttagaagggcggcgatgccaggccggccgagacgccaatggtggaacatctagtgacggttcttcgtcaatggccgccatttacggcggggtggaaggtggaggaacccgctccgaggtgctgctggttagcgaagatggcaaaatcttagctgaggcggacggcttatcaaccaatcattggcttatcggaaccgataagtgtgtagaaagaatcaacgagatggtgaaccgcgcaaaacgaaaagctggggtggatcctttggtccctctgaggtcacttggcttatctctgtccggcggggaccaggaagatgccggtagaattctaattgaagagcttagagatagatttccgtaccttagcgagtcatatttgataaccaccgacgcagccggctccatcgctactgcaacgccagacggcggcgtagtgttgatctctggcactggatctaactgtaggcttattaatcccgacggttctgaatcgggatgtggtgggtggggacacatgatgggggacgaagggagcgcctactggattgcccaccaggcagtcaagatcgtttttgactcaatcgataaccttgaggccgcgccccatgatattggatatgtcaaacaggcaatgtttcactacttccaggtgccggatcgcttgggcatcctcactcacctgtaccgcgattttgataagtgtcgatttgctgggttctgtagaaaaatcgccgaaggcgcccagcagggggaccctctcagccgatacatttttaggaaagccggcgagatgctggggcgccatatcgtggccgttttgcctgagatcgatcctgtcctcttccagggaaaaatcgggctacccatactttgcgtgggaagcgtgtggaagagttgggagctcctaaaggaggggttcctgctagctctgacgcagggcagggagattcaggcccagaactttttttcgagtttcacactcatgaagctgagacactcttcagccctgggcggcgcctcgttaggcgcaaggcacattggccacttgctcccaatggattattctgcaaacgcaatcgctttctatagctatacattttcttag

SEQ ID NO: 196444 - DNA, 1548 bp, synthetic construct
  misc_feature 1..1548: note = Description of Artificial Sequence: Synthetic coding sequence
  source 1..1548: mol_type = other DNA
atggccaccagcaccggccggtggctgctgctgcggctggccctgttcgggtttttgtgggaggcctcggggggcctagactccggcgcgtcaagagacgacgatctcctcttaccataccctcgggcccgtgccagattgcctcgggactgcacaagagtcagggcgggcaacagagaacacgaatcctggccgccgcctcctgctacgcctggtgccggtggcctagccgtgcgcactttcgtgtctcatttcagagatcgcgccgtggcaggacacctcacgcgcgccgtggaaccactgcgtaccttttccgttttggaacccgggggccctggaggctgcgccgcacggcgcagagctacagtagaggagacagctagagcggccgattgtcgcgtggctcaaaatggggggttttttagaatgaattccggggaatgtcttgggaacgtggttagtgacgagagacgggtctcaagtagcgggggcctacagaatgcccaattcggcatccgcagagacggaacactcgtgaccggatacctctctgaggaagaagtcctggacacagaaaatccttttgtgcaattgctaagcggagttgtttggctaatccggaatggaagtatttacattaatgagagccaggccacggagtgtgacgagacccaagagaccggaagcttctctaagtttgtcaacgtcatctcagcacgaaccgctattgggcatgatcggaagggtcaactggtactgttccatgccgatggacaaaccgaacagagggggattaatctttgggaaatggccgagttcctgctcaaacaggacgtggtcaacgccatcaacttggacggggggggcagcgccaccttcgtgcttaacgggacattagctagctatccttctgaccattgccaggataatatgtggcgatgccctcgtcaggtgtccactgtcgtgtgtgtccacgagcctcgatgtcaaccaccggattgccatggtcacggtacttgcgtagacgggcactgtcagtgcactgggcacttctggagaggacctggctgcgacgagctggactgcggcccaagtaactgttctcagcacggcctctgtacagaaaccggctgcagatgtgatgctgggtggactggttccaactgcagcgaggaatgccccctggggtggcatggtcccggctgccagcggccttgcaaatgtgagcaccactgtccctgtgatcctaagactggcaactgttctgtttcccgcgtgaagcagtgtttacagccacctgaggccaccctgcgagccggcgagctctcattctttacgcgcaccgcttggttagcactcacattagcgctggccttcctgttgctgatctccaccgccgccaacctgtctcttctcctcagccgagcagaaagaaacagaaggctccacggcgattatgcctaccacccattgcaggaaatgaatggggaacccctggcagccgagaaagagcagcccggtggggcacacaacccatttaaggactag

SEQ ID NO: 196445 - DNA, 1446 bp, synthetic construct
  misc_feature 1..1446: note = Description of Artificial Sequence: Synthetic coding sequence
  source 1..1446: mol_type = other DNA
atggccaccagcaccggccggtggctgctgctgcggctggccctgttcggctttctttgggaggcctccggaggtctggattcaggggcgtccagggacgacgatctccttcttccctacccccgtgcacgagcacggttgccacgagattgcacaagagtgcgggctggtaatcgcgaacatgaaagttggccaccaccccctgccacccccggggcaggcgggttggcagtgcggacatttgtttcacacttcagagatcgggccgtggcgggacacttgactcgtgccgtggagccactgagaactttcagcgtcctggaaccgggaggtcctggaggctgtgcagcaaggaggcgcgctactgtggaagaaaccgccagagccgcggactgcagagttgcccaaaatggagggtttttccgcatgaattccggtgagtgcctgggaaatgtggtcagcgatgaacgtcgcgtgtcaagctctggggggctgcaaaatgcccaattcggcattagacgagatggcacactggttaccgggtatttgagtgaggaggaagtcttggatacagagaatccattcgttcagctcctcagcggcgttgtttggttgattagaaatggctccatctacattaacgagtcccaggcaactgagtgtgatgagacccaagaaaccggctcattcagcaaattcgttaacgtcatttctgcaaggaccgctattggccacgacagaaaaggacagttggtgctgtttcatgctgatggccagaccgaacaaaggggcattaacctatgggagatggctgagttccttctgaagcaagacgtcgtgaacgccatcaaccttgatggaggcgggtccgccacatttgtgttgaacggtacccttgcgtcctatccgtcagaccactgccaggacaacatgtggcggtgccctcgacaagtcagcaccgtcgtatgcgtgcacgagccccgctgccaaccgccagattgtcatggccacggaacttgcgttgacggacattgtcaatgcaccggccatttctggaggggacctggctgtgacgaactggattgcggacctagcaactgtagccagcatggcctctgtacagagaccggatgccggtgtgatgccggctggacagggagcaattgcagcgaggtcaagcagtgtcttcaacctcctgaggcaacactgcgagccggtgaactatcatttttcacacggacagcctggttggctttgaccctcgccctggctttcttgctgctaattagcacggcagctaaccttagtctgttgttgagtcgagccgaacgtaaccgtcgactccatggagattacgcataccaccctctgcaggaaatgaatggcgagcctttagctgcggaaaaggaacagcctgggggcgcacacaacccttttaaggattag

SEQ ID NO: 196446 - DNA, 2514 bp, synthetic construct
  misc_feature 1..2514: note = Description of Artificial Sequence: Synthetic coding sequence
  source 1..2514: mol_type = other DNA
atggccgagcccagccaggcccccacccccgcccccgccgcccagccacgtccactccaaagccctgccccagctccgaccccaacaccagccccctccccagctagcgcacctattcccactcccactccagcgcccgcacctgcacctgccgcggcccctgcagggtccaccggaaccggaggtccgggagtggggtcggggggggccggctcaggcggcgatccagccagacccggactgtcacagcagcaacgtgccagtcagcgtaaggcccaggtgcgagggctgccccgggcaaaaaagctggagaaactcggggtgttcagcgcttgtaaggcaaacgagacttgcaaatgtaatggttggaagaaccctaagccacccaccgcgccccggatggaccttcaacagcccgccgccaacttaagcgagctctgcagaagctgcgagcatcccctggctgatcacgtcagtcacttagagaatgtgtcggaagacgaaatcaatcggctccttggcatggtagtggatgtcgagaatctcttcatgtccgttcacaaggaggaggacacagacaccaaacaagtctatttctaccttttcaaactacttaggaaatgtatccttcagatgactaggccagtcgtggagggaagtcttggctccccgccattcgagaagccaaacatagagcagggggtactgaactttgtgcagtacaaattttctcacctggctccaagagagaggcagactatgttcgaactgtcaaagatgtttctcctgtgcctcaattattggaagttagaaaccccagcccagttcaggcagcgctcacaggcagaagatgtggcaacctacaaggttaactacaccagatggttgtgctactgccacgtgcctcaatcctgtgactcattgccacggtatgagaccacccacgtctttggcagaagccttctgcggagcatttttacagttactcggcgacagctattggagaagttcagggttgagaaagacaaattagtgccggaaaagcggaccctgatcctgactcactttcccaaatttctcagcatgctggaggaggagatctacggggccaatagccccatttgggaatccggctttacaatgcccccttcggaggggacccagctggtgccacgtcccgcatctgtgagcgcagcagtggtcccaagtacacctattttctcccccagcatgggaggcggatctaactcgtccctgagcctggattctgctggcgccgaaccaatgcctggcgaaaaaaggactttgcctgagaacctgaccttggaggacgctaaacgactgcgcgtcatgggcgacatacctatggagctggtgaacgaagtgatgctgacaattaccgacccagccgccatgttgggccctgagacaagtctactaagcgccaatgcggcccgagacgaaactgccagacttgaggaacgtcgcggtataattgagttccacgttataggcaattcactgacgcctaaagccaaccgaagagtgctactgtggcttgtcggactccagaacgtcttttcccatcaacttccacgcatgcctaaagagtatatcgcccgcctggtgttcgaccccaagcataagacattagcactgataaaagatgggcgggttattggaggcatctgcttccgtatgttcccaacccagggcttcactgagatcgtgttttgtgcggtgacctctaacgagcaagtgaagggatatggtacccaccttatgaatcacctgaaggaatatcatattaagcacaatattttatactttctgacatacgcagatgagtatgctatcggttattttaaaaaacagggcttctccaaggacattaaggtccccaagtcacgttatttgggatatattaaagattatgaaggcgcaacactgatggagtgtgagctgaatccgagaatcccatacaccgaactgtctcacatcattaagaagcagaaagaaatcataaaaaagttgatcgagcgaaagcaagcccagatccggaaggtgtacccgggtctgtcatgtttcaaggaaggagtgcggcagatcccagtggagagtgtgcccgggatccgggagactggctggaagcccttaggaaaggagaaaggcaaagaattaaaggatcccgaccagctctacaccaccctgaaaaatttgctcgcccagattaagtcgcatccatctgcttggccgtttatggaacccgtcaagaagtctgaggcacctgactattacgaggtcattagatttccaatagacctcaagactatgaccgaacgcctccggtcccgctattacgtaacccggaaactctttgtagcggatctgcagcgtgtcatcgccaattgccgggaatacaaccctccggatagcgagtactgcaggtgtgcatctgcattagagaaattcttctacttcaagctcaaagagggaggcctgatagacaaatag

SEQ ID NO: 196447 - DNA, 1260 bp, synthetic construct
  misc_feature 1..1260: note = Description of Artificial Sequence: Synthetic coding sequence
  source 1..1260: mol_type = other DNA
ccccagtgctgcctgcacagccggggcatgttcccccggctgagccctgtcgacactgaggccgtgtggctgctgcagggttggctgtttcaacatcaacctcagttttggggcccagcacagatcagagcggtccttggcgccgtgcctcgcggtcgcctcctggttctagatctgtttgcggaatcccagcccgtctacacccgcaccgcctcattccaaggacaacctttcatttggtgcatgttacacaactttgggggaaatcacgggctgtttggagccttagaagccgtcaacggcggtccagaggctgcacgccttttccccaatagcacaatggtggggacgggaatggctcccgagggtatcagtcagaatgaggtagtttatagcctcatggctgaactagggtggaggaaagaccctgtgccagatcttgctgcctgggtcacctcctttgccgcccgacgttacggagtaagccaccccgacgcaggcgcggcctggcggctgctcttaagatccgtatacaattgctcaggagaggcctgcaggggtcacaatcgctctccgctggtacgcagaccgagtttgcagatgaatacctccatatggtataaccggagtgacgtgtttgaggcctggcgcctacttctcacgagcgcacccagcctagcaacatcccccgcctttcgctacgatctgctggacttgaccaggcaagccgtgcaagaactagtgtctctttactacgaagaagcgaggtccgcttacctatctaaagagctggccagcctgctcagggctggcggggtgctggcctacgagcttctcccagcactggacgaggtgctcgcgagtgatagccggttcctcctgggaagttggctggaacaggctcgtgctgctgcggtgtccgaagcggaagctgacttttatgagcagaatagccgttatcagctgacactatgggggccggaagggaacatcttggattacgccaacaagcagctggcggggctcgtcgcaaattactacacccctcggtggcggttgtttttagaggccctagtggactctgtggcacaaggtatcccgtttcagcaacatcagttcgataagaacgtattccaattggaacaagcattcgtgctgagcaagcagcgctaccctagtcagccaagaggagatactgtcgacctagccaagaagattttcctcaagtactaccctcgttgggtggcaggaagctggtag

SEQ ID NO: 196448 - DNA, 963 bp, synthetic construct
  misc_feature 1..963: note = Description of Artificial Sequence: Synthetic coding sequence
  source 1..963: mol_type = other DNA
atggccttccccaagaagaagctgcagggcctggtggccgccaccatcacccctatgaccgagaacggggaaatcaatttctctgttatcggacagtacgtggattacctggtgaaggaacagggggtgaagaatatctttgtgaacggcactaccggagagggcctgtcactgtccgtgtcagagcggcggcaggtggccgaagaatgggtcacaaaaggtaaagataaattggatcaggtgattatacacgtgggggccttgagtcttaaagagagccaggaactggcacagcatgctgccgagattggggccgacggtatagcagtcattgcccccttttttctcaaaccatggacaaaagatattttgattaattttctcaaagaggtggccgcagccgctccagccctccctttctattactatcacatcccagcccttaccggcgtcaagatcagagccgaggagctgttggatgggatcctggacaaaatccctactttccagggactcaaatttagcgacacagatctcttggatttcggtcaatgcgtcgatcagaatagacagcaacagtttgcctttctgttcggtgtggacgaacagctcctcagtgccctagtgatgggtgccaccggcgccgttggcagcacatataactatctggggaagaagacaaatcagatgctcgaagccttcgagcagaaggacttctcactggccctcaactatcagttctgcattcaaagattcatcaacttcgtagtcaagcttggattcggggtctctcaaaccaaagcaatcatgaccctcgtttcaggcatcccaatggggcctcctagacttcctcttcagaaagctagtcgagagttcacagatagcgccgaggccaagctgaagagccttgactttctgagctttactgaccttaaagacggcaacttggaagccggcagctag

SEQ ID NO: 196449 - DNA, 330 bp, synthetic construct
  misc_feature 1..330: note = Description of Artificial Sequence: Synthetic coding sequence
  source 1..330: mol_type = other DNA
atggccttccccaagaagaagctgcagggcctggtggccgccaccataacacctatgactgagaacggtgagattaacttcagtgtgatcggacagtatgttgattatcttgtcaaggaacagggagttaagaatattttcgtcaacggaacgactggcgagggactctccctgtcagtaagcgagcggagacaggtagccgaggaatgggtgaccaagggcaaagataagtctaatcatcacaagctcggaactattcgcactactcagtcccgcagatcttctttccggcgacagttaaaagcctggcactctggatctcatctgtag

SEQ ID NO: 196450 - DNA, 558 bp, synthetic construct
  misc_feature 1..558: note = Description of Artificial Sequence: Synthetic coding sequence
  source 1..558: mol_type = other DNA
atgagccgggcccccggcatcctggccagctggcggcgggccccctcactgagtgtccagaagggttctcaaaccgcccggcacacctgccaccccgaagttccacttggaaattgcttcctccctgtatataaggcctcccccctgactgtgacccgcctctgggctgagagactggatcaagtgatcattcacgtgggggccctgagtctcaaagagtcccaggagcttgcacaacacgcagcagaaatcggcgccgatggaattgcagtcattgcccccttttttctaaaaccatggaccaaagacatccttattaattttctgaaagaggtggcagctgcagccccagccctgcctttctattattatcatattccagccttaacaggcgtcaaaattcgtgctgaggagctgctggatgggatcctggataagattccgacattccaggggctaaagttctccgatactgatctgctcgattttgggcagtgcgtggaccaaaataggcagcagcagtttgcatttctcttcggcgtagacgaacatctctag

SEQ ID NO: 196451 - DNA, 723 bp, synthetic construct
  misc_feature 1..723: note = Description of Artificial Sequence: Synthetic coding sequence
  source 1..723: mol_type = other DNA
atggccttccccaagaagaagctgcagggcctggtggccgccaccatcacccctatgaccgagaacggcgaaataaatttcagcgtcatcgggcagtatgtggactaccttgtcaaggagcaaggcgtgaagaacatatttgttaacgggactacaggcgaggggctgtccctgagcgttagcgagcgtcgacaggtggcagaagaatgggtgaccaagggtaaagacaaactcgaccaggtaataatccacgtcggcgcactgagtcttaaagagagccaggagctggcgcagcacgctgcagaaatcggagcagatggtattgccgtcatcgccccgttcttcctgaaaccttggacaaaggacattctcattaattttcttaaagaagtggccgcagccgcgcctgctctgcccttttactactaccacattccagccctaacaggggtgaagatcagagctgaagagttactcgacggcatcctcgataaaatcccaacatttcaaggcctgaagttcagcgacacagatctcctagacttcggccaatgtgtcgaccagaacagacagcagcagtttgcattcttgtttggcgtggatgaattttgcatacagcgctttatcaatttcgtagtgaagctcgagaactctaaattaaaagtctcaaagaaccagcgtaccttgccgctaggcaccacgaacttccctttcctgcactag

SEQ ID NO: 196452 - DNA, 963 bp, synthetic construct
  misc_feature 1..963: note = Description of Artificial Sequence: Synthetic coding sequence
  source 1..963: mol_type = other DNA
atggccttccccaagaagaagctgcagggcctggtggccgccaccatcacccccatgactgagaacggggaaatcaattttagcgttatcggccagtacgttgactacttggtgaaagagcaaggcgtgaaaaatattttcgtgaatggcaccactggggagggcctctcgcttagtgtgtctgaacgtcgtcaggtggctgaagagtgggtcactaaagggaaggacaaactggaccaggtgattatccacgtgggagcactgtctttaaaggagtcacaggagcttgctcagcacgccgcggagataggtgccgatggtatagccgtgatcgctcctttttttttaaagccttggacaaaggacatcctgatcaactttttaaaagaagtcgctgccgccgccccagcacttccgttttattattatcatatccccgctctgacgggcgttaaaatacgagccgaggagctactcgacgggatactcgacaaaataccaacgttccagggtctcaagttctccgacacagatctgctcgatttcgggcagtgcgttgaccagaatcggcagcaacaattcgctttcctgttcggggtggatgagcaactactctcagccctggttatgggagcaactggagccgtcggatccacatacaactacctgggaaagaagacaaaccaaatgttggaggcttttgagcagaaggacttctcactagccctaaattatcagttttgcattcagcggttcatcaattttgttgtgaagctcggatttggagtgagccagaccaaagcgattatgacccttgtttcaggcattccaatgggaccaccacggcttccccttcaaaaggcgtcccgagaattcaccgacagcgctgaggcgaagctgaaatccttggacttcctctccttcacagatctgaaagatggtaatttggaggcaggatcctag

SEQ ID NO: 196453 - DNA, 906 bp, synthetic construct
  misc_feature 1..906: note = Description of Artificial Sequence: Synthetic coding sequence
  source 1..906: mol_type = other DNA
atgagccgggcccccggcatcctggccagctggcggcgggccccctcgttaagcgtccagaaaggcagccagactgctcggcatacttgtcatcccgaagtgcctcttggcaactgcttcctgcccgtctataaggcgagcccactgacggtaactcgtctctgggctgaacgactggatcaagtgattattcatgtcggcgcactctcgctgaaagagtctcaagaactcgcccagcacgccgccgagatcggcgccgacggaatcgctgttattgcccccttcttcctgaaaccgtggaccaaagacatcctcataaatttccttaaggaagtggccgccgccgcaccagcactgccattctactattatcacatccccgcactgaccggggtaaagattcgggccgaggaattattggatggcattttagacaaaattccaacatttcaaggacttaaattttccgacaccgatcttctcgactttggccagtgcgtagatcaaaacaggcagcagcagtttgcattcctcttcggcgttgacgagcaattgctgagcgcgttggttatgggggcaactggcgccgtgggcagcacttacaattatctcgggaagaagacaaatcaaatgttggaggcattcgagcaaaaggatttcagcctggccctgaattaccagttctgcattcagcggttcatcaattttgttgtaaagctcggattcggggtatcccagacaaaagcgatcatgactctagttagcgggatccctatgggtccaccccgattaccgcttcagaaggcatcacgggagttcactgactccgcagaggccaagcttaagtccctggactttctgtcgtttaccgatcttaaggatggaaacctcgaggccgggtcgtag

SEQ ID NO: 196454 - DNA, 723 bp, synthetic construct
  misc_feature 1..723: note = Description of Artificial Sequence: Synthetic coding sequence
  source 1..723: mol_type = other DNA
atggccttccccaagaagaagctgcagggcctggtggccgccaccatcaccccaatgacagaaaatggagaaatcaatttttccgtgatcgggcagtatgtggactacctggtcaaggagcagggtgtaaagaatattttcgtgaatggcaccaccggtgaagggctaagcctgtccgtttctgagcgacgacaagttgctgaggagtgggttactaaaggcaaagataaactagatcaagtgatcatacacgtgggagccctaagcctcaaggaatcacaggaactagcgcagcatgccgcagaaatcggggctgacgggatcgcagtaattgcaccatttttcctgaaaccatggaccaaagacatccttataaactttcttaaagaggttgccgcagccgcaccggcattgcccttctactattatcacatcccagccctgaccggtgtgaagatcagggcagaagaactgctggacgggattctcgataaaatcccaactttccaaggtctcaaattctcggatacagatctgctcgattttggccaatgcgtcgaccagaatcgccaacagcaattcgctttcctattcggcgtcgatgagttctgtattcagcggtttatcaactttgttgtgaaactcgaaaatagtaaattgaaagtaagtaaaaaccagcgcaccttaccactggggacaacaaactttccattcctacattag

SEQ ID NO: 196455 - DNA, 624 bp, synthetic construct
  misc_feature 1..624: note = Description of Artificial Sequence: Synthetic coding sequence
  source 1..624: mol_type = other DNA
cgggagggccagaagggcagccagaccgcccggcacacctgccaccctgaagtgcctctggggaattgtttccttccagtgtataaagcaagtcctctcactgtgacacgtctctgggctgagagattggaccaggtgatcattcacgtcggcgcactgagcctaaaggagtcccaggagctggcccagcacgcagccgagattggggccgacgggattgcagtgatcgcaccattttttctaaaaccctggactaaagatattctgatcaacttccttaaagaagtggccgctgcagcaccagctctccctttctattactaccacatcccagcgctcactggagtgaagacgactgtggagtgcagtggagacggctcaaactggtcaagcgggcagttctgtatccaaaggtttatcaactttgtagtgaagctcggcttcggcgtgtcccagacaaaggccatcatgactttagtgagcgggatccctatggggccaccccggctgccactgcagaaggcatcacgtgagtttaccgactctgctgaagccaaactgaagtccctcgactttctgtcttttaccgacctcaaggatggaaacttagaagccggcagctag

SEQ ID NO: 196456 - DNA, 747 bp, synthetic construct
  misc_feature 1..747: note = Description of Artificial Sequence: Synthetic coding sequence
  source 1..747: mol_type = other DNA
atgggcctgagccgggtgcgggccgtgttcttcgacctggacaacacactgatcgataccgccggcgcttccaggcgtgggatgttggaggtgatcaaactcctgcagagtaagtatcactacaaagaggaggctgagattatctgtgacaaggtccaggtaaagttgtccaaggaatgttttcatccctataatacttgtatcaccgacctcaggaccagccactgggaagaggctatccaagagactaaagggggcgctgccaatcgcaagctggctgaagagtgctactttctctggaaaagtacaagactgcaacatatgacccttgcagaagatgtgaaagctatgctgaccgagttgcggaaggaggtgcgcctcctcctgctgaccaatggggataggcagactcagcgggagaaaattgaagcttgcgcctgtcagtcgtactttgacgcagtggtcgtgggcggcgagcagcgcgaggaaaaacccgcaccttcaatcttttactattgttgcaacctgctcggtgtccagccaggggattgcgtaatggtcggcgacacactagaaacagacattcaggggggccttaatgcaggcctcaaggcgacggtgtggatcaataaaaatgggatagtcccactgaagtcttctccagtcccccattatatggtgagcagtgtcctggaactaccagctctgctccaatcgatagactgtaaggtatcaatgtccacttag

SEQ ID NO: 196457 - DNA, 1515 bp, synthetic construct
  misc_feature 1..1515: note = Description of Artificial Sequence: Synthetic coding sequence
  source 1..1515: mol_type = other DNA
atggccgcccaggccctggccctgctgcgggaggtggcccggctggaagctcctctggaggagctccgcgcactgcacagcgtcttgcaggccgtacctctgaatgagcttcggcagcaggctgccgagctgcggctcggcccactctttagcctcctgaatgaaaaccaccgcgagaagaccaccctgtgtgtttctatccttgaacgcttgctgcaagccatggaacccgtacacgttgcccgcaaccttagagtcgatctgcagcgcgggctcatccacccagacgatagcgttaagatcttaactctgtcccagatcgggcgcattgtcgaaaactctgatgccgtcactgaaatcctcaataatgccgagctcttgaagcagatcgtgtactgtattgggggagaaaatctgagcgtcgccaaagccgccatcaagagcttatctcgtatcagcctgacccaagccggcttagaggccctgttcgagtccaatctgttggatgacttgaagagtgtaatgaagaccaatgatatagtacgataccgcgtgtacgagctgatcattgagatatcatccgtcagccccgagagtctgaattactgcacaaccagtggactggtgacgcagctgctgcgggagctcactggtgaagacgtcctcgtccgagccacctgtatcgaaatggtcaccagcctggcctatacacaccatggtcggcagtatctggctcaggagggtgtgatcgaccaaatctccaacatcattgtgggcgcagacagcgatcccttctcatctttttacctgccaggctttgtaaaattctttggcaacctcgcagtgatggactcaccacagcagatctgtgaacgctatcccatattcgtggagaaagtctttgaaatgatagagtcgcaggacccaactatgatcggggtggccgtggacactgtgggaatcctcggatctaatgtagagggcaagcaagttctccaaaaaacaggaactcggtttgagcggctcctgatgcgcattggccaccaatcgaagaatgctccggtagagcttaaaatccggtgtctggatgctatcagctcactgctatacctgccacccgagcaacagacagatgatttactgcgtatgactgagagctggtttagctcattgagtcgggatccccttgagctcttcaggggtattagtagccagccttttccagagctgcactgtgccgccttgaaagtgtttacagcgattgccaaccagccttgggcgcaaaagctgatgttcaatagtcctggattcgtagagtacgtggtggatcggtccgtggaacacgacaaggcttccaaagatgcaaagtacgagttggttaaagccctggcgaactctaagacgatcgccgaaatattcggcaaccctaattacctccgcctgcgcacctacctatctgaaggaccgtactacgtcaagcccgtctctaccacagccgtcgagggcgcagagtag

SEQ ID NO: 196458 - DNA, 423 bp, synthetic construct
  misc_feature 1..423: note = Description of Artificial Sequence: Synthetic coding sequence
  source 1..423: mol_type = other DNA
atggtgctggtgctggactacagcggccggcccatggtgatcagctcaggaatgcagagcatggataccatgaaacaggtttatcagattgtgaagcctctgaatccaaacttctgtttccttcagtgcactagcgcttaccctttgcagcccgaggatgtgaacctaagagtaatctcggagtaccagaagctgtttccagacattcctattggatacagtggacacgaaaccgggatcgcgatcagcgtcgccgccgtcgccctgggggccaaggtgcttgaacgccacatcacactagataaaacttggaaggggtccgatcatagcgccagcctcgagcccggagaactagctgagttggtgcgatcggtccgattggtggagcgtgccctaggaagccccactaagcagttactgtag

SEQ ID NO: 196459 - DNA, 348 bp, synthetic construct
  misc_feature 1..348: note = Description of Artificial Sequence: Synthetic coding sequence
  source 1..348: mol_type = other DNA
gaggacgtgaacctgcgggtgatcagcgagtaccagaagctgttccccgatatccccatcgggtattccggccatgagaccggcattgcaatctcggtggccgctgtagcactgggggctaaggtgctggaaaggcacataaccctggacaaaacttggaagggcagtgaccattcagcaagtcttgaaccgggtgagctggccgaacttgtgcgctctgttcggctcgtagagcgcgccctcggttcccccaccaagcaacttcttccatgtgagatggcgtgtaatgagaaagtgtgtcctgccggcctatattcggtcctgcttccatgcgtggagaagggctag

SEQ ID NO: 196460 - DNA, 873 bp, synthetic construct
  misc_feature 1..873: note = Description of Artificial Sequence: Synthetic coding sequence
  source 1..873: mol_type = other DNA
atggacatcgaggcctacctggagcggatcggctacaagaagagcagaaataagttggacctcgagacattaaccgatatcttgcaacaccagatacgagctgtacccttcgagaacctgaacattcactgcggagacgcaatggaccttgggctggaagcaatcttcgaccaggtggttcgacgtaaccggggtggctggtgtttgcaagtgaaccatcttttgtattgggctctaacaactatagggttcgaaacgaccatgcttggcggctacgtgtattcaaccccagcaaagaagtactcaactggcatgattcaccttttactgcaggtcaccatcgacggacgtaactatattgtagatgccggtttcgggaggtcataccaaatgtggcaacccttagagctgatatccgggaaggaccagccgcaggtgccgtgtgttttccgcttaaccgaagagaatggattttggtatctggaccagattagaagggagcagtacatcccgaatgaggaattcctgcacagtgatctactggaagactccaaataccggaaaatctacagttttacactgaaaccccggacaattgaggatttcgaaagcatgaatacttacctgcagacaagcccgtcttccgtcttcacatcaaagagcttctgttccctgcagactccggatggagtccactgtctggtcgggttcacactaacacacagacgcttcaattacaaagacaacacggatctgatcgagtttaaaaccctgtccgaggaagagatcgagaaggttctgaagaacatcttcaatataagcttacagcgcaaactggtgcccaaacacggcgatcggttcttcactatctag

SEQ ID NO: 196461 - DNA, 873 bp, synthetic construct
  misc_feature 1..873: note = Description of Artificial Sequence: Synthetic coding sequence
  source 1..873: mol_type = other DNA
atggacatcgaggcctacctggagcggatcggctacaagaagagccgcaataagcttgatctggagactctgactgacattctgcagcatcagatcagggctgtcccctttgagaacctgaatatccactgcggcgacgcgatggacctagggctggaagctatcttcgatcaggtggtgcggcgcaaccgcggggggtggtgcttgcaggtcaaccatctgctctactgggccctgaccaccataggctttgaaacaactatgttgggtggctacgtttactcgactccagccaaaaagtactcaaccggcatgatccacttgctgctgcaggttaccatagatgggcgaaattacattgtggacgccgggtttggcaggagttaccagatgtggcagcctctggaattaatcagtgggaaggaccagcctcaggtcccctgtgtttttcggctgacggaggaaaatgggttttggtaccttgatcagatccggagggaacaatatattcctaacgaggagtttctgcactctgacctgttggaggatagcaagtaccgcaagatctactctttcacactcaagccgaggaccatcgaggatttcgagtccatgaatacctacctccagacaagtcctagttccgttttcacatccaaatctttttgtagccttcagacacccgacggagttcactgtctggttggctttacccttacacatcggcgattcaattacaaggataacaccgatcttatcgaatttaagacgctttccgaagaagaaattgaaaaggtattgaagaatatctttaacatttcactgcagcgcaagctggttcctaagcatggcgaccggttctttacaatatag

SEQ ID NO: 196462 - DNA, 873 bp, synthetic construct
  misc_feature 1..873: note = Description of Artificial Sequence: Synthetic coding sequence
  source 1..873: mol_type = other DNA
atggacatcgaggcctacctggagcggatcggctacaagaagagccgcaacaagttggacctcgaaacattaacagacatccttcaacatcaaataagagcagtgccattcgagaatctgaatatccactgtggggacgccatggacttggggctcgaggcaattttcgatcaggtggtacggcggaaccgggggggttggtgtctgcaggttaaccatctgctgtactgggccctcaccacaattggattcgaaactaccatgctgggcggttacgtctattctacacccgcaaaaaagtactctacagggatgatccatctgcttctccaggtgaccattgacggcagaaattatatcgtagacgcgggctttggaaggtcctaccagatgtggcagcccctggagctaatttcgggaaaagaccagccccaggtcccatgcgtgttcaggctaactgaggagaacggcttttggtacttggaccagattaggcgggagcagtatatccctaacgaggaatttctgcacagcgaccttttggaggacagcaaatatcgcaagatctacagctttactttgaagcctagaaccatcgaggactttgagtctatgaacacatatttacagacctcaccttcaagcgtttttactagcaaatccttctgctctttgcagaccccagatggagtccactgcttagtgggtttcactcttactcacaggcggttcaattacaaagacaacacagatctgattgagttcaagactctctcagaagaggaaatcgagaaagtgcttaaaaacatcttcaatatcagcctgcagcgcaaattggtcccgaagcacggagatcgcttcttcactatctag

SEQ ID NO: 196463 - DNA, 873 bp, synthetic construct
  misc_feature 1..873: note = Description of Artificial Sequence: Synthetic coding sequence
  source 1..873: mol_type = other DNA
atggacatcgaggcctacctggagcggatcggctacaagaagagcagaaacaaactggacctggagacccttactgatattttgcagcaccaaatcagggcagtgccattcgaaaacctcaatatccattgcggggacgccatggatctgggcctcgaagccatatttgaccaggtggtgcggaggaaccgcggcggatggtgtcttcaagtgaatcaccttctctactgggccctcacaactatcgggttcgagacgaccatgctgggtggatatgtttacagtacccctgcaaaaaaatatagcacagggatgatccatctgttgctgcaggttaccatcgatgggcgaaattacattgtggacgccggatttggcaggagctatcaaatgtggcaaccacttgaactaatatcggggaaggaccaaccccaggtcccttgtgtgtttcgcctgaccgaagagaacgggttttggtatctagatcaaatcagacgtgaacagtacatccctaacgaagagtttctacacagcgacctgcttgaagactcaaaataccgaaagatctattcttttacactgaaaccacggaccatcgaggacttcgaatccatgaatacatacctgcagacatctccctcttcagtgttcacatccaagagcttctgttccctgcagactcccgacggtgtacactgcttagtcggcttcaccctcacccatcggcgcttcaactacaaggataatactgacctcatcgagttcaaaacactgtctgaagaggagatagaaaaagttttgaagaacatctttaatataagtctgcagcgtaagttggtacccaaacacggcgatagattcttcacaatatag

SEQ ID NO: 196464 - DNA, 873 bp, synthetic construct
  misc_feature 1..873: note = Description of Artificial Sequence: Synthetic coding sequence
  source 1..873: mol_type = other DNA
atggacatcgaggcctacctggagcggatcggctacaagaagagcaggaacaaactagacctggagaccctgaccgatatcttgcagcaccagatcagggcggtcccctttgaaaatctaaatattcactgtggcgatgccatggatctcggcctggaggctattttcgaccaggtcgtccgtcgcaatcggggaggatggtgcctacaggtcaatcacctgttgtactgggctctgactaccattggctttgagaccacaatgttgggcggatacgtgtactctactccagcaaaaaagtatagcactgggatgattcatttactcctgcaggttacaattgacgggcggaactacatcgttgacgctggcttcggacggtcctatcagatgtggcagccgctggagctgattagcggaaaagaccagcctcaagtgccctgcgtgtttcggctgactgaggagaacggattctggtacttggatcaaataaggagggaacagtacatcccaaacgaggagttcctccacagcgatctgctcgaggacagcaagtaccgcaagatctattcgtttaccctcaaaccaaggacaatcgaagatttcgaatctatgaacacatatcttcagacttctccgagctctgtgttcactagtaaatctttttgtagcctccagaccccagacggggtgcactgccttgtgggctttaccctgacccaccgccggttcaattacaaggataatactgacctcattgagtttaaaaccttgtcagaggaggagatcgaaaaagtactgaaaaacatatttaacattagtctccagagaaaactcgtcccaaagcatggcgaccggttcttcaccatttag

SEQ ID NO: 196465 - DNA, 873 bp, synthetic construct
  misc_feature 1..873: note = Description of Artificial Sequence: Synthetic coding sequence
  source 1..873: mol_type = other DNA
atggacatcgaggcctacctggagcggatcggctacaagaagagcaggaataaactggatcttgaaacgttgactgacattcttcagcaccaaattagggctgtgccgttcgagaacctgaacattcactgtggcgacgctatggatctcggtttggaagcgattttcgaccaggtggtgaggcggaatcgtggtgggtggtgtcttcaggtaaatcacctcttgtattgggccttgacgaccattggcttcgagacaacgatgctgggcggatacgtctatagtaccccggctaaaaaatactccacaggaatgatacacctgctgctgcaggtcactattgatggcaggaactatatcgtggatgccggctttggcaggagctaccaaatgtggcagcctctggagctaatctcgggcaaggaccaaccacaagtcccctgtgtcttccggcttacagaggagaacgggttctggtacctggatcagattagaagggagcagtatatcccgaacgaggagtttctgcatagtgacctgcttgaggatagcaagtatagaaaaatttacagttttacccttaaacctagaacaattgaggatttcgaaagtatgaacacctatctgcagactagcccttcgtcagtgttcacctccaaatctttttgtagcttacagacccccgacggggtacattgcctggtagggttcaccttgactcatagacgcttcaattataaggataacaccgacctgatcgaattcaaaacactgagcgaggaagaaatagagaaggtgctgaagaacattttcaatatatctctccagcgaaagctggtgccaaagcacggggacaggttttttacaatttag

SEQ ID NO: 196466 - DNA, 873 bp, synthetic construct
  misc_feature 1..873: note = Description of Artificial Sequence: Synthetic coding sequence
  source 1..873: mol_type = other DNA
atggacatcgaggcctacctggagcggatcggctacaagaagagcaggaataagttggacttagagaccctgactgatattctacaacatcaaatccgggctgtccccttcgaaaacctgaatatacattgcggagatgccatggacctcggcctggaagctatttttgaccaagttgtgcgaagaaatcgtggaggctggtgcttgcaagtgaaccacctcctttattgggcgctgacaactattggcttcgagacaaccatgctgggtggttacgtctattctaccccagccaaaaagtactcaacaggcatgatccacctgctcttacaggtcaccatcgacggccggaattatattgttgatgccggatttggacgaagctaccaaatgtggcagcccctggagctgatttccgggaaggaccagccacaggtcccttgcgtattccgcctgaccgaggaaaacgggttctggtacttggatcagatcagaagagagcagtacattcccaacgaagagtttctccacagcgacctgttagaagattctaagtataggaaaatttacagcttcacgctgaagccccgtaccattgaagacttcgaatcaatgaacacgtacctccagacatctccgagctcggtgttcacgagtaaaagtttctgcagccttcagacccccgatggcgtgcactgcctcgtgggcttcaccttgactcatagacggtttaactacaaagacaataccgacctgatcgagttcaaaacgctctccgaggaggaaatcgagaaggtgctgaagaatatcttcaatatttccttacagagaaagttagtcccaaaacacggagataggttcttcaccatttag

SEQ ID NO: 196467 - DNA, 1059 bp, synthetic construct
  misc_feature 1..1059: note = Description of Artificial Sequence: Synthetic coding sequence
  source 1..1059: mol_type = other DNA
atgctgctgctgctgctgcacaaggaggccgccctggagccccagggtcctgcagttgggtataactccctgcccgtgagtgatgaccaccatgtctctggcatacaggccaggaagaagcagcagtcagtgttttggatcaagactgaggatcaaccaacatttaacctcctgagaaaaggcattatggacattgaagcatatctggaaagaattgggtataaaaagagccgcaacaagctcgacctggaaactctgacagacatcctccagcaccagatacgcgccgtcccgtttgaaaacctgaacatccattgtggggatgccatggacttgggcctggaggcaatttttgaccaggtcgtgaggaggaaccgcgggggatggtgcctgcaggtcaatcacctcctgtactgggccctgaccacgatcggtttcgagacaacaatgttaggtggctatgtgtacagcaccccagccaagaaatacagtactggcatgattcaccttctgctccaggtgacaatcgatggacggaattatattgtggatgccggattcggccgctcataccagatgtggcagcctctggagctgattagcggtaaggaccagccccaagtgccctgcgtctttcgcctgacagaggagaacggcttttggtacctcgaccagataaggcgggaacagtatatacctaacgaggaattcctccacagtgatctcctggaggatagcaaatatcgcaaaatatactcattcaccctgaaacctcgcacaatcgaggactttgagagtatgaacacatatctgcaaacaagccctagctcagtcttcaccagcaagtcgttctgtagtcttcagactccggacggggtccattgtctggtgggcttcacactgactcatcgcaggttcaactacaaagataacacagacctcatcgagttcaagacactctctgaggaggaaattgaaaaggtccttaaaaacatattcaacattagcttacagaggaaattggtccccaaacacggtgatcggttcttcacaatatag

SEQ ID NO: 196468 - DNA, 873 bp, synthetic construct
  misc_feature 1..873: note = Description of Artificial Sequence: Synthetic coding sequence
  source 1..873: mol_type = other DNA
atggacatcgaggcctacttcgagcggatcggctacaagaacagcagaaataaactagatcttgaaacactgacagacatcctggagcaccagatccgggctgtaccttttgagaatctgaacatgcactgcggtcaagctatggaactgggactggaagctatattcgaccacattgtcaggagaaacagggggggctggtgtcttcaagtgaaccagttgttatattgggcactcacaaccatcggctttcaaactacaatgttgggaggctacttctacatcccccctgtcaataagtatagcaccggtatggtacacctccttctgcaagtgactatcgacggccggaattacatcgtcgacgcaggaagtggctcgagcagccaaatgtggcagcctctggagctaattagtggcaaggaccagccccaggtgccgtgcatcttttgcctgactgaggagagaggcatctggtatcttgaccagattcgtagggaacagtacattactaacaaggaatttctgaattcacaccttctgcctaagaagaaacatcagaaaatttatctgtttacattggagccacggactattgaggatttcgaaagcatgaatacttatctgcagacctctcccacctcatcatttattacaacatctttctgctccctccagaccccagagggagtgtattgcctggtcgggttcattctcacttacagaaaattcaattacaaggacaacaccgatctagtggaattcaagacgctcacggaagaggaagttgaggaagtgctcagaaacatctttaagatctcattgggaaggaatctcgtgcccaagcctggggacggttcgttgaccatatag

SEQ ID NO: 196469 - DNA, 684 bp, synthetic construct
  misc_feature 1..684: note = Description of Artificial Sequence: Synthetic coding sequence
  source 1..684: mol_type = other DNA
atggccccctgccacatccggaagtaccaggagagcgaccggcagtgggttgtaggcctgctttcacggggaatggccgaacatgcgcctgctacatttagacagctcctcaagctgcccaggaccctcatactccttttgggcggtcctctggctctgctgcttgtgtcaggctcctggttgttagccttggttttctccatctcgctctttcctgccctgtggttcctggccaaaaagccctggaccgagtacgtagatatgacactatgtactgacatgagtgacatcacaaaatcgtacctgtctgaaagaggatcatgcttttgggttgctgagtctgaggaaaaagtagtgggaatggtcggcgccctgccagtcgatgatcccacattacgcgagaaaagacttcagctgtttcaccttttcgtggacagcgagcacagaagacaggggatcgccaaggccctggtccgcacggttctacaatttgcaagggaccaaggctactcggaggtcatccttgatacagggaccatccaattatcggcgatggccctgtaccagtctatgggttttaaaaagaccggccagtcatttttctgtgtgtgggcgaggctcgttgccctgcacacggtgcacttcatctaccatctgccatcctccaaagtggggtccctgtag

SEQ ID NO: 196470 - DNA, 405 bp, synthetic construct
  misc_feature 1..405: note = Description of Artificial Sequence: Synthetic coding sequence
  source 1..405: mol_type = other DNA
atggccgacatcgagcagtactacatgaagccccccggcagctgcttttgggtagccgtgctagacggtaacgtggtgggcatcgttgctgcccgggcacacgaggaggacaatacggttgagctcctgagaatgtcagtggacagccgatttaggggtaagggcatcgccaaggccctgggacgtaaggtactggagttcgcagttgtacacaactatagtgctgtggtcctagggaccaccgccgtgaaggtggctgcccataaactgtatgaatcacttggcttccgccacatgggcgccagcgaccactatgtgttgcctggaatgaccttatcactggctgagcgcttattttttcaggtcagatatcatcggtacagactccagctgcgcgaagaatag

SEQ ID NO: 196471 - DNA, 909 bp, synthetic construct
  misc_feature 1..909: note = Description of Artificial Sequence: Synthetic coding sequence
  source 1..909: mol_type = other DNA
atgcactgcggcccccccgacatggtgtgcgagaccaagatcgtggcggcagaagaccacgaggcgcttcccggagcaaaaaaggacgccctcctggcagctgcgggagctatgtggcccccccttccagccgcccctggccctgctgcagctccacccgctccacccccagcacctgtagcccagccccacggcggtgccggtggcgcgggcccccccgggggacgcggggtgtgtatcagagagttccgggcggctgagcaggaagcagctaggcgcatcttctatgatggcattatggagcggattcccaacacagccttccgcggactgcggcagcaccccagggctcagttgctgtatgcgctgttggccgccctgtgctttgcagtgagtcgctctctgcttctgacctgtctcgtgccagccgcactcctgggattgaggtactattatagccgcaaggttattcgcgcatacctcgagtgcgcacttcatacggatatggcagatatcgaacagtactatatgaagccgcccggttcatgcttctgggtggccgtgcttgatggcaatgtcgtcggaatagtggccgcacgtgcacacgaagaagataacactgttgaacttctgcgcatgtctgtcgacagcaggtttcggggaaagggaatcgctaaagctctcggacgaaaagtgttagagttcgcggtcgtccacaactattctgctgttgtcctgggtactacagcagtcaaggtcgcggctcacaagctgtatgaaagtcttgggtttcgccacatgggggcttcagatcactacgtgctgcccggaatgacccttagtctggcagaaagattgtttttccaggtgagatatcaccggtaccgtctccagttaagggaggagtag

SEQ ID NO: 196472 - DNA, 1182 bp, synthetic construct
  misc_feature 1..1182: note = Description of Artificial Sequence: Synthetic coding sequence
  source 1..1182: mol_type = other DNA
atggacgagaacgagagcaaccagagcctgatgaccagcagccagtaccctaaagaagcggtgagaaaaaggcagaacagcgcccgaaattctggcgcttcagactcttcgcgtttttcccggaaatccttcaaactggattatcgccttgaggaggatgtcactaagagcaaaaaagggaaagacgggagatttgtgaatccatggcctacatggaagaacccgtctattccgaacgtgctgcgctggttaatcatggagaaggatcatagcagcgttccgtcatcaaaggaagagctggacaaagagctcccagtgctgaagccctacttcatcacaaatcccgaagaggcaggggtccgggaggccggcttgagagtgacctggttggggcacgcaacggtcatggtggaaatggacgaattgatcttccttactgaccccatcttttccagcagagccagcccgtctcagtatatgggtcctaagaggtttcggagatcgccttgtacaatatccgagctccctcccatcgacgcagtcctcatttcacataaccactatgatcacctggattataatagcgtcattgccctgaacgaacgatttggtaacgagctgcgctggtttgtgccccttggcctgttagactggatgcagaagtgcggctgtgagaacgtgatcgagctggattggtgggaggaaaactgcgtcccagggcacgataaagtgacgtttgtgtttacaccttcccagcactggtgcaagcggacgttgatggacgataataaagtcttgtggggcagttggagcgtgctgggaccttggaaccgctttttctttgcaggggataccggctactgtcccgctttcgaggagattgggaagagattcgggccatttgatttggccgccatccccatcggggcgtatgagcctagatggttcatgaagtatcagcatgtcgaccccgaggaggcagtgaggatccacaccgacgttcagactaaaaaatcgatggcgatacactggggaaccttcgccctagccaacgagcactacctagagccccccgtgaagctgaatgaagctttggaaaggtacggtctgaatgctgaagactttttcgtgctgaagcatggagagagcagatacttaaataatgacgatgagaacttttag

SEQ ID NO: 196473 - DNA, 375 bp, synthetic construct
  misc_feature 1..375: note = Description of Artificial Sequence: Synthetic coding sequence
  source 1..375: mol_type = other DNA
atggacgagaacgagagcaaccagagcctgatgaccagcagccagtacccgaaagaagccgttaggaaacggcaaaactccgcacggaacagtggggcttctgactctagcagattcagtcgcaagtccttcaagctggattacagacttgaggaagacgtgacgaagtcaaaaaagggtaaggacgggcgcttcgtaaatccctggcccacctggaagaatccctcaatcccaaatgtgctacggtggctaattatggaaaaggatcatagctctgtccctagtagcaaggaggagctcgataaagaactgccagtgcttaagccttatttcatcactaacccggaggaagctggggttcgggaggccggctag

SEQ ID NO: 196474 - DNA, 1182 bp, synthetic construct
  misc_feature 1..1182: note = Description of Artificial Sequence: Synthetic coding sequence
  source 1..1182: mol_type = other DNA
atggacgagaacgagagcaaccagagcctgatgaccagcagccagtacccgaaggaggccgtacgcaaacgacagaactccgcaaggaattccggcgccagcgactcttctaggttctctaggaagtcatttaaactggactatagactggaagaggatgtgacaaagtctaagaaaggcaaggacggtagattcgttaatccctggcccacttggaagaaccctagcattcctaacgtgctcagatggctcatcatggagaaagaccattcatctgtcccatcgagtaaagaggaattggataaggagctccccgtcttaaagccctactttattaccaatcctgaagaagccggggtgagggaagccggactgagagttacttggctcggccacgcaaccgtgatggtggaaatggatgaactgatctttctgactgatcccatcttcagcagtagagcctcaccgtctcaatacatggggccaaagcgattcaggagaagtccatgcacaattagtgagttaccacccatcgacgctgtgcttatctctcacaaccactacgaccatctagactacaattccgtcatcgccctgaatgaacggttcggcaatgagctccgctggttcgtgccgctgggtcttttggactggatgcagaagtgtggatgtgaaaacgtgatcgaacttgactggtgggaggagaattgtgttcctggacatgacaaggtgactttcgtatttactccttcacaacattggtgcaagcgaaccctgatggacgacaataaagtgctgtggggctcatggtctgtgttggggccctggaacaggttcttcttcgccggtgacacgggttactgccctgccttcgaagagataggcaaacgtttcggtccatttgacctggccgccatccctattggagcctatgaacccagatggttcatgaagtatcagcatgtggacccagaagaagccgttcgcatccacaccgatgtccagaccaaaaagtcaatggctatccattggggaaccttcgcattagccaacgagcactatctcgaaccacctgtgaaactgaatgaagctctggaaaggtacggcttgaacgccgaggatttctttgtcctcaagcatggcgagtctcggtatctaaataacgacgatgagaatttctag

SEQ ID NO: 196475 - DNA, 18 bp, synthetic construct
  misc_feature 1..18: note = Description of Artificial Sequence: Synthetic coding sequence
  source 1..18: mol_type = other DNA
atggacgagaacgagtag

SEQ ID NO: 196476 - DNA, 1182 bp, synthetic construct
  misc_feature 1..1182: note = Description of Artificial Sequence: Synthetic coding sequence
  source 1..1182: mol_type = other DNA
atggacgagaacgagagcaaccagagcctgatgaccagcagccagtatcccaaggaggcagtgcgaaaaaggcagaacagcgcaagaaacagtggagccagtgatagtagccgtttctctcggaaatcttttaaattggactaccgcctggaagaagatgttacgaagagtaaaaagggtaaggatgggaggtttgtcaacccatggcccacctggaaaaaccccagcatacctaatgtgctgagatggctgataatggaaaaagaccatagcagtgtcccatcaagcaaggaggagctcgacaaggagctgcccgtgctgaagccatactttatcacgaatcccgaggaggcaggggtgagagaagcgggcttgcgggtgacctggctggggcatgcgacagtaatggttgaaatggatgaactgatcttcttgactgatcccattttctcatcccgcgcatctccaagccagtatatgggccccaagcgcttccgtagatccccttgcacgattagcgaactgccccctatcgacgcggtcctgattagccacaatcactacgaccatctggactacaattcggtgattgctttgaatgagaggttcggcaacgaactgcgttggtttgtgcctctcgggttgctggactggatgcaaaaatgtggatgcgagaatgtgatcgaactggactggtgggaggaaaactgtgtgccggggcatgataaagtgacatttgtgtttaccccctcccagcattggtgcaagcgcacactgatggatgacaacaaggttctttggggcagctggtcagtgctgggtccttggaatagattcttttttgccggagatactggctattgtcccgcgtttgaggaaattggaaagcgcttcggcccattcgatcttgccgcgattcccataggtgcctatgaaccccggtggtttatgaagtaccagcatgtggatcccgaagaggcggtccggattcatacagacgtgcagacaaagaagtctatggcgatccactggggtaccttcgcattggccaacgaacactacctggaaccacctgtaaaactcaacgaggccttggagaggtacggcctgaatgccgaggatttcttcgtgctgaagcacggcgagtccaggtatcttaacaatgacgacgagaacttttag

SEQ ID NO: 196477 - DNA, 1401 bp, synthetic construct
  misc_feature 1..1401: note = Description of Artificial Sequence: Synthetic coding sequence
  source 1..1401: mol_type = other DNA
atggcccggcggcgggagctgaagcggtgcctgcagctgctggccagctcggcggagcctgctaggcgtgctagggtgcggaagaacccttccgcatgtcggggtcgcccgtctagatacgctgcggcactgtgtgcaggcacactgtggcctgaagccgcagagctgaggcgcagggctctccccgccactccttctgcttcatccagcccaaaggacatggatgagaatgagagtaaccagagcctaatgacatccagccagtacccaaaggaggccgtgaggaaacgtcaaaattccgctcgtaattctggcgcaagcgatagtagcagattttcgcggaagtccttcaagctggactatcggctggaggaagacgtgaccaagtcaaaaaaggggaaggatggccggtttgtgaacccctggccgacttggaaaaatcccagcattcccaacgtgctccgatggcttatcatggagaaggatcatagctcggtgccctctagtaaggaagagctggacaaggaacttccagtcctcaagccttacttcatcaccaacccagaggaggctggcgtgagggaagccgggctgcgggtgacctggctgggacacgccacagtaatggtcgaaatggatgaacttatctttctcacagatcccatcttctcgtcgagagccagtccctctcagtacatgggacccaaaaggttcagaagaagcccatgcactatctcagagcttcccccgatcgatgccgtactgatcagccataaccactacgaccacctcgattacaatagcgtgatcgcccttaacgaacgatttggaaatgagcttcggtggtttgtgcctcttggccttctcgattggatgcaaaaatgtggatgtgagaatgtgatcgagctggattggtgggaggagaactgtgtgcctggtcacgacaaggtaaccttcgtattcacaccttcacagcattggtgcaaaaggacactgatggatgataataaggtgttgtggggaagttggagcgtactgggcccatggaatcgtttcttctttgcgggggacacaggatactgtcccgccttcgaagagattggcaaacgctttgggcccttcgacctggccgccattcctatcggggcctacgagccaagatggtttatgaaataccagcatgtggatccagaggaggcagtgcgaattcacaccgacgtccagacgaagaaatctatggctatacattggggcacgttcgcactcgccaacgaacattacctcgaaccacccgtcaagttgaatgaagcgcttgagaggtacggactcaatgctgaggatttttttgtgcttaaacatggtgaaagccgctacttaaataatgatgatgaaaatttctag

SEQ ID NO: 196478 - DNA, 1182 bp, synthetic construct
  misc_feature 1..1182: note = Description of Artificial Sequence: Synthetic coding sequence
  source 1..1182: mol_type = other DNA
atggacgagaacgagagcaaccagagcctgatgaccagcagccagtatccaaaggaagccgtgcgaaaacggcagaactctgcgcggaacagcggcgcctccgattcttctagattctctagaaagagcttcaagcttgattacaggctggaagaggacgtgacgaaatcaaaaaagggcaaggacggtcgtttcgtgaacccatggcccacctggaagaacccttcaatcccaaatgtgctgcgttggctaatcatggaaaaggaccattctagtgtaccctcgtcaaaagaagagctcgacaaggaactccctgtgttgaagccatacttcattactaatcccgaggaggccggtgttcgcgaggccggtctccgagtaacgtggctaggacatgccaccgtcatggtggaaatggatgaattaatctttcttaccgaccccatcttttcatccagggccagtccaagtcagtatatgggccccaagagatttcggagatccccctgcaccatatcagagttgccgcccatcgatgcagtgttaattagccacaaccattacgaccatctcgattataactccgtcattgcactaaacgagcgttttgggaatgagctcagatggttcgtgccactggggctgttggattggatgcagaaatgcggatgtgagaacgtgatagagctagattggtgggaggagaactgtgtgccgggccacgacaaggtaacgttcgttttcactccaagccagcattggtgcaagaggacactcatggacgataacaaagtgctgtggggtagttggtccgtgctgggaccatggaatagattcttctttgcgggagacactggatactgcccagccttcgaggaaattgggaagcggtttgggccgtttgatctggcagccatcccaataggagcatacgagccgcgttggttcatgaagtaccaacatgtggatccggaagaggctgtgcggatacacacagacgtgcagactaaaaagagcatggccatccactgggggactttcgcgttggccaatgagcactatttggagcccccagtgaaactcaatgaagccctggagcgctatggattgaacgccgaagatttctttgttttaaaacacggagaatcccgttatttaaacaatgacgacgagaacttctag

SEQ ID NO: 196479 - DNA, 2199 bp, synthetic construct
  misc_feature 1..2199: note = Description of Artificial Sequence: Synthetic coding sequence
  source 1..2199: mol_type = other DNA
atggagcggcaggtgctgctgagcgagcccgaggaggccgccgccttgtaccgcggcctgtcaaggcagccagctctgagcgccgcctgcctcggccccgaggtgaccacccaatacggaggacagtataggacggttcataccgaatggacacagcgtgatttggagcggatggagaacataaggttttgtcgccagtatctggtgttccacgatggagacagcgtcgtgtttgccggccctgcagggaactccgtagaaacgagaggtgagctgctctctagggagtccccatcaggtacaatgaaagctgtgctgaggaaagctgggggaacaggccccggcgaggaaaaacaatttttggaggtgtgggaaaaaaatagaaagttgaaatcatttaacctgagcgctcttgagaaacacgggcctgtctacgaggacgattgctttggatgcctgtcctggagccactccgaaacgcatctgctttatgtcgcggagaaaaaaagaccaaaggctgagtccttctttcaaaccaaggctctggatgtcagcgcatccgatgatgagattgcacggcttaaaaagcccgatcaggcaatcaaaggagatcaattcgtgttctacgaggactggggtgaaaacatggtctctaaatcaatacctgtcttgtgtgtcctcgatgtggagagcggcaacattagtgtgctggagggtgtgccggagaacgtgagcccaggccaggctttttgggctcctggcgacgccggcgtggtctttgtcggatggtggcacgagccctttaggcttgggatccgattctgcaccaacagacgatccgcactgtactacgtcgacctgattggcggcaagtgcgaattgctttccgacgattccctcgcagtgtcgagcccaaggctaagcccggatcaatgcaggatcgtgtacctgcaatacccatccttgattcctcatcaccagtgcagtcaactgtgtttgtacgactggtacactaaagtaacctccgttgtggttgacgtggttccacggcagctgggggaaaatttcagtggtatttattgctctctccttcccctgggctgttggtctgctgactcacagcgagtggtgttcgattcggctcaacgttcgaggcaagacctcttcgctgtcgatacccaagtcggaactgtcaccagtctgacagccggcggcagtggcggatcttggaagctgctcactattgaccaggacctcatggttgcccagttttccaccccaagcctacctccaacgctgaaggtgggcttcctgccatccgcaggaaaggaacagtctgttctgtgggtctctctggaggaggccgaaccgatacctgatatacattggggtatccgcgttttacagcctccaccggagcaagagaacgtacagtatgcaggtctcgattttgaggcgatactgttgcagccaggatcaccaccagacaagacccaggtacccatggtcgttatgcctcatggagggccacactccagctttgtcacagcctggatgcttttccccgctatgctgtgtaagatggggttcgcagttctgctcgtaaactatcgtgggtccaccggctttggtcaggatagcatcctctccctccccggaaacgtgggccaccaggatgtcaaggacgtgcagtttgctgttgagcaggtactgcaggaagaacatttcgatgccagtcacgtggcattgatgggcggctcacatggtggcttcattagttgccatttgatcggacagtacccggaaacataccgtgcatgcgtcgccaggaatcctgtcattaacattgcgagcatgctggggagcactgatatcccagactggtgcgtggtagaggctggattcccctttagctcagattgtctcccagacctctccgtgtgggccgagatgctggacaagagcccaatccgatacattccccaggttaagaccccattgctgctgatgctcgggcaggaggaccgtagggtcccctttaagcaggggatggagtactatcgcgctctgaagacccggaacgtcccagtaagacttctgctctatccaaagagcacacacgcactgtcagaggtggaagtggagtccgatagctttatgaatgccgtcctgtggctgagaacccatctgggctcctag

SEQ ID NO: 196480 - DNA, 1833 bp, synthetic construct
  misc_feature 1..1833: note = Description of Artificial Sequence: Synthetic coding sequence
  source 1..1833: mol_type = other DNA
gtgctgaaccggctgcagagcaagtacggcagcctgtaccggcgggacaatgtgatactgtcaggaacccacacccatagtggcccggccggttacttccagtacaccgtatttgttattgcaagcgaagggttctccaatcaaacttttcagcatatggtcacaggaatcctgaagagcattgacatcgcccataccaatatgaaacccggcaagatctttatcaacaagggaaacgtcgatggcgtccaaataaacaggtctccttactcgtatctacaaaaccctcaaagcgagcgcgcccgatattctagcaacacggacaaggaaatgatcgtgctaaagatggtggatcttaacggggacgacctaggcttgatcagttggttcgctatccatcccgttagtatgaacaatagtaatcacctggtgaacagtgataacgtgggctacgcatcttatctgctggagcaggagaagaataagggatacttgcctggccaaggtcctttcgtggccgccttttccagcagtaatctaggcgacgtgagccccaacattctcggaccgagatgtatcaacacaggggaatcgtgcgacaacgcgaatagcacctgtcctatcggcggtccgagtatgtgcattgccaaggggcctggccaggacatgtttgatagcacgcaaattattgggagagctatgtatcaacgagctaaggagctgtatgccagcgcctctcaggaggtgaccggccctctcgcatctgcccatcagtgggtcgacatgactgacgtgaccgtttggctgaacagcacacacgcttcaaagacctgcaagccagctctaggctattcattcgcagccggaactatagatggagtaggtggactaaacttcacacagggtaagactgagggggacccgttttgggacactatccgcgaccagattctgggaaagccgagcgaggagattaaggaatgccacaagccaaaaccgattttactgcacaccggcgagttgtcgaaaccacacccctggcaccccgatatcgtcgacgtgcaaataatcactctgggatcgctggcaatcactgctatccccggcgaatttacgaccatgtctggcaggagactcagggaggcggtgcaagccgagttcgcgagccacggtatgcagaatatgactgtggtgatctcagggctgtgtaatgtgtatacccactatataacaacatacgaagagtatcaggcccaaagatacgaagctgcatccacaatctacggtccacacacacttagcgcatacatccagctgtttcggaatctggccaaagcaatcgcaacagatacagtcgctaatctgagtaggggcccggaaccgccgttctttaaacaactgatcgtaccattaatcccaagtattgtggatagggcgcccaaaggcaggacgtttggtgatgtactgcagcctgccaagcctgaatatcgcgtaggggaggtcgccgaagtgattttcgtgggagcaaatccaaaaaactcagtccagaatcagaatcatcaaactttcctaactgtggagaaatacgaggccaccagtacaagttggcagattgtgtgtaacgatgccagttgggagaccagattttactggcataagggcctgctcggactgagcaacgctacagtggagtggcatattccggatacagctcagcccggaatctaccggattcgatactttggacacaataggaagcaagatatcctcaaacctgctgtcatcctatctttcgaagggacgtcgcctgcatttgaggtggtcaccatctag

SEQ ID NO: 196481 - DNA, 1869 bp, synthetic construct
  misc_feature 1..1869: note = Description of Artificial Sequence: Synthetic coding sequence
  source 1..1869: mol_type = other DNA
atggacagcgagaagagcagcgagtggcggagcgacgtgctgaacagattacagtccaagtatggatcactgtatcggagagataacgtgattctgtctggaacccacactcactcaggcccagctggatactttcagtacactgttttcgttatagcctcagagggcttctccaatcaaactttccaacatatggttacaggcattttgaaaagcatagacattgcccacactaacatgaagcctgggaaaattttcatcaacaaagggaacgtggatggtgtgcaaatcaataggtctccctactcttacttacaaaatccacagtcagagcgggcccgctactcttctaacacagacaaggagatgattgtcctgaagatggtggacctcaacggtgatgacctggggctaatcagttggttcgccatacatccggtgagcatgaataacagcaatcatctcgttaattccgacaacgtggggtatgcgtcatatctcctggagcaggaaaagaacaagggctacttgccaggccagggcccattcgtcgccgccttttcctcctccaatctgggagatgtctcacccaatatcctgggaccacgttgcatcaacactggggaatcctgcgataatgcaaactccacttgccccattggcggcccatccatgtgtatcgcaaagggccccggccaggacatgttcgatagcacccagataatagggcgggcaatgtaccagcgtgccaaagagctgtatgctagtgcatcgcaagaggtgactgggcctcttgccagcgcgcaccaatgggtcgatatgacagacgtaacggtgtggctcaactctactcacgcatccaagacctgcaagcctgcacttgggtattccttcgctgccgggacaattgatggggtaggcgggcttaacttcacacaaggtaaaaccgagggggatcccttctgggacaccatcagggatcagatcctgggcaagccatccgaggaaatcaaggaatgtcacaagccgaagcccatactgcttcacaccggcgagctgagtaaaccacacccttggcatcctgatattgttgacgtgcagattatcaccctgggatcactggccatcacagcaatcccgggagagttcacaacaatgtccggccgtcggttacgggaagccgtccaggccgagtttgcctcccacggcatgcaaaacatgacagtagtgatatccggactctgtaatgtgtacacacattacattactacatatgaagagtatcaagctcagagatatgaggcggcaagcaccatctacggaccccatactctgtccgcctacatccagctctttcgcaacctggcgaaagctatcgccaccgacacagtggctaatctttccaggggcccggagcctcctttctttaagcagctcatcgtgcccctgatcccgagtatcgtggatcgggccccaaaggggcgcacattcggggatgtcctgcagccggccaagcctgaatatcgtgtaggcgaagttgcggaggtcatctttgtgggggcaaaccctaaaaacagcgtccagaaccagaatcaccagacttttttgaccgtcgaaaagtacgaggctacttcaacatcatggcagatcgtctgcaacgacgcttcatgggagacccgcttctattggcacaaagggctattgggcctgtcaaatgcaaccgtagaatggcatattccggacactgcgcagcctggtatctaccgaattcggtattttggtcataaccgcaaacaggatatactgaagcctgccgtcattctttccttcgaaggaacctcaccagcgtttgaggtcgtcaccatctag

SEQ ID NO: 196482 - DNA, 1341 bp, synthetic construct
  misc_feature 1..1341: note = Description of Artificial Sequence: Synthetic coding sequence
  source 1..1341: mol_type = other DNA
atggagatggagcaggagaagatgaccatgaacaaggagctgagccccgacgctgctgcatactgctgctctgcctgtcacggtgacgaaacgtggagctataaccaccctattcgaggaagagctaaatctcgttcactgtcagccagccccgctctaggctcaactaaggaatttaggagaacccgatccttgcatggaccgtgtcccgtgacgacatttggccccaaggcttgtgttctgcagaaccctcagactattatgcacatccaggacccagcatcacagagactgacttggaataagagccctaagagtgtactggtgattaaaaagatgcgggacgcgtcactcctacagcctttcaaggaactgtgcactcatctcatggaggagaacatgatcgtgtatgtggagaagaaggtcctcgaagatccagctatcgcttctgatgaaagcttcggcgctgtgaagaaaaaattttgtacatttcgcgaggactatgacgatatctccaaccagatcgactttataatttgcctcggaggcgatggcacactgctgtatgcatctagtctgtttcaaggtagcgtccctccagtgatggccttccatctgggttccctaggcttcttaactccattttcatttgagaactttcagtcccaggtcacgcaggttatcgaggggaacgctgccgttgtgctgaggtcacggctgaaagtacgggttgttaaagagcttcgggggaaaaagacagctgtccacaacggactgggcgaaaatgggagccaggccgcaggtctggatatggacgttggaaaacaagcaatgcaatatcaggtgctgaatgaagtggtgattgaccgcggaccgtcttcctacctgtcaaatgtcgatgtctacctcgacggccacctcataactacggtgcagggtgacggcgtgatagtgagcacccccactggttcaacagcctatgctgccgcggccggcgctagcatgattcaccctaatgtgcccgcaattatgataactccaatatgcccacactccttatcatttcgccccatagtggtccctgctggagttgagctgaaaattatgctgtccccagaggcacggaataccgcttgggtgagtttcgacgggagaaaaagacaagaaattcggcacggtgacagcatcagcatcaccaccagctgctaccccctcccgagcatttgcgtcagagaccccgtgtcggactggttcgagtctctggcccagtgtttgcattggaatgttcggaagaaacaagctcactttgaagaagaggaagaggaagaggaggagggctag

SEQ ID NO: 196483 - DNA, 1341 bp, synthetic construct
  misc_feature 1..1341: note = Description of Artificial Sequence: Synthetic coding sequence
  source 1..1341: mol_type = other DNA
atggagatggagcaggagaagatgaccatgaacaaggagctgagccctgatgctgccgcatattgctgttcagcttgtcatggagatgaaacatggagctataaccatcccattcggggtagagccaagtcacgcagcctcagtgccagtcccgccctaggaagtaccaaggagtttcgccgcactcggagtttacacggaccttgcccggttaccaccttcgggcctaaagcttgtgtgctccaaaatccacaaacaattatgcacatccaggatccggcttcccaaagactgacttggaacaagagtcccaaatcagtgctcgtcatcaagaagatgagggatgccagcctgctccagccattcaaggagctttgtactcaccttatggaagagaatatgatcgtctacgtggaaaagaaagtgctggaggatcctgctatagctagcgacgaatcatttggggctgttaagaaaaagttctgcactttccgagaggactatgatgacatttctaatcagattgacttcataatctgtctcggcggggatgggactctgctttatgcctcgtccctctttcaggggagcgtcccgcccgttatggccttccatctaggatccctgggatttcttacgcccttcagcttcgagaattttcagtctcaagtgacacaagtcatcgaaggtaacgctgctgttgtcctgcggagtcgcctcaaggttagagttgtaaaggaactgcgcgggaagaagaccgctgtgcacaatggtctgggcgagaatggttcccaggcagcaggcctggatatggacgttggaaaacaagcaatgcagtaccaagtattgaacgaggtggtgattgatagaggcccctcttcttacctgtcaaatgtggacgtttatctcgacggccatttgatcaccactgtgcaaggggacggagtgatcgtatcgacacctacagggtctacagcttatgccgctgctgccggagcttcaatgatccacccgaatgtccctgctataatgataaccccaatctgccctcacagcctctctttcaggcccatagtggtccctgccggcgttgaactcaagattatgctctcccctgaagcccgtaataccgcgtgggtgagtttcgacgggcgcaagcgccaggagattaggcatggggattcaataagtatcactacctcgtgttatcctctgccgtctatttgcgtgcgcgaccccgtcagtgactggttcgaatcgctcgcccagtgcctacactggaatgtcagaaaaaaacaggcgcactttgaagaagaagaagaagaagaggaggagggctag

SEQ ID NO: 196484 - DNA, 1245 bp, synthetic construct
  misc_feature 1..1245: note = Description of Artificial Sequence: Synthetic coding sequence
  source 1..1245: mol_type = other DNA
atgggccggccccgggtgcggcaggcctggcccggctgctgcggccacacaggccgccttcctgcaggcagaggatatctggcgagccacatgtgtgaccccgccggcgcagagcttataggggatgggatgtctgacccgacccctccatccaacgcttgtactggacacatccaggacccagctagccagaggttaacatggaacaagtctcccaagtccgtgctagtgatcaaaaagatgagggacgcgagcctgctgcagcctttcaaggagctgtgtactcatctcatggaggaaaacatgatcgtgtacgttgagaagaaagtcttggaagaccccgcgatcgcatccgacgagagtttcggcgcggtgaagaagaagttctgcacattcagagaagactatgacgacatctctaaccagattgattttataatctgcctgggcggagacgggacccttctatatgccagttcactgttccaaggatccgtcccgccagttatggcattccacctgggctccctcgggtttctcacgccattttctttcgagaactttcagtcacaggtcacccaggtgatcgaaggcaatgccgccgtggttctgaggagcaggcttaaagtccgtgtcgtgaaggaactgcgcggcaagaagaccgccgtccataatggcctaggtgagaacggctcacaggctgccggcctggacatggacgttggcaagcaggcgatgcagtatcaggtactgaatgaagtggtaatcgaccggggccctagcagctatcttagcaacgttgatgtttacctcgacggccatctgattacaactgtacagggagacggcgttattgttagtactcctactgggagcaccgcctatgctgcagccgcgggggcaagcatgatacatcctaacgtacccgctatcatgattacaccaatttgcccccacagcttgtccttccggccaatagtcgtgcccgctggagttgagcttaagatcatgctgagtccagaggcacggaacacagcctgggtgagcttcgatgggaggaaaagacaagaaatccggcacggagactcaatctctatcacaactagttgttacccgctcccctctatctgtgtacgcgatccggtgtctgactggttcgaatcactcgctcaatgcctccactggaatgtaaggaaaaaacaagcccatttcgaagaagaggaggaagaggaggaggaggggtag

SEQ ID NO: 196485 - DNA, 1776 bp, synthetic construct
  misc_feature 1..1776: note = Description of Artificial Sequence: Synthetic coding sequence
  source 1..1776: mol_type = other DNA
atggagatggagcaggagaagatgaccatgaacaaggagctgagcccagatgcggccgcatactgctgcagcgcctgtcacggggacgaaacgtggtcctataaccatccaatccgggggagggcgaaatctaggtcattatcagcgagccctgccctcggctccacaaaggagtttagacggacacgcagcctgcacggcccctgtcctgttacgacattcgggcctaaggcttgcgtgctgcagaaccctcagacaatcatcgcgactccgctgtctctcgccagccaactgctccccagcccagccgtcagtcacagcgggcagggtggggtgaccggacaggtgcatgtgctcccgcaaccatccgaccagggcgtgctgagtggcccccgggctgcccgcggccagaccgctccgcaggaggaggctgtcacccaggaagaagtagaggccctcgtctgtgggcatacgcaaaggtgggtgcccggacccgtgtacgatgccgcagccgggggaagcgggtgggcacaactgtccctgcgggcgggaatgggtgtcggccaggcaaccggccacattcaggatcccgcttctcagcgcctgacatggaacaagtcccctaaaagtgtgctcgttatcaagaagatgcgagacgcgtcactgcttcagccattcaaggagctgtgcacccacctaatggaggcgagaggagccggtggcaagggcgcctggggcgcccacggggtgggcggggccagcatccatatcacggcccccagagtgggatctgcgggagggatgagcaggcttgctctgtgcttccaggagaacatgatcgtatacgtggagaagaaagttttagaggaccctgcaatcgcttccgacgagtcatttggggccgtcaaaaagaagttctgcaccttcagggaggactacgacgatatcagcaatcaaatcgatttcattatctgtcttggcggcgacggcaccctgctctacgccagttcgctgttccagggctccgtgccacccgtcatggccttccatttagggtctctgggattcttaactccgttcagctttgagaactttcagtctcaagtcacacaggtgattgagggaaacgcagcggtggtcttgcggagccgcttaaaagttcgtgttgtgaaggagctgagaggcaagaaaaccgcagtgcataatggtctcggagaaaacggaagtcaggcagcgggactggacatggatgttggcaagcaggctatgcagtaccaggttcttaacgaagtggtaattgaccgcgggccatcatcatacctgtccaacgtggacgtataccttgatggtcatttgattacaaccgtgcagggggatggggttattgtgagcacgcccacaggatcaacagcctacgctgcggctgctggtgcttctatgatacatcccaacgtgcccgcgattatgatcacccctatctgcccacactcgctgtctttccggcccattgtcgtgccagccggagtcgaacttaagatcatgctctcccccgaggccaggaacactgcctgggtgtcctttgatggtaggaagagacaagaaatccgccacggggattccatatctattacaacttcttgttaccctctgccaagcatctgtgtccgagaccccgtgtcagattggtttgaatcactagcccagtgtttgcattggaacgtgaggaagaagcaggctcacttcgaagaagaggaggaggaggaggaggagggctag

SEQ ID NO: 196486 - DNA, 1776 bp, synthetic construct
  misc_feature 1..1776: note = Description of Artificial Sequence: Synthetic coding sequence
  source 1..1776: mol_type = other DNA
atggagatggagcaggagaagatgaccatgaacaaggagctgagccccgacgccgctgcctattgttgcagcgcgtgtcacggagacgagacatggagttataaccatccaatcagaggcagagccaaaagcagaagtttgtccgcctcacccgctctcggcagtactaaggaatttcgacggacccgctcactgcatggaccttgccctgtgacgacctttgggcccaaagcgtgtgtactgcagaatcctcagaccatcatagccacaccccttagcctggcctcccagctactgccatctccggcagtaagccacagtggacagggcggcgtgaccggtcaggtgcatgtgctacctcagccttccgatcaaggagttctgtcaggtcctcgggctgccagagggcagaccgcccctcaggaagaggccgtcacccaggaagaggtcgaggccctcgtgtgcggacatactcaaaggtgggtgccggggcctgtctatgacgccgctgctggggggagtggttgggcccaactgagcctgagggccggtatgggtgtgggacaagcgactggtcatattcaggaccccgcctctcagcggctaacatggaacaaatctccgaagagcgtgctggtcatcaagaaaatgagggatgcttcacttctgcagcctttcaaagagctgtgtacccatttaatggaagcccgcggtgccggagggaaaggcgcttggggagcacacggcgtgggcggcgccagtatacacataaccgccccgcgcgtggggtccgctggtggcatgtcacgacttgctttgtgttttcaggaaaatatgattgtgtatgtcgagaagaaggtgctggaggacccagccatcgcgagcgatgaatcctttggagccgtgaagaaaaagttctgcacatttcgcgaggattacgacgacatctccaatcaaatcgattttattatttgcctgggcggcgacggtactctgctgtacgcgtctagcctctttcagggatccgtgcccccggtcatggcctttcacttggggagtctgggatttcttacacccttttcctttgagaattttcagtcccaagtgacccaggtgatcgaggggaacgctgccgtggtgctacgcagcagattgaaagtacgggttgttaaggaactgagagggaaaaagactgctgttcacaatggtctcggcgaaaacggctcacaagctgcgggtttggatatggacgttggtaagcaagcaatgcagtatcaagttctgaacgaagtagtcatcgatagaggaccctcatcctatctctctaacgtggatgtttacctcgatggacatctcattactactgtgcaaggggacggcgtgatagtttccacaccgactggttcaactgcatacgcagctgccgctggggcgagcatgatccacccaaacgtgcctgctattatgattaccccaatatgcccgcactctctcagctttagaccaatcgtcgtaccggccggtgtggaactgaaaatcatgttatccccagaggctaggaataccgcatgggtttcattcgacggcaggaaaaggcaggagattcggcacggcgactcgatatcaattacgaccagttgttacccgctcccctccatatgcgtgagggatcccgtcagcgactggttcgagtcgctggcacagtgcctgcattggaatgtgcggaagaagcaggcccacttcgaagaagaggaggaggaggaagaggaaggatag

SEQ ID NO: 196487 - DNA, 621 bp, synthetic construct
  misc_feature 1..621: note = Description of Artificial Sequence: Synthetic coding sequence
  source 1..621: mol_type = other DNA
atgggccggccccgggtgcggcaggcctggcccggctgctgcggccatacagggcgcctccccgctggccgtggttatctggcaagccatatgtgtgatcctgctggagcagaattgatcggggatggaatgagcgatcccacaccaccttcgaatgcttgtacagggcacattcaggatcctgcctcccagagactgacatggaacaagtccccaaaatcagtattggttatcaagaagatgagggatgcctccctactccaacccttcaaggaactctgcacccacctcatggaagagaacatgattgtgtatgtggaaaaaaaggtacttgaggacccggcgatcgcctcagatgaatccttcggagcggtcaagaagaagttttgcacctttcgtgaagactatgacgacatcagtaaccagatagattttattatatgcctgggaggagatggaactcttctgtatgcaagctctctgtttcaaggaagtgttccacccgttatggcattccatctggggagtctcggtttcctgacaccattctctttcgaaaatttccagtctcaggttacgcaggtgatcgagggaaacgctgccgttgtcctccgctcatag

SEQ ID NO: 196488 - DNA, 2121 bp, synthetic construct
  misc_feature 1..2121: note = Description of Artificial Sequence: Synthetic coding sequence
  source 1..2121: mol_type = other DNA
atgggccggaaggtgaccgtggccacctgcgccctgaaccagtgggctctcgactttgagggtaacttgcagaggatcctgaagtcaattgaaatagccaagaatcggggcgcgcgctaccggttggggccagaactcgagatctgtggatatggctgctgggatcactattacgagtccgatacgctgctgcacagctttcaagtgttagccgccctggtggagagccctgtcacccaagatatcatttgcgacgtgggtatgcctgtcatgcaccgcaatgttcgctataactgccgcgtcatttttctcaatcgcaaaatcctgctgatccggcctaaaatggccctcgccaatgaggggaattaccgggaactcaggtggttcacaccttggagcagaagccgtcacacagaagaatatttcttgcccaggatgatccaagacttgacaaagcaagagacggtaccctttggcgacgctgtccttgtcacgtgggatacatgcatcggcagcgaaatatgcgaagagctttggactccccactccccccacatcgatatgggcttggacggagtcgaaattattactaatgcgagcgggtcgcaccaagtgcttagaaaggccaataccagggttgatttagtaaccatggttacttctaaaaatggcggcatttacttgcttgcaaatcagaagggatgtgatggcgatagactttattatgacgggtgcgccatgatagcgatgaacgggtctgtattcgcccagggcagccagttcagcttggatgacgtcgaggtgctgacagcaacattagacctcgaggacgtgcgcagttaccgcgccgagatatcgtccaggaatctagctgccagcagggcctccccctatcccagggtcaaagtcgattttgccttgagctgccacgaggaccttcttgcccccatttcagaaccaatcgaatggaaatatcatagccctgaggaggaaatctccttgggacccgcgtgttggctctgggatttcctgagacgtagccagcaggcgggcttccttcttcctctgtctgggggggtcgacagcgccgcaactgcctgtttaatatattccatgtgctgtcaggtgtgtgaagccgtgcgctctggaaacgaggaggtactggcagatgttagaaccatcgtcaatcaaatttcctacaccccccaggacccaagagatctatgtggcagaattctgactacttgttacatggctagtaaaaacagttcccaggagacgtgtacccgtgcacgtgaactcgctcagcaaatagggagtcatcatatatcacttaatatcgatcctgccgttaaagcagtcatgggcatcttttctctagtgacggggaagtctcctttgtttgcggctcacggggggtcgagcagagaaaatctggctctccagaatgttcaggctaggattcggatggttctggcctacctcttcgcccagctctcactttggtcaagaggcgtgcacggcggactcctggtgctgggcagcgcgaacgtcgatgagtctttgcttggttacctaactaaatatgattgttcatctgccgatattaatcctataggtggcattagcaagactgacttgcgtgctttcgtgcagttctgcatacagagatttcagctgcccgcactccaatccattttgctggcaccagctaccgccgagctcgaacctctggctgatggccaggtaagtcagaccgacgaagaagatatgggaatgacctatgctgaactttcagtctacggcaagctgaggaaagtagcaaaaatggggccctactctatgttctgcaagctgctgggtatgtggcgtcacatttgtaccccacggcaggtggctgacaaagtgaaaaggtttttctctaagtactctatgaataggcacaagatgacgacactgaccccagcctatcacgcagagaactactccccagaagacaatcggtttgatttgcgcccctttctctacaatacctcatggccatggcagttccgttgtattgagaaccaagtactgcaattggaacgagcagaaccacagagtttagacggcgtggactag

SEQ ID NO: 196489 - DNA, 1341 bp, synthetic construct
  misc_feature 1..1341: note = Description of Artificial Sequence: Synthetic coding sequence
  source 1..1341: mol_type = other DNA
atgggcatcagcggccaggaggtgctgaccgccaccctggacctggaagacgtgcggtcctatcgcgctgagatctcttcccggaatttggccgcttctagagcttccccttatcccagagtaaaagtcgattttgctctttcctgccacgaagacctactagctccaatctcagaacccattgaatggaaataccactctccagaggaggagattagccttggaccagcctgttggctttgggacttcctgagaagaagccagcaggccggttttctgttgcccctttcaggtggcgttgacagtgccgcaacagcgtgcctcatctattctatgtgctgtcaggtatgcgaagccgtacgatcggggaacgaagaggtcctcgcggacgtgcgaaccattgtgaaccaaatctcttacacaccccaagacccccgggatctgtgtgggcggatactgacaacctgctatatggcttcgaaaaatagttcacaggaaacctgtacaagggccagagaactcgcccagcaaattggttctcaccatatttctctcaatattgaccctgctgtgaaagctgtgatgggcatattctctcttgtgaccggcaaatctcctttgttcgcggctcacggcggatctagccgagaaaacttggccctgcaaaacgtgcaggcccgcatccgcatggttctggcctacttattcgcccagttgagcttatggagcaggggggtccatggggggctgttggtcttagggtcagcgaacgttgacgaaagcctgcttgggtacttgacgaagtatgattgtagtagtgcagatataaacccaatcggcggaatctctaagacagatctcagggccttcgtccagttttgtatccagcgatttcagctaccagcccttcagagcatactgcttgccccggctacagctgaactggaacctctcgcagacggccaggtatcccagaccgatgaagaggatatggggatgacttacgctgaactgtcggtttatggtaagttgaggaaggtggccaagatgggaccatattctatgttctgtaagctgcttggaatgtggcggcacatctgcacaccacgccaggtggctgacaaagtcaaaaggttcttcagtaagtactccatgaataggcataagatgacaacccttacccctgcatatcatgcagagaactactctcctgaagataatcgatttgaccttagacctttcctgtacaataccagctggccgtggcaattccgttgcatcgaaaaccaggtgttgcagttagaaagagctgaaccccagagtctggacggcgttgactag

SEQ ID NO: 196490 - DNA, 1122 bp, synthetic construct
  misc_feature 1..1122: note = Description of Artificial Sequence: Synthetic coding sequence
  source 1..1122: mol_type = other DNA
atggagcccgccgtgagcgagcccatgcgggaccaggtggcccggactcacttaaccgaagatacaccgaaagtgaatgccgatatcgaaaaagttaatcagaaccaggcaaaacgttgcactgtgatcggcggaagtgggtttctgggacagcatatggtcgaacagctgctggcaagagggtacgccgtcaatgtgttcgacatacagcagggattcgacaatccgcaggtgcgtttctttctgggcgacctatgctctcgtcaggacctttaccccgccctgaagggcgtgaatacagtgttccactgtgccagccctccacccagcagtaataataaagaactgttttacagagtaaattatatcggcaccaagaacgtgattgagacctgcaaggaggcgggagtgcaaaaattgatcctcactagctccgcgagcgtgatcttcgagggggtggatatcaaaaatgggaccgaagacttaccctacgcaatgaaacctatcgactattataccgaaaccaaaattctgcaggagcgggccgtgctcggggctaatgatccggagaaaaacttccttactaccgccatccgcccacacggaatcttcgggcccagggatccccaactcgtgcctatcctgatcgaggctgctagaaatgggaaaatgaaattcgtgatagggaatggtaagaatctggttgatttcactttcgttgaaaacgtggtgcatggtcacatcctagccgccgagcagctctctagagatagcaccctaggcgggaaggcgttccacataacgaatgacgagcccataccgttctggacatttttatcaagaattctgacaggcctcaactatgaggccccaaagtatcacataccgtactgggttgcctattatttggctctgcttctctcgctgctggtcatggtcatttctcctgtgatacagctgcagcccacctttactcccatgagagtagcgttggccggtacttttcactactacagctgtgaacgcgccaaaaaagctatggggtatcaacctctcgtgactatggatgatgccatggagaggacagtgcagtcatttcgacatttgcgacgtgtgaagtag

SEQ ID NO: 196491 - DNA, 765 bp, synthetic construct
  misc_feature 1..765: note = Description of Artificial Sequence: Synthetic coding sequence
  source 1..765: mol_type = other DNA
atggagcccgccgtgagcgagcccatgcgggaccaggtggcccggacacaccttactgaagatactccaaaggtgaatgccgatattgagaaggtgaatcaaaatcaagcaaagcggtgtaccgtgattggtggaagcgggtttctgggccagcatatggtggagcagctgttagccaggggctacgcggtgaacgttttcgatattcagcaaggattcgataatccccaagtgcggttctttctgggggatttgtgtagccggcaagatctgtacccagcactcaaaggcgtcaataccgtcttccactgcgcttccccgccacccagttccaacaacaaggaactgttttaccgagtcaattatattggtactaagaatgtgatcgagacctgtaaagaagctggagtgcagaagctgattttgaccagttcggcctctgtgatatttgagggcgtagacatcaaaaacgggaccgaggacctcccttatgccatgaagcctatcgattattataccgagactaagattctacaggagagggccgtgctgggagccaatgaccctgagaagaattttctgacaaccgccatccggccccacggaatattcgggcccagagatccacagctcgtcccaattttgatagaggcagctcgcaacgggaagatgaagtttgtgattgggaacggcaagaatctcgtcgattttacatttgtggaaaatgtcgtgcatgggcatattctcgccgccgaacagctgtag

SEQ ID NO: 196492 - DNA, 1122 bp, synthetic construct
  misc_feature 1..1122: note = Description of Artificial Sequence: Synthetic coding sequence
  source 1..1122: mol_type = other DNA
atggagcccgccgtgagcgagcccatgcgggaccaggtggcccggacccatctgactgaagacactccaaaggtgaacgccgatatcgagaaagtgaaccagaatcaggccaaacggtgcacagttatagggggctccgggtttctgggacagcacatggtggagcaactgctcgcgagggggtacgcagttaacgttttcgacattcaacaggggtttgataatcctcaggtccgattttttttaggagacctgtgctcccgccaggatctctatcccgctctgaagggggtgaatactgtgtttcactgtgcgtctccccctccatccagcaacaataaggagctcttctatcgggtaaactacattggcacgaaaaacgtgatagaaacatgtaaagaagccggtgttcaaaagctgattcttacttccagtgcgtccgtgatatttgagggagttgacataaaaaacggcacggaagatctcccttacgcaatgaaaccaatcgactattacacagaaacgaagattctccaggagagagctgtcctcggcgctaatgatccagaaaaaaacttcctcactacagccatccggcctcatggaatctttgggcctagagatccccagctcgtcccaatcctcatagaggccgccagaaatggaaagatgaagttcgtcattgggaacggaaagaatctggtggatttcaccttcgtcgagaatgtggtgcatggccacattctggcagccgagcagctttcaagggacagtactctgggaggcaaagcatttcacattacgaatgacgagcctattccgttctggacctttctcagcagaattctcacaggcttaaactacgaagcgcctaagtatcacatcccatactgggttgcttactacctggccctactgctttccttgctcgtgatggttatatcacctgtgatccaactacaacctaccttcacccccatgagagtagcacttgcaggcacgttccactactatagctgtgaacgggccaaaaaggcaatgggctaccagccgctggtcacaatggatgacgcaatggaacgcactgtgcagtcgtttagacacctcagacgtgtcaagtag

SEQ ID NO: 196493 - DNA, 825 bp, synthetic construct
  misc_feature 1..825: note = Description of Artificial Sequence: Synthetic coding sequence
  source 1..825: mol_type = other DNA
atggtgggccggcgggccctgatcgtgctggcccacagcgagcggactagtttcaactatgctatgaaagaagctgccgcagccgccttgaagaagaaagggtgggaagtggtcgaatcagatttgtacgcaatgaacttcaatcctatcatttcaagaaaagacattacgggaaaactcaaagatcccgccaatttccagtacccagccgagtccgtccttgcctacaaagagggacatctgtctcccgatattgtggcggaacagaaaaaacttgaggcggcagatctggtcatcttccagttccctctgcagtggttcggtgtacctgctattcttaaaggctggttcgagagggtttttattggagagttcgcctacacttacgctgctatgtacgataaaggaccattcagatcgaaaaaggccgtcctctcgatcacaacgggagggagcggctccatgtatagtctgcagggcattcatggcgatatgaacgtcatactttggcccatacagtccggcatcttacacttttgtgggttccaggtgctggagccccaactcacctattccatcggacacaccccagcagacgccagaatacagattctcgagggatggaaaaagcgtcttgagaatatctgggacgaaactccattgtatttcgccccaagttccctcttcgacctaaactttcaagcaggcttcctgatgaaaaaagaagtgcaggacgaggagaagaataaaaagtttggcctgtccgtgggacatcacctgggcaagtcaatccccacggataaccaaatcaaagccagaaagtag

SEQ ID NO: 196494 - DNA, 711 bp, synthetic construct
  misc_feature 1..711: note = Description of Artificial Sequence: Synthetic coding sequence
  source 1..711: mol_type = other DNA
atggtgggccggcgggccctgatcgtgctggcccacagcgagcggactagctttaactacgctatgaaagaggctgccgcagctgcgctgaagaagaaaggctgggaagttgttgagtcagatttgtacgcaatgaactttaatccaatcatcagtcgaaaggatatcacaggcaaactcaaggacccggcaaattttcaatatcccgcggagtcagtgctggcatacaaagaggggcacctgtcacctgatatagtggcagagcagaaaaagctggaagcagctgacttggtcatcttccagtctaagaaagcagttctgtctataaccacaggtggatctgggagcatgtactcactccagggaatccacggtgatatgaatgtgattctgtggccaattcagagcgggattctacacttctgcggattccaggtcctggagccgcagctgacttactcaatcgggcacacaccagccgacgcccgcatacagatcctggagggatggaaaaagagacttgagaacatctgggatgagactccactgtactttgcccccagttctctctttgatctcaatttccaggctggcttccttatgaagaaagaggttcaggatgaagagaagaataagaaatttgggctttctgttggtcaccatctcggcaagagcatccctacagacaatcagatcaaggccaggaagtag

SEQ ID NO: 196495 - DNA, 723 bp, synthetic construct
  misc_feature 1..723: note = Description of Artificial Sequence: Synthetic coding sequence
  source 1..723: mol_type = other DNA
atggtgggccggcgggccctgatcgtgctggcccacagcgagcggacctccttcaactacgctatgaaagaagccgccgccgccgccctgaagaagaagggctgggaagtagttgagagtgacctgtatgctatgaactttaaccccatcatctctcggaaagatatcacgggcaagctgaaagatccagcgaatttccaataccccgcggaatcagtgctggcgtataaggaaggtcacttgagccccgatatcgttgccgaacaaaagaaactcgaagccgctgatctggtgatatttcaattcccactccagtggttcggtgtgcctgcaattctgaagggttggtttgaacgagttttcattggcgaattcgcttatacctacgctgccatgtatgacaaaggacctttccgatcagggatcttgcacttttgcgggttccaggtgctggaacctcaactaacttattctatcggccatacacccgcagacgctcgcattcaaatactggagggctggaagaaaaggcttgagaatatatgggacgagacgcccttatattttgctccctctagcttattcgatctcaatttccaggcaggattcctgatgaaaaaagaggtccaagatgaagaaaaaaataagaaattcggcctgtctgtaggtcatcatttaggaaaatcaattcccacagacaaccagatcaaggccagaaaatag

SEQ ID NO: 196496 - DNA, 609 bp, synthetic construct
  misc_feature 1..609: note = Description of Artificial Sequence: Synthetic coding sequence
  source 1..609: mol_type = other DNA
atggtgggccggcgggccctgatcgtgctggcccacagcgagcggacgtcattcaattacgctatgaaagaggccgccgccgccgctttgaagaagaaaggatgggaggtggttgaatccgatctctacgcaatgaactttaatccgatcatcagtaggaaggatatcactgggaagttgaaagaccctgctaattttcagtatcccgctgagtctgtgctcgcctataaggaagggcatctgagccctgacatcgtggctgaacagaagaagctcgaggctgccgacctcgtcattttccagagcggtattttacatttttgcggcttccaagtcttggagcctcaactgacctatagcatcggacatacccccgccgatgcccgaatccagatactcgaggggtggaaaaagagactggagaatatttgggacgaaacaccactctacttcgccccttcctccctgttcgatttaaacttccaagccggattcctcatgaagaaagaagtccaggatgaggagaagaacaagaagtttgggttatccgtcgggcatcacttaggtaagtcaatccctaccgataaccagatcaaagccagaaagtag

SEQ ID NO: 196497 - DNA, 696 bp, synthetic construct
  misc_feature 1..696: note = Description of Artificial Sequence: Synthetic coding sequence
  source 1..696: mol_type = other DNA
atggccggcaagaaggtgctgatcgtgtacgcccaccaggagcccaaaagtttcaacggctctttgaagaatgttgctgtggacgaactctcacgacagggctgcactgttactgttagtgatttgtacgccatgaatctcgagccacgtgctaccgacaaggatatcaccgggaccctgtccaatcctgaggtctttaactacggtgtggagactcacgaggcttacaagcagcggagccttgctagtgatattacagacgaacagaaaaaggtacgcgaggccgaccttgtgatttttcagtttcccctttactggttctccgtccctgcaattctaaaaggctggatggaccgtgtcctctgtcagggcttcgcattcgatatccccggcttctatgattctgggttactccagggcaaacttgctcttctctccgttaccacaggggggaccgccgagatgtataccaagacaggagtgaacggagactcgaggtattttttgtggccccttcaacacggcaccttgcacttttgtgggtttaaagtgctggctcctcagatcagctttgccccagagatcgccagcgaggaggagcgaaaaggaatggtggctgcatggtcgcagagactgcagacaatttggaaggaagagccaatcccttgtacagcccactggcatttcggtcagtag

SEQ ID NO: 196498 - DNA, 696 bp, synthetic construct
  misc_feature 1..696: note = Description of Artificial Sequence: Synthetic coding sequence
  source 1..696: mol_type = other DNA
atggccggcaagaaggtgctgatcgtgtacgcccaccaggagcccaagagctttaacggaagccttaaaaacgttgctgtggatgagctgtcccgacagggatgcacagtcaccgtgagcgatctgtacgccatgaatctggagccacgggctacagacaaagacataactggcacactgtctaatcccgaggtctttaactatggagtggagacccacgaagcttacaaacagaggagcttggcttccgacataacagacgagcaaaagaaggtccgggaagctgacctggtaatctttcagtttcctctctactggttctccgtgcccgcgatcttaaaaggatggatggatagggtgctatgccaggggttcgcttttgacatcccaggattctacgatagcggattacttcagggtaagctggcactgttgtcagtcaccaccgggggaacagctgagatgtatacgaaaactggtgtcaacggtgattcccgctactttctgtggccccttcagcatgggacactccatttctgtgggttcaaagtgctggcccctcaaattagtttcgcccccgagatcgccagcgaggaggaacgcaagggtatggtagccgcctggagccagcggctgcagacaatctggaaggaggagcctatcccatgcactgcgcattggcacttcgggcaatag

SEQ ID NO: 196499 - DNA, 582 bp, synthetic construct
  misc_feature 1..582: note = Description of Artificial Sequence: Synthetic coding sequence
  source 1..582: mol_type = other DNA
atggccggcaagaaggtgctgatcgtgtacgcccaccaggagcccaagtcttttaatggctctctcaaaaatgtggcggtggacgagctatcgagacagggatgtaccgtcacagtctcagatctctacgcaatgaatttggagccccgggccaccgataaagatataacaggtactcttagtaacccggaagttttcaattacggggtcgaaactcacgaagcatataagcagagaagtctggccagcgacattactgatgaacaaaagaaagtgcgcgaagcagatctcgtgatcttccagggaaagttggcgctgctaagcgtgactacaggaggcacggcagagatgtacacaaagactggcgtgaacggggacagccgctattttctctggcctctgcagcacggcacccttcacttctgcggcttcaaagttctggcccctcagatatcttttgcaccagagatcgcatccgaagaggagagaaagggcatggtcgccgcctggagccagaggctccagaccatttggaaggaagagccaatcccgtgcaccgcgcattggcactttggtcagtag

SEQ ID NO: 196500 - DNA, 582 bp, synthetic construct
  misc_feature 1..582: note = Description of Artificial Sequence: Synthetic coding sequence
  source 1..582: mol_type = other DNA
atggccggcaagaaggtgctgatcgtgtacgcccaccaggagcccaaatccttcaacggttcactgaagaatgttgctgtcgacgagctttcacggcaggggtgcactgtgactgtttccgatctgtatgccatgaacttggagcctagagctacggataaggacatcactggtactttatccaaccccgaggtctttaattacggggttgaaactcacgaggcttacaaacagaggagtctagcctccgatataactgatgagcagaaaaaggtgcgggaagcggatctggtcattttccagggcaagctggccttactgtccgtcaccacgggggggaccgcagaaatgtacacgaaaaccggcgtgaatggagactctcgctatttcttatggccactgcagcatggcacactccacttttgtggatttaaggttctggcccctcagattagctttgctcctgagatcgcctctgaagaggagcgcaaggggatggttgcagcttggagccagagacttcagactatctggaaggaggaaccgatcccatgtaccgcccattggcattttggacagtag

SEQ ID NO: 196501 - DNA, 696 bp, synthetic construct
  misc_feature 1..696: note = Description of Artificial Sequence: Synthetic coding sequence
  source 1..696: mol_type = other DNA
atggccggcaagaaggtgctgatcgtgtacgcccaccaggagcccaaatctttcaacgggagtctaaaaaatgtcgcagtggatgagctcagccgccaagggtgtactgtgactgtatccgacctgtatgcaatgaacctcgagccccgggccactgacaaggatattactggcaccctgtcaaacccggaggtgtttaattatggcgttgagacacacgaagcatacaaacagcgctcacttgcgtctgatatcacggacgagcaaaagaaagttcgtgaggccgacctggttattttccagtttccgctctattggttcagtgtccctgctattctgaaaggatggatggaccgcgtcctttgtcagggatttgccttcgatatccccggattctacgactcaggacttctgcagggaaagctagctctgcttagcgtgacgacaggcggaaccgcggagatgtacaccaagactggagttaacggagacagtcggtactttttgtggccgcttcagcacgggactctccacttttgcggtttcaaagttcttgccccccagatctctttcgcccctgaaattgcgtccgaagaggagcgcaaagggatggtagccgcctggtctcagcgcctgcaaaccatatggaaagaagagcctattccttgcacggcacactggcacttcgggcagtag

SEQ ID NO: 196502 - DNA, 420 bp, synthetic construct
  misc_feature 1..420: note = Description of Artificial Sequence: Synthetic coding sequence
  source 1..420: mol_type = other DNA
atggccggcaagaaggtgctgatcgtgtacgcccaccaggagcccaagtcattcaatgggtctctaaagaatgtggcagtagacgaattgagccgccaagggtgcactgtaactgtttccgatctgtacgctatgaacctggaacctagagccacagacaaggacattacaggcaccctctccaatcccgaggtgtttaactacggagtggagactcatgaagcatacaaacagcggagccttgcctccgatataactgacgagcagaagaaagtccgcgaggctgaccttgtgatttttcaatttccgttgtactggttctccgtgcctgctattttgaagggctggatggacagagtactgtgtcaaggattcgccttcgacataccaggattctatgattctggacttctccagtag

SEQ ID NO: 196503 - DNA, 420 bp, synthetic construct
  misc_feature 1..420: note = Description of Artificial Sequence: Synthetic coding sequence
  source 1..420: mol_type = other DNA
atggccggcaagaaggtgctgatcgtgtacgcccaccaggagcccaagagctttaacggatctcttaagaatgtggctgtcgatgagctctcccgtcaggggtgtactgtcaccgtcagtgatctgtacgctatgaacttagagcctcgcgccaccgacaaagacattaccggaacactttcaaacccagaggtgttcaactatggcgttgagactcatgaggcctacaaacagagaagcctggctagtgatattacagacgagcagaagaaggtgagagaggcagatctggtcatcttccagtttccattgtattggttctcggttccggccatattgaagggatggatggatcgcgtactgtgtcagggttttgcgttcgacatccccggcttctacgacagcggacttttgcaatag

SEQ ID NO: 196504 - DNA, 192 bp, synthetic construct
  misc_feature 1..192: note = Description of Artificial Sequence: Synthetic coding sequence
  source 1..192: mol_type = other DNA
atggccggcaagaaggtgctgatcgtgtacgcccaccaggagcccaagtcttttaatggcagcctgaaaaatgtggctgtggacgagctgtcccggcaagggtgcaccgtgacggtgtctgacctctatgccatgaacttggagcctagagccactgacaaggatatcacggggactttgtcaaatccatag

SEQ ID NO: 196505 - DNA, 483 bp, synthetic construct
  misc_feature 1..483: note = Description of Artificial Sequence: Synthetic coding sequence
  source 1..483: mol_type = other DNA
acccccggcctgaagcagagcagccacctgagcctgtggagcagctgggactatcgcctgttagatagcttaaagcgggattatgcggggaagccccagcccccaattaaatctgagagaagaaatcccccctcttatgccatggcaggaaagaaagttctcatagtgtatgcccaccaggagccgaagtccttcaacgggagcctaaagaacgtggccgttgacgaactctcccgacagggttgtacagtgacagtcagtgatctgtacgctatgaatctggaaccacgtgcgactgacaaggatatcaccggcaccctctccaatcccgaagtgtttaattacggggttgaaacacatgaggcatacaaacaacgctcattggcctccgatatcaccgatgaacaaaaaaaggtgagagaggctgatctggtgatttttcagatgctgtccacggaattgagcctgacctcacgctgttag

SEQ ID NO: 196506 - DNA, 231 bp, synthetic construct
  misc_feature 1..231: note = Description of Artificial Sequence: Synthetic coding sequence
  source 1..231: mol_type = other DNA
atggccgccgccgccgccagccggggcgtgggcgccaagctgggcctgcgcgaaatcagaatccatctatgccaacgatcaccagggagccagggggtgagagactttatagagaaacgttacgttgagctgaaaaaagccaaccccgacctgcctatcctgattcgcgagtgcagtgatgtccagcccaaactgtgggcccgatacgcctcacgggtccagaattcctag

SEQ ID NO: 196507 - DNA, 213 bp, synthetic construct
  misc_feature 1..213: note = Description of Artificial Sequence: Synthetic coding sequence
  source 1..213: mol_type = other DNA
atgtggttcgagatcctgcccggcctgagcgtgatgggcgtgtgcttactcatcccgggcctggcgacagcctacattcacaggttcacaaatggaggtaaggaaaaacgtgtagctcactttggctatcactggtctctcatggagcgggatcgccgcatcagcggtgttgataggtactatgtgtcaaagggcctggagaatatagactag

SEQ ID NO: 196508 - DNA, 1068 bp, synthetic construct
  misc_feature 1..1068: note = Description of Artificial Sequence: Synthetic coding sequence
  source 1..1068: mol_type = other DNA
atggccctgcggctgctgaagctggccgccaccagcgccagcgccagagtcgttgccgctggtgctcagcgcgttagggggatccattcatcggtacaatgcaagctgcggtacggcatgtggcattttttattaggcgacaaggcatcaaagcgactgacggagagatcacgcgtgatcaccgtggacggcaatatatgcacaggcaaaggcaagttggcaaaggagatcgccgagaagctgggtttcaaacactttcccgaagccggcatccactatccagactcaaccacaggcgatggaaaaccactggccactgattacaacgggaactgcagcttggagaaattttacgatgacccccgatcaaatgatggaaattcttacagactgcagagctggttatactcttcccgacttctccagtattcagatgcactagagcaccttctgacgactggccagggcgtcgtccttgaacgatctatcttctcagacttcgtgtttctcgaagcgatgtataatcaggggtttatccgcaagcaatgtgtcgaccactacaatgaggtcaaatcagtgacaatctgcgactatctgcccccacacctggtcatctacatagatgtgcctgtgcctgaagtccagagacggatccaaaagaagggtgacccacacgaaatgaagattacctccgcgtacctgcaagacatcgagaacgcgtacaaaaaaacctttttacctgagatgtctgaaaaatgtgaagtgctgcaatattctgctcgggaggcccaggacagcaagaaggtggtggaagacattgagtatcttaagttcgataagggcccttggttgaagcaggacaaccgcacactctaccatttaaggctcttggtgcaagacaagttcgaggtcctcaactatacatcgatacctatattcctgccagaggtgacaattggcgcccaccaaaccgaccgggtgctccatcagttccgcgagcttcccgggcgaaaatatagtccaggctataacaccgaggtaggtgacaagtggatatggctgaagtag

SEQ ID NO: 196509 - DNA, 1068 bp, synthetic construct
  misc_feature 1..1068: note = Description of Artificial Sequence: Synthetic coding sequence
  source 1..1068: mol_type = other DNA
atggccctgcggctgctgaagctggccgccaccagcgccagcgccagagtggttgccagagccccatccgcttggcgaggaattcactcgagcgtccagtgtaaactgcgctacgggatgtggcatttcctgctcggagataaggcttcaaagaggctcaccgaaagatcaagggtgataaccgttgatggtaacatctgtaccggtaaaggcaagctggcaaaagagatagccgaaaagctcggcttcaaacacttccccgaggcaggcattcattatcctgattctaccaccggggacggaaagccattggccactgactacaacggtaactgttccctggaaaagttctacgacgacccaagatcaaacgatggcaattcttaccggctccagagctggctgtatagttccagactgctccagtactccgacgcgttggagcacctcctgactacaggccaaggcgtagtcctagaacgtagtattttttccgacttcgttttcctggaagcaatgtataatcagggctttatcaggaaacagtgcgtagatcactacaatgaggtcaagtccgtgacaatttgtgactacttacctccccacctggtcatctacatcgacgtgccggtgcccgaagtgcagagaagaattcagaagaagggcgaccctcatgaaatgaaaattacttccgcatatcttcaggacatcgaaaacgcctataaaaagactttcttgcccgaaatgtccgaaaaatgcgaagtacttcagtattctgcccgtgaggcccaagatagtaaaaaggtggtcgaagacatcgagtacctcaagtttgataaaggcccctggcttaagcaggacaatcggaccctctaccatctgaggttgctcgtgcaggataaatttgaggtgttgaattacacttcaataccgattttcctcccagaagttacaattggtgctcatcaaaccgatcgggtgttgcatcagttccgggaactgcctggcaggaaatactcccccggctacaacaccgaggtgggtgacaagtggatctggctgaagtag

SEQ ID NO: 196510 - DNA, 426 bp, synthetic construct
  misc_feature 1..426: note = Description of Artificial Sequence: Synthetic coding sequence
  source 1..426: mol_type = other DNA
atggcccccaaggtgttccggcagtactgggacatccccgacggcactgattgccaccggaaggcctattctactactagcatcgctagcgtcgccggactcactgcggctgcttaccgggttactttgaatccgccagggacatttctggagggcgtcgcgaaagtgggacagtataccttcaccgcagctgcggtgggcgccgttttcggacttactacctgtatcagtgctcatgtacgggaaaagcccgatgacccccttaattactttctgggtggctgcgccgggggtctgaccttgggcgcccgcacgcacaactacggcattggtgctgcggcgtgtgtctactttgggatagcagcttccctggtgaaaatgggacggctagagggatgggaagtatttgcgaagcctaaggtgtag

SEQ ID NO: 196511 - DNA, 687 bp, synthetic construct
  misc_feature 1..687: note = Description of Artificial Sequence: Synthetic coding sequence
  source 1..687: mol_type = other DNA
atggcccccaaggtgttccggcagtactgggacatccccgacggcacagactgccatagaaaggcatattctaccacttcaatagccagtgtggctgggctgactgccgccgcctaccgggtgaccctcaatcctcctggaaccttcttggaaggagtagccaaagtgggccagtatacgttcaccgctgcagcagtaggggccgtctttggccttaccacctgcatatccgcacatgtccgtgagaagcctgatgatcccttgaactattttctcggggggtgtgccggaggtcttactctgggcgcccgcaaaactgggtcccattgcgtggtgcaggctggactgaagctcctcgcctcaagtagtccacacaccagcgcttctcagagtgcaggcattatcgggatgtctcattgtgtgcagaggttttgggtgccatcgagcagtgcctgtttagaagtcctctctggcgagtctactgacgttcacgcctgcagttctacccgaggcgcttgcaattcctccggctctagacccctgcccgagctgggagcgcgcgcatcaggtagcttgcgtaaaggcggtcacacacaccctgcaccacgaggagccggagccctgacccccgtccaggcgttaatcgagtctctacttaacacgctcggctccaaccctagaacatag

SEQ ID NO: 196512 - DNA, 684 bp, synthetic construct
  misc_feature 1..684: note = Description of Artificial Sequence: Synthetic coding sequence
  source 1..684: mol_type = other DNA
atgcaggagccccggcgggtgaccccctgcctgggcaagcggggcgttaagacacctcagctgcaacctggctcggcatttttgcctcgtgtgagaaggcagtcttttcctgcacggagcgactcctatactacagtacgcgacttcctcgctgtcccccgcacaatctcaagtgcctccgcaacgctcatcatggccgtggccgtgtcacatttcaggcctggcccagaagtctgggacaccgctagtatggctgcctcgaaagttaagcaggatatgcctcctccaggtggctacgggccaatagactacaagagaaacctacctaggaggggactctcaggctattctatgctagccatcggtatcggaaccttgatatacggccactggtcgattatgaaatggaatcgcgaacggcgaaggcttcagattgaagattttgaagccagaattgcccttctgcccctactccaggctgaaaccgacagacgcaccttgcagatgctgcgtgaaaacttagaggaggaggctatcattatgaaagatgtccctgattggaaggtaggcgagtctgtgttccataccacaagatgggtgcctcccttaataggagagctctacggattaaggactaccgaagaagccctgcacgcttctcatggcttcatgtggtacacctag

SEQ ID NO: 196513 - DNA, 435 bp, synthetic construct
  misc_feature 1..435: note = Description of Artificial Sequence: Synthetic coding sequence
  source 1..435: mol_type = other DNA
atggccgccagcaaggtgaagcaggacatgcccccccccggcggctacgggccaatcgattacaagagaaatctgccccgtcgcggcctctcaggatattctatgcttgctattgggatcggcacactcatttacggccactggtctataatgaagtggaacagagagcggcggcgtctgcagatagaggactttgaggccaggatcgctctgcttccactattgcaagcagaaactgacaggcgaactttgcagatgctccgggagaatctcgaggaggaggccatcattatgaaggacgttcccgactggaaggtcggcgagtctgtcttccacaccacacgttgggtacctcctctgatcggcgagctgtacggcctgcgcactactgaggaggctctgcatgcgtcacacggatttatgtggtacacatag

SEQ ID NO: 196514 - DNA, 300 bp, synthetic construct
  misc_feature 1..300: note = Description of Artificial Sequence: Synthetic coding sequence
  source 1..300: mol_type = other DNA
atggccgccgccgccgccagccggggcgtgggcgccaagctgggcctgagggagatcagaatccatctgtgccagcgatcacccggctcccagggcgtgagagatttcattgaaaagaggtacgtggagcttaagaaggcaaaccctgacctgcctatcctcattagggaatgttccgacgttcaacctaagctatgggcacgatacgccttcgggcaagagacaaatgtgcccttgaataacttctcagccgaccaggtgacccgcgcattggagaatgtgctatcaggcaaggcctag

SEQ ID NO: 196515 - DNA, 720 bp, synthetic construct
  misc_feature 1..720: note = Description of Artificial Sequence: Synthetic coding sequence
  source 1..720: mol_type = other DNA
atggccggcgtgctgaagaagaccaccggcctggtgggcctggccgtgtgcaacactcctcatgaggtctgcaccttcgtgctatcatcttttctcaattcacagggccgactgaatagctgccacttcgcatattgccgggtgaatggtatacagatgttccaagccctcaattacaagcctagagaacttttgcggcacgggcgatgcccccctacaagtctcatccggtgccatatctttatctatttttgccacgacctctttattaagcctgtgttcttattgactttttctctaactttctcctggctgcacttatgcctgttgctgagcgcccccagccagatctacatctcggtttttcacctcttcagtcttccgtatcggttctgccttggagctctggactacatctatttgggtctcctaaaagttctccctccttttccaagcgtgagatccttcccttccgtgttcactaatgtgttcataaaaaagacacataaattttttattctgttggtgccgagcataattacacccttcctgtgcttcacacttcagattacacaaaagtcttacctttacttcctgcagttcttgtcctatagccccctaaacgcactgtcacacccttggagattcagctccagccccattataagcatgctgcctaatccgatggtgagtagctacttctccccctccctaacatag

SEQ ID NO: 196516 - DNA, 351 bp, synthetic construct
  misc_feature 1..351: note = Description of Artificial Sequence: Synthetic coding sequence
  source 1..351: mol_type = other DNA
atggccggcgtgctgaagaagaccaccggcctggtgggcctggccgtgtgtaataccccacacgaaagattacggattttgtacactaaaattttggacgttctggaggaaattcctaagaatgcagcgtaccggaagtatactgagcaaattactaatgagaaattggctatggtcaaggccgagcctgatgttaaaaaattagaagaccaacttcaagggggacagctggaggaggtaatacttcaggcggagcacgagctgaacttggctaggaaaatgcgtgaatggaagttgtgggagccactagtagaagaacccccagccgaccagtggaagtggccaatttag

SEQ ID NO: 196517 - DNA, 351 bp, synthetic construct
  misc_feature 1..351: note = Description of Artificial Sequence: Synthetic coding sequence
  source 1..351: mol_type = other DNA
atgccctaccgggtgggccagaccaccggcctggtgggcctggccgtttgtaataccccacacgagcggctcagaatcctctacactaaaattctggacgtgttagaggaaatccctaaaaatgcagcctaccgaaagtataccgagcagatcaccaatgagaaattagcaatggtgaaggcagaacctgacgtgaagaagctggaagaccagttgcagggtggccagctggaagaagtcatcctgcaggccgagcacgagctcaacctggcccggaaaatgagggagtggaagttatgggaacctctggtggaagaaccgcctgccgatcagtggaaatggcctatctag

SEQ ID NO: 196518 - DNA, 465 bp, synthetic construct
  misc_feature 1..465: note = Description of Artificial Sequence: Synthetic coding sequence
  source 1..465: mol_type = other DNA
atgggcaaggacatccggccccggagcgcccgggccgcctgcaagggcgtcggcctgtggtcaggttgcttcggcaaaatggccgggtcaggggtacgccaggccacatctactgcctcgaccttcgtaaaaccaattttcagccgagacatgaacgaggcaaaacgccgtgttcgagaactgtaccgcgcatggtacagagaagttcccaataccgtgcaccagtttcagcttgatatcaccgtgaaaatggggcgagacaaagttcgagaaatgttcatgaagaacgctcacgtcacagacccacgggtggtcgacttactggtgattaagggaaaaatcgaactggaggagactattaaagtttggaaacagagaactcatgtgatgcgttttttccacgagaccgaggctccacggcctaaggatttcttgagtaagttttacgttggccatgacccatag

SEQ ID NO: 196519 - DNA, 342 bp, synthetic construct
  misc_feature 1..342: note = Description of Artificial Sequence: Synthetic coding sequence
  source 1..342: mol_type = other DNA
atggccagcgccacccggctgatccagcggctgcggaactgggccagtggacatgatttacaaggcaaactccagttgaggtaccaggagatctctaagcgaactcagcccccccctaagctgccagtggggccttctcataagctttccaataattactactgcaccagggacgggcggcgggagagtgttcccccttcaattattatgtcatctcagaaagctttggtgagcggcaaacctgccgaatctagcgccgtggctgcaaccgagaaaaaggcggttactccggcaccccctattaagagatgggagctcagttcagatcagccctatctgtag

SEQ ID NO: 196520 - DNA, 519 bp, synthetic construct
  misc_feature 1..519: note = Description of Artificial Sequence: Synthetic coding sequence
  source 1..519: mol_type = other DNA
atgcccggcatcgtggagctgcccaccctggaggagctgaaggtggacgaggtgaagatttcttctgccgtcctgaaagctgccgctcaccattacggagcacagtgcgataagcctaataaggagtttatgctgtgtagatgggaggaaaaggatcctagacgttgcctcgaggagggaaagctggtcaacaaatgcgctctcgatttcttccgtcagataaagagacattgcgctgagccctttaccgaatattggacttgcattgactatacgggccagcagctttttcgacactgtcggaagcaacaggctaagttcgacgagtgtgtcctagataagctcggatgggtcaggcctgacttgggcgagctgagtaaggtgactaaggtgaaaaccgacaggccccttcccgaaaatccatatcactctcgccctcggcctgaccccagtcccgaaatagaaggagacctccaacccgcaacccatggcagcaggttttatttctggacaaaatag

SEQ ID NO: 196521 - DNA, 387 bp, synthetic construct
  misc_feature 1..387: note = Description of Artificial Sequence: Synthetic coding sequence
  source 1..387: mol_type = other DNA
atgcccggcatcgtggagctgcccaccctggaggagctgaaggtggacgaggtgaaaataagcagcgcagtcctgaaggccgccgcccatcactacggcgcacagtgcgacaaacccaacaaggagtttatgctgtgccgttgggaggagaaagatccaaggaggtgcctggaggaagggaaactggtgaataagtgcgcgttggactttttccggcagataaaaagacattgcgctgagcctttcacggagtattggacctgcatcgattataccggccaacagttattcagacactgtagaaagcagcaagcgaagttcgacgaatgtgttctcgataagcttggttgggtacggcccgacctgggagaactttccaaaggttag

SEQ ID NO: 196522 - DNA, 1134 bp, synthetic construct
  misc_feature 1..1134: note = Description of Artificial Sequence: Synthetic coding sequence
  source 1..1134: mol_type = other DNA
atggccgccgccgcccagagccgggtggtgcgggtgctgagcatgagccggtctgccattaccgccatagccacatctgtgtgccatggcccaccatgtaggcagttgcaccacgctttgatgccgcatggaaaaggtgggcggtccagcgtttctggcatcgtggctacggtgtttggggccactggattcctggggcgttatgtggtaaaccacctcggacgtatgggctcacaggtaatcatcccatacaggtgcgataaatacgacatcatgcacctacgccccatgggagacttgggccagctgctgtttctggaatgggatgcacgcgataaggatagtattcgccgtgtcgttcaacacagcaacgtggtcattaacctgatcggcagggactgggagacgaagaatttcgacttcgaggatgtgtttgtcaagatcccacaggctatagcacagttgagcaaagaagctggcgtggagaagtttattcacgttagtcatcttaatgctaatattaaatcaagtagccgttatctacggaacaaggctgttggggagaaggttgtgcgtgacgctttccctgaggcgatcatcgtgaaacccagtgatatatttggtcgcgaggacagatttctcaattccttcgccagcatgcataggtttggccccattccgttaggatccctgggctggaagaccgtgaagcagccagtctacgttgtggatgtatccaaggggatcgtgaacgcggtcaaggatccagatgctaatggcaaaagcttcgccttcgtcgggccatccagatatctcctatttcaccttgtgaagtacatatttgcggtggctcaccggcttttccttcccttcccactccctttatttgcatacaggtgggttgcccgtgtgttcgaaattagtcctttcgaaccatggatcacaagggacaaggtggagcgcatgcacattacagacatgaagctgccacacctgccgggtcttgaggacctggggattcaggccacaccattagaactcaaggctattgaagttctccgtagacatcgcacctaccgttggttgagcgctgagatcgaagatgtcaaacccgctaagaccgtgaacatctag

SEQ ID NO: 196523 - DNA, 984 bp, synthetic construct
  misc_feature 1..984: note = Description of Artificial Sequence: Synthetic coding sequence
  source 1..984: mol_type = other DNA
atggccctggtgcacaagctgctgcggggcacctacttcctgcggaagttcagcaagccgacctccgcactctatcccttcctgggtatccggtttgcggagtactcatccagccttcagaagccggtggcctcccccggaaaggcatcttcgcagaggaaaacggagggagatctccagggagaccaccaaaaggaggtggctttggatattacatcctcagaagagaagcccgacgtaagctttgataaagctattcgcgatgaagcgatctatcactttagactgctcaaggatgagattgtagatcactggcgcggcccggagggacaccctctgcatgaggtgctgctggagcaagccaaggtggtgtggcagtttaggggaaaagaagatttagacaagtggactgttacctcggacaaaaccattggcggccgtagtgaggtattcctgaagatgggcaagaacaatcagagcgccctgctgtatgggacactgagcagcgaggccccacaggatggtgagtccacacgttctggatactgcgcaatgatctcgcggatcccacggggagcatttgagagaaagatgtcatatgattggtcccagttcaataccttgtacctgcgcgtccggggcgacggcaggccttggatggttaatattaaggaagacactgatttttttcagaggactaaccagatgtacagctatttcatgtttactagaggcgggccgtattggcaggaagttaagattcccttcagtaagtttttcttctcaaaccgcgggcgcatcagggacgtgcagcatgagctgcctttggataaaatatctagcattggtttcacactcgcggataaagtagacggacctttctttctcgagatcgattttatcggggtcttcactgaccccgcccacactgaagagttcgcctacgaaaactctcccgagctcaacccacggctgttcaagtag

SEQ ID NO: 196524 - DNA, 576 bp, synthetic construct
  misc_feature 1..576: note = Description of Artificial Sequence: Synthetic coding sequence
  source 1..576: mol_type = other DNA
atggccctggtgcacaagctgctgcggggcacctacttcctgcggaagttttctaaacctacatccgctttatatcccttcctaggaatccggtttgccgaatattccagttccctgcagaaaccggtggcctcccctggaaaggcctcctcccagcgtaaaactgagggcgatctgcaaggcgatcatcagaaagaggttgctttggacataacatcctcggaggagaagcctgacgtgtcttttgataaagcgattcgcgatgaggctatctaccacttcagactgctgaaagacgagatcgttgaccactggcgcgggcccgagggacatcctctgcacgaggtgcttcttgagcaggctaaggttgtgtggcagttccgaggaaaggaagatctggataaatggaccgtcacatccgataagacaatagggggcagatctgaagtgttcctaaagatgggaaagaataatcagtccgccctcctgtatggcacattgagttctgaggctccacaagacggagagagcacaagatctgggtactgcgcaatgattagcagaatcccccgttag

SEQ ID NO: 196525 - DNA, 630 bp, synthetic construct
  misc_feature 1..630: note = Description of Artificial Sequence: Synthetic coding sequence
  source 1..630: mol_type = other DNA
atggccctggtgcacaagctgctgcggggcacctacttcctgcggaagttttcaaagccaacatctgccctgtaccctttcctcggcataagattcgcggaatactcctcatcgctgcaaaagcctgttgccagtcctggaaaggcttcatcacagcggaaaactgagggcgatctccagggcgaccatcagaaggaggttgctctggatatcaccagctccgaggaaaaacccgacgttagctttgacaaagcaattcgcgatgaggctatttatcatttccgccttctgaaagatgagatcgtggatcattggcgcggccctgaaggtcaccctctgcatgaggttttgttggagcaggctaaggtcgtttggcagttccgtgggaaggaagatctggataagtggacagtcacctccgataagacaataggaggtcgctctgaagtctttcttaaaatgggtaaaaacaaccagtctgcgctgctgtatggaaccttgtcctctgaggcccctcaagacggagagagcacccgcagcggctactgcgccatgatctcgaggatcccaagaggggcctttgagagaaaaatgtcttacgactggagtcaatttaatacgttgtactag

SEQ ID NO: 196526 - DNA, 510 bp, synthetic construct
  misc_feature 1..510: note = Description of Artificial Sequence: Synthetic coding sequence
  source 1..510: mol_type = other DNA
atgggctggagccaggacctgttccgggccctgtggcggagcctgagcagagaagtgaaggaacatgtaggaaccgatcagtttgggaacaaatactactacattccacagtacaaaaattggcgaggacaaactatacgcgagaagagaatcgtggaggccgcaaataagaaagaggtggactatgaagccggcgacattcctaccgagtgggaagcttggattcgcaggacgcggaagaccccgcctactatggaggaaatattaaagaatgaaaagcacagagaggagatcaagattaagtctcaggacttctacgaaaaggaaaaactgctgagcaaagagacctctgaagaattgctgccgccgcccgttcagacgcagataaagggccacgcgtccgctccttatttcgggaaagaagaaccatcagtcgccccaagctcaacaggcaaaactttccagcctggctcctggatgcccagagatgggaaaagccataaccagtag

SEQ ID NO: 196527 - DNA, 384 bp, synthetic construct
  misc_feature 1..384: note = Description of Artificial Sequence: Synthetic coding sequence
  source 1..384: mol_type = other DNA
atgtacatcgacagctacaacagccggggcttcatgatcaacggcaaccgcgtcctgggtccttgcgccttgctgccacatagcgttgtacaatggaatgtcgggagccatcaagacattactgaagattcattttcactcttttggctcctcgaacctagaatcgagattgtggttgtgggcaccggcgatcgaaccgagaggctgcagtctcaggtcttgcaggctatgcgccagcgaggaattgctgtggaggtgcaggacacacccaatgcttgcgccacattcaatttcttgtgtcacgaggggagggtgaccggagcggccctaatcccaccaccgggcggaacttcactcacgtctctcggccaggcagcccagtag

SEQ ID NO: 196528 - DNA, 555 bp, synthetic construct
  misc_feature 1..555: note = Description of Artificial Sequence: Synthetic coding sequence
  source 1..555: mol_type = other DNA
atggccaccgccctggccctgcggagcctgtaccgggcccggcccagcctaaggtgtcccccggtggagttgccttgggcacccaggcgtggacacagactcagtccagccgatgacgaactgtaccagcgcactcggatctccctgctgcagagagaagccgctcaggcaatgtacatagacagctacaactcccgcggcttcatgatcaatggaaacagggtgctgggcccttgcgcactactcccccactcggtggtccaatggaacgtcggctctcatcaggatattactgaagacagcttttctcttttttggctcctggagccacgcattgagattgtggtggtgggcactggcgatcgcacagagaggttgcagtctcaggtgctgcaggcaatgcgacagcgcggaatcgcagttgaagtacaggacacccccaatgcatgtgccacgtttaattttttatgccacgaaggcagagtgacaggtgccgcacttattccacccccgggtggcacaagcttgacatccctcggccaggccgcacagtag

SEQ ID NO: 196529 - DNA, 384 bp, synthetic construct
  misc_feature 1..384: note = Description of Artificial Sequence: Synthetic coding sequence
  source 1..384: mol_type = other DNA
atgtacatcgacagctacaacagccggggcttcatgatcaacggcaaccgtgtgctgggcccatgtgcactgcttccccacagcgtggtccagtggaatgttgggtcccaccaggacatcaccgaggactcattcagtttgttctggctgctggagccccgtattgaaatcgtcgtggttggcactggggaccgcaccgaacgcctgcagagtcaagtactgcaggccatgcggcagcgtggtatcgcagttgaggtgcaagacactccgaacgcgtgcgcaacttttaactttctatgccatgaggggcgagtgaccggagcagctttgatcccgcctccgggagggacatcgcttactagtcttggacaggccgcccagtag

SEQ ID NO: 196530 - DNA, 384 bp, synthetic construct
  misc_feature 1..384: note = Description of Artificial Sequence: Synthetic coding sequence
  source 1..384: mol_type = other DNA
atgtacatcgacagctacaacagccggggcttcatgatcaacggcaatagggttctcggtccatgcgccctgttaccccattctgtagttcagtggaatgttggatcacatcaggatattactgaggacagctttagcctcttctggctgctcgaacccagaatcgagattgtggtcgtgggcaccggggaccgcacggagagactccagtcccaggtgctgcaagctatgcgccagcgcggtatagccgttgaagtccaagatacacctaatgcctgtgccacttttaactttttgtgtcacgagggacgggttaccggggccgccctgatccctccgccgggtggtacatctttgacctctctcggccaagctgcacaatag

SEQ ID NO: 196531 - DNA, 528 bp, synthetic construct
  misc_feature 1..528: note = Description of Artificial Sequence: Synthetic coding sequence
  source 1..528: mol_type = other DNA
atgggcgccctggtgatccggggcatccggaacttcaacctggagaatagagcagagagagaaattagtaagatgaaaccatcagttgcacccagacatccatccacgaatagcctcctgagggaacagatctccctctatccagaagtgaagggcgagattgccaggaaggacgagaagctgttgagcttcttaaaagacgtgtacgtggactctaaggatccagttagttccctgcaggtgaaggcggctgagacatgtcaggaacccaaggaattcaggctgcctaaagaccatcacttcgatatgattaacatcaaaagcatccccaagggaaaaatctcaattgtcgaagccctgaccctcctcaacaaccacaagctgttccctgaaacgtggacagcggagaagattatgcaggagtaccaactcgaacaaaaagatgtgaactcactcttgaaatacttcgtcacgttcgaggtggagatatttccaccggaggacaaaaaggcaatccgctccaagtag

SEQ ID NO: 196532 - DNA, 519 bp, synthetic construct
  misc_feature 1..519: note = Description of Artificial Sequence: Synthetic coding sequence
  source 1..519: mol_type = other DNA
atgcccgacagctgggacaaggacgtgtaccccgagcccccccggcggacccctgtccagcccaatccaattgtttatatgatgaaagcatttgatctcatcgtcgacagacccgtgactctggttcgtgagttcattgaacggcagcacgccaagaacaggtactactattaccataggcagtacagacgagtacctgatatcacagagtgtaaagaggaagatatcatgtgcatgtatgaggcagagatgcagtggaaaagagattacaaagtggaccaggaaattatcaacattatgcaagaccggctcaaagcttgtcagcagcgagaaggccagaactaccaacaaaattgcatcaaagaagttgagcagttcacacaggtcgcgaaggcatatcaggatcgttaccaagacctgggcgcatactccagcgcccgtaaatgtctggctaaacagcgacagcgaatgctgcaggagcggaaagcagccaaagaagcagcggccgccacgagttag

SEQ ID NO: 196533 - DNA, 507 bp, synthetic construct
  misc_feature 1..507: note = Description of Artificial Sequence: Synthetic coding sequence
  source 1..507: mol_type = other DNA
atgcccgacagctgggacaaggacgtgtaccccgagcccccccggcggacccccgtgcagccaaaccccatcgtttacatgatgaaagcttttgaccttatcgtggatcgacccgtcactttggtcagagagttcattgagagacagcacgccaaaaaccgatactattattaccacaggcagtatcggcgggtgcctgacattaccgaatgcaaagaggaagatattatgtgcatgtatgaggctgagatgcagtggaaacgggattataaggttgaccaggagatcatcaacataatgcaagataggttaaaggcttgccaacagcgcgaagggcagaactaccagcagaattgcatcaaggaagtggaacaatttacccaagtggcaaaggcctaccaggacaggtgcgcatgtcccactcacccccagcctcctacaatccttttgcggcccggcggccagaatcactgtaagtcctccctgcccagtctggtcctgacctag

SEQ ID NO: 196534 - DNA, 492 bp, synthetic construct
  misc_feature 1..492: note = Description of Artificial Sequence: Synthetic coding sequence
  source 1..492: mol_type = other DNA
atggccgccggcctgttcggcctgagcgcccggcggctgctggccgccgcagctacacgcgggcttcctgctgcgcgagttcgctgggagtcgtcattctctcggacggtggtagcaccctccgcagtggccggaaaaagaccccccgagccaacaactccctggcaggaggatcccgagccagaggatgagaacctgtacgaaaaaaatcccgattcacatggctacgacaaggatcctgtacttgacgtgtggaatatgagattagtgttttttttcggagtctctatcattttggtgctaggatctacattcgtggcgtaccttcccgactaccgctgcacaggatgcccgcgggcttgggacggtatgaaagaatggtccaggcgcgaggcagagaggctggttaagtatagggaggcgaacggcctaccgattatggagtccaattgctttgatccatccaagatacagctaccggaggatgagtag

SEQ ID NO: 196535 - DNA, 462 bp, synthetic construct
  misc_feature 1..462: note = Description of Artificial Sequence: Synthetic coding sequence
  source 1..462: mol_type = other DNA
atggccgccggcctgttcggcctgagcgcccggcggctgctggccgccgcagccaccaggggcctgccggcagcccgggtaaggtgggaatccagtttctcaagaaccgtggttgcccctagtgccgtcgctggtaaacgccctccagagcccactaccccctggcaagaagatcctgaaccagaggacgagaacctgtatgagaagaaccccgattctcacggctatgataaggaccctgttttagacgtatggaacatgcgtctggtgttcttttttggggtgtccatcattctggtgctgggttcaactttcgtggcctacctaccggattacagaatgaaggagtggagcaggagggaggccgaaaggcttgttaagtatcgggaggcaaatgggttgccaatcatggagtcaaactgtttcgatccttcaaaaatacagctgcctgaggacgagtag

SEQ ID NO: 196536 - DNA, 474 bp, synthetic construct
  misc_feature 1..474: note = Description of Artificial Sequence: Synthetic coding sequence
  source 1..474: mol_type = other DNA
gccgcccccagcgtgatggccgccggcctgttcggcctgagcgccagacggctgcttgccgcacgtcgtcgcggcctacctgctgctagggtccgctgggagtcctctttctcacgaacagttgtggcaccgagtgcggtggcaggcaagcgtccaccagagcccactactccatggcaggaggatcctgagccggaggacgagaacctgtacgagaagaacccagactcccatgggtatgacaaagaccctgtgcttgatgtctggaacatgcgactggttttcttctttggagtctccataatccttgtactggggtctacattcgtggcctacctgcccgactaccggatgaaagagtggagccgccgcgaagcagaaaggcttgtcaagtacagggaagcaaacgggctccccattatggagtccaactgcttcgatccgagcaaaatacagctgccagaagatgagtag

SEQ ID NO: 196537 - DNA, 297 bp, synthetic construct
  misc_feature 1..297: note = Description of Artificial Sequence: Synthetic coding sequence
  source 1..297: mol_type = other DNA
atggcccacgagcacggccacgagcacggccaccacaagatggagttgccggactatagacagtggaagatcgaaggcactcctctagagaccatccagaaaaaacttgccgccaaaggtctcagggacccatggggacgcaacgaagcttggcgctatatggggggcttcgctaaaagcgttagcttctcggacgtgttctttaaaggttttaagtggggattcgccgcttttgttgtcgctgtgggcgcagagtattatcttgagtccctgaataaagataagaaacatcactag

SEQ ID NO: 196538 - DNA, 297 bp, synthetic construct
  misc_feature 1..297: note = Description of Artificial Sequence: Synthetic coding sequence
  source 1..297: mol_type = other DNA
atggcccacgagcacggccacgagcacggccaccacaagatggagctccctgactaccgccaatggaaaatcgagggcacacccttagaaactattcagaaaaaactcgccgcaaaaggcctgcgggacccatggggccgcaacgaggcctggcgctatatgggggggttcgccaaatccgtgagcttcagcgacgtctttttcaagggttttaaatggggcttcgccgcctttgtcgtcgctgttggcgccgagtactaccttgagagcctaaacaaagacaaaaagcaccactag

SEQ ID NO: 196539 - DNA, 198 bp, synthetic construct
  misc_feature 1..198: note = Description of Artificial Sequence: Synthetic coding sequence
  source 1..198: mol_type = other DNA
atggcccacgagcacggccacgagcacggccaccacaagatggagctgccggattaccggcagtggaagattgagggcactccgttggaaacaatacagaaaaaattagctgctaaaggattgagagacccttggggtaggaatgaggcatggcgctatatggggggttttgctaaatccgtttctttttcggactag

SEQ ID NO: 196540 - DNA, 297 bp, synthetic construct
  misc_feature 1..297: note = Description of Artificial Sequence: Synthetic coding sequence
  source 1..297: mol_type = other DNA
atggcccacgagcacggccacgagcacggccaccacaagatggagctgcccgattatcgccagtggaagattgaggggacccctcttgaaactatccagaagaagctggcagcaaagggcctgcgggacccctggggacgaaacgaagcatggcgatacatgggagggttcgccaagtctgtttccttctccgatgttttttttaaagggttcaagtggggctttgctgcgtttgtcgtagccgtgggggccgagtattatttagagtctctcaataaggataagaaacaccattag

SEQ ID NO: 196541 - DNA, 741 bp, synthetic construct
  misc_feature 1..741: note = Description of Artificial Sequence: Synthetic coding sequence
  source 1..741: mol_type = other DNA
atgaccaccggcgactgctgccacctgcccggcagcctgtgcgactgcagcggctcccctgcattcagtaaagtggtcgaggctacagggctcggacccccccagtacgtggcccaagttaccagtcgggatggccggctgctctctacagtcattagagccctcgatacgccgagtgatggcccattttgcaggatttgccatgagggagctaatggagaatgtctgctctctccatgtggatgcacagggaccttgggggcggtgcacaagtcttgcttggagaaatggctttcttctagtaataccagttactgtgagctctgccacacggaattcgctgtggaaaagcggccacgaccattaacagaatggttgaaggatcccgggccacggactgagaagcgtaccttgtgctgcgacatggtctgcttcctgtttattacacccttagccgctatcagcgggtggttgtgtttgcggggggcccaggatcacctcaggctgcacagccagttagaagcagtgggtctgatagcattaaccatcgccctcttcacaatctatgtactgtggacactcgtgagttttcgctatcattgtcagctctattcagaatggcggaaaacaaaccagaaagtaaggttaaaaatccgggaagcagattcacccgagggcccccagcattcccctctagcagccgggctgcttaaaaaggtcgctgaggagacacccgtgtag

SEQ ID NO: 196542 - DNA, 561 bp, synthetic construct
  misc_feature 1..561: note = Description of Artificial Sequence: Synthetic coding sequence
  source 1..561: mol_type = other DNA
atggccgtggcccgggccggcgtgctgggcgtgcagtggctgcagcgggcaagtagaaatgtcatgcccttaggagcccgcaccgcatctcatatgacaaaagatatgtttccaggaccttatccaagaacccctgaagagagagcagcggccgcaaagaaatacaacatgagagttgaagattacgagccatacccggacgacggcatggggtacggagactatcctaagctgccagacagaagtcagcacgagagagacccctggtatagctgggaccaaccaggtctgagattgaattggggcgaaccaatgcactggcacttggatatgtataatagaaaccgcgtggataccagccccacacctgtgtcgtggcacgtcatgtgcatgcagcttttcggttttctggccttcatgatctttatgtgctgggtcggggacgtatatcctgtctaccagccagtcggccctaaacagtatccatacaataacctgtacttagagaggggcggcgaccctagtaaggaacctgaaagagtggtgcattacgagatttag

SEQ ID NO: 196543 - DNA, 519 bp, synthetic construct
  misc_feature 1..519: note = Description of Artificial Sequence: Synthetic coding sequence
  source 1..519: mol_type = other DNA
atggccgtggcccgggccggcgtgctgggcgtgcagtggctgcagagggcgtctcggaacgtgatgccactgggcgccagaacggccagtcacatgaccaaagatatgttcccaggtccatatccacgaacaccagaggaacgggctgccgccgcaaaaaagtacaacatgcgggtcgaggattacgagccctaccctgacgacgggatggggtatggcgattaccccaagctgcccgatagatcacaacacgagcgcgatccatggtactcctgggaccagcccggtctcagactgaattggggagagcccatgcactggcatcttgacatgtacaatcgcaaccgcgtcgataccagcccaactcccgtgtcttggcatgtgatgtgtatgcagctctttggatttctggcatttatgatctttatgtgttgggttggcgatgtgtacccagtatatcagccagtgtgcaggcatcattttagctacaacctgggattcctgtccgccctgggttag

SEQ ID NO: 196544 - DNA, 468 bp, synthetic construct
  misc_feature 1..468: note = Description of Artificial Sequence: Synthetic coding sequence
  source 1..468: mol_type = other DNA
atgaccaaggacatgttccccggcccctacccccggacccccgaggagcgcgcagccgcagccaagaaatataatatgcgggtggaggattatgaaccttacccagatgatgggatgggatatggggactaccccaagttgccggatagatcacaacacgaaagggatccctggtacagctgggatcaacccggacttagattaaactggggagaacctatgcactggcacctcgacatgtacaaccggaaccgagtcgatacaagtcctactccagtgagttggcacgtcatgtgcatgcaacttttcggctttttagcctttatgatctttatgtgctgggtcggtgacgtgtatcctgtttaccaaccagttggaccgaagcaatatccttacaacaacttgtatctcgagcgcggcggggacccgagcaaggagccagaacgggtcgtgcactatgaaatctag

SEQ ID NO: 196545 - DNA, 519 bp, synthetic construct
  misc_feature 1..519: note = Description of Artificial Sequence: Synthetic coding sequence
  source 1..519: mol_type = other DNA
atggccgtggcccgggccggcgtgctgggcgtgcagtggctgcagagagcaagcaggaatgtcatgcctctcggggcacggaccgccagtcacatgacaaaggatatgtttcccgggccctatccccgaacgccagaggagcgagcagccgcagctaagaaatataacatgcgcgttgaggactacgagccctatccagacgacggtatggggtacggggactacccaaagctgccagaccggtctcagcacgaaagagacccctggtatagctgggatcagccagggctgaggctaaactggggagaacccatgcactggcacttagatatgtataaccggaaccgggttgacacatccccaactcctgttagctggcacgttatgtgtatgcagctgttcgggtttttggcctttatgatttttatgtgctgggtgggcgacgtgtacccagtctaccagcctgtgtgcaggcaccacttctcttacaatttggggtttctttcagctttgggatag

SEQ ID NO: 196546 - DNA, 540 bp, synthetic construct
  misc_feature 1..540: note = Description of Artificial Sequence: Synthetic coding sequence
  source 1..540: mol_type = other DNA
atggccttcctggccagcggcccctacctgacccaccagcagaaggttctgcgcctttataagcgggctctccgccaccttgagtcttggtgtgtgcagcgcgacaaatacagatacttcgcatgcctcatgcgggccaggttcgaagagcacaagaatgaaaaggacatggccaaagctacacagctcttgaaagaagctgaggaggagttttggtatcgtcagcatccacagccatacatcttcccagattcgccaggcggtacatcatacgagcggtacgattgttacaaagtccctgagtggtgcctggacgactggcatcctagtgaaaaggccatgtatcccgactacttcgcaaagcgagaacaatggaagaaactgcgcagggagagttgggagagggaagtgaaacaactacaggaggagacaccaccaggggggccgcttacagaggctttaccaccggctagaaaagaaggggatctgcctccactttggtggtacatagtcacacgtcccagagagcgacctatgtag

SEQ ID NO: 196547 - DNA, 471 bp, synthetic construct
  misc_feature 1..471: note = Description of Artificial Sequence: Synthetic coding sequence
  source 1..471: mol_type = other DNA
atggccagccgggtgctgagcgcctacgtgagccggctgcccgccgcctttgctcctctgccccgcgtgagaatgttagccgtagccagacctttgagcacagcactgtgcagcgccggtactcagaccagactcggaacccttcagccagccctggtcctggcccaggtgccagggcgagtgacacagctgtgcaggcagtatagcgacatgccccctctgaccctggagggaattcaggacagagtgctctacgtgctgaagctctatgacaaaattgaccccgagaagttgtcagtgaactcccatttcatgaaggatctcggtctggacagcctcgatcaggtcgaaataatcatggccatggaagatgagttcggattcgagatcccggatatcgacgccgagaagctgatgtgcccacaggagattgtggactacatcgcggataagaaagacgtgtacgaatag

SEQ ID NO: 196548 - DNA, 231 bp, synthetic construct
  misc_feature 1..231: note = Description of Artificial Sequence: Synthetic coding sequence
  source 1..231: mol_type = other DNA
atggcccccagcgccctgctgcggcccctgagccggctgctggcccctgcccggctcccaagcggcccatctgttaggtcaaagttctacgtgcgggagccccccaacgcgaagccagattggttgaaggtgggcttcactcttgggaccactgtcttcctgtggatctacctcattaaacagcacaacgaggatattcttgagtataaaaggcggaacggtctcgagtag

SEQ ID NO: 196549 - DNA, 231 bp, synthetic construct
  misc_feature 1..231: note = Description of Artificial Sequence: Synthetic coding sequence
  source 1..231: mol_type = other DNA
atggcccccagcgccctgctgcggcccctgagccggctgctggccccagctaggcttccctcaggccccagtgtacgttctaaattctatgtcagagagcccccgaatgccaagcccgactggctcaaggttggctttaccctggggaccacagtgtttctctggatctatctaataaagcaacacaacgaggacatcttggagtataaacgacgcaacgggctggaatag

SEQ ID NO: 196550 - DNA, 231 bp, synthetic construct
  misc_feature 1..231: note = Description of Artificial Sequence: Synthetic coding sequence
  source 1..231: mol_type = other DNA
atggcccccagcgccctgctgcggcccctgagccggctgctggccccagcccgcctgcctagcggcccaagcgtgcggagcaagttctacgtgcgtgagccccccaacgcgaagccagactggctcaaggtgggctttacactcgggaccaccgtttttctttggatttacctgattaagcagcataatgaggacattctcgagtacaagagacgcaatggccttgaatag

SEQ ID NO: 196551 - DNA, 231 bp, synthetic construct
  misc_feature 1..231: note = Description of Artificial Sequence: Synthetic coding sequence
  source 1..231: mol_type = other DNA
atggcccccagcgccctgctgcggcccctgagccggctgctggccccagcccgcttacccagcgggccaagcgtacgctccaaattttacgtccgggagcctcccaacgcgaaacccgattggcttaaagtcgggtttactcttggcaccaccgtgttcctttggatttatctaatcaaacagcataatgaggacatcttggagtataagcggcggaatggcttggagtag

SEQ ID NO: 196552 - DNA, 231 bp, synthetic construct
  misc_feature 1..231: note = Description of Artificial Sequence: Synthetic coding sequence
  source 1..231: mol_type = other DNA
atggcccccagcgccctgctgcggcccctgagccggctgctggcccctgctagacttccaagtgggccgagcgtccggagcaaattttacgtgcgtgagccgcccaatgcaaaaccagattggctaaaggtcggatttactctcggaactaccgtgtttttgtggatatatcttatcaagcagcacaatgaggatatcctggaatacaaaaggcgcaatggcttggaatag

SEQ ID NO: 196553 - DNA, 231 bp, synthetic construct
  misc_feature 1..231: note = Description of Artificial Sequence: Synthetic coding sequence
  source 1..231: mol_type = other DNA
atggcccccagcgccctgctgcggcccctgagccggctgctggcccccgctcgcctaccttctgggccctccgtgagaagcaagttttacgtacgggagccacccaacgctaaaccagactggctcaaagtgggcttcactttaggaaccactgtatttctgtggatttatctaattaagcagcacaacgaagacatccttgaatacaaacggcggaatggattagagtag

SEQ ID NO: 196554 - DNA, 231 bp, synthetic construct
  misc_feature 1..231: note = Description of Artificial Sequence: Synthetic coding sequence
  source 1..231: mol_type = other DNA
atggcccccagcgccctgctgcggcccctgagccggctgctggcccccgctcgtctgccctccggcccttccgtgagaagcaagttctatgtcagggagccccctaatgccaagccagactggttaaaggtgggatttacactgggcacgaccgtgtttctctggatttatttgataaagcaacataacgaagatattctagaatacaaaaggcgaaacggcctggaatag

SEQ ID NO: 196555 - DNA, 231 bp, synthetic construct
  misc_feature 1..231: note = Description of Artificial Sequence: Synthetic coding sequence
  source 1..231: mol_type = other DNA
atggcccccagcgccctgctgcggcccctgagccggctgctggcccccgcccgcctgccatccggaccgtctgtccgtagtaaattctacgttcgcgagccgccaaatgctaaacccgactggctcaaggtgggatttacgctgggcacgactgtcttcctgtggatctatctcatcaagcaacacaacgaagatatcctagaatacaagaggcgaaatggattggagtag

SEQ ID NO: 196556 - DNA, 915 bp, synthetic construct
  misc_feature 1..915: note = Description of Artificial Sequence: Synthetic coding sequence
  source 1..915: mol_type = other DNA
atgatctacaccatgaagaaggtgcacgccctgtgggccagcgtgtgcctccttctgaatctggctcctgctccgctgaatgctgactctgaggaggacgaagaacatacaataataacagatacggagctgcctcccctgaagctgatgcacagcttttgcgcctttaaggccgatgacggcccatgcaaagccattatgaagagattcttcttcaacatcttcacacggcagtgtgaggaatttatttatggaggctgtgaaggaaatcagaacagatttgagagcctggaggagtgtaaaaagatgtgcacccgcgacaacgctaatagaattatcaagaccaccctgcagcaggagaaacccgacttctgttttctggaagaagatcctggaatctgccgggggtacatcacccgatatttctataataaccaaacaaaacagtgcgagaggtttaagtacgggggatgtctcggaaatatgaacaatttcgagaccttggaggaatgcaagaacatttgtgaggacggtccaaacggttttcaggtggacaactatggaacacaattgaacgcagtgaataatagcctgactccccagtctaccaaagtcccttccctttttgagtttcatggaccttcgtggtgccttaccccagctgacagagggttgtgccgggctaacgagaatcggttctactataactccgtgattggcaagtgcagaccattcaaatactccggctgcgggggcaacgaaaacaacttcacatcaaaacaggagtgccttcgggcctgcaagaagggctttattcagaggatctccaagggcggtcttatcaagaccaaaaggaagcggaagaagcagcgcgttaagatagcctacgaggaaatttttgtgaagaacatgtag

SEQ ID NO: 196557 - DNA, 2013 bp, synthetic construct
  misc_feature 1..2013: note = Description of Artificial Sequence: Synthetic coding sequence
  source 1..2013: mol_type = other DNA
atgcagatcccccggttctgctaccacgagcggctgagcgtggccggcaactgccgcatgtgtctggtagagatagaaaaagcacccaaggtcgtcgccgcatgtgccatgcccgtgatgaaggggtggaatattttaacgaacagcgaaaagagtaaaaaagctagggaaggcgtgatggaattcctgctagccaatcatcccctggattgtcccatttgcgatcagggtggcgagtgtgacctacaggaccagtccatgatgttcgggaacgatcgaagtcggttcctagaaggaaaacgggcggtcgaggacaagaacatcggccccctggttaagactatcatgacccgctgtatccagtgtacccggtgcatcaggtttgcttctgagattgctggtgtcgacgatctgggaaccacgggccgcggcaatgacatgcaggtcggcacttatattgaaaagatgttcatgagtgagctctccggaaatattatcgacatctgtcctgtcggagctctcacttctaagccatatgcttttactgcaagaccatgggagacgcggaagaccgagagtatcgacgtgatggatgctgtagggtctaatatagtggtgagcaccaggactggagaagtgatgcgcatcctgccacgcatgcatgaggacatcaacgaggagtggataagcgacaagacgagatttgcatatgacggactaaaaaggcaacggctaactgaacctatggtccgtaacgaaaagggactgctcacatatacctcttgggaggatgcgctgtcacgcgttgctggcatgctgcagagtttccagggcaaagacgttgcagccatcgcgggcggtcttgtcgatgctgaagcactggtggcattgaaggatttgcttaaccgcgtagatagcgacacactctgtacggaagaggtgttcccgacagccggtgccggcaccgacttgcgatcaaactacctactgaacaccactatcgccggcgtggaggaagctgacgttgtgctcttagtgggcaccaatccccgtttcgaagctcccttattcaatgcaaggattaggaaaagctggctgcacaatgacctgaaggttgcccttattggttcacccgtggaccttacgtacacctacgatcatttgggcgattcccccaaaatcctccaggatatcgccagtggtagccatcctttttcacaggtactgaaggaagctaaaaaacctatggttgtgctcgggagcagcgccctgcaacgcaatgatggggctgccatcctggccgccgtgtccagtatcgcccagaagattcggatgacgtctggagtgaccggtgactggaaggtgatgaatatcctgcataggattgcaagccaggtagcagcactcgacttaggatataaacccggcgtggaagccatccgtaaaaacccacccaaggtgcttttcctgctgggggccgacggcggctgtatcacacggcaggaccttccaaaggactgcttcatcatttaccaaggccaccatggcgatgtgggggctcccatcgctgatgttatcctgcctggtgcggcatacacagagaagtccgctacctacgtgaatacagaaggaagggctcagcagaccaaagtggccgtgaccccccccggtcttgcccgcgaggactggaagattatcagggcgctgtctgagatcgccggaatgacactgccatacgatacacttgatcaagtcagaaatcgcctggaagaagtgagccccaacctcgtacgttatgatgacatagaaggggcgaattacttccagcaagccaacgagttgtccaaactcgttaaccagcagttgttggccgacccattggtacctccacagctgaccatcaaggacttctacatgactgacagcatctcccgcgcctcccagaccatggcaaagtgcgtgaaagcagttaccgaaggcgcgcaggccgtggaagagccttccatctgttag

SEQ ID NO: 196558 - DNA, 1851 bp, synthetic construct
  misc_feature 1..1851: note = Description of Artificial Sequence: Synthetic coding sequence
  source 1..1851: mol_type = other DNA
atgtgggagggcgtgatggagttcctgctggccaaccaccccctggattgcccaatctgtgatcagggcggagagtgcgacctgcaggatcagagcatgatgttcgggaacgaccgctctaggtttctcgaaggaaagcgcgccgtagaggacaagaacattggccccctggtcaaaactattatgacacggtgtatccagtgtacccgatgtatacgctttgcatcagaaattgccggtgtcgatgatctcggaaccactggtcggggtaatgatatgcaggtgggaacctacattgagaagatgttcatgtccgagcttagcggcaacatcattgatatctgtccagtgggcgcactgacttctaagccctacgcctttacagcaagaccttgggaaacaagaaaaaccgagagtatcgacgtgatggacgcagtaggtagcaacatagtcgtgtcaaccaggaccggcgaggtcatgcgcatattgcctcgcatgcacgaggacatcaacgaggagtggattagtgacaagacccgtttcgcatacgacggattaaagaggcagcgcctgaccgaaccaatggtgcggaacgagaagggtctgttaacctatacgagttgggaggacgccctctctcgggtagcagggatgttgcagagcttccagggcaaagacgtcgcagcgattgccggcgggctcgtggatgcagaagcgctagtcgctctgaaagatttgttgaacagggtggacagcgataccctctgtactgaagaggtcttcccaactgccggagccggaacagatcttaggagcaattacttactgaatactacaatcgccggggtggaggaggctgatgtagtgctccttgtaggtacgaatcctcgattcgaggctccactcttcaacgctcgaatccgcaaatcttggctccataacgatcttaaagtcgcgcttatcggctctccagtagaccttacgtacacctacgaccatctgggagacagccccaagatactacaagacattgcctcgggctctcaccctttcagccaagtcctgaaagaggccaagaagcccatggtggtccttggcagttctgccttacagcgcaatgatggggctgctatactggccgcagtcagctctatcgcgcagaagatacgaatgacaagtggcgtaaccggcgattggaaagtgatgaacattctacaccgcatcgcttcccaggttgcagccctggacttgggctataaaccgggggtggaagcaatcagaaagaatccccccaaagttctgttccttttaggcgcagacggagggtgtatcaccaggcaggatcttcctaaggactgttttataatttatcagggtcaccacggtgatgttggagctcccattgccgatgttatccttcccggcgctgcctacacagagaaaagcgccacatatgttaataccgaaggaagagctcaacaaacgaaagttgcggtgaccccccctggcctcgccagagaggactggaaaatcatcagagcactttccgaaatagctggaatgacactcccatacgatactctcgaccaggtgagaaataggcttgaggaggtgagcccaaacctcgttcgttacgatgatattgaaggtgcaaactacttccagcaggccaatgaactgtctaagcttgtaaaccaacagctcctggccgacccgcttgtacccccccaactgacaattaaggacttctatatgaccgactctatctcgcgcgcctctcagactatggctaaatgcgttaaggctgtcacggagggagctcaggcggtggaagagccctcgatctgttag

SEQ ID NO: 196559 - DNA, 2076 bp, synthetic construct
  misc_feature 1..2076: note = Description of Artificial Sequence: Synthetic coding sequence
  source 1..2076: mol_type = other DNA
atgctgcggatccccgtgcggaaggccctggtgggcctgagcaagtcccctaagggatgtgtgagaaccaccgcaaccgccgcttcaaatttgatcgaggtgttcgtggatggccagagtgtgatggtggagcccgggactaccgtgctgcaagtggtggctgcttgtgctatgccagtaatgaagggctggaacattctgactaatagcgaaaagtctaaaaaggcgagagaaggcgtcatggagtttctgcttgcgaaccaccccctggattgccctatttgtgaccagggtggcgaatgcgatctccaggaccaatccatgatgttcggcaacgacagaagcagatttctggaggggaagcgagccgtcgaggataaaaatataggcccactcgtcaagaccattatgaccagatgtatccagtgcacgcgttgcatcagatttgcaagcgagatagcgggagtggacgacctaggcaccaccggccggggcaacgacatgcaagtaggcacttacatagagaaaatgttcatgtccgagctgagcggcaacattattgatatttgcccagtgggagcgttgacttccaaaccctacgccttcacggctaggccctgggagacacggaagaccgaatctatcgacgtgatggatgccgttggatcaaatatcgtggtgtctactagaacgggtgaagttatgcgaatcttgccccgcatgcatgaagacataaacgaggagtggatttctgacaaaaccaggtttgcttacgatggcctgaagcggcagagactcacggaaccgatggtgaggaacgagaaaggactgctcacatatacttcatgggaagatgccttatctcgggtggccggaatgctacaaagttttcaaggaaaggacgtggcggctatagcgggtggtctggtcgacgcagaggcactggtcgcactaaaggatctacttaatcgcgtggacagtgacaccctatgcactgaagaggtgttcccgaccgccggcgccggcaccgatcttaggtcaaattaccttttgaacactacaattgctggagtagaggaggccgacgtagtgctgttagtgggtaccaatcctaggttcgaagctccactcttcaatgccaggatacgaaagtcctggctccacaacgaccttaaggtggccctgattggttcacccgtagacctgacttatacctatgaccacttgggggactcaccgaaaatcctccaagatattgccagcgggagccaccctttttcccaggttctcaaggaggcaaagaagcccatggtggtgctgggcagctcagccctgcaaagaaatgacggagccgctatccttgcagcagtgagctctattgcccagaaaatccggatgacatccggtgtgacaggggattggaaggtgatgaacatcctgcatcgcatagcctcgcaggtggctgccctggacttggggtacaaaccaggcgtggaggcgattagaaaaaatcccccaaaggtcctctttctgctgggcgccgatgggggttgtataacaagacaagatctccctaaggattgctttattatatatcagggccatcacggggatgtgggcgcaccgattgccgatgtgattctaccgggcgccgcctatacagagaaatctgccacctacgtgaatacagagggtagagcacagcaaacaaaggtggctgtgacaccacctggcctggccagggaagactggaagatcattcgggcactttctgaaattgccggtatgactctgccatacgacacgctggaccaggtcagaaaccgcctcgaagaagtcagcccaaatttagtacgttatgacgatatcgagggcgctaattacttccagcaagccaacgagctgtctaagctagttaaccagcagcttttagcggatcctttggtgcctccccagcttacaattaaagacttttatatgaccgatagcataagcagggcctcccaaacgatggccaagtgcgttaaggctgttacagaaggagcacaggctgttgaggaaccttcaatctgttag

SEQ ID NO: 196560 - DNA, 2184 bp, synthetic construct
  misc_feature 1..2184: note = Description of Artificial Sequence: Synthetic coding sequence
  source 1..2184: mol_type = other DNA
atgctgcggatccccgtgcggaaggccctggtgggcctgagcaagtcccccaagggatgcgtgagaacaaccgcaacagctgcgagcaacctcattgaggtttttgtcgatggacaaagcgtgatggtggagcctggcactaccgtcttgcaggcatgtgaaaaggtaggtatgcagatccctcggttttgttaccacgagcggctcagcgtcgccggcaactgtcgcatgtgtttggtcgagatagagaaggctcctaaagtggtggccgcttgcgccatgcccgtgatgaagggatggaacattttgaccaacagtgagaagtcaaagaaggcacgggaaggagtaatggaatttctgcttgctaaccacccactcgattgtccaatctgtgaccagggtggtgagtgcgatcttcaagatcagagtatgatgttcggaaacgatcgcagtcggtttctggaggggaagagagccgtggaggacaaaaatattggaccactggtgaagactatcatgacacgctgtattcaatgtacgcggtgtatcagattcgccagcgagattgctggcgtcgacgacctgggaaccactggaagagggaatgatatgcaggtcggcacttacatagagaagatgttcatgtcagagctgtccggcaatattattgatatttgtcccgtgggcgctctgaccagcaagccctacgcctttacagcgcgcccttgggagacgcgaaaaactgagtcaattgatgtcatggacgcagtcggaagcaatatcgtcgtgtccactcgtaccggcgaggtgatgaggatactgccaaggatgcacgaagacattaatgaagagtggatttcagacaaaacgaggtttgcctatgatggactgaaacggcagcgccttactgagcccatggtgagaaacgagaagggattgctgacatacacatcttgggaagacgcccttagccgggtagccggtatgctgcaaagttttcagggcaaggatgtcgccgccatcgcaggcggcttagtggacgccgaggctttggttgccctcaaggatttgctcaatagagtcgatagtgataccctgtgcactgaagaagtgttccccacagcaggtgcggggaccgacttgaggtccaattatttattaaacaccaccattgccggcgtagaggaggcagacgtggtactgctggtcggcactaaccccaggttcgaggccccgttgttcaatgcgagaatccgcaagtcctggttgcataacgatctaaaagtggcccttattggctcacccgttgacctgacttatacgtacgaccatctgggcgactcccctaagatcttacaggatatcgccagcggcagtcatccatttagtcaggtgctaaaagaggccaagaaacctatggtggtcctgggatcatccgctctacagcggaacgacggagctgccatactggcggctgtgtcttctatagcccagaagatacgcatgaccagcggtgtaactggcgactggaaggtgatgaatatacttcatcgcatcgcatcacaggtggccgctctcgatctcgggtacaagccaggtgtggaggctatccggaaaaatcctcccaaggtgctattcttattgggggcagatggggggtgcataactaggcaagatctgcctaaggattgctttattatttaccaggggcaccacggcgatgtcggggcacctatagcggatgtgattctgcctggggccgcttacacagagaagtccgccacatatgtgaacactgagggcagggcgcagcagactaaagttgccgtgactcctcccgggctggctcgagaggactggaaaatcatccgtgcactgtctgaaattgctgggatgaccctcccttatgacaccctggaccaggttagaaatagacttgaggaggtgagccctaatctcgtgaggtacgacgatattgaaggagctaactattttcaacaggccaatgagctgagcaaactcgtcaaccagcagctgttggctgaccccctggtgccgccccaattaactattaaggacttctatatgacagacagcatctccagagcttcccagacgatggccaagtgcgtcaaagccgtcactgaaggagctcaggccgtggaggaaccatctatttgttag

SEQ ID NO: 196561 - DNA, 393 bp, synthetic construct
  misc_feature 1..393: note = Description of Artificial Sequence: Synthetic coding sequence
  source 1..393: mol_type = other DNA
atgctgcggatccccgtgcggaaggccctggtgggcctgagcaagagcccaaaaggatgcgtaagaactactgcaaccgccgcctccaatctgatcgaggtgtttgtggatggacagtcagtgatggttgagccggggaccacagttctgcaggcttgcgagaaagtcggaatgcaaatccctcggttctgctatcacgagagactgtccgtcgctggcaattgccgcatgtgcttagtcgagatagaaaaggccccaaaagtggttgccgcatgcgccatgcctgtgatgaagggctggaatatcttgacgaattcggaaaagagcaagaaggccagagagggagtcatggagttcctgctggccaaccatcctctggattgtcccatatag

SEQ ID NO: 196562 - DNA, 2226 bp, synthetic construct
  misc_feature 1..2226: note = Description of Artificial Sequence: Synthetic coding sequence
  source 1..2226: mol_type = other DNA
atgcggatccggggcagcagcggcaccctgagccggatcaacatgctgcgcattccagtgcgcaaggcccttgtgggtctgtccaaatcccccaagggctgcgtccgcaccaccgctacagcagcatcaaacttaattgaagtcttcgtcgacggccagagcgtcatggtagagcccgggactaccgtcctgcaggcctgcgagaaagtaggaatgcagatacccaggttctgttatcacgaacgactttccgtggcgggcaattgccgtatgtgtctggtggaaatcgagaaggccccaaaggttgtggctgcttgcgctatgcccgttatgaagggctggaacattctgacaaacagcgaaaaaagcaaaaaggctagagaaggagtgatggaatttttgttggctaatcacccgttggattgtcccatttgtgatcaggggggcgagtgcgatctgcaggaccagtcaatgatgtttggcaatgaccgtagtcgcttcttggagggtaagcgggccgtggaggacaagaacatcggccctctagtcaagaccatcatgacccgctgcattcagtgcactagatgcatccggtttgcgagcgaaatcgccggagtggatgatttgggcacaaccggccgcggtaatgatatgcaggtcgggacatacattgagaaaatgtttatgtctgagctgagcggcaacattatagacatatgccccgtgggcgcattgacctccaaaccttacgctttcaccgccaggccctgggagacgaggaagacggaatctatcgacgtgatggatgctgtcggatccaacattgtggtttcgactcggactggcgaggtaatgcggatcctaccaaggatgcacgaggatattaacgaggaatggattagcgataaaacgcgttttgcctatgacggactaaagagacagcggctcacagagcccatggtacggaatgagaaaggcctgctgacgtataccagctgggaagatgccctctctcgcgtggcgggaatgcttcaatcgtttcagggcaaagatgtggcggctatcgctggcggtttggttgatgccgaagccctggtggcccttaaggacctgctgaaccgtgtagactcagacacactgtgtacagaagaggttttccccacagctggagccggcacagatcttagatcaaattacctgctgaacacaacaatagctggcgttgaagaagccgacgtagtgctccttgtgggcaccaatcccagattcgaagcgccgctcttcaacgcacggatccgaaagagttggctgcataatgatctaaaagttgccttaattgggagcccagtggatctgacttacacgtacgaccacctgggagacagccccaaaattctgcaggacatcgccagcggatcacaccccttttcccaggtcttaaaggaagctaaaaaacccatggtcgtgcttggatcctcagcgttgcagcggaatgatggagcagctattcttgctgcagtatcatcaattgcgcaaaagattagaatgactagtggcgttactggagactggaaagtaatgaatatcctccatcggatcgcatcccaggtggccgccttagatctgggctacaagcctggtgttgaggccattcggaaaaaccctcccaaggtactctttctacttggcgctgatggaggctgcatcacgcggcaagatctgcccaaggattgctttatcatttaccagggtcatcatggcgatgtgggcgcccccattgccgatgtgattctcccaggagccgcctatacggagaagtcagccacctacgttaacactgaaggacgcgcccaacagacaaaggttgcagtgacccccccagggctcgcacgcgaggactggaaaattattcgcgccctgagcgaaattgctgggatgacattgccctacgacacactagatcaggtgaggaacagacttgaggaggtatccccgaatctggtaagatatgacgacatcgagggggccaactatttccagcaggccaacgagctaagcaagcttgtcaatcagcagctgttagctgatcctctggtcccgccgcagcttactatcaaagatttttacatgaccgattctatttctagggcgagccagacaatggctaaatgcgtgaaagccgtgaccgagggtgcgcaggctgtggaggaaccgtccatctgttag

SEQ ID NO: 196563 - DNA, 1836 bp, synthetic construct
  misc_feature 1..1836: note = Description of Artificial Sequence: Synthetic coding sequence
  source 1..1836: mol_type = other DNA
atggagttcctgctggccaaccaccccctggactgccccatctgcgatcagggaggcgaatgcgatctccaggaccaatctatgatgtttggcaatgacagaagtcggtttctggagggaaagcgcgctgtggaagacaagaacatcggtcctttagtgaagaccatcatgaccagatgcattcagtgcactaggtgtatccggtttgcgagcgagatcgcaggagtcgacgacctcggtacgaccggtcgcggaaacgacatgcaggtaggcacctacatagagaagatgttcatgtcggagctgagcggaaacatcatagatatttgccccgtgggtgcattaaccagcaagccctatgcctttactgctaggccatgggaaacacgtaagacggagagcattgatgtcatggatgcggtgggctccaacatcgtcgttagcacacggacaggggaagtgatgcgaatcctaccccggatgcatgaagacatcaacgaggagtggatcagtgataagacccggttcgcttacgatgggctgaagagacaaagattaactgagcccatggtgcggaatgaaaagggattactgacttatacatcttgggaagatgccctctcacgtgtagccgggatgttgcaatctttccagggcaaggacgtagcagcgattgccggagggttggtggacgctgaagcgttggtcgcactcaaggatctgctgaaccgagttgattccgatacattgtgcaccgaagaagtctttcccaccgctggggcgggaactgacctacgctcgaattacctgctgaacaccactattgcaggtgtggaggaggccgacgttgtccttctggttggcacaaaccccagattcgaggcgcctctctttaatgcccggattcgcaagtcgtggcttcacaatgacttaaaggtggcccttatagggtcacctgtggatctcacctatacctacgaccacttgggcgatagccctaagatcctacaggacatcgcctccggaagtcacccgttcagccaggtgttgaaggaagccaagaagcccatggtcgtgctgggaagctccgctctccaaaggaacgatggcgccgctatcctggccgccgtgtcatccatcgcccaaaagattcggatgacatcaggagtcaccggcgactggaaggtgatgaatatattacatcgcatagccagccaagtggctgctctcgatttaggatataagcctggagtagaggcgatccggaaaaatccaccaaaggtgctatttcttctcggcgcagatgggggttgcatcacgcggcaagatttgccgaaagattgctttataatctatcagggccatcacggagatgtcggcgcccccatcgccgacgttatactaccgggggctgcctacacggaaaaaagcgccacctacgtaaacacagagggcagggcccagcagactaaagtggctgttacgcctccagggctcgcgcgggaagattggaagatcatcagagctctaagtgagattgctggcatgaccctgccgtacgacaccctcgaccaggtaaggaacagactcgaggaggtgtcgcccaatctcgtgaggtacgacgacatcgaaggagctaattactttcagcaggccaacgagttatccaagttagtgaaccagcagcttctggcagacccactggtgccaccccagctgaccatcaaggatttctacatgacagactcaatttcccgcgcttcccagactatggctaagtgtgtgaaagcagttaccgagggcgctcaagccgtcgaggaacccagcatctgttag

SEQ ID NO: 196564 - DNA, 1392 bp, synthetic construct
  misc_feature 1..1392: note = Description of Artificial Sequence: Synthetic coding sequence
  source 1..1392: mol_type = other DNA
atggccgccctgcgggccctgtgcggcttccggggcgtggccgcccaagtgctaaggccaggagctggagtgagactgccaatccagcctagcagaggcgtcagacagtggcaaccagatgtggaatgggctcagcagtttgggggcgcagttatgtacccgtccaaggagaccgcccactggaaaccaccaccttggaatgacgtagatccaccaaaggacactattgtgaagaacatcactctgaacttcggaccacaacatcctgcggctcacggtgtgctgaggctggtcatggagctgtctggagagatggtccgcaagtgcgacccccacatcggcctgctccatcgggggactgagaaactgattgagtacaagacttacctccaggcactgccctattttgacagactagattacgtgagtatgatgtgtaacgaacaggcatactcacttgccgtggagaagttactgaatatccgtccacctccacgcgctcaatggattcgggtgttgtttggcgagatcacccgcttgctgaaccatataatggccgtcacgactcatgcactggacctcggggcaatgacccctttcttttggctctttgaggaaagggaaaaaatgttcgagttttacgagagagttagtggcgccagaatgcacgcggcatacattcgcccagggggcgtccatcaggatctcccacttggcttaatggacgatatttaccagttctccaaaaattttagcttacggctggacgaactggaagagctgttgaccaataacagaatttggaggaaccgaacaatcgacattggagttgtgacagctgaggaggctctaaactatggcttttccggcgtcatgctgcgaggctctggtatccagtgggatcttcgaaagacgcagccgtatgacgtgtacgatcaggttgagtttgatgttcctgttggaagtcgcggcgattgctacgaccggtacctgtgccgcgtcgaggaaatgaggcagtcactgaggataattgctcagtgtctgaacaaaatgccgcccggagagattaaggtggacgacgccaaggttagcccacctaagcgagccgagatgaaaaccagcatggagtcacttatccatcacttcaaactctacaccgaagggtaccaggtgcctccgggcgccacgtacacagccatagaagccccgaaaggcgaatttggggtctacctggtatccgatggatccagtcggccataccgatgtaaaatcaaggcccctggctttgcgcacctggccgggctcgacaagatgagtaaaggacacatgttggccgacgtggttgctataattggaacccaggacattgtgtttggcgaggtagatcgatag

SEQ ID NO: 196565 - DNA, 1374 bp, synthetic construct
  misc_feature 1..1374: note = Description of Artificial Sequence: Synthetic coding sequence
  source 1..1374: mol_type = other DNA
atggccgccctgcgggccctgtgcggcttccggggcgtggccgcccaggtcttaagacctggcgccggagttcgcctccccatccagcccagccggggagtccgccagtggcaacccgatgtcgagtgggctcagcagtttggtggggccgttatgtatccaagtaaagagactgctcactggaaaccaccaccttggaacgacgtcgatccccctaaagacactatcgttaagaatattaccctaaattttggccctcaacatcccgctgcccatggcgtcctccggttagttatggagctgtccggggagatggtgcgaaaatgtgatccccacatcggcctccttcataggggcactgagaagctgatcgagtacaaaacttacctgcaggccctgccatactttgacagactggattacgtgtctatgatgtgcaacgagcaggcgtattcattggccgtagagaagctgctcaacatccgacccccgccaagagcccaatggatcagggtgctctttggggagataacccggctgcttaatcacatcatggcagtgacaacacacgccttggatctgggtgcaatgactcctttcttctggctcttcgaggaacgcgagaaaatgttcgagttctacgagagggtgtccggtgcacgcatgcacgctgcttacatccgaccaggcggcgtccatcaggacctgcctcttggcctgatggatgatatttaccagttcagcaagaacttctccctgagactggacgagctcgaagaactgcttacaaacaacagaatctggcgaaaccgcactattgacattggggttgtcaccgccgaagaagctcttaattacggtttttccggcgtgatgctgagaggcagcgggattcaatgggatctaagaaagacacagccgtacgatgtctacgatcaggtcgagtttgacgtgccagtaggtagccggggagattgctatgataggtacctttgcagggtagaagaaatgcgccagtccttaagaatcattgcccagtgtctgaataagatgccgccgggtgagataaaggtcgacgacgcgaaggtgtccccgccaaagagagccgaaatgaagacctcaatggagagtctcatacaccacttcaagctatataccgaaggttatcaggtaccaccaggtgccacgtacacagcgatcgaggccccgaagggtgagttcggagtgtatttggtatctgacggctcgagccgcccataccggtgcaagattaaagcccctggctttgcccatctcgctgggctcgataagatgagcaagggtcacatgttggccgacgtggtggcaataatcggtaccagacccatagtttag

SEQ ID NO: 196566 - DNA, 696 bp, synthetic construct
  misc_feature 1..696: note = Description of Artificial Sequence: Synthetic coding sequence
  source 1..696: mol_type = other DNA
atggagctgagcggcgagatggtgcggaagtgcgacccccacatcggtttgctccatagaggaacagagaaacttatagaatataagacttatcttcaggccctaccatattttgatcgactggattatgtgtcaatgatgtgtaacgagcaggcgtactctcttgccgtggagaaactcttaaacatcagaccaccgccgagggctcagtggatccgggtgctgttcggcgaaatcacccggctcttgaaccacataatggccgtgacaacccacgccttagacctcggggccatgacaccctttttttggttattcgaagagagagagaagatgttcgaattttatgagcgcgtgtcaggcgctcgaatgcacgccgcctatattcgacctggtggagtccaccaggaccttcctttagggctaatggatgatatttatcagttttctaaaaatttttccttgcgcctcgacgagttagaggagctgctcaccaataacaggatatggagaaatcgtacaatagacattggcgtcgtgactgctgaggaggcgttaaattacggattttcaggtgtaatgttaagggggagcggaatccagtgggacctgagaaagacccagccatacgacgtttatgaccaagtcgaattcgacgtgcccgtgggttccagaggggactgttatgaccggtag

SEQ ID NO: 196567 - DNA, 162 bp, synthetic construct
  misc_feature 1..162: note = Description of Artificial Sequence: Synthetic coding sequence
  source 1..162: mol_type = other DNA
atgttcgagttctacgagcgggtgagcggcgcccggatgcacgccgcatacatccggccaggaggcgtgcaccaggacctgcccctcgggttgatggacgatatatatcaattctcaaaaaacttctctctgaggctcgatgaattggaagaggttagttag

SEQ ID NO: 196568 - DNA, 795 bp, synthetic construct
  misc_feature 1..795: note = Description of Artificial Sequence: Synthetic coding sequence
  source 1..795: mol_type = other DNA
atggccgccgccgccgtggcccggctgtggtggcggggcatcctgggggcgtccgcactgacccgagggacgggccgaccctccgtcctgttgctcccagtccgacgcgaaagcgctggcgcagacacccgtcctacggttcgacctcggaatgacgtggcccacaagcagttgagcgccttcggggagtacgtggcagaaatccttcccaagtacgttcaacaagtgcaggtatcttgctttaacgagctggaggtctgcatccaccccgatggcgtgatcccggtactgacgttcctgagggatcatacaaacgcacagtttaagagcttggtagatctaactgcggtcgatgtgcccactagacagaatagattcgaaatcgtatataatttgttgtccctgcggttcaactcacgcatcagagtgaagacttatacagatgagcttactcctatcgaatcggcggtaagcgtctttaaggcagccaattggtacgagcgcgaaatctgggacatgttcggggttttcttcgctaaccaccctgacctgagaaggatcttgaccgattacggattcgaaggccatcctttcagaaaggacttccctctgagcggatatgtagaattacgctatgatgacgaagtgaagcgggttgtggccgaaccagttgagctggcgcaggagtttcggaagttcgatcttaatagcccctgggaagcttttcctgtgtataggcagccaccagaaagcctaaaactggaagcaggagataagaagccagacgcaaaatag

SEQ ID NO: 196569 - DNA, 528 bp, synthetic construct
  misc_feature 1..528: note = Description of Artificial Sequence: Synthetic coding sequence
  source 1..528: mol_type = other DNA
atggccgccgtgagcatgagcgtggtgctgcggcagaccctgtggaggagacgagccgtggccgtggccgcactgtccgtcagtagggtgccaactcggtctttacggacctcgacttggagactggcacaggatcaaacccaggatacccaacttattaccgtcgacgagaaactggacatcaccacacttactggcgtgcctgaggaacacataaaaacaagaaaggtacggattttcgttcccgctagaaataacatgcagagcggggtgaataacaccaagaaatggaaaatggagtttgacacccgcgaacgctgggagaatcccctgatgggttgggccagcaccgcagaccctctttctaacatggttctcaccttttctactaaagaagatgctgttagtttcgctgaaaagaacgggtggtcatacgacatagaagagaggaaggtgccaaagcctaagtccaagtcttatggggccaacttctcttggaataagaggactcgcgtgagcacaaaatag

SEQ ID NO: 196570 - DNA, 321 bp, synthetic construct
  misc_feature 1..321: note = Description of Artificial Sequence: Synthetic coding sequence
  source 1..321: mol_type = other DNA
atgcccttcctggacatccagaagcggttcggcctgaacatcgaccggtggctcacaatccagtctggagagcagccttacaagatggcgggacggtgccatgcttttgagaaagaatggatcgaatgtgcacatggcattggttacactagggctgagaaggaatgcaaaatagaatatgatgattttgttgagtgccttctccggcaaaagacaatgcggcgagccggaaccatacgtaagcagagagacaagctgataaaagagggcaagtacacccctcctcctcaccacatcggcaagggggaacccaggccttag

SEQ ID NO: 196571 - DNA, 321 bp, synthetic construct
  misc_feature 1..321: note = Description of Artificial Sequence: Synthetic coding sequence
  source 1..321: mol_type = other DNA
atgcccttcctggacatccagaagcggttcggcctgaacatcgacagatggcttacgatccagtcaggagaacagccatacaagatggctggaagatgccacgctttcgaaaaggagtggattgaatgcgcccacggcattggatatacccgggctgaaaaggaatgtaaaatcgagtacgacgatttcgttgagtgtttgctgagacaaaagaccatgcgtcgtgcaggaacgatacggaagcagagagacaagctcattaaggagggcaagtatacgccccctcctcaccacattggtaaaggggagccgaggccatag

SEQ ID NO: 196572 - DNA, 375 bp, synthetic construct
  misc_feature 1..375: note = Description of Artificial Sequence: Synthetic coding sequence
  source 1..375: mol_type = other DNA
atggccgccgccatgaccttctgccggctgctgaaccggtgcggcgaggcagcccgttccttgccattaggcgccaggtgttttggagtccgggtgtctccaaccggcgagaaggtgacacatacggggcaggtgtatgacgataaggactatcgccgcattaggtttgtggggcggcaaaaagaagtgaacgaaaatttcgccattgatcttatcgccgaacaacctgttagcgaagtagagaccagagttatcgcctgtgacgggggggggggagcactgggtcatcctaaagtctacattaatctggacaaagagacaaagaccgggacatgcggatattgcggcttgcagtttcgccagcatcatcactag

SEQ ID NO: 196573 - DNA, 1560 bp, synthetic construct
  misc_feature 1..1560: note = Description of Artificial Sequence: Synthetic coding sequence
  source 1..1560: mol_type = other DNA
atggcccccatccccaagaccgtgggccggatcaagctggactgctcactccgacctagctgccctctcgaggtagccgctgccccaaaactttgtaaggaatttgggccagaagattatggcgaggaggacattgttgactttctcagaagactcgtggaatctgacccccagggccttcatagaatccacgtggatgggtcatcgggccgactgcaactctggcatcacgactatctgctaggccatttggacgacgaaggcaaaagcacaggccagagcgatagaggcaaaggcgccgaaggactgggaacctactgtggtctgcgtaaatccttcctataccctccacaggaaagcgaaccgtgcccccagtctccatcagcctccgcgacatttccatccgtgtccgattccctgctccaggtggcgatgccacagaaactgctggtgacagaggaagaggcaaatcggctcgctgaggagttggttgccgaggaggagagaatgaaacaaaaggctgagaagaaacgacttaaaaaaaaaagacagaaagagaggaagcgacaggagcgcctagagcagtattgcggcgaacctaaagcctccactacctcagatggggacgaaagcccgccgagctcccccgggaatccagtgcagggtcagtgtggcgaagaagaggactccctggatctgagctcaacatttgtgtccctcgcactccgaaaggtcggtgactggcctctgtccgccaggagggagaagggactcaaccaggagcctcaggggcgtggcctggccctgcagaagatgggccaagaggaagagtcaccgcctcgcgaagaacgaccacagcagtcccctaaagtccaggcctctccaggactcttggcagcggcgctccagcagagccaggagctggccaaactgggtacgtcgttcgctcaaaacgggttctaccatgaggcagtcgtgctgtttacccaagccctgaaactgaatccgcaagaccataggctgtttggaaatcggtcattctgtcatgaacgcttggggcaaccagcttgggctctggccgacgcccaggtggctcttaccctgcggccaggttggccacgggggcttttcaggctgggcaaggccctaatgggcctacaacggtttcgggaggctgcagccgtcttccaggaaaccctgagagggggcagccagcctgacgcagcccgggaattacgtagctgtttactgcatctcacccttcagggacaaagaggcggtatctgcgctcctcccctgtcacctggggcattgcagcctctccctcacgctgagcttgcaccaagtgggctgcctagtcttcggtgccctcggagtaccgcactgaggtctcctggattgagcccacttttacattacccaagttgccacaggtcccaccctaaccagcccttgagccaaacccaaagtcgacgccctcaccctctcaagccacaagacccgtctaaaggctgggatatcttgggcctgggcctccagcatctctcacaggctagatag

SEQ ID NO: 196574 - DNA, 621 bp, synthetic construct
  misc_feature 1..621: note = Description of Artificial Sequence: Synthetic coding sequence
  source 1..621: mol_type = other DNA
atggccgtgctgagcgcccccggcctgcggggcttccggatcctgggactcagaagctctgtgggacccgccgtccaggccagaggtgtgcaccagtccgtcgctactgacggaccgtcctccacacaacccgctctgcctaaagctagagcggtagcacccaaaccttccagccgaggagaatatgttgtggcgaagttggacgatttggtaaattgggcacgtcgctcgtcactctggcccatgacatttgggcttgcttgctgcgccgtcgagatgatgcacatggctgccccccggtatgatatggaccgattcggagttgtgttccgcgcaagtccaagacagagcgacgtgatgatagttgcgggtacactgactaataagatggctcccgccttaaggaaggtgtatgaccagatgcccgagccccggtatgtggtctccatgggtagttgcgccaatggtggtggctactaccattattcctatagcgtggtacggggatgcgacagaattgttcccgttgatatttacatccctggcagggctggcacagcgcctcctacccgggagctggaaacaggcccggctccccatggtgctcggcgccctttgtag

SEQ ID NO: 196575 - DNA, 885 bp, synthetic construct
  misc_feature 1..885: note = Description of Artificial Sequence: Synthetic coding sequence
  source 1..885: mol_type = other DNA
atggccgtgctgagcgcccccggcctgcggggcttccggatcctgggacttaggtccagcgtcgggccagccgtacaagcgaggggcgtccatcagagcgtggccaccgacggtccctctagcactcagcctgcgttgcctaaggctagggccgtggcccccaagccttcttcccgcggagagtatgtggtggccaagttggacgatttggtgaactgggcacgacgggtatcaacgatgagctgccgtccatcgtccagcgcgagggcgtctctgcatacccaccgccacacacacactcatacgaatgttcagacacgaacacacacaacccatgcctgcaccctcacttgcgctcatgtgcacgcaagctctcatgtgtggactgacgtttacacggaccacacccacactcatgctcacaacgcacacatgcataccagaactcacgctcacctacatactcatgcccacacatctacttgcgcacacactctcgcgcacatccacacgtgcaccctggcacttatgcacactcacgcacatatatatacatgcacccgcactttggctcatacttgtacatacatgcacagtcatgctcatacatgtacgctcacccatatgcacacccgcccctgtgtggacacttgtatgtgtgcgtgctggcatgcgtgcactcaagcacactccctcatgcatactcacccttgcggcaggggcgctggcagaaccttgcctgaagcacccgttctggcatggtggcctgttgtaccatccgaagactcagatccagctggggacgatccctctgttagtgtaatcttatttctggcctctgtgtgcagcagttgcttttcattcaaagtaaaggcagtcttctag

SEQ ID NO: 196576 - DNA, 645 bp, synthetic construct
  misc_feature 1..645: note = Description of Artificial Sequence: Synthetic coding sequence
  source 1..645: mol_type = other DNA
atggccgtgctgagcgcccccggcctgcggggcttccggatcctgggcctacgctctagcgtgggccccgcagttcaggcacgaggtgtacaccagtccgtcgcaaccgatggtccaagttccacccagcctgcactaccgaaggccagggccgtcgcccctaagccttcatctcgtggggagtacgtggtagccaagctggacgatctggtcaattgggcccgaaggtcttctctgtggcccatgacctttggcctggcctgctgtgctgtggaaatgatgcacatggccgctcccagatacgatatggaccgcttcggagtagtgttcagggccagccctcggcagtctgacgttatgatagttgcggggacacttaccaacaagatggccccagcgcttcgcaagtctagtctgagaccagatgctggcgccgctctgagaggactccacggcgagttgcggcaacgaaggcggctactccccctgttcctgctgggtggagaagggcttcgcccacaccgtgcccggggtcacttgcaccctcgcttgcccacaactgccgaggccttgttatacggtatcctgcagcttcagcgtaaaatcaagagggaacggcgtcttcagatctggtatcggcggtag

SEQ ID NO: 196577 - DNA, 621 bp, synthetic construct
  misc_feature 1..621: note = Description of Artificial Sequence: Synthetic coding sequence
  source 1..621: mol_type = other DNA
atggccgtgctgagcgcccccggcctgcggggcttccggatcctggggttgcggagttctgtggggccggcggtgcaggccaggggtgtgcaccagagcgtggcaactgacggtcccagcagcactcaacccgccttacctaaggccagagctgttgcacctaaaccttctagccgtggggagtacgtggtcgctaaacttgacgaccttgtgaactgggcccggaggagcagtctctggcccatgacttttggtttggcttgctgcgctgtcgaaatgatgcacatggccgcccctcgatatgacatggaccgttttggcgttgtgttcagagctagccctcggcaatctgacgtcatgatcgtagcaggaacacttacaaacaaaatggctcccgctctccggaaggtgtacgatcagatgcctgagccaagatacgtggtgagcatgggatcatgcgccaacggcggcggttactatcactatagctacagcgttgtgcgcgggtgtgaccggatcgtgcctgttgacatttacatacctggccgagccgggacagctcctcctactcgggagcttgaaactggaccagcgccgcatggagccagacgccccctctag

SEQ ID NO: 196578 - DNA, 633 bp, synthetic construct
  misc_feature 1..633: note = Description of Artificial Sequence: Synthetic coding sequence
  source 1..633: mol_type = other DNA
atgcggtgcctgaccacccccatgctgctgcgggccctggcccaggctgcacgggctgggcctcccggcggtaggtccctgcacagctccgctgttgctgccacatataaatacgtcaacatgcaggatccagagatggacatgaaaagcgtcaccgatagggccgcgcgaaccctcctatggactgagctgtttcgtggtctggggatgactctctcatatctgtttcgagagcccgccaccatcaattaccccttcgaaaaagggccactgagtcctcggttcagaggggagcatgcattacgaagatacccctccggagaggaacgctgcatcgcgtgcaagctttgtgaggccatctgccctgcccaggctatcacaatcgaggctgagcctagggccgatgggtctagacgcacaactaggtacgacattgatatgacaaagtgtatttactgcggattctgtcaggaagcttgtccagttgatgccatcgtggagggtccgaacttcgagttctccactgaaacacacgaagagctcctgtacaacaaggagaaattgctaaacaatggcgataaatgggaggctgagatagccgcgaatattcaggccgactacttatataggtag

SEQ ID NO: 196579 - DNA, 375 bp, synthetic construct
  misc_feature 1..375: note = Description of Artificial Sequence: Synthetic coding sequence
  source 1..375: mol_type = other DNA
atgcggtgcctgaccacccccatgctgctgcgggccctggcccaggccgcccgggcaggacctccgggcgggcgctccctccattcttccgctgtggcggcaacttataagtacgttaacatgcaagatccggagatggacatgaagagcgtgaccgaccgagcggccagaactttgctgtggactgagctgtttaggggattgggcatgactctgtcctatttatttagagagcctgccacaatcaattaccctttcgagaaaggccccctttcacctagattcaggggagagcacgctctgcgaaggtatccaagcggggaggagaggtgcatagcctgtaagttatgtgaagccatttgcccggctcagtag

SEQ ID NO: 196580 - DNA, 333 bp, synthetic construct
  misc_feature 1..333: note = Description of Artificial Sequence: Synthetic coding sequence
  source 1..333: mol_type = other DNA
atgcggtgcctgaccacccccatgctgctgcgggccctggcccaggccgccagagccggaccccctgggggaaggagtctgcacagttctgccgtggccgccacttacaaatacgtgaatatgcaggaccccgagatggacatgaagagtgtgactgatcgcgcagctcgcactctattgtggactgaactattcagaggactgggaatgactctgtcctacctatttagggagcctgctactattaactatccgttcgaaaagggccccctgtcccccagatttcggggagaacacgctctgaggcgatatcccagcggggaggaaagatag

SEQ ID NO: 196581 - DNA, 555 bp, synthetic construct
  misc_feature 1..555: note = Description of Artificial Sequence: Synthetic coding sequence
  source 1..555: mol_type = other DNA
atgcggtgcctgaccacccccatgctgctgcgggccctggcccaggctgcaagagctgggccgcctgggggccggtcattgcatagtagtgctgtcgccgccacatacaagtatgttaatatgcaggatcccgagatggatatgaagtctgtcacagaccgtgcagcgaggacattgctgtggacggagctcttccgcgggctgggcatgacattaagttatttattcagggagcctgccactattaactatcctttcgagaagggtccactttcacctaggttcaggggcgaacacgccctgcgccgatatccatcaggggaggagaggtgcattgcttgtaaactgtgtgaggcgatttgtcctgcacaggctatcactatcgaggcagagccccgggccgacggttccagacgaaccacgagatacgatattgacatgaccaagtgcatctattgcgggttctgccaggaagcctgtcccgtcgatgcaatcgtggagggcccaaatttcgagtttagcacagagacgcacgaggaactgctgtacaattag

SEQ ID NO: 196582 - DNA, 195 bp, synthetic construct
  misc_feature 1..195: note = Description of Artificial Sequence: Synthetic coding sequence
  source 1..195: mol_type = other DNA
atgaccaagtgcatctactgcggcttctgccaggaggcctgccccgtggatgctatcgttgagggccctaactttgaattttccaccgaaacccacgaggaactactttataacaaggaaaaattactcaacaacggcgataaatgggaagctgagatagccgccaatatccaggccgactatctgtaccgatag

SEQ ID NO: 196583 - DNA, 1395 bp, synthetic construct
  misc_feature 1..1395: note = Description of Artificial Sequence: Synthetic coding sequence
  source 1..1395: mol_type = other DNA
atgctggccacccggcggctgctgggctggagcctgcccgcccgggtgtccgtgcgcttctctggggatactactgcaccaaaaaagacctcgtttgggagtctgaaagacgaggaccgaatttttacaaatctctacgggaggcatgactggcgtctgaagggttccctcagcaggggtgactggtataaaacaaaagagattctgctgaaaggtcctgattggattttgggcgagattaagacctccggactcagaggcaggggcggagccggtttccccaccggactgaagtggtcttttatgaacaagccttccgatggccggcctaaatatctggtcgttaacgcagacgaaggagagcccggaacttgcaaggaccgggagattctgcggcacgatccccataaactgctggaaggctgcttggtgggtggccgagctatgggagcccgcgccgcgtacatctacataagaggggaattttacaatgaggcgagtaatttacaagtcgcaatcagggaggcctatgaggccggccttataggaaagaatgcctgcggctctggttacgacttcgatgtgttcgtagtgcgtggggccggtgcctacatttgcggcgaggagactgcgctcattgagtctatagaagggaagcagggaaagcctaggttaaagcccccgttccctgccgacgtgggggtcttcggctgtcccactactgtggctaatgtggaaaccgtcgcagtctctccaactatttgccgtcgaggtggcacatggttcgccggatttggccgggagaggaactccggaacaaaactgttcaatatctctggacacgttaaccatccttgtacagtggaagaagagatgagcgtgccccttaaagagctgatcgaaaagcatgcaggtggggtgacaggcggctgggacaaccttctggctgtgattccagggggatccagtacccctttaatacctaagtcagtttgcgaaactgtgctgatggactttgacgccctggtgcaagcacaaacaggcctcggcacagcagccgttattgtcatggataggtctaccgatatcgtcaaggcaattgctaggctgattgaattttataagcacgaaagctgtggccagtgcaccccatgcagggagggggttgattggatgaataaggtaatggcccggttcgtgcggggcgatgctcgacctgccgagatagactcattgtgggaaattagtaagcagatcgaaggacacaccatctgcgccctaggagatggcgcagcctggcccgtgcagggtctgatacgccatttcagacctgagctggaggagagaatgcagagattcgcccaacagcaccaggccagacaggcagccagttag

SEQ ID NO: 196584 - DNA, 1374 bp, synthetic construct
  misc_feature 1..1374: note = Description of Artificial Sequence: Synthetic coding sequence
  source 1..1374: mol_type = other DNA
atgctggccacccggcggctgctgggctggagcctgcccgcccgggtgtcaaccgctcctaaaaaaacctcatttggcagcctcaaagatgaagaccgaatcttcacaaatctctatggtcggcatgactggaggttgaaaggctcgttgagcagaggtgattggtacaaaacgaaagaaatcctgttgaagggcccagactggatccttggcgagattaaaaccagcggactgcgaggacgggggggagccgggtttcccacaggcttgaagtggtcatttatgaataagccttccgacgggagacctaaatacctggtggtaaatgctgacgagggcgaacccgggacctgcaaagatcgggaaattctgcgccacgatccccataagctcttggaaggctgcttagtgggaggccgggccatgggggcgcgcgccgcgtatatctatatccgtggggaattctataacgaggccagcaacctccaagtcgctataagagaggcgtatgaagctggccttatcggcaaaaatgcctgtggcagtggctacgacttcgatgttttcgtcgtgcggggggcgggagcctacatttgcggggaggaaactgccctcattgaaagtatcgagggaaagcaaggaaaacctcggctgaaaccgccctttccagctgatgtgggagtgttcgggtgccccaccactgtggccaatgtcgaaacggtcgctgtatctcccaccatttgccggagaggaggaacgtggtttgctgggtttgggagagagcgaaactctgggacgaaactcttcaatatctctggacacgtgaaccacccctgtacagttgaggaggaaatgagcgttcccctaaaggaactgatagagaagcacgcgggtggcgtgaccggtggctgggataaccttctggccgtcatccctggtggtagtagtacgccactgatcccgaaatctgtgtgcgaaactgtgctgatggacttcgacgctctggttcaagctcagactggccttggcacggctgcagtgattgtcatggatagatccacagatatagttaaggccattgcccggctgatcgaattctacaagcatgaatcatgtggacagtgtaccccatgcagagagggcgtggactggatgaacaaagttatggctcgatttgtgcgaggggatgccaggccagcagagatcgactcactttgggaaatcagcaagcagattgagggacacaccatctgcgctcttggcgatggtgctgcatggcccgtgcagggattaattcgtcatttccgccccgagcttgaggagcgcatgcagcgattcgcccagcagcatcaggcccgacaggcggcaagctag

SEQ ID NO: 196585 - DNA, 1008 bp, synthetic construct
  misc_feature 1..1008: note = Description of Artificial Sequence: Synthetic coding sequence
  source 1..1008: mol_type = other DNA
atgctggccacccggcggctgctgggctggagcctgcccgcccgggtgagcgtgaggttttccggggacaccacagcccctaagaaaacatcctttggttctctgaaagacgaggatcggatttttaccaacctgtacggacggcacgactggcgactcaaaggatcactaagtcgaggggattggtacaagacgaaggagattcttctaaagggtccggattggattctcggagaaatcaagacctccgggctacgaggtcgcggaggtgctgggtttcctaccggcctcaaatggagttttatgaataaaccctcggatggatctcctacaaccgttgctaatgtggagacggtcgctgtgtctcccaccatctgccggcgcggaggcacttggtttgcaggcttcggccgggaacggaattctggcaccaagcttttcaacatctccggccatgtgaaccacccttgcaccgttgaggaggaaatgagcgttcccctaaaggagctcattgagaagcacgctggtggagtcacgggtggttgggacaaccttcttgcagtaattcctgggggttcaagtacacctttaattccaaaaagtgtgtgtgagaccgtcctgatggacttcgacgccctggtccaagcacaaactgggcttggaacagcagccgtgatcgtgatggaccggtccactgatattgtgaaggcaatcgccaggttgattgagttctataagcatgagagctgtgggcagtgcaccccttgtcgcgaaggtgtagactggatgaacaaagtcatggcccgtttcgtgcgcggcgacgcccgaccagccgagatagattccctctgggaaattagtaagcagatagaggggcacaccatatgcgccctgggcgatggtgctgcctggccagtacagggtttaatacgtcatttccgtcccgagctggaagagagaatgcagaggttcgcccagcagcatcaggcaaggcaagccgcatcttag

SEQ ID NO: 196586 - DNA, 1368 bp, synthetic construct
  misc_feature 1..1368: note = Description of Artificial Sequence: Synthetic coding sequence
  source 1..1368: mol_type = other DNA
atgctggccacccggcggctgctgggctggagcctgcccgcccggaccgcccctaaaaagacttcatttggctctctgaaggacgaagatcggatttttaccaacctttacgggcgccatgactggcgtttgaaagggtccctaagtagaggcgactggtacaaaacaaaagaaatcctattgaaagggccagactggatcctgggggagatcaaaacatccggacttcgggggcgtgggggtgcaggatttcctaccgggctcaagtggtctttcatgaataaaccgtctgacggaaggccaaagtatctcgtggtaaacgctgatgaaggcgagccagggacttgcaaggatagggagatccttaggcacgacccccataaactgctggaaggatgtctcgttggaggaagagcgatgggtgcacgagccgcttatatatatattagaggggagttttataatgaggctagtaacctgcaggtggccattagggaagcctatgaggccggtctcatcggtaagaatgcctgcggctctgggtatgacttcgacgtctttgtggtccggggcgcgggcgcctacatctgcggcgaagaaaccgctctgattgaaagtattgagggcaaacagggcaagccgaggcttaagcccccttttcctgcggacgtaggcgtgtttggatgcccgactaccgtggccaatgtcgagacagtggccgtaagtccaactatatgtaggagaggtgggacctggtttgctggctttggacgagaaaggaactccggcaccaagctcttcaatatctcaggccacgtgaatcacccatgtaccgtcgaggaagaaatgtccgtcccacttaaagagctgatcgagaagcacgccgggggggtcacaggcggttgggacaacttgctagcagtgattccaggaggctcttcaacccctctgatccccaaaagtgtgtgtgagacagtattgatggacttcgatgcactggtccaggcacaaacgggtctgggcactgcagccgtaattgttatggaccgctctacggacatcgtaaaggcgattgctaggttgattgaattttacaaacacgagtcatgcggtcaatgtactccatgtcgggagggcgtggactggatgaacaaggtcatggctagattcgtgcgcggagacgcaaggcctgccgagattgactcattatgggagatttctaagcaaatcgagggccataccatttgcgctctgggcgacggagctgcctggccagtgcagggccttatccgccattttcgccctgaactggaagagcggatgcagagatttgcccagcaacaccaggcacgtcaagccgcatcctag

SEQ ID NO: 196587 - DNA, 1092 bp, synthetic construct
  misc_feature 1..1092: note = Description of Artificial Sequence: Synthetic coding sequence
  source 1..1092: mol_type = other DNA
atgaacaagcccagcgacggccggcccaagtacctggtggtgaacgccgacgaaggggaacccggcacatgtaaggatagggaaattttgcgacatgatccacataagttactggaagggtgtctggtgggcggtcgagccatgggagctcgtgcagcgtacatttatattcgcggagagttttataacgaagcaagcaacctgcaggttgcgatacgggaagcctatgaggcaggccttataggaaaaaacgcttgtggttcaggatacgatttcgatgtcttcgttgttcgaggcgcgggggcctatatatgtggtgaagaaacagcactgattgagtctatagaaggaaagcagggcaagccgcggcttaaaccccccttcccagctgacgtcggcgtctttggctgccctactactgtagccaacgtggagacagttgccgtgagcccgacaatttgtcgcagaggcggtacctggttcgctggtttcggtcgtgagaggaattctgggaccaaactatttaatatctctgggcatgttaaccatccatgtaccgtcgaagaggagatgtctgttccactcaaagagctcattgagaaacatgctgggggagtgacagggggctgggataatctcctggccgttatccctggaggtagtagtacacccctcattcccaagtcagtctgtgaaaccgtcctcatggatttcgatgctctcgtgcaggcacaaaccggcctcggaacagctgctgttattgtcatggatcgttcaacagacatagtcaaggcaatcgcgaggctcatcgaattctataagcatgagagctgtggccaatgtactccgtgtcgtgagggggtggattggatgaacaaggtaatggctaggttcgtgcgcggtgacgctagacccgcggaaatcgatagcctctgggaaatctcgaaacagatcgaaggtcatactatctgcgccctgggcgacggagccgcctggcccgtccaagggctaattcgtcacttcagacccgagctcgaagagaggatgcaaagatttgcacagcagcatcaagcacggcaggctgcaagttag

SEQ ID NO: 196588 - DNA, 750 bp, synthetic construct
  misc_feature 1..750: note = Description of Artificial Sequence: Synthetic coding sequence
  source 1..750: mol_type = other DNA
atgttcttcagcgccgccctgcgggcccgggccgccggcctgaccgctcactggggccgacacgtgagaaatctacacaagaccgtcatgcagaacggtgccgggggtgcgctgtttgtccaccgagacacgcccgaaaacaatcccgatacaccttttgacttcacacccgagaactataagcgaatcgaagccattgtgaagaactaccctgaagggcacaaagccgcggcagtgcttcccgtcctggacctggcacagagacagaatgggtggcttccaatctctgcaatgaacaaagtggccgaggtgctgcaggtccctccgatgcgggtgtatgaggtggctactttctacacaatgtacaacagaaagccagttgggaaatatcatattcaggtgtgcaccactactccttgcatgctgcgtaactccgatagcatcctcgaagcgatccagaagaagctgggcatcaaagtgggcgagacgactcctgataagctgtttactctaattgaggtcgagtgccttggcgcttgtgtcaacgccccaatggtgcagatcaatgacaactattatgaggatcttaccgccaaggatattgaagaaattatcgatgagcttaaggccgggaagattcctaagcctggccccaggagcggccgcttcagctgcgagcccgctggtggactgactagcctgacagaacctcctaaaggccccggcttcggcgtgcaggcgggcctgtag

SEQ ID NO: 196589 - DNA, 327 bp, synthetic construct
  misc_feature 1..327: note = Description of Artificial Sequence: Synthetic coding sequence
  source 1..327: mol_type = other DNA
atggccgccccctgcctgctgcggcagggccgggccggcgccctgaaaactatgctgcaagaggcccaggtgttcagggggctggcctctacggtcagcctttcagccgaatccggcaagagcgagaaaggtcagccacagaattcgaagaaacagtcacccccgaaaaagcctgcgcccgtgcccgccgaaccttttgacaatacaacatacaagaatctccaacatcatgactactcgacctatacctttcttgacctcaatctggagctcagcaaatttaggatgcctcagccatcctccgggcgagagtcacctcggcattag

SEQ ID NO: 196590 - DNA, 1422 bp, synthetic construct
  misc_feature 1..1422: note = Description of Artificial Sequence: Synthetic coding sequence
  source 1..1422: mol_type = other DNA
atggccgccccctgcctgctgcggcagggccgggccggcgccctgaagacgatgctgcaggaggcgcaggtatttagaggacttgcgtcgacagtctccctgtcagcagagtctggaaagagcgaaaagggccagccacaaaactcaaaaaagcaaagtcctcctaagaatgttgtggaacccaaggagcggggcaagttgcttgcaactcaaaccgcggccgagctgagtaagaacctgtctagtccatccagctacccgcccgccgtgaacaagggcagaaaggtggccagcccttcacctagcggctccgtcttgttcactgatgagggcgttcccaaatttttgtctagaaagacactggttgagtttcctcagaaagtgctctcccccttcaggaagcaaggcagcgatagcgaagctaggcaggtggggcggaaagtcacttcaccaagctcctcttcctctagttctagctccgatagcgaatcagacgatgaggctgacgtctccgaagttacccctagggtggtttcgaaaggacgcggcggcctccgaaaacccgaggcttcgcactctttcgagaaccgggcccctcgcgtgacggtatctgccaaagagaaaacgctgctgcagaagccgcatgtggatatcaccgatcctgaaaagcctcaccagccaaagaagaaaggatcccctgccaagcccagcgaaggtcgcgaaaatgcccgcccgaagaccactatgcccaggtcccaggtggacgaagagtttctgaagcagagcttaaaggagaagcagctgcaaaaaacttttcggctcaacgaaattgataaagaaagtcaaaagccttttgaggtgaagggtccgctgcccgtccatactaagtctgggctgagcgcccctcccaagggatcgcccgcccccgccgtgctggcagaagaggcacgggccgaggggcagctgcaggccagcccgcccggagctgccgaggggcacctggaaaaaccagttcccgagccccaacgcaaggcagctccccctctgccacgcaaagagacctccggcactcagggaatcgagggtcacctcaaaggtgggcaggctatcgttgaagatcaaatcccgccaagtaatctggaaactgtcccagtggagaacaatcacggcttccacgagaagacagccgctctgaaactcgaagccgagggtgaggcaatggaagatgcggcggctcccggtgatgacaggggaggcacccaggaaccagccccggtacccgccgaaccattcgataatacaacatacaaaaacctgcagcaccacgactactcaacctatacatttctcgatctaaatctcgaactttcaaagtttcgtatgcctcagccgtcctcagggagagaatcacccagacactag

SEQ ID NO: 196591 - DNA, 339 bp, synthetic construct
  misc_feature 1..339: note = Description of Artificial Sequence: Synthetic coding sequence
  source 1..339: mol_type = other DNA
atgctgcaggaggcccaggtgttccggggcctggccagcaccgtgtccctgagcgccgagagcggcaaaagcgagaaaggacagccacagaacagtaaaaaacagagtccaccgaagtccgtgccaactccgcacaggaggtattcaccttgcggcgactggaaagacgcatcgagccttaagccagcgcctgttccagcagaaccattcgacaacactacgtacaagaacctgcagcaccatgattactcgacgtacacattcttggatctaaatctcgaattgagcaagttccgcatgccccagccctcatctggcagagagagcccgagacactag

SEQ ID NO: 196592 - DNA, 2223 bp, synthetic construct
  misc_feature 1..2223: note = Description of Artificial Sequence: Synthetic coding sequence
  source 1..2223: mol_type = other DNA
atggagaagctgggcgtggagcccgaggaggagggcggcggcgacgacgacgaggaagatgccgaggcttgggccatggagctagcagatgttggagccgccgcaagtagccaaggtgtgcacgaccaggtcctgcccaccccaaacgcttctagccgggttatcgtgcatgtggatctggattgcttctacgctcaggtggagatgattagtaatcctgagctaaaggacaagccacttggggtccagcagaagtacttggtcgtcacgtgtaattacgaggcgaggaagctgggcgtaaagaaattgatgaacgtccgcgacgccaaagaaaagtgccctcagttggtactcgttaatggcgaagacctcacaaggtacagagagatgagttacaaagtgactgagttactggaggagttctctcccgtagtggagaggctaggctttgatgaaaatttcgtggacctgactgagatggtagagaagagactacaacaactgcagagtgacgagttaagcgcagtgacagtgagcggtcacgtgtacaacaatcagtccattaatctgctggacgtcctccatatccgtctattggtgggctcccagatagcggctgaaatgagggaggcaatgtacaatcagttgggtttgacaggatgtgccggcgtggcttctaacaaattgttggcaaaattggtgagcggtgtgttcaaacccaatcagcagaccgtgctgctacctgaatcttgtcaacatctgatccattctctgaatcacataaaggaaattccggggatcggatacaaaaccgccaagtgcttggaggccttaggcattaattccgtgcgagatctgcagacctttagccccaagattctagaaaaggagctgggaataagtgtggcccagcgcatacaaaagctgtcttttggggaagacaactcgcccgtcatcttgagcggccccccccagtccttctccgaagaagactctttcaaaaagtgttccagcgaggtcgaggccaagaacaagatcgaggagctgttggcgtccttgctaaatcgtgtatgccaggacggacgtaagccccataccgtgaggttgattatcaggcgctattctagcgagaaacactacggcagggaatcgagacaatgtcctataccctcacatgtgattcagaaacttgggaccgggaactatgacgtcatgactcctatggtggacattctcatgaagctgtttcggaatatggtgaacgtcaaaatgccttttcacctcaccttgctatctgtgtgcttttgcaatttaaaggccctcaatacagcaaagaaaggattgattgactattatcttatgccatcactctccaccacctcccggtcaggcaaacactcttttaagatgaaagacacccacatggaggattttcctaaggacaaggagactaacagagacttcctgccctcaggcagaatcgaatccacacgaacacgcgaatcgccactggataccaccaatttttctaaagagaaggacatcaatgaattcccgctgtgtagcctgcccgaaggagtggatcaggaagtgtttaaacagctgcccgtcgatatacaagaagaaatcctgtccgggaagtcacgagaaaagtttcagggcaagggctcagtgagctgtcctttacacgcaagtcggggcgttctgagcttttttagcaaaaaacagatgcaagacattccgatcaaccccagagatcacctgtcaagctcaaaacaggtgtcaagcgtttcaccttgcgaaccagggacgtccggtttcaacagcagcagcagcagctatatgtctagccaaaaggactattcttattatttggacaatcgcctgaaggacgagagaatttcccagggccccaaggagccacaaggcttccactttacgaattcgaacccagccgtgagtgctttccattcgtttcccaaccttcaaagcgaacagctattttcaaggaatcacactacggactcccacaagcaaacagttgccacggattcccatgagggcctaaccgagaacagagaacccgactctgttgatgagaagataacgttccctagcgatatagatccccaagtcttttacgaactgcccgaggcggtacagaaggaattgctggctgaatggaaacgcgccgggtcagattttcatatcgggcataaatag

SEQ ID NO: 196593 - DNA, 540 bp, synthetic construct
  misc_feature 1..540: note = Description of Artificial Sequence: Synthetic coding sequence
  source 1..540: mol_type = other DNA
atgaacaagcggggcttcagcatggaggtgggccagtacatcttcgttaattgccctagcattagcctgttagagtggcaccccttcactctaacatctgcaccggaggaggattttttctcaattcacataagggccgccggggactggacagagaacttaatccgggcctttgagcagcagtactcccctatccctagaatagaggttgacggcccatttggtactgccagcgaagatgtcttccagtacgaggtcgccgtcctggtcggtgccggcatcggcgtgaccccgttcgcgtctattttgaagtcaatctggtacaagtttcagtgtgctgatcacaacctgaagacaaaaaaaatttacttttactggatatgtcgcgagactggagcctttagttggtttaataatctcctgacaagcctggagcaggaaatggaggaactgggaaaatccttgcggaagtgttgccatcgctattcaagcttggaccccagaaaagtgcagttctacttcaataaagaaaatttctag

SEQ ID NO: 196594 - DNA, 1584 bp, synthetic construct
  misc_feature 1..1584: note = Description of Artificial Sequence: Synthetic coding sequence
  source 1..1584: mol_type = other DNA
atgggcaactgggtggtgaaccactggttcagcgtgctgttcctggtggtctggttagggctgaatgtgttcctgttcgtggacgccttcttgaagtatgagaaggccgataaatactactacacccgcaaaatcctggggttttgctctcggactttacggaaacagctagatcacaatctgacgtttcacaagctggtagcctacatgatctgcctgcatactgctatccacatcattgcacacctgttcaacttcgactgctactctcgttcccgccaggccacagacgggagcttggcgtccatcctgtccagcctgagtcacgacgagaaaaagggcggctcttggttgaatcccattcagagccgcaatactacagtagagtatgttaccttcacttctatcgccggcctcaccggtgtcattatgacgattgcactaatcctgatggtgactagcgctactgagttcattagacggtcctactttgaggtgttttggtacacccaccacttattcatcttttacatcttgggtcttggcatccacggcatcgggggaatagtccgggggcagactgaggagagcatgaatgaatcccaccctcgtaagtgcgctgaatcatttgagatgtgggacgatcgcgatagtcactgccgccgcccaaagtttgaaggccaccctccggagtcatggaaatggatcctggcgcccgtgatcttatacatctgcgagcgcattctcagattctatcgcagtcaacaaaaagtggtcatcacaaaggtagtgatgcatccatcaaaagtactggaactgcagatgaacaagcgggggttttctatggaagttggtcaatacatctttgtaaactgtcccagtatctcactgctggaatggcatcctttcacactgacctctgcgcccgaagaagatttttttagcattcatatacgagccgctggcgactggacagaaaatctgattcgggcctttgagcagcagtatagccccattcctaggatcgaagttgacggacccttcggaactgcctcagaggatgtatttcagtacgaagtcgccgtcctagtcggagcaggaattggagtgacaccgttcgcttctattctcaaatcaatttggtataaatttcagtgcgcagatcacaacctgaaaacaaaaaaaatttacttttactggatctgcagggagacaggcgcattcagctggttcaataatttacttaccagtctggaacaggaaatggaagagctgggaaaggtgggcttcttgaactaccggctgttcttaaccggatgggattccaatatcgtggggcatgcagcacttaattttgataaagctacggacattgtcacagggttgaagcagaaaacctcatttggacgaccaatgtgggacaacgaattctctacaatcgcaacatctcaccccaagtccgtggtcggggtgttcctttgcgggcctcgcactctagcaaaaagcctgcggaagtgttgtcacagatacagctctctggatccaaggaaggtccaattttatttcaacaaagaaaacttctag

SEQ ID NO: 196595 - DNA, 579 bp, synthetic construct
  misc_feature 1..579: note = Description of Artificial Sequence: Synthetic coding sequence
  source 1..579: mol_type = other DNA
atgggcaactgggtggtgaaccactggttcagcgtgctgttcctggtggtatggcttggcctgaatgtgtttctgttcgtcgatgcctttctgaagtacgagaaagctgacaagtactattacacacgtaagatcctgggtagtaccctggcctgcgcccgggcatccgccctttgcctaaacttcaacagcactctcatattgctgcccgtgtgccggaacctcctgagtttcctgcgaggtacttgctccttttgtagccgcactcttaggaagcagcttgaccacaatctgacgttccacaaactggtggcatacatgatctgccttcacaccgccattcacattatcgctcacctgttcaattttgattgctattcgcgcagtcgccaggccacagacggaagcttggccagcattctgtcatccctctctcacgatgagaagaaaggcggctcatggctgaatccaattcatccccacattacccctaccgtttacatgtttacagtcacattcgatatggtcctgtcctccgttaattcaaatttgttcctctttcttctgatcaaaaagtag

SEQ ID NO: 196596 - DNA, 579 bp, synthetic construct
  misc_feature 1..579: note = Description of Artificial Sequence: Synthetic coding sequence
  source 1..579: mol_type = other DNA
atgggcaactgggtggtgaaccactggttcagcgtgctgttcctggtggtgtggctagggctgaatgtgttcctgttcgttgatgccttcctgaagtacgagaaggctgataaatattattatacgcgaaaaatcttggggagcacactcgcctgtgccagagcgtcggcactgtgcctcaacttcaactctacactcatccttctgccagtgtgccgtaacctgctgagtttcctgagagggacttgttcattctgctcgcggacgctccggaagcagctcgatcacaatttgacgttccataagcttgtcgcatacatgatttgcttgcataccgctatccatataatcgctcatctattcaatttcgactgttactctcggagtcgacaagcaacggacggcagtctagcctccattctttcctccctgtcacatgatgaaaaaaagggaggtagctggctgaaccccattcaccctcacattacccctacagtttacatgttcacggttacattcgatatggtgctttcaagtgtaaattccaaccttttcctgtttcttctgatcaaaaaatag

SEQ ID NO: 196597 - DNA, 1695 bp, synthetic construct
  misc_feature 1..1695: note = Description of Artificial Sequence: Synthetic coding sequence
  source 1..1695: mol_type = other DNA
atgggcaactgggtggtgaaccactggttcagcgtgctgttcctggtcgtgtggcttgggctcaatgtttttctctttgtggatgcattcttgaagtacgagaaggccgacaaatattactacaccaggaaaattctcgggtccacacttgcttgcgctcgcgcttccgctttgtgcctgaactttaattcaacactgatcttgctgcctgtctgccgaaacctgctgagcttcttgcggggaacgtgctccttttgttcaagaactttgcgaaaacaactggaccacaatctaacattccataagctcgtggcatacatgatttgtctgcacaccgcgatccacattatagctcacctgtttaactttgactgctattctagatctcggcaggccaccgacggatccctcgcttccatcctgtcaagcctgagtcacgatgaaaagaaaggggggagttggttgaatcccatccagagtaggaacactacagtggagtatgttacttttacatctatcgccggtctaactggcgttataatgactattgctctgatccttatggttacttctgccacagagttcataagaagaagttatttcgaggtgttttggtacacacaccatctctttattttttacattctcggcctgggcatacacggaattggtggaatcgtgcgcggccagaccgaggaatcaatgaacgaaagccatcctcggaaatgcgccgagtcattcgagatgtgggacgaccgggactcccactgcaggcggccaaagtttgagggacaccctcccgagagctggaagtggatactggccccagtcatcctgtatatatgcgagaggatcctgcggttctacagaagccagcaaaaagtcgtgatcaccaaagtcgtaatgcacccttctaaggtcctggaacttcaaatgaacaagagaggattctcaatggaggttggacagtacatttttgtaaactgcccaagtatttcactgcttgagtggcaccccttcactctgacatccgctccggaagaggatttctttagcatccacatccgcgctgctggcgactggacagagaacctgatccgcgcctttgaacagcagtattcaccaatccctcgtattgaagtggatggccccttcggtacggccagtgaggatgtgtttcagtacgaggttgctgtgctggtcggggctgggattggcgtcacccccttcgcaagcatactgaaatctatttggtataaatttcagtgcgctgatcacaacctcaagactaaaaagatatatttttactggatctgccgagagacaggggcattctcctggttcaataacctgctgaccagcctcgagcaggagatggaggaactcggaaaagtggggtttctgaactaccgcctgttcctcacaggctgggacagtaacatcgtgggtcatgcggcattaaacttcgataaggcgactgacattgtgaccgggcttaaacagaagacaagcttcggaagacccatgtgggacaatgaattttctacaatcgctacctcccaccccaagagtgttgtaggcgtcttcttatgtggtcccaggactcttgcaaaaagcctgcggaagtgttgccatcgttacagttcactggatccacgtaaggtgcagttctacttcaacaaggagaatttttag

SEQ ID NO: 196598 - DNA, 528 bp, synthetic construct
  misc_feature 1..528: note = Description of Artificial Sequence: Synthetic coding sequence
  source 1..528: mol_type = other DNA
tgattcagcatggaggtgggccagtacatcttcgtgaactgcccctccatttctctcctggaatggcatccctttactttgacctccgctcctgaagaggactttttcagcatacacattcgcgccgcaggcgactggacagagaatttaatcagagcctttgaacagcaatacagtcctattcctagaattgaagtggatgggccttttggtactgcctctgaagatgtgttccagtatgaagtcgccgtcctggttggggccggtatcggcgtgacccccttcgcatcgatcctgaagagcatctggtacaaattccagtgcgccgatcacaatctgaaaacaaaaaaaatctacttttattggatatgtcgtgagaccggggcctttagttggttcaataatcttttgaccagcctggaacaggaaatggaagaactaggcaaatccctgaggaagtgttgtcataggtattcatcgctggacccaaggaaggtgcagttctacttcaataaagagaatttttag

SEQ ID NO: 196599 - DNA, 1707 bp, synthetic construct
  misc_feature 1..1707: note = Description of Artificial Sequence: Synthetic coding sequence
  source 1..1707: mol_type = other DNA
atgatgggctgctggatcctgaacgagggcctgagcaccatcctggtgctctcttggttaggtatcaacttttacctcttcatcgataccttctattggtatgaggaggaagaaagcttccattacacacgcgtcatactaggcagtactctcgcctgggcccgcgcctcggctctctgtctgaattttaattgtatgctaatactgatacccgttagccggaatcttatttcttttatcaggggtacctccatatgttgtcgagggccgtggaggcgccagctcgacaaaaatcttaggttccataaattggtcgcatatggaatcgcggtgaacgcgaccatccacatcgttgctcatttctttaacttagaacggtaccattggtctcagagtgaggaagcgcagggactcttggcagccttaagtaagctgggtaacacaccaaacgagtcatatctgaatccagtacgtacattcccaacaaacactacaaccgaactcctcaggacaattgcgggcgtgacaggactggtgatttctcttgcactggtgttaataatgacctcctccacggagttcatcagacaagcctcctacgagctgttttggtatacacatcacgtgtttatcgtcttctttctcagtctcgcaatccacggaaccgggcgcatcgtgcggggacagacacaagactcactcagtctgcacaatatcactttttgtcgggaccgctacgccgagtggcaaaccgttgcgcagtgcccagtcccacaattttctgggaaggagcccagtgcttggaagtggatcctggggcccgtcgtactatacgcatgcgagcggataatcaggttctggcggttccagcaggaagtagtgatcacaaaagttgtgtctcacccgagtggtgtgttggaacttcacatgaagaaacgggggttcaaaatggcccccggccaatatattctggttcagtgtccggccatatcctcactggaatggcaccccttcacacttacctcagcaccgcaggaggactttttttccgtccacattcgggctgctggtgattggacggccgctctgcttgaggcttttggcgcagaggggcaagctctccaggagccatggtcccttccgcggctggccgttgacgggccattcgggactgccctcactgacgtgtttcactaccctgtctgcgtttgcgtcgcagccggaattggggtaacccctttcgctgctctgcttaagagtatctggtataagtgctctgaagcccaaacgcccttgaagctgtctaaagtatacttttactggatttgcagagatgccagggcctttgagtggtttgctgatctgttactgtcattagagactagaatgtctgaacaggggaaaactcacttcctttcataccatatctttctgaccggttgggatgagaaccaggctctgcatattgctttgcattgggatgagaacacagacgtgataaccggcttgaaacaaaaaaccttctatgggcgacccaattggaacaatgagtttaaacagattgcctataaccatccctcaagttctataggagtgttcttctgcgggcccaaggctctttctcgcacattacagaagatgtgccatctgtatagctctgctgatccaagaggggtgcatttctattataacaaagagtctttttag

SEQ ID NO: 196600 - DNA, 1737 bp, synthetic construct
  misc_feature 1..1737: note = Description of Artificial Sequence: Synthetic coding sequence
  source 1..1737: mol_type = other DNA
atggccgtgagctggcggagctggctggccaacgagggcgtgaagcacctgtgcttgtttatttggcttagcatgaacgtgttgctgttctggaagacttttcttctctataatcaaggacctgagtaccactacctgcatcagatgctcggactgggtctctgtctctcgcgcgcttctgctagcgtcctcaatctcaactgttctcttatcctgctgcctatgtgcaggacacttttggcctatcttcgtgggtcacagaaagttcctagtcggcgaacccggcggcttctggacaaatccagaaccttccacatcacttgtggcgtgaccatctgtattttctccggcgtgcacgtggcagcacatcttgtcaatgcactcaatttctctgtcaactacagcgaagactttgtcgagctgaacgctgcccggtatagggatgaggacccacgcaaactgctattcacaacagtgcctgggttgactggagtatgcatggtggtggtgctcttcctgatgatcactgccagcacatatgccatcagggtgagcaactacgacattttttggtacacccacaacctgttcttcgtgttttatatgctactgacccttcatgtcagcggggggctgttaaagtaccaaacaaacttggatacccatccacccggctgtatctccttaaatcgcacttccagccagaacattagcctgcccgagtatttttcagagcactttcacgaaccttttccggagggcttttcaaaacctgcagagtttactcagcacaaattcgtgaaaatctgtatggaggaaccgcggttccaggccaactttccacaaacttggttatggatatccggacctttatgtctctattgtgccgagagattatatagatatattcgcagcaataaacctgtgacaatcattagcgtgatgagtcacccttctgatgtgatggagatccgtatggtgaaggaaaactttaaggcaaggcccgggcagtatatcacccttcactgcccctccgtttctgccctggaaaaccacccattcaccctgaccatgtgccctacagaaactaaggctacttttggagtccacctgaaaatcgtgggggattggactgaaaggttcagggacctgctgctgccacctagcagccaagattccgaaatcttgcccttcatccagtcaaggaactaccccaaactttacatcgacggaccattcggaagcccttttgaagagtctttgaattacgaagtctccctgtgtgtggccggcggtatcggagtgactcctttcgcatccattttgaatacgctattggatgattggaaaccatacaagctgaggaggttatatttcatctgggtttgccgagatattcaatcttttcggtggttcgctgacctcctgtgcatgctgcataataaattttggcaggaaaatcgtcccgactatgtgaacatccagttatacctatcacagactgatggcattcagaaaattattggcgaaaagtaccatgcgctgaacagcagactgtttatcgggagacctcgctggaagctgctgtttgatgaaatcgcaaaatataatcgaggaaagactgtgggggtgttttgttgcggccccaactccctgtctaagacacttcacaaactctcgaatcagaataattcctacggcacccggttcgagtataataaagagagtttttcctag

SEQ ID NO: 196601 - DNA, 1665 bp, synthetic construct
  misc_feature 1..1665: note = Description of Artificial Sequence: Synthetic coding sequence
  source 1..1665: mol_type = other DNA
atgaacgtgctgctgttctggaagaccttcctgctgtacaaccaggggccagaataccactatctgcaccagatgttggggctggggctctgtctttccagagcctcagccagcgtcctgaatcttaactgctccctgatcctgctccctatgtgtaggactctgctggcttacctgaggggttcccagaaagtgcccagcagaaggacacgcaggttgctggataagagccggacattccacatcacgtgtggagtgactatctgcatcttttcaggcgtgcatgtagctgcacaccttgtgaatgcactaaatttcagcgtgaactattctgaagattttgttgagctgaacgcagctcgctatagagacgaggaccctcggaagcttctgttcacaacagtaccaggtctgactggcgtatgcatggttgtggtcttgttcctgatgatcaccgcatccacctacgctattagagtttccaactacgatatcttttggtatacccataacctgtttttcgtcttttatatgctgctcacgttacacgtaagtggcgggcttcttaagtaccagacaaacttggacactcaccctcctggttgtattagcctgaaccggacaagtagccaaaatatttcgctacccgagtatttctccgagcacttccatgagccgtttccagaagggtttagtaagcctgccgaattcacacagcacaaatttgtgaagatttgcatggaggagcctcgtttccaggcaaatttcccacaaacatggctttggatctcaggaccgttgtgcttatattgcgctgaaagactttaccgatatattcgatcaaacaagccagtaacgattatttcagtcatgagccaccctagcgacgtgatggaaattcgtatggtgaaagagaatttcaaagccagaccaggtcagtacataacactgcactgtccttcagtgtctgccctagagaatcaccctttcaccctgacgatgtgccctactgaaaccaaagcaacattcggcgtacatctcaagattgtgggagactggacagagcggtttagggatctcctgctacccccctccagccaggacagcgagatcttgccttttatccaaagcagaaactacccgaagctttatatcgacggaccgttcggtagtccattcgaggagtctttgaactatgaagtgagtctgtgtgtggccggcggaataggagtgacccccttcgcttcaattttgaacacgttacttgacgattggaagccatacaaactgcggaggctgtatttcatttgggtgtgcagggatatacagtcctttaggtggtttgcagatctcctgtgcatgctccacaacaagttttggcaggagaacaggccagactatgtaaacatccagctttacctcagccaaaccgatggcattcagaagatcattggtgagaagtatcatgcgctgaattctagacttttcattggaaggccgagatggaagctgctatttgatgaaatcgccaagtataaccgcggcaaaacagtgggcgttttttgctgtgggcctaattcactatctaagaccctgcataagctcagcaaccagaataacagctatgggacccgctttgagtacaacaaagaatccttttcctag

SEQ ID NO: 196602 - DNA, 816 bp, synthetic construct
  misc_feature 1..816: note = Description of Artificial Sequence: Synthetic coding sequence
  source 1..816: mol_type = other DNA
atggccgtgagctggcggagctggctggccaacgagggcgtgaagcacctgtgccttttcatttggctctcgatgaacgtcctgctgttctggaagacatttttgctctacaaccagggacccgaataccactatctgcatcaaatgcttggatgcccaaccgaaaccaaagcaacctttggcgtgcatcttaaaattgtgggagactggaccgagcgcttccgcgatctgttactgccacccagcagtcaggatagcgagatcctccctttcatacagtcaagaaattatcccaagttatacatcgatggcccattcggttcgccttttgaggaaagtctcaattatgaggtctctttatgcgtggctggcggaataggggtcacaccattcgcctccatcctgaacacactcctcgacgactggaaaccttataagttacggaggctgtactttatctgggtgtgcagagacattcagtcttttcggtggttcgccgacctgctgtgtatgcttcacaacaagttttggcaagagaatcgacccgactacgtgaacatccagctttatctctcccagaccgatggcatccagaaaataataggggaaaaatatcatgcgctgaattctaggctgtttatcggacggcccagatggaaactactgtttgacgaaatcgcgaagtacaatcgcggaaagaccgtgggcgtgttttgctgcggcccaaacagccttagtaaaaccctccataagttatctaatcagaacaatagctatggcactagatttgagtacaataaggagagcttctcctag

SEQ ID NO: 196603 - DNA, 165 bp, synthetic construct
  misc_feature 1..165: note = Description of Artificial Sequence: Synthetic coding sequence
  source 1..165: mol_type = other DNA
atggccgtgagctggcggagctggctggccaacgagggcgtgaagcatctgtgtctgtttatctggctctccatgaatgttttactcttttggaagacttttttactgtacaaccaaggcccggaatatcattacctccatcaaatgctgggcgagctgagctag

SEQ ID NO: 196604 - DNA, 1800 bp, synthetic construct
  misc_feature 1..1800: note = Description of Artificial Sequence: Synthetic coding sequence
  source 1..1800: mol_type = other DNA
atgggcgagatgtggcggaagcgggaggaggtgatcttccgggagtacagcttttcgttttaccctctgaacatctttgctcccttcgtgctgttcccggattacttttgcctcttggggtttatttggctatcaatgaacgtgctcctcttctggaagacattcctactgtataaccagggtccagaataccactatcttcaccagatgctgggactgggtctgtgcctgagcagagcctccgcaagcgtgctgaacttgaattgctccctcattttgctgcccatgtgccgcacgttacttgcatatctgcgaggctctcagaaggttcctagtcgtaggaccagacgtttactcgacaagtcccggacttttcacatcacctgtggagttactatttgcattttctcaggcgttcacgtagccgctcatttggtgaatgccctgaacttttcagtgaattattctgaggatttcgtggaacttaacgccgctcgctatagggacgaggatcctcgtaaactgttattcaccacagttcctggtttgacaggagtatgtatggtagtcgtgctgttcctcatgataactgctagtacctatgccatacgtgtttccaactacgacatcttttggtatacccacaatctttttttcgtcttctacatgctcctgaccttacacgtgtcaggcggactgctcaagtatcagaccaatctggacacacaccctcctggttgtatatctctcaatcgcacaagttctcagaacatctctctgcctgaatacttcagtgagcacttccacgagccattccccgagggcttttctaaaccggcagaattcacacagcacaaatttgtcaagatttgcatggaggagccaaggttccaggccaacttcccacagacttggctgtggatttccggtcccctgtgcctttattgcgctgaacgcctgtatcgatacattcgctccaataagcccgtcactataatatctgtcatgagccacccatcagacgtcatggagataagaatggtgaaggaaaacttcaaagccagacccggacagtatataactctccactgcccatctgtcagcgctctggagaaccacccattcaccctaacaatgtgcccaaccgaaacaaaagcaaccttcggggttcacctaaaaatagtgggggactggacggagcggtttagagacctcctcctgcccccatcctcccaggactctgaaattctgcccttcattcagtccagaaattacccaaagttgtacatcgacggacctttcgggtccccattcgaggaatccctaaactatgaagtttccctgtgtgtcgcaggcggaattggagtaaccccctttgcgagtatccttaacaccctactggacgactggaaaccatacaaactccgacgactctacttcatttgggtgtgccgcgacattcagagcttccgctggttcgctgacctcctgtgcatgttacacaacaagttctggcaagaaaatcgcccagattacgtgaatatccagctgtacttgagccaaacagatggcatacaaaagataattggagagaaatatcatgcactgaattctaggctcttcataggccgccccagatggaagctcttgtttgacgagatagccaagtacaatagggggaagacggtcggcgtgttttgttgcgggccaaacagcctgtctaagaccctccacaaactctctaatcagaacaacagctatggtactcgattcgaatacaataaggagtcttttagctag

SEQ ID NO: 196605 - DNA, 1665 bp, synthetic construct
  misc_feature 1..1665: note = Description of Artificial Sequence: Synthetic coding sequence
  source 1..1665: mol_type = other DNA
atgaacgtgctgctgttctggaagaccttcctgctgtacaaccagggccccgaatatcactacttacatcagatgttgggacttggcctctgcttgtcacgcgcttcagctagcgttctcaatttgaattgctcactaatcttacttccaatgtgtcgcaccctacttgcctacttgcgcgggtctcaaaaggtgcccagccggagaacacgccgactcctagacaagtcgaggacattccatattacttgcggcgtgaccatctgcatctttagtggagtgcacgtggctgcccatctggtgaacgcccttaacttctctgttaattattctgaagatttcgtcgaactaaatgccgcccgctaccgcgatgaggacccccgaaagctactatttacaactgtccccggactgactggagtctgcatggtcgtggtgctgttccttatgattacagctagcacctatgctatccgagttagcaattacgacatattctggtacacccataatttgttctttgtgttctatatgctgttaaccctgcacgtcagtggcggattactcaaataccaaactaacctggacacccatcctcctgggtgtatctctctgaacagaacgtcttcccagaacattagtctgccggagtatttcagcgagcacttccacgagccatttccagagggtttctcaaagccagccgaattcacacagcataaatttgtgaaaatttgtatggaagaaccaagattccaggcaaactttccacagacttggctttggatttccggtcccttgtgtttgtattgtgccgagaggttgtaccgctatattcgatccaataaaccagtgaccatcattagtgtaatgtctcatccttctgatgtgatggaaattcgcatggtcaaggaaaattttaaggctcgccctgggcaatacataacccttcattgtccctccgtatccgccttagagaatcacccttttacactgaccatgtgcccaaccgagacaaaagccacttttggggtacacctgaagattgttggggattggacggagcgtttcagggatctgttgctgcccccctcatcccaggactctgaaatactgcctttcatccagagccggaattacccaaagctttatatagacggcccctttggttcgccatttgaggagtctctgaattacgaagtgagcctgtgcgtggccggcgggatcggcgttaccccctttgccagcatcttaaacacactgctcgatgactggaaaccgtataaactccgtaggttatacttcatctgggtatgcagagacatccagtcattccggtggtttgccgatctcctgtgcatgctgcataataagttctggcaggagaatcgcccagattacgttaatatccagctgtacctgtcgcaaacagatggcattcaaaagattattggggagaagtatcacgcactgaactctagactgtttatcgggcgccctaggtggaagttgttgttcgatgagatcgcaaagtacaatcgcggtaagactgttggcgttttctgttgcggtccaaacagtctgtcaaagacattacataagctgtctaatcagaataattcttatggtacaagatttgagtacaataaagaatcctttagctag

SEQ ID NO: 196606 - DNA, 1665 bp, synthetic construct
  misc_feature 1..1665: note = Description of Artificial Sequence: Synthetic coding sequence
  source 1..1665: mol_type = other DNA
atgaacgtgctgctgttctggaagaccttcctgctgtacaaccaggggccggagtaccactatctgcaccaaatgctgggcctcgggctgtgcctttccagagcttccgcgtcagtactaaatttgaactgtagcctcatattgctgcccatgtgtcgcactttgctggcttacttgcgggggtctcagaaggtgccgagcagacgtacccgccggctgttggacaaaagccgaacgttccatattacatgcggagtcacaatttgcatcttttctggggtgcacgttgcagcacacttagtcaacgccctcaatttttctgtgaactattccgaggacttcgtcgagctgaatgctgcgagatacagagacgaggacccgagaaaacttttgtttacaaccgtacccggcctcacaggggtgtgtatggtcgtcgtcctgttcctaatgatcacagcatccacttatgctatcagggtttccaattatgatatattttggtacacacataatctgttcttcgtgttttatatgctactgacgctccacgtcagcggggggcttctcaaataccagacaaatttagacacgcatccacctggatgcatatctctcaacaggaccagcagccagaatattagcctgcctgagtactttagtgagcattttcatgagccttttcctgagggcttttctaagcccgctgagtttacccagcataagtttgtcaaaatatgcatggaggaacctcgatttcaggccaactttccccagacttggctttggatctcaggccccctttgtctctattgcgctgagaggctttataggtacattcggagtaataaacccgtgactataatcagcgtcatgtctcatccatccgatgttatggaaatccgaatggttaaggagaattttaaagctaggccaggacagtatatcacacttcattgtccaagcgtttctgccctagagaaccacccttttacgctcacaatgtgccccaccgagactaaggctacctttggcgtgcatctgaaaattgtgggagactggacagagcggttccgcgacctcttgctgccaccatcaagccaggattctgaaatcctaccttttatccaatcccggaactaccctaagttgtacattgatggcccctttggttctcccttcgaggaatcgctgaactacgaggttagcctgtgcgtggccggcggcatcggggtcactccatttgcatcaatcctaaataccctgctagatgattggaagccgtacaagcttcgaaggctctatttcatttgggtgtgccgagatatccaatcttttagatggttcgccgatctgctgtgtatgctgcacaataagttttggcaggaaaatcgcccagactatgtaaatatccagctctacttatcacaaactgacggaatccaaaaaatcattggcgagaagtatcacgcgctgaatagccgcttatttatcggccggcctaggtggaaactgctattcgacgaaatagctaagtataatagaggtaagaccgtcggggtgttttgttgcggccctaatagcttgagcaaaaccttgcacaaactgtctaaccaaaacaacagttacggtacccggttcgaatacaataaggaaagtttcagttag

SEQ ID NO: 196607 - DNA, 696 bp, synthetic construct
  misc_feature 1..696: note = Description of Artificial Sequence: Synthetic coding sequence
  source 1..696: mol_type = other DNA
atggccgtgagctggcggagctggctggccaacgagggcgtgaagcatctctgccttttcatctggctgtccatgaatgtgttattattctggaagaccttcctcctgtacaatcagggtccagagtaccactatctccatcagatgcttggctgtcctacggaaacaaaagcaacttttggcgtgcatctcaagatcgtaggggactggacagaacgattccgcgatttgctcttaccaccatctagtcaggacagcgaaattctcccatttattcagtccaggaattaccccaaggatgactggaaaccgtacaaactgaggcgactttacttcatttgggtgtgcagagacatccagtccttccgatggttcgcagacctcttatgtatgctgcataacaaattctggcaggagaaccgccctgactatgtgaacattcagctgtacctgagtcagaccgatggaattcagaagattataggcgaaaaataccatgcgctgaacagtagactgtttatcgggcggccccgatggaaactgctgtttgacgagattgcgaaatacaacaggggcaagacagtgggagtgttttgttgcgggcccaactccctgtccaaaacattgcataaattgagcaatcagaataactcttacggaacacgtttcgaatataacaaagagtccttttcttag

SEQ ID NO: 196608 - DNA, 1617 bp, synthetic construct
  misc_feature 1..1617: note = Description of Artificial Sequence: Synthetic coding sequence
  source 1..1617: mol_type = other DNA
atggccgtgagctggcggagctggctggccaacgagggcgtgaagcatctgtgtctgttcatttggctttcaatgaacgtcctcctgttctggaaaacatttctgttgtataatcaaggcccggagtaccattatctacaccaaatgcttggcttgggcctttgtctgtcaagagcctctgcatcggtactgaaccttaattgctctcttatcctgctccctatgtgcagaaccctgctagcttacctacggggctctcagaaggtacccagtagacgaacacggcgcctattggacaagagtcgtaccttccacatcacttgcggcgtgactatctgtattttttccggtgtgcacgtggcggcccacttggtgaatgcccttaatttctccgtaaattattcggaagatttcgtagaattaaatgctgccagatacagggatgaagatcctcggaaactgttgttcaccaccgtgcccggactgaccggcgtgtgcatggtcgtggtgctgttcctcatgatcacagcttcaacatatgcaattcgtgtgagcaattacgacatcttctggtacacgcacaacctgttctttgttttttacatgctgttgaccttgcacgtcagcgggggcctcctcaagtatcagactaacctggatacccacccgccgggatgtattagcctcaaccgcacctctagccaaaatatctctctccccgagtatttctcagagcactttcatgagccatttccagagggatttagcaagcccgcagaattcacgcagcataaattcgtgaagatctgtatggaagaacccagatttcaggccaacttcccacagacttggctgtggatatccgggccattgtgcctgtattgcgctgagaggctctacagatatatccggagcaataagccagtgactattatcagcgtgatgagtcacccttccgacgtaatggagataagaatggttaaagagaacttcaaggcccgtcccggtcagtatattaccttacattgccctagtgtgtcagcccttgaaaaccatccattcactttaactatgtgccctacagagaccaaggccacttttggcgtgcacctgaagattgtgggtgattggaccgagaggtttcgagacctgctcctgcctcccagctctcaagacagtgaaatcctaccattcatccagagtcggaattacccaaaagacgattggaaaccttacaaattgcgccgactgtatttcatttgggtgtgtagagacatccagtctttcagatggttcgcagacctgctctgcatgctccataacaaattctggcaggaaaataggcccgactacgtgaacattcagctttacctgtctcagaccgatggcatccagaagataatcggggagaaatatcatgctctgaatagtagactgttcatagggcggcccagatggaagttgctttttgacgagatagcaaagtacaataggggtaagacggttggtgtcttctgttgcggccccaattccctttctaagacactacacaagctgagtaatcagaataattcctatggcacgcggttcgagtacaataaggaaagcttctcttag

SEQ ID NO: 196609 - DNA, 1665 bp, synthetic construct
  misc_feature 1..1665: note = Description of Artificial Sequence: Synthetic coding sequence
  source 1..1665: mol_type = other DNA
atgaacgtgctgctgttctggaagaccttcctgctgtacaaccagggacctgagtaccactacctccatcaaatgttaggcctcggactctgcctctcccgtgcttctgcctcagtgctgaatctgaattgttctcttattctgctgccaatgtgtcgtaccctgctggcatatttgcgggggtcacagaaggtgccatctcgtcggacccgacggttactagataaatctaggactttccatattacttgtggggttaccatttgcatcttttctggggttcacgtcgccgctcacttagtcaacgctctcaatttctcagtgaattactcagaggattttgttgaactaaacgcggctcggtaccgggacgaagaccccaggaagctgcttttcaccacagtcccaggattaacaggcgtctgtatggtcgtggtgctgtttctgatgattaccgctagcacgtatgctattagagttagtaactacgatatattctggtatactcataacttattcttcgtgttctacatgctgttaacactgcacgtcagcggcggtttgctaaagtaccagaccaacctggatacacacccacctggatgtatttcgctgaatagaacgtcatcacagaatatctcacttcctgagtatttctcggagcactttcacgagcctttccctgaggggttctccaaacctgccgagtttacccaacataagtttgtgaaaatttgcatggaagagccgagattccaggcaaatttcccccagacctggctttggatttctggccccctgtgtctgtattgcgccgagagactttacaggtatattcggtcaaataaacctgtaactataatttctgtcatgtcccacccctcagatgtaatggagatccggatggtcaaggagaatttcaaggcgagacccggtcaatatatcacactgcattgtcccagcgtaagtgcactggagaaccacccattcactttgacaatgtgcccgacagaaaccaaagccacttttggtgtacatctcaaaatagtgggagattggacagaacgctttcgcgatcttttgctgcctccttcttctcaagacagtgagatcttaccattcatccagtccaggaactaccctaaactttatatagacggccctttcggaagtccattcgaagagagcctgaactatgaggtgtcactttgcgtagccggtggaattggcgtaacaccttttgcgagtatcctcaacacgttactcgacgactggaagccctacaaactccgccgattgtacttcatctgggtatgtcgagatatacagtcttttcgatggttcgccgatctgctgtgcatgttgcataataagttttggcaggagaatcgcccagactacgtgaacatacagctctatctgagccagacagacggaatccagaagattattggggaaaaataccacgcgctaaacagtcgattgtttatcggccgaccgcggtggaagttgctgtttgatgaaatagccaagtacaaccgcgggaaaacagttggggttttttgttgtggacccaatagcttgtctaaaacactccacaagctgtccaaccaaaataacagctatggcacaaggttcgagtacaacaaggaatctttttcttag

SEQ ID NO: 196610 - DNA, 1665 bp, synthetic construct
  misc_feature 1..1665: note = Description of Artificial Sequence: Synthetic coding sequence
  source 1..1665: mol_type = other DNA
atgaacgtgctgctgttctggaagaccttcctgctgtacaaccagggacctgaatatcactacctgcatcaaatgctcggtttgggcctgtgtctctcacgggctagtgcatctgtgctaaatctgaattgcagcctgattctgcttcccatgtgtcgcaccttactggcgtacctgcgtggctcccaaaaggtgccgtccaggcggaccaggcgcctcttggacaagtccaggacctttcatatcacatgtggcgttactatttgcatcttctctggagtgcacgttgcagctcaccttgtgaatgcgctgaacttttccgttaactattctgaggactttgtggaactgaatgctgccagatacagggatgaggaccctaggaaactgctattcacaaccgtccccgggctaacaggggtatgcatggtggtagtcctgtttctgatgattacggcatcgacttacgccatcagagtatctaattatgatattttttggtatacccataatctgttcttcgtgttttacatgctcttaactctgcacgttagtggggggttgttgaagtaccagaccaatttagacactcacccacccggatgcatttctctgaaccgcaccagcagtcagaacatttccctgcccgagtacttcagcgaacattttcatgagcctttccccgaaggcttctcaaagcctgcggaatttacacaacataaatttgttaaaatatgcatggaagagcctcgtttccaggccaatttcccacagacctggctgtggatcagtggccctctctgcctttactgcgccgagcggttgtataggtatatacggtctaataaacccgtgaccattataagtgtcatgagtcacccctcagatgtcatggagatccggatggtgaaagagaactttaaggctcggccaggccagtacatcaccctgcactgtccgtcagtaagcgctttagaaaaccacccattcacgcttacaatgtgcccaactgaaacgaaggctacatttggtgtgcacctgaagattgtgggcgactggactgaacgctttagagacttgctcctgccccctagcagtcaggactctgagatactgccatttatccaaagcagaaactatccaaagctttacatagacggaccctttggcagtccattcgaagaatcactgaactacgaagtgagcttgtgtgtggcggggggaatcggcgttacccctttcgcctctatcctgaacaccctgctcgacgattggaagccttacaagctgcggaggttgtattttatctgggtatgcagggatatccagagcttccgctggttcgccgatttactgtgcatgctgcataataaattttggcaagaaaaccgccccgactacgtaaatatccagctgtatctgtctcagactgatggcatccaaaagataatcggagagaagtaccacgctctcaactctcggctttttatcggcagacctcgctggaagctgttattcgatgaaatcgctaagtataatcgcggcaaaactgtcggcgtattttgctgcggcccaaattcactcagtaaaactctgcacaaacttagcaaccaaaacaacagctatgggaccagatttgagtataataaggagtcattctcatag

SEQ ID NO: 196611 - DNA, 2193 bp, synthetic construct
  misc_feature 1..2193: note = Description of Artificial Sequence: Synthetic coding sequence
  source 1..2193: mol_type = other DNA
atggccttcgtgtgcgccggcctgagcgacaccatgagcgccgaggaggatgccagatggctgaggtgggtaacgcagcagtttaaaacaattgctggagaggatggtgaaatcagcctccaagagtttaaagccgcactccacgtcaaggagtccttcttcgctgagcgcttctttgccctgtttgatagtgatcggagtggtacaatcacgcttcaggaactgcaggaggcgctcacactgctgattcacgggtcccccatggataagctgaaattccttttccaggtgtatgatatcgacggcagcggctcaattgaccccgatgagctccgcaccgtcctgcagtcctgcctacgggagtccgcgatctcgctgccagatgaaaaactggaccaattaactctggcattgttcgagtccgccgacgccgacggtaacggggctataacctttgaggagctccgggatgagctacagcggttcccgggcgtaatggagaacctgactattagtgctgctcactggttgactgcccccgcgcccaggccccggcccagacgcccccgccagttgacccgggcctattggcataaccaccgatcccaactgttctgcctggccacctacgctggcttacacgtgctgttatttgggctggcggcctccgcgcatagagaccttggagcttcagtaatggtggcgaaaggctgtggccagtgtttgaactttgactgcagctttatcgccgtgctgatgcttcgaaggtgcctcacgtggctgagggccacatggttagcccaggtattgccgctcgatcagaacatacaattccaccagctcatgggctacgtggtagtcggattatccttggtacatacggtggcacacaccgtaaactttgtactgcaagctcaggctgaggcatctccattccagttttgggagctgctgttgacaactcgacctggcatcggctgggtgcatgggagcgccagccctacaggggttgctctgttgttgttactcttgctgatgtttatttgtagcagctcatgcataagacgttccggtcacttcgaggtcttttactggacacatctgtcttatctgttggtgtggttgttattgatcttccacgggcccaacttctggaagtggctgttggtgcctggcattctttttttcctggagaaggcaattggactggctgtctccaggatggcagcagtgtgtataatggaagtcaacctcctccctagtaaggtgacccacttgttaatcaaaagaccgccattcttccactaccgtcccggagactatctctatctgaacattccaacgattgccagatacgagtggcatcccttcactatcagcagcgccccagagcagaaagatacgatatggctgcacatacgctcacagggacagtggaccaaccggctgtacgagtcattcaaggcttctgatccattaggccgcggcagcaaaaggcttagtcgcagcgttaccatgcgaaaatcccaacgatcctcaaaagggagcgagattctgctggaaaagcataaattttgcaacattaagtgctatattgatggtccctacggcacccccacacgccggatttttgccagtgagcacgccgtactgataggagccggaatcggaatcacaccatttgcctcgattctgcaatccattatgtatcgccatcagaaacggaagcatacttgccctagttgccagcacagctggatagagggtgttcaggacaacatgaagcttcacaaggtggattttatctggatcaatcgagaccagcggagcttcgaatggtttgtcagcctgctcactaagctcgaaatggatcaggccgaggaggcacagtatggtagatttttagaacttcacatgtacatgacttcagcactgggtaaaaacgacatgaaggcaataggcctgcagatggcgttggacctgctcgctaataaggagaagaaggactcaatcactggcctgcagacacgcactcagccagggagacctgattggtcaaaagtgtttcaaaaagtggcagcggagaaaaaagggaaggttcaggtatttttctgcgggtccccggcactggcaaaggtcctgaaaggtcactgcgaaaagtttggcttccgattttttcaggagaacttctag

SEQ ID NO: 196612 - DNA, 2298 bp, synthetic construct
  misc_feature 1..2298: note = Description of Artificial Sequence: Synthetic coding sequence
  source 1..2298: mol_type = other DNA
atgaacaccagcggcgaccccgcccagaccggccccgagggctgccgggggactatgagcgcagaggaggacgcacgctggctacgctgggttacgcagcagttcaaaacaatcgctggagaagacggcgaaatctcactacaggagttcaaagcagccctccacgtcaaggagtccttcttcgctgagaggtttttcgcactttttgacagcgatcgttcaggcaccataacacttcaggagcttcaggaagcacttactctcctgattcatgggagccctatggataagttgaaatttctattccaggtgtatgatattgacgtatgcgctcgccagggggcttccgcgggaaccgaatggggggccggcgcaggccctcattgggcttccagtcccctagggactgggagcggctcaattgatccggatgagctgcgcacagtcctgcagtcctgtcttcgagagtccgcaatttctttaccagacgagaagcttgatcagctgacactcgccctgtttgagtctgctgacgccgacgggaacggggcgataacctttgaggagttacgtgatgagctgcagcggttcccaggcgtcatggaaaaccttaccatttccgctgcccactggttaacggcccctgcccctcgtccaaggccccgcaggccaaggcagctgacccgggcctattggcataaccaccgctcccagttattttgtctcgccacatatgccggcctgcatgtgcttctgtttgggctggctgcttccgcacatcgggatctgggcgccagtgttatggtggcaaaggggtgtggccagtgtctcaactttgactgttcctttatcgcagtgctcatgctaagaaggtgcctgacctggctgagggctacctggctcgctcaggtcttgccgttggaccagaatattcagtttcaccagcttatgggctacgtggttgtaggcctgtcattggtccatacggtggctcatacagttaactttgtgctccaagcccaagcagaggcaagcccattccagttctgggagctcctgctgactaccaggcctggcatcggttgggtccacggaagtgcctctccaactggtgtggcccttctgttgttgctccttcttatgttcatttgtagctcttcttgtattagaaggtctggtcactttgaagttttttattggactcacctttcctacctcctcgtctggcttctcctgattttccatggccctaacttctggaaatggttgttggtgcctgggattcttttcttcttggaaaaggccatcggtcttgcagtaagtagaatggcagcagtgtgcatcatggaggtgaaccttctcccctccaaagtcacccatctgctgatcaaaagacctccgttctttcactaccgccctggtgattatttgtatcttaatatccccaccatcgcacgctacgaatggcaccccttcacaatatcatccgcccctgaacagaaagacacaatctggttgcacatccgatcacagggacaatggaccaataggctgtatgaaagcttcaaagcctcagatcccctaggccggggctcaaagcgcttgtcacgatccgtcaccatgcgcaaatcccaacgaagctctaaggggagtgagatccttcttgaaaagcataagttttgcaatatcaagtgttacatcgacggtccatacggaacaccaacccggagaatctttgcatctgaacatgccgtgctgattggcgctgggattgggatcactccctttgcttcgattctccagtccatcatgtaccgccatcaaaagaggaaacatacttgcccatcctgccaacacagctggatcgagggagtgcaagataacatgaaactgcacaaggtagatttcatctggataaatagggatcagcggagttttgaatggtttgtgagcctcttaaccaagcttgagatggaccaggcagaagaggcccagtacggaaggtttcttgagttacatatgtacatgacatctgccctgggaaagaatgatatgaaagccatcggccttcagatggcattggacttactcgccaataaggagaagaaggactcgatcaccggactgcaaacaagaacgcagcctgggcggccagattggagcaaggtgttccagaaggtggcagcagagaagaagggaaaggtccaggtgttcttttgtggatcacccgcactggccaaggtgcttaagggccattgcgagaaatttggcttccggttttttcaggaaaatttctag

SEQ ID NO: 196613 - DNA, 2214 bp, synthetic construct
  misc_feature 1..2214: note = Description of Artificial Sequence: Synthetic coding sequence
  source 1..2214: mol_type = other DNA
atgaacaccagcggcgaccccgcccagaccggccccgagggctgcagggggactatgtcagcggaggaagatgcaaggtggctgcgctgggttacacagcagtttaaaacaattgcaggagaggatggggagatctccctgcaggaattcaaagccgcactgcatgtcaaagaatccttctttgcagagcgctttttcgccttgtttgactccgatagaagcggaacaattacattgcaggaattgcaggaggccctcactctgctgatccacggtagccccatggataaactgaagttcctcttccaagtttacgacatcgacggttctggatccattgatcctgatgaactccgcacagtgctgcagagctgcttgagagaatccgccatcagcctgcccgatgagaagctcgatcagctgactctcgccctctttgaatcagcagacgccgatggcaacggggctattactttcgaggaactgcgtgatgagctacagaggtttcccggagttatggagaacctcactatttcagccgcccattggctgaccgcccccgccccccggccgcgcccacgaaggcctaggcagttgactagggcttactggcacaatcacagatcacaattgttttgtctcgccacatacgctggccttcacgtgctgttatttggcttggccgcttctgcccatcgggatcttggagccagtgtgatggtcgctaaagggtgtgggcaatgtcttaattttgactgtagtttcattgctgtcctcatgctgaggcgttgtcttacgtggctgagagccacgtggctcgcacaagtactgcccttggatcagaacatccagttccatcaactcatggggtacgttgtcgtcgggctgagtctcgtccacacggtcgcgcacacagtgaattttgtcctgcaggcacaggccgaagccagccctttccagttctgggagttgctcctgactacacggccgggtataggctgggtacatggatccgcatctccgacgggtgtagctctcctacttctcctcctcctcatgttcatctgcagcagcagctgcatacgcagatctggccatttcgaagtgttttactggacacatcttagttaccttctggtgtggttgctgctgatcttccacggtcccaacttttggaagtggcttctggtgccaggcattctcttttttttagagaaagcaataggattagccgtcagtcgcatggcagcagtctgtataatggaggtaaatctcttacctagtaaagtgacccatctattaattaagagaccgccatttttccactatcggcccggggactacctgtatctcaacattcctacaatcgctcgttatgaatggcacccattcactatcagcagcgcaccggaacagaaagacacaatctggctgcacattaggtctcagggtcagtggacaaatagactttacgaatcattcaaagcctctgaccctctcggcagaggcagcaagcgtctgagtagaagcgtgactatgaggaaatcccagcgcagtagcaaggggtcagagattctgctggaaaagcacaagttctgtaatataaagtgctacatagatggaccttatggaacacccacgcgccgaatcttcgcctccgaacacgcagtgttgattggagccgggatcggtattacccccttcgcatctatactccaatcaattatgtaccggcaccagaagcggaagcacacttgccctagttgtcagcacagctggatcgaaggagtgcaggacaatatgaagctacacaaagtggacttcatttggatcaaccgggaccagaggtcattcgaatggtttgtttctctcctgacgaaacttgagatggaccaagcggaagaggcccagtatgggaggtttcttgaactccacatgtacatgacaagtgctttaggtaagaatgatatgaaggccatcggtctgcagatggccctagatctgttggccaacaaagagaagaaagatagcattacaggacttcagacccggacccaacctggcaggcctgactggagtaaggtgttccagaaagtcgccgccgaaaaaaagggaaaagttcaggtcttcttttgcggaagccccgccctggccaaggtgctgaaaggccattgcgagaaatttggattcaggttcttccaggagaatttctag

SEQ ID NO: 196614 - DNA, 4419 bp, synthetic construct
  misc_feature 1..4419: note = Description of Artificial Sequence: Synthetic coding sequence
  source 1..4419: mol_type = other DNA
atggacaacgccctgttctgcctggccgccgtgagcaacctggacattgaatctaagctctccgtgtactatcgggccccatggcatcagcagagaaacattttcctgcctgctacacgccccccttgtgtcgaggaactgcatcgccacgcccgccagtctctgcaggcactacgccgtgagcatcgctcacgctcagatcgtcgcgaacagcgcgcagctgctcccctttccatcgcagcccccccgctccccgcttatccccccgcacattctcagcgcaggagggagtttaaggaccggcacttcttaacatttaactccactagatcaccctcacccactgaatgctgccacatgaccccatggtccaggaagtctcatccaccggaagatgaagacaccgatgtgatgctcggccagcggcctaaaaatccaattcataacattccctccacacttgataagcaaacaaattggtccaaggcactgccactaccaactccagaggaaaagatgaaacaggacgcccaggtcatctcatcatgcatcattccaatcaacgttaccggagtggggttcgatcgggaagcttctattcgctgttccttagtgcactcacagagcgtgttgcagcggagacgcaaactgagaaggagaaaaacgatctctgggatcccacgcagagtacagcaagaaatagacagcgacgaaagccctgttgctcgcgagcgtaacgtaatcgttcacactaatcccgacccatcgaataccgtgaatcgtatcagcggtaccagagatagtgaatgccaaaccgaggacatccttatcgccgctcctagtagacgaagaatccgggctcaacgaggacagtctattgccgctagcctgagccactctgccggcaatatctcagccttagccgacaagggggacacaatgtttactcctgcggtgtcctcaagaactagaagccgcagtctacccagggagggcaaccgaggaggcgatgcagagccgaaggtgggagcaaaaccctcagcttatgaggaaggcgagtctttcgttggtgaccacgaacggacccctaacgatttctcagaggcaccctctagtccgtctgctcaggatcaccagcccaccctgggactcgcttgctcccagcacctgcatagccctcaacataaactttccgagcggggccgctcacgcctttcaagaatggctgcggattcaggatcctgcgacatttctagcaacagcgacacattcggtagcccaattcactgcatatccaccgcaggcgtcttgctctcgtctcatatggatcaaaaagatgatcaccagtcttcttcagggaactggtctggttcgagcagcacatgcccatcacaaactagtgagacaatacctcccgccgccagcccccccctgacaggctcatcccattgtgattctgaattatccctgaacacagcaccacacgcaaacgaggacgcttctgtttttgtcactgagcagtacaatgaccacctggacaaggttcggggccacagggcaaattctttcacctcaaccgtcgctgatcttctggatgacccgaacaacagtaacacctccgactcagagtggaattaccttcatcaccatcacgatgcgagctgtagacaagacttctcccccgagagacccaaggctgacagtctaggctgcccctcattcacttctatggccacatacgattctttcctcgagaagtcacccagtgacaaagctgacacctcttctcatttctcagtggacacagagggttactatacctcaatgcattttgactgcggcctgaagggaaacaaatcttacgtctgtcactatgctgccttagggccagaaaatggccaaggggtgggcgcatcccctgggctccccgattgcgcatggcaggactacttggaccacaaaagacagggacggccatcaatttcctttagaaagcctaaggccaagccaacccctcctaaaagaagcagctccctgagaaagagcgacgggaatgccgacatatctgagaaaaaagagcctaagattagtagtggccagcacctcccccactcttcaagggagatgaagctccccttagatttcgccaacaccccctcccgaatggagaatgctaatctgcctaccaaacaggaaccatcttggatcaaccagtctgagcaggggatcaaggaaccgcagctggacgctagcgatataccgcccttcaaggacgaagtggcagagtcaactcactacgctgatctctggttgctgaatgatctgaagactaatgacccctatcgctcactgtctaatagttcaactgctaccggaaccaccgtgatcgaatgcatcaagtcccccgagtctagtgagtctcagacctctcagagcgagagccgcgccacgacccctagcctgcccagcgtggacaatgagttcaagttagcctcccccgaaaaactcgctggactggcctcgccttctagtggatactccagccagagtgaaacacctaccagcagcttcccaacagcctttttttccgggcctctttcccccggaggctctaagaggaagccaaaggtcccggagcgtaagtcctcactgcagcagcctagcctgaaggatggaactatctccctgtcaaaagatttggagctacccattattcctccgacccacctggatctgtccgctttacataatgtgctgaacaaaccatttcaccacagacaccccttgcacgtgtttacacataataagcaaaatacagtaggtgaaacccttaggtcgaatcctccaccgagcctcgcaattacccctaccatccttaagtccgtgaatctgaggtccattaacaagtctgaagaggttaagcagaaagaggagaacaacaccgacctcccctatttggaggaatccacactgaccactgccgcactgtcaccatccaagattcggccacacaccgctaacaaatctgtatccaggcagtatagtacagaagacacaatcctctctttcctcgattctagcgcagtggaaatgggacccgacaaactacacttagagaaaaactctacatttgatgtgaaaaaccggtgtgaccctgagactattaccagtgccggttccagtctgctggattccaacgttacaaaagaccaggtgaggacagagaccgagcctatcccagagaacacacctaccaagaactgcgcctttccaacagaaggattccaacgtgtctcggccgcacgacctaacgatctagacggcaagatcattcaatatggtccgggccctgacgagacactggagcaggttcagaaagctcccagcgctggcctggaagaggtagctcaacccgagagcgtcgatgtaattacctctcagtccgactctccgaccagggcaaccgacgtatctaatcaattcaagcaccaattcgtgatgtcacgacaccacgataaggtgccagggacaatttcgtacgaatcagagatcacaagcgtcaactctttccctgaaaaatgttccaagcaggaaaacatcgcatctgggatatctgctaagtccgccagcgacaattcaaaagctgaggaaacccagggtaacgtggatgaggcatctctaaaagagagtagcccttctgatgatagtataatctctcccctgtcggaagacagccaagcagaagcagaaggagtgttcgtgagccccaataaaccgagaactacagaagatctgttcgccgtcattcaccgctcaaaacgtaaggttttggggcgtaaagattctggggacatgagtgtgagatcaaagtctagagctcccttgtctagctcatcgagctcagcttcctctatcaccagcccttcatccaacgtcaccaccccaaactcacaaaggtctccgggacttatctaccgaaatgcaaagaaatcaaataccagcaatgaggagttcaagctgctgctcctgaaaaagggtagtcgcagtgactcctcataccgaatgagcgcaaccgaaatcctaaaatcacctatcctgccaaagccccccggggagctcacagcagagtcaccacaatcaaccgacgatgcacatcaaggttcacagggagccgaagcactaagtccactgtctccctgttccccaagggtaaacgctgagggctttagtagcaaaagcttcgccaccagcgctagtgctagggtggggaggtctagagcgccccctgctgcgagtagttccaggtatagcgtgaggtgtcgattgtataataccccaatgcaggccatttccgaaggcgagacagagaacagcgatggcagccctcatgacgatagatcatcacagagcagcacctag

SEQ ID NO: 196615 - DNA, 4893 bp, synthetic construct
  misc_feature 1..4893: note = Description of Artificial Sequence: Synthetic coding sequence
  source 1..4893: mol_type = other DNA
atgcccttcgccaagcggatcgtggagccccagtggctgtgccggcagagacgccctgcacctggtccagctgtggatgccagcggcggcagcgcagagcccccccccccactgcagcctcccggccggcgtgacctggacgaggtggaagcacccgggcctgaggagcccgcgagggcagtgcccgctccaagcggactcccccccccacctccacccctccccgctcccgcagaccagacacagcccccccacggcgaggcatctgtagcaggagaagagtccacggccggcattcccgaagcggcgcccgccgcaggtgaggcctcctccgctgctgccgccgccgccgtgttgctgatgcttgacttatgtgccgtgtcaaatgctgcactcgcccgggtactgcgacaattgtccgatgtcgcccgccatgcttgcagcctattccaggagcttgagtcggacattcagctcacccaccgacgcgtttgggcactgcagggtaagctcggcggcgtgcagcgagtgctcagcaccctcgatccgaaacaggaggccgttcctgtgtcaaatttagatatagaatctaaactcagcgtgtattaccgggccccttggcaccagcagcgaaatattttcctccccgcaacccgccctccttgcgtcgaagagctgcatagacacgctcggcagagtcttcaggctttaagaagggagcatcggtcacgatctgatcgaagagaacagagagcggccgcacccttgtctattgctgcacccccgcttccagcctacccccccgcccactctcagaggagacgtgagtttaaggaccgacacttccttacatcacacccccctgaagacgaggacacagacgtcatgttaggtcagaggccaaagaaccccatccacaacatcccctctactttagacaagcagaccaattggagtaaggcactgcctcttccaacccctgaggagaaaatgaagcaggatgctcaggtcattagtagttgtattatcccgatcaatgtgactggggtcggatttgacagagaagcatctataagatgctctctagtgcatagccagtccgtccttcagcgacgcagaaagctgcgacgccggaaaactatttctggaataccaagacgcgtccaacaggaaatcgatagcgacgagtccccagttgcgcgggaaaggaatgttattgtgcacaccaatcccgacccaagtaataccgtgaataggatctcagggacgagagactcagagtgtcaaactgaggacatcttaattgcagcgccaagccgcagaagaatccgggcacaacgtggccagtccatagcagcaagcctcagccatagcgctggtaacattagcgctctggccgacaagggagacacaatgttcacaccagctgtctcatcccgcacccgctcgcgcagcttgcctagggagggaaatagggggggtgacgccgagcccaaagtgggagccaagccgagtgcctatgaggagggagaaagtttcgtgggcgatcatgagcgtacgcccaatgacttctctgaggccccaagcagtcccagtgcacaggaccaccagcccactctgggcttggcgtgctcccaacacttgcacagtccacagcacaagttatctgaacgcggaagatctcgcctcagccggatggccgcggattctggctcctgtgatattagctcaaactccgacacatttggatcccctattcactgcattagcaccgctggcgtcctcctcagttcccacatggatcaaaaagacgaccatcaatcgtccagtggaaactggtctggctcatcgtctacatgcccgtcgcaaacaagcgagaccatcccgcctgccgcatcaccccccctgaccggaagctctcattgcgactcagagctcagccttaacactgcacctcatgccaatgaggatgcctccgtgttcgtgacagagcaatacaacgaccacctcgacaaggtgaggggccatagagctaacagcttcacaagtaccgtcgctgatctcctggacgacccaaacaactccaacacgagcgatagcgaatggaattacctgcaccaccaccatgatgccagctgccgtcaggacttttcgccagagagacccaaggctgatagtttgggctgtccatcatttacaagtatggcaacatacgattcttttctcgagaaatcgccatccgacaaagcggacacttcaagccacttttccgtggatactgagggctactatacatcgatgcacttcgattgtgggctgaaaggcaataagagttatgtctgtcactacgccgccttagggcccgagaatggccaaggtgtgggagcttctcctggtctcccagactgcgcatggcaggactatctggaccacaagaggcagggtagaccctcaatctcctttcgtaagcctaaggccaaacctacacctccaaaaaggtcctctagcctgcgtaagtcagacgggaatgctgacatttcagagaagaaggaacctaagatatcaagcggccaacacctcccacactccagtagggaaatgaagcttccactcgactttgctaataccccctcacgcatggagaacgcaaatctgcctaccaaacaagaacctagttggatcaatcagtccgagcaggggattaaagagccacagctcgatgcctctgatatccccccttttaaagacgaagttgccgaaagtactcactatgcagacctgtggctgctgaacgacttaaagaccaacgacccttacaggagtttgagcaactccagcacagcaacaggcactacggtgatcgaatgtattaagtcaccagaatcttctgagagtcaaacaagtcaaagcgagtcccgggccaccactccgtcactgccatcggtggataatgagttcaagcttgcgtctccagagaaacttgccgggctcgcctctccttccagcgggtattcgagtcagtcagagacacccacttcaagctttcctactgccttcttcagcgggcccctctcaccaggtggcagtaaacgtaagcccaaggttcctgaacgaaaatcaagcctccagcagcctagcctaaaggatggtacgataagtctctctaaggatttggagctgccaattattccacccactcacctggacctctccgccctgcataacgttcttaataagccctttcatcacaggcatccactgcacgtgttcactcacaataaacaaaataccgtgggagagacgctccgatctaatcctcctccctctcttgctatcaccccaaccatactcaagtccgtgaatttgaggtctattaacaagtctgaggaggtgaagcaaaaggaagagaacaataccgaccttccatatcttgaggagtcaacactcactacagccgcgctttcgccctctaagatcaggccacatacagccaacaagagcgtgagccggcagtactcgaccgaagacacaatcctgagttttctcgactctagtgctgtcgagatgggtcccgataagctgcacctcgagaaaaactccactttcgatgtaaaaaaccgatgcgacccggagaccattacgtcagccggttctagcctgctagactccaacgtcaccaaagaccaggtcaggaccgagaccgaacccattcccgagaatacacctactaaaaattgtgcgtttccgacagaaggctttcagcgagtttccgcagctaggcccaatgacctggatgggaagatcatacaatatggccctggcccagacgagacgttggagcaggtgcaaaaggcaccctctgcgggcctagaggaagttgcacaacccgagtcagttgacgttattacgagccagtccgattcacccaccagagctacagacgtcagcaaccagttcaaacatcaattcgttatgagcaggcaccacgacaaggtgccaggcacaatttcctatgagtccgaaattacctctgtgaatagcttccctgagaaatgttctaagcaggagaacatcgcctccggtattagcgcgaaaagcgcctccgacaatagtaaagctgaggaaacccagggcaatgtagacgaagcctcactcaaggagagttcacccagtgatgatagtatcataagtcctctttcagaagactctcaagcagaagccgaaggcgttttcgtgtcacccaacaaaccacgtaccacagaggatctatttgctgtaattcaccggagtaaacgtaaggtgctgggccggaaagactcaggtgacatgtctgtgagatccaaatctcgtgcgccactcagttctagctcaagcagtgcatccagtatcacgagcccctctagtaatgtgacaactcctaatagtcagcgcagccccgggcttatctataggaatgctaagaagtccaataccagcaacgaggaatttaagctgctcctcttgaagaaaggttccaggagcgattcctcgtatcggatgtcagctactgaaatcctgaagagcccaattctgccaaaaccccctggggagctgactgccgagagcccgcagtcaacagacgatgcccaccaaggtagccagggcgcggaagctctgtcccccttatctccttgcagccccagagtcaacgccgaagggttctctagcaagtcctttgccacctccgcgagcgccagggtgggccgatcacgggctcctcctgcagcatccagctcacggtactccgtgagatgtcggctgtataacacacccatgcaggctatctctgaaggagaaacagagaattccgacggcagtccgcacgacgataggtcttctcaatccagcacgtag

SEQ ID NO: 196616 - DNA, 4425 bp, synthetic construct
  misc_feature 1..4425: note = Description of Artificial Sequence: Synthetic coding sequence
  source 1..4425: mol_type = other DNA
atggccctggcctgctgcatgcccaagaacgccgccgtgagcaacttagacattgaatctaagctatccgtgtactatcgcgcgccctggcaccagcagcgcaatatattcctaccagcaaccaggcctccgtgcgtagaagaacttcataggcacgcgcgtcagtctctgcaggctctgcgccgagagcacaggagtaggtcagatcggcgtgagcagcgcgccgctgcccccttgagcattgccgcgccaccattgcccgcatatcccccggcccattcccagcgaagaagagagttcaaggatcgtcactttctgacttttaactcaacccgctcacccagtcctaccgagtgttgccacatgacaccgtggagtcgcaagagtcatccccctgaggacgaagataccgacgtgatgctgggccagagaccaaaaaaccctattcataatattccttccacactggacaagcagaccaactggtccaaggctctaccacttcccacccctgaggaaaaaatgaagcaagatgcccaggtaatcagttcctgcatcattcctattaacgtgacgggcgtcggattcgaccgggaagcttcaatccgatgcagtctggtccactctcagtcagtcctgcagcgccgtcgcaagctccgccgccgaaagacgattagcggcattccgagacgggtgcaacaggaaatcgattctgatgaatccccagtagcacgagagaggaacgttatcgtgcatacaaaccctgatccgtctaacactgtcaataggatcagtggaacgcgggattcagagtgccagactgaagatattcttattgcagctccttcacggcgacgtatccgggcccagaggggccagagtatcgcggcttcacttagtcacagtgccggaaatatctccgccttggccgataagggggataccatgtttacccctgcagtttctagccggacaaggtctagaagtctaccgagggaagggaatagagggggagatgccgaacctaaggtaggggccaaacccagcgcatacgaagaaggagaatcctttgtgggcgaccacgaacggactccaaatgatttctccgaggctccctcctcaccatccgctcaggaccaccagccaaccttaggattggcatgtagtcaacatctgcactcacctcagcataaattgagcgaacggggcaggtctagactgtcgcgcatggctgctgatagcggctcctgtgacatttcctccaacagcgatacattcgggtcacctattcactgcattagcacagcaggcgtacttttgagctcccatatggatcagaaagatgaccaccagtcctcctccggcaactggagcggctcctcaagtacttgcccatcacagaccagtgagaccatccccccagcagcaagcccgccactgacaggtagttcccattgtgactccgagctcagtctgaacactgccccccacgctaacgaggatgcctctgtatttgtgacagaacagtataatgatcacctcgacaaagttcgcggtcatagggctaattcattcacgagcaccgtcgccgacctgttggatgaccccaacaacagcaataccagcgatagtgagtggaattacctgcatcaccaccatgatgcctcttgtcgacaagatttctcccccgaaaggcccaaagctgattcactaggatgcccttccttcacttcgatggcaacctatgactcctttctagaaaaatcacccagtgacaaagcggatactagctcccactttagcgtcgataccgaaggatactacacctccatgcactttgactgcgggctgaaaggcaacaaatcttatgtctgtcattacgccgccctgggtcctgagaatggacagggggtaggcgcctccccaggactgcccgactgcgcatggcaggattacctcgaccacaagcgtcaaggcaggcccagcatttcattcaggaaaccgaaggcgaagcccacaccccccaagcgcagcagttccttgagaaagtcagatggaaacgctgatatctccgagaagaaggaacccaaaatttcatctggccaacacctgccacatagcagccgagagatgaagctgccacttgatttcgctaacacccccagtaggatggaaaatgccaatctgccgactaagcaggaaccatcttggattaaccagagtgaacagggcataaaagagcctcaactcgatgcctctgacattcctccctttaaggacgaggtcgcagagagtacccactacgccgatctctggcttctgaatgatcttaaaactaacgacccttaccggtcactgtcaaattcatccaccgcaactggcaccacagtgatcgagtgtatcaaaagccccgagtctagcgagtcacagacgagccagagcgaatctagagccacaacgccttccttgccctccgtggacaacgagtttaagctggcctctccagagaaactggctggtctagccagccctagcagcgggtactcatcccagagcgagacacccacatcatctttccccacagccttctttagcggtcctctgagccccgggggaagcaagcgtaagccaaaagtgccagaacgtaaaagctctctccagcagccttcgcttaaggatggcaccattagcctgagtaaggacttagaactgcccattatcccacctacgcacctcgatttatctgctctccataatgtgctcaataaaccgtttcatcatcgccaccctttgcacgtcttcacccacaataagcagaacactgtcggcgagacactaaggagcaatccacccccgagcctcgcgatcactcctacaattctgaagtccgtgaacctgaggagcatcaataaatctgaagaggttaagcaaaaagaggaaaacaataccgacctaccctacctagaggaatcaaccctgacaacggctgctctttcaccatctaagatccgacctcacacggccaataaatcagtgagccgccagtacagcactgaggacaccattctgagcttcctggatagttcggctgtggagatgggtccggacaagcttcatctggagaagaacagcacatttgacgtgaagaaccgatgtgatcccgagactatcacatccgctggaagctctctcttggattccaacgtgactaaagatcaggtcaggacagagacagagcccataccggagaatacacccacaaaaaactgcgctttccccaccgaggggttccagcgcgtttctgccgctcgacccaacgacctagacggaaaaataattcagtatggccctggccctgacgaaaccttggagcaggttcagaaagcacctagtgccggtctggaagaggttgcacagcctgaatctgttgacgtaatcacttctcagtcagacagccctacaagggcgacagatgtgagcaaccagtttaagcatcagttcgtgatgtcaagacaccatgataaggtgcctggcacaatcagctatgagtcagagatcactagtgtgaactcatttcccgaaaagtgtagtaaacaagagaacatcgcttctggaatctctgccaaatctgccagcgacaacagcaaggccgaggaaactcaaggcaatgtggacgaagcctctttaaaagagtcttcacccagcgatgattccattatttctcctttgagcgaggacagtcaggcagaagccgaaggtgtcttcgtgtctcccaacaaaccccgcaccaccgaggatctttttgcggttatccatcggtctaagcggaaagtcttaggacggaaggacagtggagatatgagtgtgaggtccaagtccagggctcctttgtcaagtagctcgtccagcgctagtagtatcacctctccctctagcaatgtcacaaccccgaactcccaacgctcccctggcttgatttatcgcaatgcgaaaaaatccaatacttctaacgaagagtttaagcttctccttctgaaaaaggggtcccgctccgactcttcctacaggatgtccgctactgagattctgaagagtccgatcctcccaaagccaccaggcgagttgaccgctgaatcaccccagagtaccgacgatgcacaccagggttcacaaggggccgaagccctcagtcctctgagcccctgcagtccaagagtcaacgcggagggtttttcatcgaagtcatttgctaccagtgcatctgctagagttggccgcagtcgcgcccctcctgctgcttctagtagtcgatattccgtgcggtgcaggctctacaatactcccatgcaagcaatctcggagggtgaaacagaaaattctgacggcagtccccacgatgataggtcaagtcagagctccacttag

SEQ ID NO: 196617 - DNA, 255 bp, synthetic construct
  misc_feature 1..255: note = Description of Artificial Sequence: Synthetic coding sequence
  source 1..255: mol_type = other DNA
cccgagctgcaggtgtgcgtgttctgccggaacaacaaggaggccatggcactctataccactcatatactgaagggcccagatggtcgtgtactgtgccctgttctgaggcgctatacttgccccttgtgtggagcctctggggacaacgctcacaccatcaagtattgccctctcagcaaggttccacctcctccagctcggcctccacctcgctccgctcgggatgggccaccaggaaagaaactacgctag

SEQ ID NO: 196618 - DNA, 879 bp, synthetic construct
  misc_feature 1..879: note = Description of Artificial Sequence: Synthetic coding sequence
  source 1..879: mol_type = other DNA
atggaggccttcccctgggccccccggagcccccggcggggccgggctccacccccaatggccttagtgccatccgcacgttatgttagtgcgccaggccccgcccatccccaacctttttctagttggaacgactacctgggtctcgcgacactgattaccaaagccgttgacggagagccccgtttcggttgcgccagaggaggtaatggcggtggcgggtcaccaccctcgtcctccagttctagctgttgcagtccgcacacgggtgctggcccgggagcattaggcccagcgttgggcccgccagattatgacgaggatgacgatgacgatagtgatgaacctgggagcaggggcagatacctcggctccgctttagagctccgagctctggagctgtgcgccggccctgctgaggcaggactgctagaagagcgttttgccgagctttcccctttcgccgggagagccgccgccgtactgctgggctgtgcgcctgctgccgctgcagccgcgacaaccacctctgaggccacccctcgagaagagagggctccagcatgggctgcagaacctcgcctgcacgcggcatcaggggctgccgctgccaggctcctaaaacctgagctgcaggtgtgcgtgttctgcagaaataataaggaagcaatggccctgtacactacccatattctaaagggcccagacggaagggtgctttgccctgtgctgaggaggtacacttgtcccttgtgcggggcttctggtgacaatgcccacacgatcaagtattgcccacttagtaaagtacctcctccccctgcccgacctcctcctcgaagcgcccgcgacgggcctcccgggaagaagttacggtag

SEQ ID NO: 196619 - DNA, 3456 bp, synthetic construct
  misc_feature 1..3456: note = Description of Artificial Sequence: Synthetic coding sequence
  source 1..3456: mol_type = other DNA
atgctgcggcgggtgaccgtggccgccgtgtgcgccacccggcggaaactgtgtgaggctggtagagagttggccgcactatggggcatcgagactcgcggaaggtgtgaagacagcgcagctgccaggccgtttcctattctagcaatgcccggcaggaacaaggcaaaatccacatgctcctgcccggatctacagcctaacggacaagacctgggcgaaaactcacgagtggcccgcctgggggctgatgaatcagaagaggagggtaggcgtggaagcttgtccaacgccggagaccccgaaatagtaaagagcccatcagatcctaagcagtatcggtacatcaagctgcagaatgggctacaagccctgttgatcagtgatctgtccaatatggagggcaagactggtaatacaacagacgacgaggaggaagaggaggtagaagaggaggaagaagatgacgatgaggattctggagctgaaattgaggatgatgatgaggaggggttcgatgatgaagatgaatttgacgacgaacacgatgacgatcttgacaccgaggataacgagctcgaggagctggaggagcgagctgaggcgaggaagaagacgacagaaaagcagagtgccgctgccttatgcgtgggcgtgggctcgtttgcagatcccgacgatctccccggcctcgcacactttctcgagcatatggtgttcatggggtcattaaagtaccccgatgaaaacggatttgatgcttttctaaagaagcatggaggatctgacaacgcttccactgattgtgagagaacagtgtttcagtttgacgtacagcgaaaatactttaaagaagctcttgacaggtgggctcaatttttcattcaccctttaatgataagggacgcaatcgatcgagaagttgaggctgtcgattctgagtaccagttagcacgtccttccgacgcgaatcggaaggagatgctgtttggctcgctcgctcggcccgggcatcctatggggaagtttttctgggggaatgcagagactctcaagcatgaaccccgcaagaataatatcgatacacatgctcgactgcgcgagttctggatgagatattactcctcccattacatgacccttgtggtgcagtcaaaggaaaccttagatactcttgagaagtgggttaccgagatcttctctcaaatacctaacaacggtctgcctaggcctaacttcgggcatctgacggacccttttgacactccagccttcaataagttatatagagtcgtccctatccgtaagattcatgctctgactataacttgggctctgccacctcaacagcagcattaccgagtaaaaccccttcactatatttcctggctggtaggtcatgagggcaaaggcagtatcctgtctttcctgcggaaaaagtgctgggccctcgccctgttcggtggcaacggcgaaaccggattcgaacagaactctacatattctgtcttctccatttctatcactctgacggatgaaggatacgagcacttctatgaggtagcctacactgtgtttcaatacctgaaaatgctccaaaagctcggaccggaaaagcgaatatttgaggagatacgtaaaatagaagacaatgagtttcactaccaagagcagaccgatccagtggagtatgtggagaatatgtgcgagaacatgcagctctaccctctgcaggatattctgacaggcgatcagctgctcttcgagtataaaccggaagtcatcggcgaagcattgaaccagctggtgcctcaaaaggctaacctcgttctgttaagcggcgccaatgaaggaaagtgtgacttgaaggaaaaatggttcgggacacagtattctatcgaggacattgagaattcgtgggccgaactctggaattccaatttcgagcttaatcctgatctacatctccccgccgagaataagtacatcgccaccgattttaccttgaaggcttttgattgccccgaaactgaataccccgtcaaaatagtgaatacaccccagggctgtctctggtacaagaaggacaataaatttaagatcccaaaagcgtacatcagattccacctaatttctcctcttatccaaaaaagtgccgcaaacgtggtgttattcgatatattcgttaatatcctgactcacaatctggcagaaccagcctacgaagcagatgttgcacagctggaatacaaacttgtcgcaggagaacatggcttaattatcagagtgaagggttttaatcacaaactgccactgcttttccagctgattatagattatctggccgagtttaactccactcctgcagtctttacaatgattactgagcagctgaaaaagacatactttaatatccttatcaagcccgagacccttgcgaaggatgtacgtctgttaatcctggaatatgcccggtggtccatgattgacaagtaccaagccctgatggatggcttaagcctggagtcccttctgagcttcgtcaaggagtttaaatcccagttattcgttgagggattggtgcagggcaatgtgacctccaccgagagtatggatttcctgaagtatgtggtcgacaagttaaatttcaaacctctggaacaggaaatgccggtccagttccaggtggtcgaacttccgtccgggcaccatctttgcaaagttaaagccttgaataagggagacgcaaattccgaagttactgtatattaccaatcgggcacccgcagtttgcgtgagtacaccctgatggaactcttagttatgcacatggaggaaccgtgttttgactttctgcgtaccaagcagacactgggctaccacgtgtatcccacgtgtcgtaacaccagcggaattcttggatttagtgttaccgtgggtacgcaggccaccaaatataatagtgaagtggtcgacaagaagattgaggagttcctgagctcctttgaagagaaaatcgaaaacctgacagaagaggcattcaatacacaggtcaccgcccttatcaagctgaaagagtgcgaagatacccatcttggagaggaggttgacaggaattggaacgaggttgtgacgcagcagtacttatttgataggctcgcacatgagatagaggctctgaagagctttagcaagagtgatctcgtcaattggttcaaagcccatagagggccaggctctaaaatgctttctgtgcatgtggtgggctacggaaagtatgagttggaggaggatggtacaccatccagcgaggatagcaattcctcctgcgaagtgatgcagttgacttatttgcccactagccccctactggccgattgcataatcccaatcacggacatacgggcctttacaaccacccttaatctgttgccctatcacaagattgtaaagtag

SEQ ID NO: 196620 - DNA, 3660 bp, synthetic construct
  misc_feature 1..3660: note = Description of Artificial Sequence: Synthetic coding sequence
  source 1..3660: mol_type = other DNA
atgctgcggcgggtgaccgtggccgccgtgtgcgccacccggcggaagttgtgcgaggccggcagagaactggctgccctctggggtattgaaaccagaggtcggtgcgaagactccgcagccgcacggccgttccccatcctggcgatgcccggcaggaataaagccaaaagcacctgcagttgtcctgatctgcagcccaacggtcaggacttaggcgagaattcccgggtcgcacggctcggggccgatgaatctgaggaagagggaagacgcggatccctgagcaacgcgggggaccccgagattgtcaagagcccctcagacccgaagcagtatcgttatattaagctgcaaaatgggttacaagccctcttgatcagcgatctgtccaacatggagggcaagactggaaataccactgacgatgaagaagaggaagaagtggaagaggaggaagaggatgatgacgaggatagcggagccgagattgaagatgatgacgaagagggatttgacgatgaagatgagtttgatgatgagcacgatgacgatctggatacggaagacaacgagcttgaggaactggaagagagggctgaggccagaaagaaaacaacggaaaaacagcagctgcagagtctttttctgctgtggtccaaactgaccgatagactttggtttaaaagcacttatagtaagatgtcttccacactgcttgtagagacacgaaacctgtatggggtggtcggcgccgagtccagaagcgcgcctgtgcagcacctggccgggtggcaggctgaggaacagcaaggtgaaaccgatactgtcctcagcgctgccgcattgtgcgtgggagttggcagcttcgctgacccagacgacctgcctggcttggcccatttcttagaacatatggtatttatgggctctctgaaataccccgatgagaacgggttcgatgccttcttgaaaaagcacggcggcagcgacaacgcctctactgactgcgaacggaccgtcttccagttcgacgtgcagcgaaagtactttaaagaggccctggaccggtgggcccagttctttattcaccccttgatgatacgggacgcaatcgacagggaagtcgaggccgtggatagtgagtatcaattggctaggccctccgacgccaatcgcaaggagatgttatttggaagcctggcgcggccaggccacccgatggggaagttcttttggggcaacgcagagacattaaagcacgagccaaggaaaaacaatattgacactcacgcgcgattaagagagttctggatgagatactacagttcacactatatgactcttgtcgtgcaaagcaaagagacgttagatactcttgaaaagtgggtgacagaaatattttcacagatacctaacaacggactaccaagaccaaattttggtcatcttacagatccattcgacacccctgcttttaataaactttaccgggtagtcccaattcgcaagattcatgctctcaccatcacctgggccctgcccccccagcagcaacattacagggtgaaacctctccattatatctcgtggctcgtgggtcacgaaggaaaagggagtatcctgtctttcctccgtaaaaagtgctgggctctggccctattcggggggaacggcgaaactgggtttgaacagaacagtacgtactctgttttttcaatatctatcaccctgacagatgaggggtatgagcatttctacgaggttgcatatacggtgttccaatacctgaagatgctgcaaaaactaggtcccgagaaaagaatctttgaggaaatccggaagatcgaagataacgagttccattaccaggaacagaccgacccggtggagtatgtggagaatatgtgtgagaacatgcaactgtaccccctgcaagacattctcacgggagaccagctcctgtttgagtataaacctgaggttataggcgaagcactgaaccagcttgtccctcagaaggccaatctcgttttgctctcaggtgcaaatgaaggaaagtgtgaccttaaggaaaaatggttcgggacgcagtactccatcgaagatatcgaaaatagctgggcggagttgtggaacagtaatttcgagcttaatcctgacctgcacctccctgctgagaacaaatacattgccaccgacttcacactcaaagcattcgattgcccagagacagagtaccccgtcaaaattgtcaataccccccagggttgtctatggtataagaaggacaataaatttaaaattcccaaggcctacatcaggttccatctgatctctcctttaattcaaaaatctgccgccaacgttgttctttttgacatctttgtgaacatcttgacccacaatctggcagagcccgcttacgaagccgacgtcgcgcagctcgagtacaagctggtggccggggagcatggactcatcattcgcgtgaaagggtttaaccataaactgcctctgttgtttcagctgatcattgactacctggcagaatttaactccacccccgctgtgttcaccatgatcaccgaacaactcaagaagacttattttaacattcttatcaagccggagaccctcgcgaaagacgttaggctgctgattcttgagtatgctagatggtccatgattgataagtaccaagcactgatggatgggcttagtttggaaagcctgttatcgttcgtcaaggagttcaagtcgcagttattcgttgaaggcctcgtgcagggaaacgtgactagtacagaaagcatggatttcctgaagtacgtggtcgataaactcaactttaagccattggaacaagagatgcctgtgcagtttcaagtggtggaactaccttctggacaccacctgtgtaaggtcaaagcactcaacaaaggggacgccaacagtgaggtcactgtgtactatcagagcggaacccgaagcctgcgcgagtacacactcatggaactcctcgtgatgcatatggaggagccctgctttgattttctgcggacaaagcagaccctcggctaccatgtatacccaacctgccgtaatacttccggtatcttaggcttttctgtcaccgttgggacacaggccacaaagtacaatagcgaagttgtggataagaagatcgaggagtttctctcttcattcgaagagaagatcgagaaccttaccgaggaggcctttaatactcaggtgacagccctgataaagcttaaggagtgtgaagacacacacctgggagaggaagtagatcggaactggaacgaggtggtgacccagcaatacctatttgacaggctagctcatgagatcgaagcactaaaatctttcagcaaatctgatctggtgaattggtttaaggcacatagggggcctgggtctaagatgctttcagtgcacgtcgtcgggtacggcaaatatgaacttgaagaggacgggactccctccagcgaagatagtaacagcagctgcgaggtcatgcaactgacctacctcccaacgtctcccctgctggctgactgtatcatccccatcaccgacatcagagcctttaccactaccttgaacctgctgccttaccataagatcgtaaagtag

SEQ ID NO: 196621 - DNA, 1662 bp, synthetic construct
  misc_feature 1..1662: note = Description of Artificial Sequence: Synthetic coding sequence
  source 1..1662: mol_type = other DNA
atgctgcagaagctgggccccgagaagcggatcttcgaggagatccgcaagattgaggataacgaattccactaccaggagcagacagacccagttgagtacgtagaaaatatgtgcgagaacatgcagctatatccactccaggacattcttacaggggatcagctgctcttcgaatacaaacctgaagtgattggcgaggccctgaaccagctggtgccccagaaggccaacctagtccttttatccggcgccaatgagggcaagtgcgacctgaaagaaaagtggtttggtacccagtactccattgaggacatcgagaattcctgggctgaactttggaatagcaactttgagctgaacccagacttgcacctacccgcagaaaataagtatattgcctatatacgctttcatttgattagccctctcattcagaagagtgcagccaacgttgtcctctttgatattttcgtgaacatactcacccacaacctggctgagcctgcctatgaagccgacgttgcacaactggaatacaagttggtcgccggtgaacatggcttgatcatccgagtcaagggatttaatcacaagcttcctctcctgtttcagcttatcatcgattatctggctgagttcaacagtacccccgcagtgtttacaatgatcaccgaacagctgaaaaaaacctatttcaacattctgatcaaacccgaaacactggctaaagacgtccgactgttaatcctcgaatatgcacggtggtccatgattgacaagtaccaggctttgatggatggactgagcctggagtctttattatcctttgtaaaagaattcaaaagccagctctttgttgaaggtctggtccaagggaacgttacctctacagagtcaatggatttcttaaagtatgttgtggataaactaaatttcaagcctctggagcaggaaatgcctgttcaatttcaggtggtagagctcccgagtggccaccacctttgcaaggtaaaagccctgaataagggcgatgccaatagcgaagttaccgtctattaccagagtggaactagatccctccgggaatacactctgatggagctgctggtcatgcatatggaagaaccgtgcttcgactttctgcgaacaaagcagacactgggaagtgaggtcgtggacaaaaaaattgaggaattcctgtcaagtttcgaagagaaaattgagaatctgaccgaggaggcgttcaatacgcaagtaacagcgctcataaaacttaaggagtgtgaggatactcacctaggcgaagaagtggacagaaactggaatgaggtggtaacacaacagtacctgttcgaccgcctggctcatgaaatcgaagcactgaaatctttttctaagtccgaccttgttaattggtttaaagcccaccgcggcccagggagcaagatgctttccgttcacgttgttggatatggcaagtacgagctggaagaggacggtacaccctctagtgaagacagcaactcttcttgcgaagtgatgcaattgacttacctcccaacttctccactgctggcagactgcataatccccattaccgacatcagggccttcacgactacgctgaatctgcttccataccataaaatagtcaagtag

SEQ ID NO: 196622 - DNA, 1617 bp, synthetic construct
  misc_feature 1..1617: note = Description of Artificial Sequence: Synthetic coding sequence
  source 1..1617: mol_type = other DNA
tgaaagatcgaggacaacgagttccactaccaggagcagaccgaccccgtggaatatgtggagaacatgtgtgagaacatgcagctgtatccactgcaagatattctcactggggatcaattattattcgagtataagccagaagtgatcggggaagctttaaaccagttagtgcctcagaaagccaatcttgtgttgctgagtggggctaatgagggtaaatgcgacctgaaagaaaaatggttcgggacacaatacagcatcgaggacatcgaaaactcctgggcagaactctggaacagtaacttcgagctgaacccagatcttcacctgccagcagagaacaaatatatcgcttacataagattccatcttatcagccccttaattcagaagagtgcagccaacgttgtcctttttgatattttcgttaatattcttacgcacaatttagcagagccggcatatgaagccgacgtcgctcagctcgaatacaagttggtggcaggggagcacggcctgatcatacgtgtcaaaggcttcaaccacaagctgccactactgtttcagttgatcatcgattacttggccgagtttaatagtactccagctgtttttactatgataacagaacaactgaagaagacctatttcaacattctgattaagccagagactcttgcaaaggacgtgcggttactgatcctcgagtacgcacggtggtctatgatcgacaaataccaagcactgatggatggactatctctggagtcactcctctcttttgtgaaggaatttaagtctcagctattcgtggagggattagtccagggaaacgttacatcaaccgagtccatggattttcttaaatatgtagttgacaaactgaattttaagccactggaacaagagatgcccgtgcagttccaggtcgtcgaactaccaagtgggcaccatctttgtaaggtcaaggccttaaataagggcgatgccaatagtgaggtgactgtctattaccagagtggcactcggtctctccgtgagtacaccttaatggaactattggtcatgcatatggaagaaccttgtttcgattttttaaggaccaaacagacattgggatctgaggtggtagacaagaagattgaggagtttctcagtagcttcgaggagaaaatcgaaaacctaacagaagaggcatttaacactcaggtcaccgcccttatcaagctgaaagagtgtgaggacactcatttaggcgaggaagtcgaccggaactggaacgaggttgtaacacagcagtatcttttcgaccgtctcgcacacgaaattgaggccctgaaaagctttagtaaaagcgacttggtgaattggtttaaagcccataggggaccaggaagcaagatgctctcagtacacgtcgttgggtacggcaagtatgagctagaggaagacggtacgccctcctcagaggacagtaattcatcgtgcgaagtcatgcagctgacttatttgccgacctcccctctactggccgattgcatcattcccatcactgatattagggcgtttacaaccaccttgaacctcctgccttatcacaagatcgtcaaatag

SEQ ID NO: 196623 - DNA, 3264 bp, synthetic construct
  misc_feature 1..3264: note = Description of Artificial Sequence: Synthetic coding sequence
  source 1..3264: mol_type = other DNA
atggagggcaagaccggcaacaccaccgacgacgaggaggaggaggaagtggaagaagaggaagaagacgacgacgaagacagcggtgctgagatcgaagacgacgatgaggagggattcgatgatgaagatgagtttgatgacgagcacgacgacgatctggacactgaagacaatgagctggaagagctggaggaacgcgcagaggcacgcaagaagaccaccgagaagcagcagctgcaaagccttttcctgctttggagcaaactgacagatcggctgtggtttaagtccacatacagcaaaatgagctcaaccctgttagttgagacccggaacctgtacggggtggtgggcgcggagagtcgatccgcacctgtacagcacttggccggatggcaggcagaggaacaacagggggagacagatacggtgctcagtgccgccgccctttgcgttggtgtgggctcgtttgccgaccctgatgaccttccaggtctcgcccacttcctggaacacatggtgttcatggggtcattgaagtacccggatgaaaacggatttgacgcattccttaaaaagcacggggggagtgacaacgcaagcaccgactgtgaacggactgttttccagtttgacgttcagagaaagtattttaaggaggctttggacaggtgggcacagttcttcatccacccgctgatgatcagagatgccattgacagagaagtcgaagcggtcgattcggaataccagcttgcaaggcctagtgatgcaaacaggaaggagatgctgttcggttccctcgccaggcctgggcaccccatgggaaaattcttctggggcaatgcagaaacattgaagcatgagccgcgcaagaacaatatcgatacccatgcccggctgagggaattttggatgcggtactattcatctcactacatgacactggttgtccagtctaaggagacactggatacgctggaaaaatgggttaccgaaatctttagccagatccctaataatgggctgcctcggccaaatttcgggcaccttaccgacccctttgataccccagctttcaacaaactttatagagtggttcccatacgcaaaattcatgccctaaccattacatgggcgttacctcctcaacaacagcactacagagtgaaaccgctacattatatcagttggttagtgggtcacgaagggaaaggctctatcctgtcttttctccgaaagaagtgttgggccctggcccttttcggcggcaacggcgagacaggcttcgagcagaactctacctatagcgtgtttagtatttcaatcaccctgactgacgaaggatacgagcacttctatgaggttgcctacactgtctttcaatatctaaagatgcttcaaaagctggggccagagaaacggatattcgaggagattagaaagatcgaggataacgaatttcattatcaggagcaaacagatccagtcgagtatgtggaaaacatgtgcgagaacatgcagctctacccgctccaagacatattgacgggggaccagctcttattcgaatataaaccggaagtaataggggaggcactgaatcagttagttccgcagaaagccaatctggtcctgctcagtggggcaaacgagggcaaatgcgacctgaaagaaaagtggttcggtacacaatacagtattgaggacattgaaaactcatgggccgagctctggaactcaaacttcgaactgaatcctgaccttcatctgccagcagaaaacaaatacatcgccaccgattttactctgaaggcttttgactgtccagaaaccgagtatcctgtgaagatcgtcaacactccacaagggtgcttatggtataagaaggataacaaattcaaaattcctaaagcctacatccggttccacctgatttcacccttgattcagaagtcagcggccaacgtggttctgtttgacatttttgtgaacatcctgacacacaacctggccgaaccagcgtacgaggccgacgtcgcccagctggaatataagctcgttgcaggagaacacggtctgatcatcagggtcaaaggtttcaatcacaaactgcctctgctgtttcagctgatcatcgattatttggccgagttcaattctactccggccgttttcaccatgattacagagcaactgaaaaagacttatttcaacatcttaattaaacccgagactttagcgaaggacgtgcgacttctgatactagagtatgctcgctggtccatgatcgacaagtaccaggcgttgatggacggactgtctttggaaagcttgttatcctttgtgaaggaattcaagtcgcagctgtttgttgagggcctagtccaaggcaacgtgacttcaacagaaagcatggacttcctgaaatacgtggtggacaaactgaattttaaaccactagagcaggaaatgccagtgcagttccaagtggtagagctgcctagtggccatcacctttgtaaggtgaaggcacttaataagggtgatgctaattctgaggtaacggtgtattatcagagtgggacccggagcctgcgggagtatacacttatggagctattggtgatgcatatggaggagccttgctttgatttccttcgaactaaacagacactcggctaccatgtctatcctacttgcagaaacacgtccggcatcctcggtttttcagtgaccgtcggtacgcaggcaacaaaatataacagtgaggtcgtagacaagaaaattgaagaatttcttagctcatttgaagaaaaaattgaaaatctcacagaggaggcctttaacacccaggtgactgctctaatcaaactgaaggagtgtgaggatacgcacttgggggaggaggtggatcgtaattggaatgaggtggtgacccaacagtatctgttcgaccgcctcgctcacgagattgaagcactcaagtcctttagcaagagtgatctggtaaattggttcaaggcccacaggggccccggcagcaaaatgcttagcgtgcacgttgtgggttacggtaaatatgagctcgaggaggacggcaccccatcatctgaagacagtaattccagctgtgaagtcatgcagttaacatacctcccaacttcccccctcctcgcggattgtatcataccaatcaccgatattagagctttcactaccaccctcaatcttctgccttaccacaaaattgtgaagtag

SEQ ID NO: 196624 - DNA, 2244 bp, synthetic construct
  misc_feature 1..2244: note = Description of Artificial Sequence: Synthetic coding sequence
  source 1..2244: mol_type = other DNA
atggagggcaagaccggcaacaccaccgacgacgaggaggaggaggaagtagaagaagaggaggaggatgacgatgaagatagcggtgcggaaattgaagatgacgacgaagagggattcgacgatgaggacgagttcgatgacgagcacgacgacgacctcgatactgaagataacgagcttgaggagctcgaagagcgcgccgaagcccgcaaaaagaccaccgaaaagcagtccgccgccgccctttgtgtcggggtcggctctttcgctgatcccgatgatctcccaggactggcccattttctggaacatatggtgtttatgggatccctaaaatatcccgacgaaaacgggtttgacgcgtttctgaaaaaacatggcgggtcagacaacgcctctacagattgcgagagaactgttttccagtttgatgtacagcggaagtactttaaagaagcattggaccggtgggcccagttttttatccatccactaatgatcagagatgctattgaccgtgaagtggaagcagtggactccgaataccagctcgcacgcccaagcgacgcaaatagaaaggagatgctctttgggtccctagctcgacccgggcacccgatgggcaagttcttttgggggaacgccgagacactgaagcatgagccccgaaaaaataatatagatacacatgcgcggctgcgagagttctggatgagatattactccagccactatatgacactggtagttcagtcaaaagaaaccctggacactttggagaagtgggttaccgaaatcttttctcagattccaaacaatggactccctcgtcccaattttggtcatctgaccgaccccttcgatactcccgcattcaacaagctatatagggtggtccctattcgtaagattcacgctctgacgataacctgggctctaccccctcagcagcagcactaccgagtgaagccactccattatatttcctggctcgtggggcatgaggggaaggggtcaatcttgagctttttaaggaagaagtgctgggctctcgctttgttcggcgggaacggagaaaccggctttgaacagaatagcacctattctgttttttccatttccataaccctcacagatgaaggatatgaacatttctacgaggtggcttacacggtctttcagtatttgaagatgctacagaagctcggcccagagaagagaattttcgaagagattcgcaaaattgaggacaatgaattccattaccaggagcagaccgaccccgtggaatacgtagaaaacatgtgcgaaaacatgcaactataccctctgcaggacatcttaactggcgaccagctccttttcgagtataagcccgaagttattggtgaggccctcaaccagctggtgcctcaaaaggccaatctggttttgctcagtggagccaatgaggggaagtgtgatctcaaggagaagtggttcggaacacaatactccatcgaggatatcgaaaacagctgggcagagctctggaactcaaacttcgaactgaacccagatctgcacctgcccgctgagaataagtatattgcaacagacttcaccctgaaggccttcgattgcccagagaccgaatatcccgttaagattgttaataccccacagggctgtctgtggtacaagaaagataacaagtttaaaatacccaaagcctatattagattccaccttatctccccgttaattcagaaatccgcagccaatgtggttttatttgacatcttcgtgaacatactcacacataatttagccgaacctgcctacgaagccgacgtcgcccagttggaatataagttagtcgcgggagaacacggccttattatacgagtgaaaggcttcaaccataagctgccactactcttccagttaatcatcgattacttggctgaattcaactcaacgccagctgtcttcactatgatcacggaacagctgaaaaagacctatttcaacatcctaataaagccggagaccttggccaaggacgtccgtttgttgatcttggagtacgcccgatggtccatgattgataagtaccaggcacttatggatggtctcagccttgaaagtctgctctcattcgtgaaggagttcaagtcacagctgttcgtagagggtctggttcagggcaatgtaacctcaaccgtgctgtgtcagtgggcccaagattctgaaacctag

SEQ ID NO: 196625 - DNA, 3447 bp, synthetic construct
  misc_feature 1..3447: note = Description of Artificial Sequence: Synthetic coding sequence
  source 1..3447: mol_type = other DNA
atgctgcggcgggtgaccgtggccgccgtgtgcgccacccggcggaagctgtgcgaggccggccgcgaactggccgccctgtggggtatcgaaactcgcggacggtgtgaagatagcgctgcggctcgaccttttccaatcctggcaatgccagggagaaacaaggcgaagagcacctgctcgtgtccagatctgcagcccaatgggcaggatctgggagagaacagccgagtcgctcgcctcggggccgacgagagtgaggaagaaggacgccgggggtccctctcaaacgctggtgacccagaaatcgtcaaatcaccatccgatcctaaacagtataggtacattaaacttcaaaacgggttgcaagcgctgttaatttctgatttatccaacatggagggtaagaccggcaacacgacggatgacgaggaggaagaggaggtggaggaggaagaggaagatgacgacgaagatagtggagcggagatcgaagatgacgatgaggagggatttgatgatgaggacgaatttgatgatgagcacgacgacgacctggacaccgaagataacgagcttgaggagctggaagaacgcgccgaagctcgcaaaaagaccacggagaagcagagtgctgcggctctgtgtgttggcgtcgggtccttcgctgaccctgacgatctccccggcctcgcacactttctggagcacatggtgttcatgggaagcctgaagtatccagacgaaaacgggttcgacgcatttctgaagaagcatggcggatcagataacgccagcacagactgtgaacggacggtgttccagttcgatgttcagcgcaaatacttcaaggaggcccttgaccggtgggctcaatttttcatccacccgctcatgatccgcgacgccatagatcgagaggtcgaagcggtggacagcgagtatcagctggcgcggccaagtgatgcgaaccgcaaggaaatgctatttggtagcctagccagacccgggcatccgatgggtaagtttttctggggcaatgcagaaacactcaagcacgaacctcggaaaaataacattgacacgcatgcaaggctgcgcgagttctggatgaggtattatagcagccactatatgactctggtggtccagagcaaagagactctcgacacactggagaagtgggtaaccgaaatcttctctcagattcccaacaacggcctgcccaggccaaactttggccacctcacggaccccttcgacactccagctttcaataagctgtacagggtggtgccaatcaggaaaatccacgcccttacgattacatgggccctccccccacagcaacagcactatagggttaagcccttgcactacataagttggctggttggtcacgaaggcaagggaagcattcttagcttcctgagaaaaaaatgttgggccctcgcactgtttggaggtaatggtgagaccggattcgaacagaactctacatactcagtgtttagcattagtatcactctgactgatgaggggtatgagcacttttacgaggtcgcttatacggtctttcagtatctgaagatgctgcagaaactggggcctgagaaaaggattttcgaggaaattcgcaaaatcgaggacaacgagttccattaccaggaacagaccgatccggtggagtatgtagaaaatatgtgcgagaacatgcaactgtatcctctgcaggatatcttaaccggggaccagctgctcttcgaatataagcccgaggtaatcggcgaggccttgaaccagttggtgccgcaaaaggccaacctcgtcttgctgtcgggggccaacgagggcaagtgtgatctaaaggaaaagtggttcggcacacagtatagcatagaggacatcgagaacagctgggccgaactgtggaactctaacttcgagttgaaccccgacctgcatctcccagcagagaacaaatatatagctactgacttcaccctcaaggcctttgactgccctgaaacagagtatcccgtcaagattgtgaatactccccaggggtgcctctggtacaaaaaggataacaagtttaagataccgaaggcctatatcagattccacctcatcagtccgttgattcagaagagtgcggcgaacgtggtcttgtttgacatttttgtgaatattctcactcacaaccttgccgaacctgcctacgaggcagatgtcgcccagttagagtataagctggtggccggagagcatggcctcatcatcagggtgaagggatttaaccataagttgcccctgctcttccagctgatcattgactatctcgccgaatttaactcaaccccggcagtctttaccatgatcacagagcagctaaaaaagacctacttcaatattctcatcaagccagagacattggccaaggatgtcaggctattgatcctggagtacgctaggtggagcatgattgataagtatcaggctctgatggatggtctgtcccttgagagcctgttgagctttgtgaaagaatttaaatctcagctctttgtggagggacttgtccaaggaaatgtgacctcaactgaaagtatggatttcctcaagtacgtggttgataaacttaacttcaagcccctggaacaggagatgcccgttcaattccaggtcgtggaactcccttccggtcaccatctgtgtaaggtaaaggccctgaataaaggcgatgcaaacagcgaagtaacagtgtactaccagtctggcacccgctcactaagggagtacaccctgatggagttgttggtgatgcacatggaggagccttgctttgattttctgcgcaccaaacagacactcggctaccatgtctatcctacctgtcgaaacacctccgggatccttgggttcagcgtcacagtagggactcaggcgaccaaatataattctgaggtcgtcgataaaaagatcgaggagtttctgtccagctttgaagaaaaaatcgaaaatcttaccgaagaggcatttaacacccaggtgacagccttgattaagctgaaggaatgcgaagacacacatttgggggaggaggttgatagaaactggaatgaggttgtgactcagcagtacctttttgatagactggcccacgaaatcgaagccctcaagagctttagtaaaagcgacctcgttaattggttcaaagcccacagagggcccggaagcaagatgctctctgtgcatgttgtgggctacggcaagtatgaattggaggaggacggcacacctagcagtgaagactcaaactcctcctgtgaggtgatgcaattgacttacttgccaacgtccccgctcttggcgattgtgagctcgcctctattaatctccggcctaagccagcagcatagtaccttcagcccaaccattaagtag

SEQ ID NO: 196626 - DNA, 1587 bp, synthetic construct
  misc_feature 1..1587: note = Description of Artificial Sequence: Synthetic coding sequence
  source 1..1587: mol_type = other DNA
atgggcgccgccgccagccggcggcgggccctgcggagcgaggccatgtcatcagtggccgcgaaggtgagagccgctagggcctttggcgagtatctatctcaatcccatccagagaaccgtaatggtgctgatcacttgctcgccgatgcatattcgggtcacgacggaagccccgaaatgcagcccgcacctcaaaacaagcgccgcctgagcctggtgtctaacggatgctatgagggatccttgtcagaagagccttccatcagaaaaccagctggtgagggacctcagcctcgcgtgtatactatttctggagaaccagcactgttacccagcccggaagctgaagctatcgaactggcggtagtgaaaggcaggaggcaaaggcatccacaccaccactcccagcctttgagggcaagcccaggcggctcacgcgaggacgtcagccgcccttgccagtcatgggctggctccaggcaggggagtaaagaatgtcctggctgtgcacagctcgctcctggccctaccccaagagcttttgggcttgaccaaccccccttgcctgagacaagcgggcgcagaaagaagcttgagcgcatgtatagcgtggatagggtgtctgacgatattccaatacggacctggttccccaaggaaaatctgttctcatttcagactgctaccaccacaatgcaggccgtgtttcgggggtatgcggagagaaaacgccgcaaaagagagaacgattccgcaagcgtgatacaacgcaactttcgcaagcatctcaggatggtgggttcccggcgcgtcaaggctcaaacgtttgcggaacggcgcgagaggtcatttagccgatcctggtctgatcctacccccatgaaggctgatacatctcatgactcaagggattctagtgacctccagagcagccattgtacgttggatgaggcgttcgaggacctagactgggacacggaaaagggtctggaggccgttgcatgtgacaccgagggatttgtcccacccaaggtaatgctgatttcttctaaggtgcccaaagccgagtatatccctacaatcatccgacgcgatgacccatcaataattcccattctgtatgaccacgagcacgcgaccttcgaggacattctggaggaaattgaacggaaacttaatgtgtatcacaagggagctaagatttggaagatgctgatcttctgtcaagggggacctggacacctctatctcctcaaaaacaaggtggcaacttttgcaaaagtcgaaaaagaagaggatatgatacacttctggaaacggctcagccgcctgatgagcaaggtgaacccagaacccaatgtgatccatattatgggctgttatattctgggcaatccaaacggcgagaagctattccagaaccttagaacattgatgaccccctatagggtgacctttgaatctcccctcgagctgagtgcgcagggaaagcagatgattgaaacttactttgattttcgactctaccggttgtggaaatctagacaacatagcaaacttttggacttcgatgatgtactgtag

SEQ ID NO: 196627 - DNA, 984 bp, synthetic construct
  misc_feature 1..984: note = Description of Artificial Sequence: Synthetic coding sequence
  source 1..984: mol_type = other DNA
atgtacagcgtggaccgggtgagcgacgacatccccatccggacctggttccccaaggagaacctgttttccttccagactgcaaccaccacaatgcaggcggtgtttcgagggtatgccgagcggaagaggcgaaagagggaaaacgactcagcgagcgttatacaaaggaactttcggaaacaccttcgaatggttgggtctcggagagtcaaggcacaaacctttgcagaaagacgagaacgtagcttttcaaggtcgtggagcgacccaacaccaatgaaagcagacactagtcacgactccagagatagctcagacctgcagagttcacactgcaccctggacgaagcgttcgaggatctggattgggataccgaaaagggccttgaggccgtggcctgtgatacagaggggttcgtacctcccaaagtgatgctgatctcttcgaaggtccccaaggccgagtatattcccacaatcattaggagagacgacccttctattatacctatcctgtacgatcatgaacatgccacattcgaggatattctggaggagattgagagaaagttgaatgtgtaccacaaaggcgctaaaatctggaagatgctgattttttgtcagggaggcccaggccatctttacctcctgaagaataaagtggcaacctttgctaaggttgagaaagaggaagatatgattcacttctggaagcgcttgtctcggctgatgtcaaaagtgaatcccgagcccaatgtgattcatattatggggtgttatatcctcggcaaccccaacggggagaagctctttcagaatctcagaaccctgatgaccccttacagggttacttttgagagtcctctggaactgagtgcccagggtaaacagatgatcgagacatatttcgattttagactgtataggctatggaaatctagacagcactctaagttgctggattttgacgatgtgctctag

SEQ ID NO: 196628 - DNA, 438 bp, synthetic construct
  misc_feature 1..438: note = Description of Artificial Sequence: Synthetic coding sequence
  source 1..438: mol_type = other DNA
atggtgggcagccggcgggtgaaggcccagaccttcgccgagcggcgggaacggtctttttcccgcagctggagtgaccctacgcccatgaaggccgatactagtcatgactccagggattcatctgacctgcagtcatcccattgcactctggatgaagctttcgaggacttggattgggacacagaaaagggcctggaggccgtggcatgcgatactgagggattcgttccacccaaggtgatgttgatttcgagtaaggtcccaaaagctgaatatattcctacaatcatcaggcgggatgatccttcaatcattcccatcctgtacgtatcccctgctcctggactgcctccaaccgacgcgctcctcagaccccatccagggcctgcccctgctcctcaggtgcccagagtcctctggagatgttggttgtag

SEQ ID NO: 196629 - DNA, 1587 bp, synthetic construct
  misc_feature 1..1587: note = Description of Artificial Sequence: Synthetic coding sequence
  source 1..1587: mol_type = other DNA
atgggcgccgccgccagccggcggcgggccctgcggagcgaggccatgtcaagcgttgccgctaaagttcgcgctgcacgagcattcggtgaatatttgtcccagagccatcctgagaacagaaatggagcagatcatctgttagctgatgcatactccggacacgacggcagccccgaaatgcagccggcgccacaaaacaagcggagactaagcctggtctccaatggatgttatgaggggtctctaagtgaggagccctctatccgtaagccggcgggcgaggggccacagccccgagtgtataccatttctggtgagcccgccctcttgccgtctccggaagccgaggcgatcgagttagccgtcgttaagggcaggcggcagaggcaccctcaccaccattcgcagccactgcgagcgagccctggcggctcccgcgaggatgtctctaggccatgccagtcatgggccgggagccgccagggttctaaagagtgccccggttgcgcccaactcgcgcctggaccaacacccagagcgtttggattagaccaacctccattaccagagacttcaggccgacgcaagaaactcgaacggatgtacagcgtggatcgggtatctgacgacatccctattcgcacatggtttcccaaagagaatctgttctcgttccagaccgccaccacaactatgcaagccgtgtttaggggatatgcagaaagaaaaagacgcaagcgcgaaaacgacagcgccagcgtgatccagcggaatttcagaaaacaccttagaatggtgggtagccggagagttaaagcccagacctttgcggagagacgggaaagatcattttcaagatcttggtctgaccccacccctatgaaggcggatacctctcacgactcaagggacagttctgacttacagagtagccattgtacacttgacgaagctttcgaggacctcgattgggacactgagaaagggctagaggccgtggcttgcgatacagagggtttcgtgccaccaaaggtgatgctgatttcatccaaagtgccaaaagccgaatatatccccaccatcattcggcgggatgatccttctatcataccaatcttgtacgatcacgaacacgcaactttcgaagatattctggaggagattgagcgtaagctgaacgtgtaccataagggtgcaaagatatggaagatgctgattttctgccaggggggccctggccacctgtacctgttaaagaataaggtcgccaccttcgcaaaggtggaaaaagaagaggatatgattcatttttggaagcggctctcacgcctaatgagtaaggttaaccccgaacccaacgtcatccacatcatgggatgctacattcttggaaatccgaacggagaaaagctcttccagaatctaagaacactaatgacgccgtatagggtcacattcgagtctccactggagctgtccgcacaggggaagcagatgatcgaaacctatttcgattttcgactataccggctctggaagagcaggcagcattcaaaactgctcgacttcgatgacgtcttgtag

SEQ ID NO: 196630 - DNA, 1503 bp, synthetic construct
  misc_feature 1..1503: note = Description of Artificial Sequence: Synthetic coding sequence
  source 1..1503: mol_type = other DNA
atgggcgccgccgccagccggcggcgggccctgcggagcgaggccatgtctagcgtggcagcaaaggtgcgcgccgcaagggcgttcggagaatacttgtcccagtcccaccctgagaatagaaatggcgccgaccatttgctggctgacgcttactctggtcacgatgggtcgcctgaaatgcagcccgcacctcagaataagagaagactgagcttggtcagcaatggatgctatgaggggagtttgagtgaagagccaagcataagaaagcccgcaggcgagggaccacaaccccgcgtgtatactatttctggagaaccggcattattaccatctcccgaagctgaggcaatcgagttagcagtcgtgaagggtcgccggcagcggcaccctcatcaccatagccagccgttacgtgcctctcccggcggctcccgcgaggacgtatctcggccttgccagtcctgggcaggttccagacaggggtcgaaggaatgtcccggctgcgcccagctcgccccaggaccaacgcccagggccttcgggctcgatcagccacctctcccagaaacctcagggcggcggaagaagttggagcgcatgtacagtgtagaccgggtttcagacgatattcctattcgcacctggttccccaaagaaaatctttttagctttcagaccgccactaccaccatgcaagctatcagcgtcttccgcggatacgcagaacgcaagagaagaaaacgcgagaacgactccgcatccgtgatccaaaggaactttagaaaacacctgcgtatggttgggtcccggagagtgaaagctcaatctagcgatctgcaatcttcccactgtactttggacgaggcttttgaagatctcgattgggataccgaaaaaggcctggaggccgttgcttgcgatactgaaggcttcgtccctcctaaggtcatgttaatttcgagcaaagtgcccaaggccgagtacatccccacaataattcggagagacgacccttccatcattccgattctttacgaccatgagcatgccacctttgaggacatcctcgaagaaattgagaggaagcttaacgtgtatcacaagggtgctaaaatctggaaaatgcttatattctgccagggaggccccgggcatctgtatttgttgaagaataaggttgccacctttgccaaagtcgagaaggaagaagatatgatccacttttggaaacggttgtctcgcttaatgtctaaagtgaatccagagccaaatgtcatccatataatgggttgctacatccttggcaatccgaacggtgagaaactcttccagaacctgagaaccctaatgacaccctatagggtgactttcgagagcccgctcgagctctccgcccagggcaagcagatgatcgaaacctacttcgatttcagactctaccgcttatggaaatccaggcagcactctaaactgctggattttgatgacgtgctgtag

SEQ ID NO: 196631 - DNA, 1518 bp, synthetic construct
  misc_feature 1..1518: note = Description of Artificial Sequence: Synthetic coding sequence
  source 1..1518: mol_type = other DNA
atgggcgccgccgccagccggcggcgggccctgcggagcgaggccatgtcttcagtggcagccaaagtccgggctgcgcgagcgtttggagagtaccttagccaatcacacccagaaaaccgcaacggcgccgaccaccttttggccgatgcatactccgggcacgacggaagcccggagatgcagccggccccccagaacaagagacggctctccctggtgtctaacggctgctacgagggtagcctgtctgaagaaccttccatccggaagcctgcgggcgaaggtccccagccccgcgtttacaccatttccggtgagcctgcccttcttccttcccctgaagccgaggccatcgaactcgctgttgttaaaggacggagacaaaggcatccccaccatcattctcaaccactgcgggccagccccggaggctctagggaagacgtatcccgaccttgccaaagttgggccggctcccgtcaagggagtaaggagtgccccggatgcgcgcagctggcaccgggcccgaccccaagagcattcgggctcgatcagcctcctcttccagagacatccggacggcgcaagaaactggaaagaatgtattccgtcgacagggtcagcgacgatattcctatacgcacgtggtttcctaaagagaaccttttctcgttccaaaccgccactactacgatgcaagcaaattttaggaaacatttgaggatggtagggtccaggcgggtgaaagcccagacgttcgctgaaaggcgggagagatctttttcccgctcctggtccgatccaactcctatgaaggcagatacgtctcatgacagcagagattcttccgacctgcaaagctcacactgcactttggacgaggcctttgaagatctggactgggacacagagaaaggactcgaggctgtggcgtgtgacactgaggggtttgtccctccaaaggtgatgctgatcagctccaaagtacccaaggcagaatatatccccacaatcatcaggcgagatgatccgtctattatacctatcctgtatgaccacgaacatgctacgttcgaggacatcctggaggagattgaacggaaactcaacgtgtaccataagggagcaaaaatctggaagatgctcatcttctgccaaggcgggcctggccatctatacctgctaaaaaataaggttgccacctttgctaaggtcgaaaaggaagaagatatgatacatttctggaagcggctatcacgcctgatgagtaaggtgaaccctgaacccaatgtgatccacatcatgggatgctacattctgggcaatcctaatggcgaaaagctcttccagaacctacgcaccctcatgacaccgtaccgggtgacttttgagagtcccctagaactctcggctcaagggaaacagatgatcgagacttactttgattttcggctttaccgtctttggaagagtaggcagcactcaaaacttttggactttgacgacgtgctgtag

SEQ ID NO: 196632 - DNA, 1593 bp, synthetic construct
  misc_feature 1..1593: note = Description of Artificial Sequence: Synthetic coding sequence
  source 1..1593: mol_type = other DNA
atgggcgccgccgccagccggcggcgggccctgcggagcgaggccatgtctagtgtggccgctaaggtgagggctgcaagggcctttggggagtatttatcccagagtcatccagaaaacaggaatggagcggaccatctgcttgccgacgcctacagtggccatgacggttcgcccgagatgcagcctgcgcctcagaacaaacgcaggctgagtctggtgagtaatggctgttatgagggatcgctcagcgaggagccttccatccggaagcctgccggggagggcccacagccccgggtgtacactatttctggggaacctgcgctgctgccctctccagaggccgaggcgatcgaactcgcggtcgtgaagggccgaagacagcgccaccctcaccaccacagccaaccattacgagcatcaccaggagggtccagagaagacgtttcgcgcccttgccagagttgggcaggctctcgtcaaggtagcaaggaatgtcctggttgtgcacagctggcacctgggccaacaccccgagcattcggcctggatcagcctcccttaccggaaactagtgggcgtcgcaaaaagttggagcggatgtactccgttgatagggtgagcgatgacattcctatccggacctggttccctaaagaaaatttattcagcttccaaactgcgacaacaactatgcaggcaatatccgtgttcagaggatatgccgagcgtaaacgcagaaagagggaaaacgactccgcttccgtaatacagcgcaacttccgaaaacacttgagaatggtcggaagccgaagggtcaaggcacagaccttcgccgaacgtagagaacgctcatttagtagatcatggtcggaccccacaccaatgaaagcggatacgagccacgatagccgggactcttccgacctgcaaagttctcactgcaccctcgacgaggcatttgaggatctcgactgggatacggagaaaggcctggaggcggtcgcctgtgacacagagggcttcgtcccacccaaagtcatgctcatttcttccaaagtccccaaagcagaatacatcccaactattattcgccgcgatgatccctccataatcccgattctttacgaccatgaacatgccacattcgaggacattctagaagagatcgaacgcaaacttaacgtttatcacaagggcgcaaagatctggaaaatgctgatattctgccagggaggccccggacacttgtacttactgaagaacaaggtggcaaccttcgctaaggtcgaaaaagaggaagacatgatccacttctggaagcgattgtcgcgtctaatgagcaaggtcaatcccgaaccgaacgtgatccacataatgggatgttatattcttggcaatcctaacggcgaaaaattgtttcagaacttacgtacattaatgacgccctatcgggttaccttcgaaagcccccttgaattatccgctcagggcaagcagatgattgagacctactttgacttcaggttgtacaggttgtggaaaagccgtcagcacagcaaactgctggactttgatgacgtcctgtag

SEQ ID NO: 196633 - DNA, 585 bp, synthetic construct
  misc_feature 1..585: note = Description of Artificial Sequence: Synthetic coding sequence
  source 1..585: mol_type = other DNA
atgggcctgggccccctgagcagcagcctgagcccccagctgatctcttctaaagtgcccaaagcagagtacatcccgaccatcatacggcgcgacgacccatctattatccctattctgtacgaccacgagcatgctacattcgaagacatcctcgaggagattgagaggaagctgaatgtgtatcacaagggcgcgaaaatttggaaaatgctgatattctgtcagggaggacccggacatctgtatcttttaaaaaacaaagtcgcaacttttgccaaggtcgaaaaggaagaggatatgatacatttctggaaacggctgtccagacttatgagtaaggttaatcctgaacccaacgttatccatataatgggttgctacatactgggcaatccaaacggggagaaactgtttcagaacttaaggactctaatgaccccatatagggtcacgttcgagtcgcccctcgagctgtctgcacagggaaaacaaatgattgaaacatatttcgactttcgactgtacagattgtggaagagcagacagcattcaaaattactcgactttgacgacgtcctttag

SEQ ID NO: 196634 - DNA, 1524 bp, synthetic construct
  misc_feature 1..1524: note = Description of Artificial Sequence: Synthetic coding sequence
  source 1..1524: mol_type = other DNA
atgggcgccgccgccagccggcggcgggccctgcggagcgaggccatgtcatccgtggctgctaaagtgagggccgccagagccttcggtgagtatctcagccagagccaccccgagaatcgcaacggggcggaccatctcctggccgacgcctattccggtcatgacggtagcccagagatgcagcccgcccctcaaaacaagcgtcgtctctccttggtcagtaacggctgttacgagggctccttgagcgaggagccctcgatccgcaagcccgccggagaagggccacagcccagagtgtataccatctctggggagccagcgttactaccatcccccgaagctgaagccattgaactcgccgtggtgaagggaagaaggcagagacacccccaccatcatagccagcccctcagagcctcccctggtggatcaagggaggatgtgtcaagaccctgtcagtcttgggctgggagtagacaggggagcaaggaatgcccaggttgtgcccagctggcccccggccccacaccccgcgcgtttggcctcgatcagcccccacttcccgagactagtggcagaagaaagaagctggagcgtatgtatagcgtggacagagtgtcagacgacattcccatccgcacctggtttccaaaggaaaatctgtttagcttccagactgcaaccactactatgcaagcagtgggcaacttcagaaagcatctgcgaatggttggctccaggagagttaaagcgcagacttttgccgaaaggagggagcgcagtttttcacgatcttggtctgatcccacgcccatgaaagccgatacaagccacgactcccgcgatagcagcgacctgcagtcttctcactgtacgctagatgaagcgttcgaggacctggactgggacaccgagaaagggttggaggcggtcgcatgcgatacagaagggtttgtgccacccaaggtgatgcttatcagcagtaaagtacctaaggccgagtacatccctaccatcattcgacgggacgacccctctatcatacccatcctctacgaccacgaacatgcaaccttcgaagacattctcgaagagatcgaaaggaagctgaacgtttatcacaaaggggccaagatctggaagatgctcatcttttgccagggagggcccggacacctgtacctgctgaagaacaaagtggctactttcgccaaagtagaaaaagaggaagacatgattcacttctggaaaagattgagccggctgatgtccaaggtgaatccagaaccaaatgtgatccacatcatgggctgctacatcctggggaatcccaacggagaaaagttgtttcagaatttgcggacactcatgaccccttatagggtcacttttgagtccccattggaattgtctgcacagggcaagcagatgatagaaacctattttgatttccggctgtataggttgtggaagtctaggcagcacagtaaactactggatttcgacgacgtactgtag

SEQ ID NO: 196635 - DNA, 1524 bp, synthetic construct
  misc_feature 1..1524: note = Description of Artificial Sequence: Synthetic coding sequence
  source 1..1524: mol_type = other DNA
atgggcgccgccgccagccggcggcgggccctgcggagcgaggccatgtccagcgtggcggcgaaggtgcgcgcagcccgagcatttggggagtatcttagtcagtctcatcccgagaatcggaacggcgccgaccacctgctggcagacgcatattccggacacgacgggagtccagagatgcagcctgctccacagaacaaacggaggctatctctcgtgtctaatgggtgctatgaaggtagtctgagtgaagagccatccattcgcaagcccgccggagagggccctcagccacgcgtctacacaataagtggtgagcccgccctgttgccatctcctgaagctgaggctatcgagctagccgtggtcaagggccgtcggcagaggcacccgcaccaccatagccagcccttacgcgccagcccgggtgggtctcgagaagatgtatctcggccctgtcagagctgggcaggcagcagacagggctcaaaggaatgtccaggttgcgcacagctggcccccggaccaacgcctagagcatttgggcttgatcagccaccgttgcctgagacctccgggcgccgaaagaagctagagcgcatgtactcagtggatagagtgtcagacgatatacctatcagaacttggttcccaaaagaaaacctgtttagttttcagacagccaccaccaccatgcaggccatctctaacttccgcaaacatttgcggatggtcggctcgcggcgggtgaaagcacagaccttcgccgagcgacgggaaagatcattttcaaggagttggtctgatccaacccctatgaaagccgacacatcccacgatagcagagatagctcggacctgcaaagtagtcactgtaccctcgacgaagcttttgaggacttggactgggatacagaaaaaggactcgaggcagtagcctgtgatacagaggggtttgtgcctcctaaggtgatgcttatttcatcaaaggttcccaaggccgaatatattcccacaattattcgccgggacgacccatcaattatccccattctctacgatcatgaacacgctaccttcgaagacatattggaggagatagagaggaagctcaatgtctaccacaagggggcaaaaatctggaaaatgctcatcttttgtcagggcgggcctggacacctgtatctcctgaagaacaaggtcgccacttttgcaaaggtggagaaggaagaggatatgattcacttttggaagaggttaagcaggctgatgagtaaagtcaacccggaaccgaacgtgattcatataatggggtgttacattctgggtaacccgaatggagaaaagctgttccagaatttgagaaccctaatgacaccctacagagtcacctttgaatctcctctcgaactttccgctcagggcaagcagatgattgaaacgtactttgactttcgtctgtaccgattatggaagtcccgccagcactctaagctcctggactttgatgacgttctgtag

SEQ ID NO: 196636 - DNA, 984 bp, synthetic construct
  misc_feature 1..984: note = Description of Artificial Sequence: Synthetic coding sequence
  source 1..984: mol_type = other DNA
atgcagctgggccggcggctggaccccgagcggcaggccctgcacctgtgcagtggagtcgagggcgaaccctggaaagccgttgctggccgagccctggggggaatatgcctttgggtgggcggcggagcccgatcgcagggcgagcattggctgcctaccccgaagggaaacttcagaaagcacctgcgcatggtgggcagccggcgcgtcaaagcacagactttcgcagagagacgagagagaagtttctccaggtcatggagcgatcctactccaatgaaagccgatacatcccacgattcaagggacagctcggatctgcagtctagccactgtaccctggacgaagcttttgaggacctggactgggacactgaaaaaggactggaggcagtggcttgtgatacagagggcttcgtgccaccaaaggtcatgttgataagttctaaggtgccaaaagcagagtacatccctaccatcataagaagggacgaccctagcattatccctatcttatatgaccacgagcacgcaacgttcgaggatatccttgaagaaatcgagcgcaagttaaatgtgtatcacaaaggggcaaagatctggaaaatgctaatcttctgccagggtggtcctggccacctgtatctgctgaagaataaagttgcaacattcgctaaggttgagaaggaggaggacatgattcatttttggaaacgattatcgcgcctcatgagcaaggtcaatccagaacccaatgtgatccatatcatgggatgttatatcttgggaaacccaaatggcgagaaactctttcagaacctacgcaccctcatgacgccttatcgcgtgacttttgaatctccgcttgagcttagcgcgcagggcaagcaaatgatcgaaacatatttcgacttcagactctataggttgtggaagtctagacagcacagcaagctgctggatttcgacgacgtcctctag

SEQ ID NO: 196637 - DNA, 648 bp, synthetic construct
  misc_feature 1..648: note = Description of Artificial Sequence: Synthetic coding sequence
  source 1..648: mol_type = other DNA
atgcccggcgaggccaccgagaccgtgcccgccaccgagcaggagctccctcagccgcaggcagagaccgggtccggcacagagagcgactctgacgagtccgtccctgagttagaagaacaggacagtacacaggccacgacccagcaggcgcagctcgccgctgccgctgaaattgacgaagagcccgtgtcaaaagctaaacaatctcggtccgaaaagaaggctaggaaggcaatgagcaagctcgggttacgacaggtgactggagtgactcgggtgaccattcgtaaatcgaaaaacattttattcgtgatcaccaagcctgacgtttataagtcaccagcatccgatacctatattgtgttcggagaggcgaagatcgaggacctctcccagcaggcccaactcgccgccgccgagaaattcaaagtgcagggcgaggctgtctcaaatatccaggagaacactcagacccccacggtgcaggaggaatcggaggaggaagaggtggacgagacgggcgtcgaagttaaggacatcgagctcgtaatgagccaggctaacgtgagccgagccaaagcggttagagccctgaagaacaatagtaacgatatcgtcaatgccatcatggagcttacaatgtag

SEQ ID NO: 196638 - DNA, 648 bp, synthetic construct
  misc_feature 1..648: note = Description of Artificial Sequence: Synthetic coding sequence
  source 1..648: mol_type = other DNA
atgcccggcgaggccaccgagaccgtgcccgccaccgagcaggagcttccacaacctcaggctgagaccggaagcggcacagagtcagactcagacgaaagcgtgcccgaacttgaggagcaggatagtacccaggctactactcagcaggctcagctggcagctgctgcggaaatcgatgaggaacccgtgtctaaagcaaagcagagtcgcagtgagaaaaaagcacggaaagccatgagcaaactgggcctcaggcaagtaaccggcgtcacaagagtaacaattcgcaagtcgaaaaacattcttttcgtgattaccaagcccgatgtatataagtctcccgcttctgatacgtatatcgtgttcggagaagccaaaattgaggacctgtctcagcaggctcagctagctgccgcagagaagttcaaggtgcagggtgaagccgtgtccaacatccaggagaatacccagacacctactgtccaggaagagtcagaggaagaggaagtcgacgaaacgggggtggaggtgaaagacattgagttggtaatgagtcaagccaacgtcagcagggcaaaagccgtaagggctttgaagaataacagcaacgacatcgtaaatgcgatcatggagctgaccatgtag

SEQ ID NO: 196639 - DNA, 6237 bp, synthetic construct
  misc_feature 1..6237: note = Description of Artificial Sequence: Synthetic coding sequence
  source 1..6237: mol_type = other DNA
atgcccggcgaggccaccgagaccgtgcccgccaccgagcaggagctccctcagccacaggcggaaactgccgtgttacccatgtcttcagccctgtccgtaaccgccgccctcggtcagccaggccccactctccctcctccgtgctcccccgccccgcaacagtgccccctcagcgctgcaaatcaggccagcccttttccatcaccttccacaatagcgtcgaccccactggaagtccctttcccccagtcttcttctggcacggcactaccgctcggcactgccccagaggctccaacttttctgcccaacctcataggacctccgatctcacccgctgcactggccctggcttcccctatgatcgcaccaaccctgaaaggcaccccgtcctcttctgctccactggcactggtagcgctcgcaccccatagcgtgcaaaaatcctccgcctttcctcccaacctcctgacaagtcccccctcagtggcagtggccgaaagtggttcagtgataaccctatcagcacccatcgcgccgagcgaacctaagaccaaccttaacaaagtccccagcgaggtcgtaccaaacccaaagggcactccatcgccaccatgcatcgtctcaaccgtgccctaccattgcgtgacaccaatggccagtatccaaagtggcgtagccagcttgccgcagaccacaccaaccactacacttgcaattgctagcccacaggtgaaagatacgaccattagtagcgtactgatctcaccccaaaaccccggctccctaagtcttaaagggcccgtatcaccacccgcagcgctgagcctcagtactcagtcgctgcctgtggtgacatcttcacagaaaaccgccgggccaaatacaccccctgatttcccgatatccctcggcagtcacctcgctcctctacatcagagttccttcggctcagtgcagctgctgggacagaccgggccatccgcattgtccgatccgacagtgaaaaccatttccgtcgaccacagtagcacgggagcatcctatccctcacaaaggtctgtgattccaccgttaccatcaagaaatgaggtagtccccgccaccgttgccgccttccccgtggtggctcccagtgtggataagggcccgtcgactatttcatccatcacgtgctcaccttctggttcactgaacgtggcgacgagcttctcactgtcccctacgaccagtttgatccttaaatcctccccaaatgccacgtatcattatcccctggtggcccaaatgccggtgtcttccgttgggaccacacccctagtggttacgaatccttgcaccattgcagcagcccccaccaccacgtttgaagtagctacatgtgtaagccccccaatgagctcaggcccgatcagcaatattgagccgacttctcccgccgcactggtgatggccccagtggcgcccaaggagccaagcacgcaggtagcaacgactttgaggattcctgtcagtccacccttgcctgaccccgaggacctcaaaaatctgccatcttcagtgctagtcaaattccctacccaaaaggatctgcagaccgtacccgcgagcctcgagggtgccccgttcagccccgcgcaggccggcctcaccactaaaaaggaccctacagtactgccactggtccaagccgcccccaagaattctcctagtttccaatctaccagttccagtccagagattccgcttagtcccgaagcaactctggccaagaagagtctgggagagcctctgcctattggcaaacccgcatctagcatgactagtccactgggcgtgaatagtagtgcctcagtgattaaaacagatagctacgccggcccagactccgctgggcctctactgaagagctctttgatcacgccaaccgtggctgcctttcccctcgaaagtgccgatcccgccggggttgcccccactaccgcgaaaggcactagtacctacacaacaacggcttctccattcttagaaggaacagtatcattagctcccaagaaccatccggttaaagagggcactctgactacgttacctctggtcccaacagcctcagaaaactgcccagtggccccctcgcctcagaacacctgcgcaccactggccacactggtgctggccccggaaatccccaaaagtgtgccttcaccgtctctgccccccgctggcactccacccggaacaaagaaggtagacggaatctctcacacttcagcacttgcccccgtggcctcgagccccaaagaatgtccgacagaggattccggtgctagtgccacggcgagttctaaaggaacgctgacttatctcgccgactctccttcaccattaggtgtgagcgtgagtccccagaccaagcgtcctcctaccaagaagggcagcgcaggcccagacacccctatcgggaacctctctagcccggtgtcacctgtagaagcttcattcctgcctgaaaattctctctctttccagggcagtaaggactcacccgccacaacgcactctccaacaccaccaagccccaagggcgctccaaccccctctgctgtgacgcctctgagccctaagggggttaccctgcctccaaaggaaacaccgactccatctgtggttaacctcccattccctaaagaggggcccgctacccctgcccctaagcaggcacccgcgctctcaatgacatcctcgagtcccaagaaagcccgcgcaacccccgctcccaaaggaatccctgccagtccttcccctaagggtgctcctaccccccccgcagcaacaccgccttcgcccaaggggggtcccgcgaccccatctccaaaatgggcccccactcccccagcagccacgcctccctccccaaagggcgggcccgccacaccttcaccaaaaggcgcaccaacaccccctgcggcaacaccaccatccccgaaagggggccccgcaaccccatcccctaagggcgctcctacacctcccgccgtgacccccccatcaccgaagggctcacccgctgcaactccgtttccaaaaggggctagcacgccaccggcagctactccgccctctccaaagggatcgcccgctgctacaccactgcctaagggagccccaacaactcccgctgccacactgccatctcccaaggggggtcccgcaacaccaagtctcaagggtgctcctacaccacctgcagcgaccccgccctcccccaaaggcggccccgccacaccgtcacccaagggtgccccaatgcccccagcggcaaccccacccagtcccaaaggcggcctggccacccccccccataagggcgctcccaccactccggcggcaaccccgccatccccgaagggagggctggctactcccccgcccaagggggcccccaccacaccagccgcaacaccaccatcgcctaaaggcggactggctactccacctcccaaaggcgcccccaccacccctgccgccaccccgcccagtcccaagggaggcctcgccacgccatcaccaaagggagccccgacaacacccgccgctacaccacccagccccaaaggcgggctggccacaccttctcctaaaggagccccaacaacccctgcagcgaccccccctagtccaaagggggggctcgctacaccgagtcccaaaggtgcccccaccacacccgcagccactcccccatctcctaaaggcgggcccgcaacccctccacctaaaggcgcccctacaccccccgcagccactccaccctcgctgaaaggagggcttgcaacccctccccacaagggcgcgcctaaccctgcagtggttacacctccctcacccaaagggggtccagcaacctctccccccaaaggggctccgaccccccccgccgccactccacctagcccaaagggatcgcccggaaccccccccccaaagggagccccaactccccccgccgtcacacctcccagtccaaaggggactcccacgctgcctgccaccacgccatcatccaagggagggccaacaacccctagtagcaaggagggaccaacaccccccgctgccacaccttcacataaaggcggccctgccatgactcctccgtcccctaaaagaggccctgccatcccgtccccaaaaggtgaccccacttcccctgctgtaataccattgtcacccaaaaaggcccccgccacccccgtcacacgcgagggggctgcgactcctagtaaaggtgatttgactccgcctgcggttacccctgtgtctttgaagaaagccccggccacttcagcccctaagggtggcccggcaactcctagctctaagggagaccctaccctgcccgccgtcaccccaccttcacctaaagaaccgcccgcacctaaacaggtagcgacctcatcgagtccaaaaaaggccccggctactcccgcccctatgggcgcccctactttacccgccgtcatccctagtagccccaaggaggtccccgccaccccttcctccagaagagatccaatcgctccaactgcaactctgctgtccaagaagacaccagcaactttggcccccaaggaggccctcatccccccagctatgaccgtgccctcgcctaaaaaaactcccgcaatcccaaccccaaaggaggcccctgctacaccctcttccaaggaagcctcatctccaccagccgtgaccccttctacctataagggtgcgccctctcctaaagaactgctgatacccccggccgtaacgagcccatcccccaaggaggctcctactcctccagctgtgaccccgcctagtcccgagaaaggaccagccacaccagctccgaagggtaccccaacctcgccccccgttacaccctccagcctgaaggactccccaacctctccagcctccgtcacttgtaagatgggtgccacggtaccccaggctagcaaggggctgccggcaaagaagggccctaccgcgctgaaggaggtcctggtcgcccctgcccctgagtcgaccccaatcatcaccgcgccaacacggaagggaccgcaaacaaaaaaatcatctgctacttccccccctatttgtcccgatccctctgccaagaatggtagtaagggacctctttccacagtggcccccgctcccttgctgccagtacagaaggacagtagtaaaaccgctaaagggaaagatgcctctcattcaccaaaagggccactcgctccccccgagagtaaagcctcaacaccgttgactgccgcagcgttcgaaaaggtgctccctaaacctgaatctgcctctgtttccgcagctccctccccacctgtctccctccccctggccccctcaccggtcccgacattgcctccaaaacagcagtttctgccttcttcaccaggcctggttctggaatcaccctcgaagccactcgctccggctgatgaggatgagcttctgccgctgattcctcctgagccgatcagtggaggtgttccattccaaagcgttctggtgaatatgcctacacccaagtccgcaggaatacccgtgccaacccccagcgcaaaacaaccagtgaccaagaacaataaaggttccggtactgagtcggatagtgatgagtctgtgcctgagctggaggaacaggactcgactcaggccacaacacaacaggcacaactggctgctgccgcagaaatcgatgaagaaccagtaagcaaggcaaagcaatcgaggtcagagaaaaaggcccgcaaagcgatgtcaaagcttgggctgcgccaggttacaggagtcacccgggtcaccattcgcaagtcgaaaaacatcctgttcgtaatcactaaacccgatgtctacaaatctcccgccagcgatacatacattgttttcggtgaagccaagattgaagacctaagccagcaggcccaactggcagcagctgagaaatttaaggtccagggggaagcagtaagtaacattcaagaaaatacccagactccaactgtccaagaggaaagtgaggaggaggaggtggacgaaaccggcgttgaggtgaaagacatcgaactggtcatgtcccaagctaatgtaagccgagccaaagcagtgcgggcacttaaaaacaacagcaacgacatcgtgaatgccattatggagttaacaatgtag

SEQ ID NO: 196640 - DNA, 648 bp, synthetic construct
  misc_feature 1..648: note = Description of Artificial Sequence: Synthetic coding sequence
  source 1..648: mol_type = other DNA
atgcccggcgaggccaccgagaccgtgcccgccaccgagcaggagcttccacagccccaagcagagaccggatcagggaccgagtccgatagcgatgaatctgtgcccgaactagaagagcaggatagtacacaggctactactcagcaagcccagctggccgcagctgcagagatagacgaagaaccagtctccaaggctaaacagtctagatcagaaaaaaaggccagaaaagcaatgagtaagctgggcctccggcaagtgacgggtgtgactagagtgaccattaggaagtccaagaacattctcttcgtaatcacgaagccagacgtatataagtcgccagcctccgatacatatatagtcttcggcgaggcgaagatcgaggatctttcgcaacaagctcagctggccgccgccgagaaatttaaggtgcagggcgaggccgtctcaaatattcaggagaacacccagacccctactgtgcaggaagagtctgaagaggaagaagttgacgaaaccggcgtggaagtcaaggatatcgagctagtaatgagtcaagcgaacgtctcccgagcaaaagctgtgagagcgctgaaaaacaacagtaacgacatcgtcaacgccataatggaactgacgatgtag

SEQ ID NO: 196641 - DNA, 21 bp, synthetic construct
  misc_feature 1..21: note = Description of Artificial Sequence: Synthetic coding sequence
  source 1..21: mol_type = other DNA
atgcccggcgaggccacctag

SEQ ID NO: 196642 - DNA, 597 bp, synthetic construct
  misc_feature 1..597: note = Description of Artificial Sequence: Synthetic coding sequence
  source 1..597: mol_type = other DNA
atgcccggcgaggccaccgagaccgtgcccgccaccgagcaggagttgccacagccacaagccgaaaccgggagcgggacagaatccgattctgatgagtccgtgcccgagctagaagaacaggacagtactcaagcaacaacccagcaggcccagctagccgccgctgctgaaatcgatgaggagcccgtgagcaaagctaagcagagccgcagcgaaaagaaggcgcgcaaggccatgagcaaacttggcctgagacaggtgaccggcgtgactagggtaactatcaggaaatcaaagaatatactattcgttatcaccaagccagatgtgtataaatctccagcctctgacacctatatcgtctttggtgaggctaagatcgaagatcttagtcagcaggcccagctcgctgcagcagagaagtttaaggtccagggggaagccgtctctaatattcaggagaacacccagacccctacagtgcaggaagaaagcgaagaggaggaggtcgacgagaccggcgtggaggtaaaggatatagagttggtgatgtctcaggccaatgtttctcgcgcaaaggctgtgcgcgcctag

SEQ ID NO: 196643 - DNA, 381 bp, synthetic construct
  misc_feature 1..381: note = Description of Artificial Sequence: Synthetic coding sequence
  source 1..381: mol_type = other DNA
atgcccggcgaggccaccgagaccgtgcccgccaccgagcaggagctacctcagccccaggccgagacaggctccgggaccgaaagcgactctgatgagtccgtgccagaactggaggagcaagattccacccaggccaccacccaacaagcacagctggccgccgccgctgagattgacgaagagcccgtaagtaaggcaaagcagtcccgctccgagaagaaagcaaggaaggccatgagtaagctcggcttgcgccaggttaccggagtcacccgggtgacaatacgcaaatccaagaatatcctgttcgtgatcaccaaaccagatgtatataagagtccggcgagcgacacctacatcgtctttggggaagcatag

SEQ ID NO: 196644 - DNA, 648 bp, synthetic construct
  misc_feature 1..648: note = Description of Artificial Sequence: Synthetic coding sequence
  source 1..648: mol_type = other DNA
atgcccggcgaggccaccgagaccgtgcccgccaccgagcaggagttaccacagccacaggcagagacaggaagtggcacggaaagcgattcagacgagtcagtgcctgagctcgaggagcaggacagtactcaagccacaacgcagcaggctcaattggccgctgccgcggagattgacgaggagcctgtgagtaaggcaaagcaaagccgatctgagaaaaaggctaggaaggctatgagcaagttagggcttcgccaggtaacaggagtgacaagagtgacaatcaggaagtcaaagaacatcctctttgtgatcaccaaacctgacgtctacaaatcccctgcaagcgatacatacattgtgttcggtgaggcgaagatagaggatttgtctcagcaggctcagctggcagcagcggagaaatttaaggtccagggcgaggcagtatcaaatattcaggaaaatacgcagactccaacagtgcaggaggagagcgaggaggaggaagtcgatgagactggcgttgaggtcaaggacatcgagctggtcatgtcccaggcaaatgtgtccagggcaaaggccgtccgagcactgaagaacaatagcaacgatatcgtcaatgccatcatggagctgacaatgtag

SEQ ID NO: 196645 - DNA, 2778 bp, synthetic construct
  misc_feature 1..2778: note = Description of Artificial Sequence: Synthetic coding sequence
  source 1..2778: mol_type = other DNA
atgcccggcgaggccaccgagaccgtgcccgccaccgagcaggagttgccccagccccaagccgagacagccgtgctcccgatgagctctgcattaagcgtgactgcagcgttaggacaacccggccccaccctacctccaccctgttctccagccccccagcagtgccccctctccgccgcaaaccaggcctcgcccttcccaagtcccagcacaattgctagcaccccgctggaagtcccctttccacagagcagttccgggactgccctccctcttggtaccgcacccgaagcccctacatttctgccaaacctgattggaccaccaatctccccagctgcactcgccttagcttctcccatgatcgcccccaccctcaaaggaactcccagcagtagtgcgccactggctttggtagcattagctccacactccgtgcaaaaatcctcggcgttcccgcctaatcttttgacttctcctccttccgtagctgtcgcggagtctggatcagtcatcacactgagcgccccaatagcgccctctgagcccaagactaacctcaacaaggtcccaagcgaagtggttcccaatcccaaggggacaccctctcctccctgcattgtctcaacagtcccctaccactgcgttacccctatggcttcgatccagagcggagtggcctccctaccacagactacccccaccacgacactggccatagcaagcccccaagtcaaagacaccacaatctcatctgtcctcattagtccccagaatccggggtcactgtcactgaaggggcctgtatccccacctgcagccctctctctttccacacagtcacttcctgtcgtcacctcctcccagaagactgccggaccaaatacaccacccgatttccctatttctctgggatcccatctagctccactccaccagagctctttcggttccgtccaactgctcgggcaaacagggccttccgccctgtctgatccgacagtaaaaaccatttccgtcgaccatagcagcaccggtgcctcttacccttcccagagaagcgtgatccctcccctgccctctagaaacgaagtggtccccgccacagtcgctgcgtttcctgttgttgcccccagcgtggacaaaggaccaagtacaatcagtagtatcacatgttctccctccggctctctgaacgttgctacctccttctcactgtcccctaccacctctctcatcttgaaatcttctccaaatgccacctatcactatcctctggtggcccagatgcccgtttcaagcgtggggaccactcccctagttgtgacaaacccctgtacaatcgccgcggccccaacaaccaccttcgaagtcgctacatgtgtctcaccccccatgtcctctggcccaattagcaatatcgagcccacaagccccgccgctcttgtcatggctccagtggcccctaaggagcccagcacccaagtggctaccacccttagaatccctgtaagcccacctcttccagaccctgaggacttgaagaatctgccctcctctgtgctcgtgaagttccctacccagaaagaccttcagacggtgcctgccagtctcgagggagcgcccttctctccagcacaggccgggcttacaaccaagaaagaccccacagtcctgccattagtccaggctgcccccaagaattcccccagcttccagagcaccagctcttcacctgaaataccgctttctccagaagccaccctcgcaaagaagtcactgggtgagccactgccaattgtggccgcgtttccactggagagcgctgatcctgcgggcgtagctcccactactgcgaaggctgctgctttcgaaaaggtattgccaaagccagagtctgctagtgtctcggcagcccccagcccaccagtctcattgcctctggcacctagccctgtcccaacccttcctcccaaacagcagttcctgccgtcgagccccggtctagtactggaatcccccagcaagcctctggcacccgccgatgaggacgaattgctccctctgatccccccagaacccatcagcggcggtgtaccattccagagcgtgctggtcaatatgcctactcctaaatctgctgggatccccgtgccaactcctagcgccaagcagcctgtgactaagaataacaaggggtcagggacagagagcgactcagacgagtccgtgccagaactggaagaacaggattcaacccaagccacaacccagcaggcacagctcgctgcagccgccgagatagacgaggagccggtgtctaaagcgaagcagtctcggtccgagaagaaggctcgaaaggctatgtccaagctagggttgagacaggtgacaggcgtcacccgggttacaataaggaaatccaagaacattctgtttgtcataactaaacccgacgtgtacaagagtcctgcctctgacacatatatcgtctttggcgaggctaaaattgaagacctgtcccaacaagcccaactggccgccgcggagaagtttaaggtgcagggggaagccgtttcgaatatccaggagaacacccagaccccaactgtgcaggaggaaagcgaagaggaagaagtggatgagaccggggtcgaagtgaaagatatcgagcttgtaatgtctcaggccaatgtaagtagagcgaaggcagtaagggcgctgaagaataatagcaatgacatcgtgaatgctattatggaattgactatgtag

SEQ ID NO: 196646 - DNA, 306 bp, synthetic construct
  misc_feature 1..306: note = Description of Artificial Sequence: Synthetic coding sequence
  source 1..306: mol_type = other DNA
atgcccctggaggacgaggtggtgcccccccaggtgctgagcgagccaaatgaggaggccggcgctgctctaagccccctgccagaagtacccccctggaccggggaggtaagtcccgcccagcgcgatggtggagccttaggccgggggccgtgggactccagcgaccggagtgcccttttaaagtcgaaactgagagccctcttaacagcacctagatccctccgcagaagttcgtgctttggcgggagaatggatcgcattggggctcagagcgggctgggttgcaattccttccgctactag

SEQ ID NO: 196647 - DNA, 456 bp, synthetic construct
  misc_feature 1..456: note = Description of Artificial Sequence: Synthetic coding sequence
  source 1..456: mol_type = other DNA
atgagcagcttcagcaccaccaccgtgagcttcctgctgctgctggcttttcagctgctcggccagactcgcgctaaccctatgtacaatgcagtatctaacgcagatcttatggattttaagaacttgctggaccatcttgaagagaaaatgcctcttgaagatgaggtggtccccccccaagtactgtctgaacctaatgaggaggcaggagctgctttatcccccctgcccgaggtgcctccctggaccggagaggtctcacctgcacaacgcgacggaggtgctttaggacgcggtccgtgggattcatccgatcggagcgccctcctgaagtcaaagctgcgggccctcctgaccgcaccacgctcactgagacgcagttcatgctttggtggcaggatggaccggattggagctcaatccggcctggggtgtaacagcttcaggtactag

SEQ ID NO: 196648 - DNA, 768 bp, synthetic construct
  misc_feature 1..768: note = Description of Artificial Sequence: Synthetic coding sequence
  source 1..768: mol_type = other DNA
atggagcagtacgccaacaacctggaggagctggtggaggagcggacccaggcctacctggaagagaagcgtaaggccgaagccctgctgtaccagattctgcctcattccgtcgctgagcagctcaagcggggagagaccgtgcaggctgaagcctttgacagtgtgactatctattttagtgatatcgttggattcaccgccctctctgccgagagcacacctatgcaggtggtcacacttttgaacgacctgtacacttgtttcgacgcagtcatcgataatttcgacgtctacaaagtggaaactataggtgatgcctatatggtggtgtctggacttcccgttagaaatggccgcctacacgcctgcgaggtcgctaggatggcgctggctttattagacgccgtcagatctttccgtatccgtcacaggccccaggaacagctccggttgaggataggtattcacaccggaccagtctgtgccggtgtggtcgggctgaaaatgccgcggtactgtctatttggcgacactgtcaacaccgcttctcgtatggagagcaatggggaagctctgaagatccacttaagctcagaaactaaagctgttctggaggaattcggaggattcgaactggagcttcgcggtgatgtggaaatgaaagtggagggagaggcttctgccctcccaactttttggggcccacgaggttcctatccatcccaggcagccaacgctacaccaattccgaaggctctgatctag

SEQ ID NO: 196649 - DNA, 3186 bp, synthetic construct
  misc_feature 1..3186: note = Description of Artificial Sequence: Synthetic coding sequence
  source 1..3186: mol_type = other DNA
atgcccggcccccggcggcccgccggcagccggctgcggctgctgctgttactgctacttccccctctattgctccttctgaggggaagtcacgccggtaacctaaccgtggcagtcgtgctgcctttggcaaacacatcatacccatggtcatgggcccgcgtgggacctgccgttgaactggcactcgcgcaagtaaaggcccggccggacctgttaccgggctggacagttagaaccgtactaggctctagcgagaacgccctgggtgtatgttccgacaccgcagcgcccctcgcagctgtcgatttgaaatgggagcataatccggccgtttttctgggacctgggtgcgtgtatgcggctgctccagtcggccggttcactgcacattggcgggtgcctctgctgacggctggagccccagcccttgggtttggtgttaaagatgagtatgctctaacgaccagggccggccctagttacgcaaagttaggtgattttgtggccgcacttcaccggcggttaggttgggagcggcaggcgttgatgctctacgcctatcgccccggtgacgaggaacactgttttttccttgtagaggggctgttcatgagggtccgagatcgactgaatattaccgttgaccatttggagtttgccgaggacgatctcagtcattatacacgcctcctgagaacaatgccgcgcaaaggccgcgtcatctatatttgcagttcgcctgacgccttcagaactcttatgttgctggcactagaggcaggactgtgcggcgaagactacgtcttcttccacctggatatatttggccaatctctccagggaggccagggccccgctccacgacgaccgtgggaacggggcgacggccaggatgtatctgccagacaggcgttccaagctgcaaagattattacgtataaagacccagataaccctgaatatctcgagtttttgaaacagttgaagcatctggcttacgagcagtttaattttaccatggaagacggactggtgaacactattccggcatcttttcatgacgggttactgctttacattcaagccgtgaccgagacactcgcccacgggggtacggtcacagatggagagaatattacccagagaatgtggaataggtcttttcaaggagttacagggtacctgaaaatcgatagctctggtgacagggagaccgacttcagcctgtgggacatggaccccgagaacggtgcttttagagtggtgctgaattacaatgggacgtctcaggagctggtggcagtgtctggacgaaaacttaactggcctttggggtatcccccaccagatatacctaagtgtgggtttgacaacgaagatcccgcttgtaatcaagatcacttatctacactcgaagtactggccttggtcggttctctgagtttattggggatcctgatcgtttcattcttcatttataggaagatgcagttagagaaggaacttgcctctgaattgtggcgcgtaaggtgggaggacgtggagccttcatccctcgaaagacatctgagaagcgcaggtagtcgactgacattaagcggacgtggttcaaattacggatctttgctaactacagaagggcagttccaagtgttcgccaaaactgcttattataagggcaatctggtcgctgtaaagagagtgaatcgaaagagaatcgaactcacccgaaaggtgctgttcgaacttaagcacatgcgggatgtgcaaaatgaacacctcacccgttttgtcggcgcatgcacggatccccccaatatttgtattctcacagaatattgtcccagaggcagtctgcaggatatccttgaaaacgagtcaatcacattggactggatgttcagatattccctcaccaatgacatcgtcaaagggatgctcttcctgcacaacggggctatctgctcccatgggaaccttaaaagctctaactgtgtggttgacggtcgatttgttctgaaaataaccgactatgggttagaatcttttcgggatctcgatcccgagcagggccacactgtgtacgcgaaaaagttatggacagcccctgaattactgcgaatggcatctccgccagtgcggggatcgcaagccggtgacgtgtactcattcggcattattttacaagaaattgctctgcggtctggggtttttcacgttgaaggattggatctgtctcccaaagagatcatcgaaagggtgacacgcggggagcagcctcctttccgacctagtcttgcacttcagagccatttggaagaattaggcttgctgatgcaacgctgctgggccgaggacccccaggaaaggcccccattccagcagatccgtttgacattgcgcaagttcaatagagagaacagctccaatattctcgacaatctgctgagccgaatggagcagtatgccaataatctcgaggagttggtggaagaacggacacaggcgtacttggaagaaaaacgcaaagcagaggcgttgctgtaccagatactgccccacagcgttgctgagcagctgaaacgcggtgagaccgtccaggccgaggcgtttgacagtgttactatatacttctccgacattgtggggtttaccgcactgtcagccgaaagcacacctatgcaggtggtgactctgctgaatgacctttacacctgctttgacgctgtcattgacaattttgacgtctacaaagtggagaccatcggagatgcttacatggttgtgtccgggctccccgttaggaatggccggctacacgcatgcgaggtggcgcggatggctctggccttactcgacgccgtgcgttccttcagaatcaggcaccggccgcaagagcagctcaggcttcggatcgggatccatactggtcccgtttgcgcaggggtggtggggctcaagatgcccagatactgtttattcggggacaccgtgaatacagccagcagaatggaatccaacggggaggctctgaagatccacctctctagtgaaacaaaggctgttctggaagaattcgggggattcgagctggagctgaggggggacgtcgaaatgaagggcaagggaaaggtacggacctattggcttctgggagaacgtgggagctccactcgagggtag

SEQ ID NO: 196650 - DNA, 1623 bp, synthetic construct
  misc_feature 1..1623: note = Description of Artificial Sequence: Synthetic coding sequence
  source 1..1623: mol_type = other DNA
aagatgcagctggagaaggagctggccagcgagctgtggcgggtgcggtgggaagacgtggagccaagctctcttgaaaggcacttaaggtcagctggaagccgtcttacactgagtggacgtggaagcaattatggaagtctacttacgaccgagggacagttccaggtattcgctaagaccgcctactataagatgcgggacgttcagaatgaacacctgacaaggtttgtcggggcgtgtaccgatccccccaatatctgcattctcacggagtattgcccaaggggatccctgcaggacattctcgagaacgagagcatcactctcgattggatgtttaggtactcactaacgaacgatatcgtgaaagggatgctgttcctgcacaacggcgccatctgtagtcatggaaacttaaagagctctaattgtgtggtggacggcagatttgtgctcaagattacagattatggcctcgagagtttcagggatcttgacccggagcaaggccacaccgtctacgccaagaaactgtggacggctccagaactcttacggatggcttcgcccccagtgcgaggatctcaggccggcgacgtgtactcgttcggaatcatcctgcaggagatcgcccttaggtcaggcgtgttccacgtagaaggcctggacctgtcacccaaggaaataatagagagagtgacgcgaggcgagcaaccccccttccgcccctctcttgccttgcagagtcaccttgaagagttgggcctgctgatgcagcgctgttgggcggaagacccccaagagcggccaccatttcagcaaatcaggcttactctccggaaattcaaccgagagaactcctcgaacatcctggacaatctgctgtctcgcatggaacagtacgcaaacaatctggaggagctcgtagaggaacgcacacaagcttacctggaggaaaagaggaaggctgaagccctactgtaccagatccttccacactcagtggccgaacaactcaagcgcggtgagactgtccaagccgaagcctttgactctgtgactatatacttcagcgatatcgtcggtttcacagcgctttcagcagaaagtacacccatgcaggtggtgactctgctgaacgacctgtatacttgtttcgatgccgtcatcgacaacttcgatgtgtataaggtcgaaacaatcggcgatgcatacatggtggtttccggacttcctgtgcggaatggccgactgcacgcctgtgaagtggcccgaatggccctggcactccttgatgctgtgcggtccttccgaatccgccatagaccacaggagcagctgcggctccggattggcatccacactggaccggtatgcgctggggtcgtgggccttaagatgccacgctactgtctgttcggggatacagtcaatacagccagtaggatggaatccaatggagaagcacttaaaattcacttatccagcgaaacaaaggccgtactcgaagaatttggtggatttgagctagagttaagaggtgatgttgaaatgaagggcaaaggcaaggtccgcacttactggctcctgggagaacggggtagctcaacccggggttag

SEQ ID NO: 196651 - DNA, 3144 bp, synthetic construct
  misc_feature 1..3144: note = Description of Artificial Sequence: Synthetic coding sequence
  source 1..3144: mol_type = other DNA
atggccctgcccagcctgctgctgctggtggccgccctggccggcggagtgcgcccccccggcgctcgaaacctgacacttgccgtggtgctacctgaacataacctctcttatgcgtgggcctggcctcgcgtcggtccggccgtggctctggctgtcgaggctctggggagggcccttccagtggacctccggttcgtgtcatcagagctcgagggggcctgctctgagtacctagcccctctctcagccgtggaccttaaactgtaccacgaccctgacctactgctgggccctggctgtgtctatcccgccgcctctgtggctcgatttgcttcccactggaggctaccattgctcaccgcgggcgcggtggccagtggcttctctgctaaaaacgatcactatagaacattagtccggacaggtccgagcgccccaaagctcggcgagttcgtggtcacccttcacggccactttaactggactgcacgcgcggcactgctctacctggacgctcgaacggacgaccgcccccactattttacgatcgagggagtgttcgaggccttgcaggggtcgaatttgtccgtgcagcatcaggtctatgcccgcgagcccggtgggccagagcaagccacccacttcattagagcaaacggacgtatcgtctacatctgtgggcccctcgagatgttgcacgaaatcttgcttcaagctcagagagagaatctgaccaatggagactacgtttttttctacctagacgtgtttggggaatcattgagggcaggccctacacgggccacggggcggccttggcaagacaatcggacccgggaacaggctcaggctcttagagaggccttccaaactgtccttgtgattacctatagggaaccccccaaccccgaataccaggaatttcaaaaccgtttactcataagggctcgagaagattttggtgtggaactcgggccttctctcatgaacctgattgccggttgcttctatgacggcatccttctgtacgccgaagtgctgaacgaaaccattcaggaaggaggaacgagggaggacggcctgaggatagtcgagaaaatgcaggggagacgataccatggcgttacaggattggtggtaatggacaagaacaacgaccgtgagaccgatttcgtgctgtgggccatgggggatctggattctggggactttcagcctgcagctcactactctggagccgagaagcagatttggtggaccggtagaccaatcccatgggtgaaaggggcccctcccagcgataacccaccctgcgcatttgatctggacgatccatcctgcgacaaaacacccctcagtacactggctatagtcgccctggggaccggcatcactttcatcatgtttggggtgtccagcttcctgatcttcagaaaactgatgctcgagaaggagctcgcttccatgctttggcggattaggtgggaagagctgcagttcggaaatagcgaacgatatcacaagggcgcaggcagccggttgaccctgtctctgcggggctcgtcatatggaagcttgatgactgcccacgggaagtaccagatcttcgcgaatactggccattttaaaggaaatgtcgtagccataaagcatgttaacaagaagagaatagagctaacccggcaggtcctctttgaacttaagcatatgcgggacgtccagttcaatcacctgacgagattcattggcgcttgcatcgaccccccaaatatctgcatcgtcacggagtactgccctagggggtccctgcaggacattctggagaacgactcaatcaatctggattggatgttcagatactccttgatcaacgatctcgtcaaaggaatggccttccttcataattccatcatatccagccatgggtccctcaagtcctctaattgcgtggttgactctaggtttgtcctcaaaataaccgactatggtctggcaagtttccgctctacggctgaaccagatgacagtcacgctctctacgccaaaaaactctggacggccccagaactgcttagtggcaaccctctccctaccaccggtatgcagaaagcagacgtatactcattcggaattattctccaggagattgctctcagatcgggccccttttatctggaaggtctagatttgtcccctaaagaaatcgtgcagaaagtgcgcaacggacagagaccttacttccggccatccatcgatcggactcagctgaacgaggagcttgtcttgcttatggaacgttgttgggctcaagatccagctgaacgtcctgattttggccagatcaaggggtttattaggaggtttaataaggagggtgggacatccattctggacaatctgcttctgcgtatggaacagtatgccaataatctcgagaaacttgtcgaagagagaacccaggcatacctggaggaaaagcgtaaagccgaagcgctgctgtatcagattttgcctcactctgtcgcagagcaattgaagcgcggggaaaccgtgcaagcggaagcctttgactcagtgactatatacttctctgatatcgtaggctttacggccctcagcgctgagtcaacacctatgcaggtcgtaacactgctgaatgacctctatacctgcttcgacgcaattatcgataatttcgatgtatataaagtagagacgattggcgacgcctacatggtggtctccggactgccaggtagaaacggtcagcgccatgcacctgaaatcgccagaatggcactggctctgctcgacgccgtctcaagtttcagaataaggcatcggccccacgaccagttacgcttacgtattggagtgcacacgggccctgtttgcgccggcgtggtcggcctgaaaatgcctaggtactgtttgtttggggacaccgtgaacactgcttcccgcatggagtccaacgggcaggcacttaagatccacgttagttccacaacgaaggacgcactcgacgagcttggatgctttcagctggaactgaggggagacgttgagatgaaaggcaagggcaaaatgaggacttactggctacttggtgagcgcaagggcccacccggcctactctag

SEQ ID NO: 196652 - DNA, 1626 bp, synthetic construct
  misc_feature 1..1626: note = Description of Artificial Sequence: Synthetic coding sequence
  source 1..1626: mol_type = other DNA
atgcccagcctgctggtgctgaccttcagcccctgcgtgctgctgggttgggccctgctggccggtgggactggcggaggaggcgtgggcgggggcggcggcggcgctggcattggaggcggaagacaagaacgcgaggcactgcccccccaaaaaatagaggtcctcgttttgctgccacaggacgattcttacctattcagccttacaagggtgcgccctgccattgagtacgcactgaggtccgtagaaggtaatggaactgggcgtagactgcttccacctggtaccagattccaggtggcatatgaagattctgactgtggaaaccgcgccctattctcactggtagacagagtcgccgcggctagaggcgctaaacccgatctgattctaggccccgtctgtgaatacgccgcagcccccgtggcacgactggcaagccattgggacttgcctatgctttcagccggtgccctcgccgccgggttccagcacaaagattctgagtactctcatttgacaagggtggctccagcatatgcaaagatgggcgaaatgatgttggccctttttagacatcatcactggagcagggccgcgttagtttacagcgacgacaagctagagaggaactgttatttcacgcttgagggcgtccacgaggtgttccaggaggaagggctacacactagcatttatagctttgatgagacgaaagatctcgacttggaagacatcgtcagaaacatccaggcaagcgagagggtcgtgataatgtgcgcaagcagcgatactatccgttccatcatgctcgtcgcccatcggcacggtatgactagcggcgattatgctttcttcaacatagagctgttcaactcgtctagctatggtgacggcagttggaagcgcggcgataaacacgactttgaagccaagcaggcatatagttccctgcagacggtgaccctcttaaggaccgtgaagccagagttcgagaagttttccatggaagtaaagtcctccgtggagaaacaagggctgaatatggaggactacgttaacatgtttgtggagggttttcacgatgccatactactctacgttctggccctgcatgaagtgctcagagctggttacagcaaaaaggacggcggtaagatcatccagcagacatggaatcggacatttgaggggatcgccggacaagtgagtatcgacgctaatggcgatcgctacggcgacttcagtgtgatagccatgacagacgttgaggctgggacccaggaggtcatcggggactatttcggaaaggagggcagatttgagatgaggcccaacgtgaagtacccgtggggaccactgaaattacggatcgatgaaaatcgtattgttgaacacacaaatagcagcccttgcaagagcagcgggggtctggaggagtccgcagtaacagggatagtagtaggggcactgctcggagccgggctactgatggccttttatttttttcgcaaaaagtatagaatcactatcgaacggcgtacgcagcaggaagagtcaaatctgggaaagcaccgcgaattgcgggaagacagcatccggtcccatttctctgtcgcatag

SEQ ID NO: 196653 - DNA, 1623 bp, synthetic construct
  misc_feature 1..1623: note = Description of Artificial Sequence: Synthetic coding sequence
  source 1..1623: mol_type = other DNA
atgcccagcctgctggtgctgaccttcagcccctgcgtgctgctgggctgggctttgttggcaggcgggacagggggaggtggggtgggcggtgggggcggcggagcaggaatcgggggtggccggcaggaaagagaagctctgccccctcagaagatcgaagttctcgtgctgttacctcaagatgactcttatctttttagcctcacacgggttcggccagccatagaatacgcccttaggtccgtggagggtaacggcacaggccggcggttactcccaccgggaaccagattccaggtagcttatgaggacagcgattgcggcaaccgggctctgttttctctggtcgacagggtggcggcagcccgaggggccaagcctgacctcattctgggcccagtgtgcgaatatgcagctgctccggtggccagactcgcctcccattgggacctcccaatgctcagcgctggcgcgttggcagccggttttcagcacaaagacagcgagtattctcacctcacgagggtcgcacctgcttacgctaagatgggagagatgatgctggcactgttcagacaccaccactggtcgcgagcagcactggtgtacagcgacgacaaattggaaaggaactgttacttcactctcgaaggggtgcatgaggtgttccaggaagaaggcttacatacttccatctacagttttgatgagaccaaagacctggacttggaagatattgtgaggaatatccaggcatcagaacgagtcgttataatgtgtgctagcagcgacaccattaggagcattatgctggttgcccaccgacatgggatgacctctggcgactacgcattcttcaacatcgaacttttcaacagcagttcttatggggacggatcttggaagcgcggggataaacacgattttgaagccaagcaggcatattcgagtctgcagactgttacgctgctccggacagtgaaacctgagtttgaaaaattcagcatggaggttaagagcagtgtcgaaaaacagggtctcaacatggaggactacgtcaatatgttcgtggaaggattccatgatgccatcttgctgtatgtgttggccttacatgaagtcctacgggccggctattctaagaaagatggcggaaagatcatacagcagacttggaaccggacttttgaaggcatcgccggccaagtatccatcgacgccaatggcgatagatacggcgatttttccgtgattgcgatgaccgatgtggaagccgggacccaggaggtaatcggggactacttcgggaaagagggacggttcgaaatgagaccaaatgtgaaatacccctggggcccacttaagctgcggattgatgaaaatcgcattgtggagcacaccaacagctcaccttgtaagtcctgcggtctagaagaatccgccgttaccggaattgtggtaggcgcacttctgggtgccgggttactgatggcattttatttctttcgaaagaaataccgtattaccatcgagcgccgaacccaacaagaggaatcaaacctgggaaagcatagggagttgcgcgaggattctattaggagccatttctccgtggcctag

SEQ ID NO: 196654 - DNA, 975 bp, synthetic construct
  misc_feature 1..975: note = Description of Artificial Sequence: Synthetic coding sequence
  source 1..975: mol_type = other DNA
atggagcccagcgccctgggcccctggagcctgttccccgacctggcccctcgcgaccaggagggccaggtgctcgcacctcgccgttgtttccgtcgggagtgtggacaaaacgagaaagtcgtgattatgtgcgccagttctgacacgattaggtcaatcatgctggtggcacacagacatgggatgacctcaggcgactacgcatttttcaacatagaactttttaactcctcatcttacggcgatgggagctggaagaggggagacaaacatgacttcgaggcaaaacaggcctactcatcactgcagaccgtcactttgttaagaaccgtcaagcctgagttcgagaaattcagcatggaggttaaatccagcgtcgagaaacagggcctgaacatggaagattatgtaaacatgttcgttgagggatttcacgatgcaattctgctctacgtgcttgctctgcacgaagtcctccgggccggttatagtaagaaagatggcggaaagatcatccagcaaacgtggaaccgcacattcgaaggcatagcagggcaggtgagtattgatgccaatggagacaggtacggcgactttagtgtaatcgccatgaccgatgtcgaggctggcactcaagaggtgattggagattacttcggcaaagagggcaggttcgagatgcgccccaatgtcaagtatccctgggggcctctgaaactgcgcatcgacgaaaataggattgtggagcacacaaacagttccccttgcaaaagttgcggccttgaggagtcggccgtgacgggcattgtggtgggtgcgctgctgggagcaggattgctgatggctttttacttttttcgtaaaaagtaccggatcaccatcgagagacgtactcaacaagaggagagcaatctgggtaagcatagagagctgagggaagatagcatacgatctcacttcagtgtggcttag

SEQ ID NO: 196655 - DNA, 915 bp, synthetic construct
  misc_feature 1..915: note = Description of Artificial Sequence: Synthetic coding sequence
  source 1..915: mol_type = other DNA
atgagcagcaccctgcccgccctgctgtgcgtgggcctgtgcctgagccagcgtatatcagcacagcaacagactttgcccaagccatttatttgggccgagcctcacttcatggtccccaaggaaaaacaagttacaatatgctgccagggcaattatggcgccgttgagtaccaactgcacttcgagggctcactcttcgcagtggacagaccgaagcccccagagcgcattaataaagtgaagttctacatccccgacatgaattccaggatggcaggacagtatagttgcatatatagggttggtgagttgtggtctgagccatcaaatctcctggacctggtggtcactgaaatgtacgacactccaaccctgtccgtgcaccccggaccggaagtcatcagcggggagaaggtcaccttttactgcaggctggatacggccacatcaatgtttcttctgctcaaggaaggacgcagctcacacgtacaacgcgggtacggaaaagtacaggccgaattcccattaggcccagtgacgaccgcccatagagggacatatagatgcttcggatcctacaacaatcatgcctggtcgtttccctccgaaccagtgaagctcttagtaaccggagatattgaaaatacaagtctggcgccagaggatccaacctttcccgcagatacctggggcacataccttcttaccaccgaaactggtcttcagaaagaccacgcattgtgggatcatacggcacagaatcttctgaggatgggcctggcattcctcgtgctggttgcgttagtgtggttcctcgtagaggactggctgtcaaggaagcgcacacgggagcgggcctctcgggcaagtacctgggagggcagacgcagactaaatacacagactttgtag

SEQ ID NO: 196656 - DNA, 864 bp, synthetic construct
  misc_feature 1..864: note = Description of Artificial Sequence: Synthetic coding sequence
  source 1..864: mol_type = other DNA
atgagcagcaccctgcccgccctgctgtgcgtgggcctgtgcctgtcccaacgcatcagtgcccagcagcagacattacctaagccatttatttgggccgagccacattttatggtacccaaagagaagcaagttacaatctgctgtcaggggaactatggcgctgttgaataccagctgcactttgagggctcactattcgccgtcgacagaccaaagcctcccgaacgcattaataaagtgaagttctatatcccggacatgaattcacgcatggccggtcagtacagctgcatttacagggtcggagagctttggagcgaaccttccaatctgttggacctggtggtcaccgagatgtatgacacgccgaccctgtccgtgcatcccggccccgaagtcatttctggggaaaaagtgaccttttattgtcggctggatactgcgacttctatgttcctgctgttgaaggagggtcggtctagtcatgtgcagcgtggatatgggaaggtgcaggcggagttcccgctgggcccggttacaacagctcatcgaggaacctatcggtgttttggctcctataacaaccacgcttggtcctttcctagtgagccagtgaagctcctcgtaacaggggacatagagaatacctcccttgctccagaagaccccacattccctgaccacgccctgtgggaccacacagcccagaatctgctcagaatggggctggctttcctcgtactggtagccctggtttggttcctggtggaggattggctgtcccggaagcgcacccgtgagagggcttcgcgcgcttcgacttgggaaggacggcgaaggctgaatacccaaaccctctag

SEQ ID NO: 196657 - DNA, 630 bp, synthetic construct
  misc_feature 1..630: note = Description of Artificial Sequence: Synthetic coding sequence
  source 1..630: mol_type = other DNA
atgagcagcaccctgcccgccctgctgtgcgtgggcctgtgcctgtcccaacgcatatccgcccagcagcagatgtacgataccccaactctttcagtgcaccccggtccggaggttattagcggcgagaaggtcactttttactgccgactggatacggcaacgtccatgttcctcctgttgaaggaaggccgctcttcccacgtacagcggggctatggaaaagtccaggcggagttccctctgggccccgtgacgacagctcataggggtacctatcgctgttttggttcctataacaaccacgcctggtcttttccgtctgagcccgtcaagctgctggtcacaggggacatagagaacacgagcctggccccggaagatcctacctttccggccgacacttgggggacatatctccttacaactgagacgggccttcagaaagaccacgccctgtgggaccatacggcacaaaatctgctccgcatgggtctggctttcctggtccttgttgccctggtctggttcctagtcgaggattggctcagccgcaagcggacaagggaaagagctagtcgcgcctccacatgggagggtcgtagacggttgaacacccagaccctgtag

SEQ ID NO: 196658 - DNA, 594 bp, synthetic construct
  misc_feature 1..594: note = Description of Artificial Sequence: Synthetic coding sequence
  source 1..594: mol_type = other DNA
atgagcagcaccctgcccgccctgctgtgcgtggagatgtacgacactccgacactcagcgttcaccccggtccagaagtgatctccggggaaaaagtgacattctattgccggctggacaccgcaacctcaatgttcttgctcctgaaggagggacgttccagccatgtgcagagaggctacggcaaggtgcaggcagaattccctctgggcccagtaacaacagcccacagaggcacttatcggtgttttggatcatataataaccacgcttggagctttccttcagaacctgtgaagctgctggttacgggcgacattgagaataccagtctcgcccccgaagatcctaccttccctgctgacacatggggaacatatttgcttacaaccgagacaggcttgcagaaggaccacgctctatgggaccatacagcgcagaacctgctcagaatgggactggcctttctagtgctggttgcacttgtgtggttcttggtggaggactggctctctagaaagcgtactcgcgagcgagcttctagggccagtacatgggaagggcggcggagattaaacacccagacattgtag

SEQ ID NO: 196659 - DNA, 912 bp, synthetic construct
  misc_feature 1..912: note = Description of Artificial Sequence: Synthetic coding sequence
  source 1..912: mol_type = other DNA
atgagcagcaccctgcccgccctgctgtgcgtgggcctgtgcctgtctcagcggatttcagctcagcaacagacgctgccaaaaccatttatctgggccgagccacacttcatggttcccaaagagaaacaggtgacaatctgctgccagggcaattacggggccgttgaataccagctccacttcgaagggagcctgttcgccgtggatcgcccgaaaccgcccgagcggattaacaaggtaaaattttacattcctgatatgaacagcaggatggcgggacagtacagttgtatatatcgggtaggcgagctctggagtgaaccaagcaatctgctcgatcttgtcgttaccgagatgtatgacactcccaccttgtctgtccacccaggacccgaagtcatatctggggagaaagtgactttctactgtcgactagataccgccacatccatgtttcttctgctgaaagagggacggagctctcacgtgcagcgcggctacggtaaagttcaggctgagtttccccttggccctgtaaccaccgcgcacaggggaacgtataggtgctttggttcctacaataaccacgcctggtcattcccatccgagcctgtgaagttactcgttactggcgatattgagaatacttcacttgcccctgaagaccccacctttccagacacttggggaacctacttgttgaccacggagaccgggctgcagaaggaccacgctctgtgggatcatacggcccaaaacttactacggatgggtctcgcgtttctggtgcttgtggccttggtgtggttcttggtcgaagattggctcagtcgcaagcgcacccgggaacgggccagtcgagctagtacatgggaagggcgtagacggctaaacactcagacactctag

SEQ ID NO: 196660 - DNA, 777 bp, synthetic construct
  misc_feature 1..777: note = Description of Artificial Sequence: Synthetic coding sequence
  source 1..777: mol_type = other DNA
atggcctggcgggccctgcaccccctgctgctgctgctgctgctgtttccgggatcccaggcccaatccaaggcccaggtgcttcagagcgtggccggtcaaaccctgaccgtccgctgccaatatcctcccacgggcagcctgtacgagaagaaaggatggtgcaaggaagctagcgccctggtttgtatccgtctagtgacaagctctaagcccagaactatggcttggactagcagatttaccatttgggatgaccctgatgccggattctttacagtaacaatgacagacctaagagaagaggatagcggtcactactggtgccggatttacaggccttccgacaatagtgtgtccaagtccgtaagattctacttggtggtttctcccgcctcagcatccacacaaacctcatggacgcccagggacctggtatcctcccagacgcagacccagtcctgcgtgcctcccaccgccggagcacgccaggcgccggagtctccatccaccatcccagtgcctagccagccacagaatagcaccctgcggccgggtcccgctgcccctattgccctggtcccggtgttttgtggcctcctggtggccaaatctcttgtcttgagtgcactgcttgtgtggtgggttcttcggaatcgccacatgcagcaccagggccgatcccttttgcaccccgctcagcctagacctcaggctcatagacactttcccctgtcccaccgcgcacccggggggacttatggaggcaagccctag

SEQ ID NO: 196661 - DNA, 813 bp, synthetic construct
  misc_feature 1..813: note = Description of Artificial Sequence: Synthetic coding sequence
  source 1..813: mol_type = other DNA
atggcctggcgggccctgcaccccctgctgctgctgctgctgctgttccccggtagtcaggcacagtccaaagcccaggtcctccaaagcgtagctggccagactctaaccgtcagatgccaatacccccctacaggcagtctgtatgaaaaaaaaggctggtgcaaggaagctagtgcgctggtgtgtatcagactcgtgacttcatctaaaccaaggaccatggcctggacctctcggttcacaatttgggatgaccccgacgccggatttttcacggtgacaatgacagacctgcgggaagaggactcaggccattattggtgtcgcatttatcgaccgtccgataacagcgtgtccaagtcagttagattctatttggtggtgtcccctgcttccgcctcaacacaaacttcctggacgccacgcgacctggtgagctcccagacccagacccaaagctgcgtgcctccaacggcaggggcacggcaggccccagaatcacctagcacaatcccagtgccgtctcatccaagcagtccactccccgttccactgcccagtcgtccacaaaactccacacttagaccaggtccagccgcgccaattgccctggttccggtgttctgcggcttactggttgcgaagtcccttgtgctgagcgccttactcgtctggtgggttttgcgcaacaggcatatgcagcaccagggtaggtcactgctgcaccccgctcaacctcggccgcaggcacacaggcattttcctctgtctcatagggcaccaggcggaacttacggtggtaaaccttag

SEQ ID NO: 196662 - DNA, 831 bp, synthetic construct
  misc_feature 1..831: note = Description of Artificial Sequence: Synthetic coding sequence
  source 1..831: mol_type = other DNA
atggcctggcgggccctgcaccccctgctgctgctgctgctgctgttcccagggtcccaggcccagagtaaggctcaagtgctgcagtctgtagccggacagactctcactgtcaggtgtcaataccctccaaccggcagcttatacgaaaagaaggggtggtgcaaagaagcttccgcgctggtgtgcattagactcgtgacatcctctaagcctcggaccatggcatggacctcccgcttcacaatctgggatgatccggatgcgggcttttttacagtgacaatgacagatctgagagaggaagactctggacattattggtgccgtatctacaggccaagtgacaactccgtgagtaaaagcgttaggttttacctcgtagtttccccagcgtcagcatctacacagacatcatggactccaagagatctggtatcctctcaaacacaaacccaaagctgtgtgccacctaccgcaggtgcaagacaggcccccgaaagcccctctaccataccagtgccgtcccagccccagaactctacactcagacccggaccggcagctcccatagccctcgtgccagtgttctgtggcctgctggtggcaaagagtctggtgttgagcgcactgttagtctggtggggagacatctggtggaaaaccatgatggaattgaggtccctggacacccagaaggcaacatgccacctgcagcaggtgacagatcttccctggacttccgtgtccagccccgtggagagggagattctttaccacactgtcgcccgcaccaagatatccgatgatgatgacgaacacacactgtag

SEQ ID NO: 196663 - DNA, 606 bp, synthetic construct
  misc_feature 1..606: note = Description of Artificial Sequence: Synthetic coding sequence
  source 1..606: mol_type = other DNA
atggcctggatgctgctgctgatcctgatcatggtgcaccccggcagctgcgccctgtgggtgtcccagccacccgagatcagaacgctggagggtagcagtgccttcttgccatgctcattcaacgcttcgcagggccgcctggcaatcggttccgtgacctggttccgggatgaagtggtgccagggaaagaagtgcggaacgggaccccagagtttcgcggtcgacttgccccattggcttcatcaaggtttctgcatgaccaccaggcggaactccatatcagagacgtgcgggggcatgatgcttccatatacgtctgtcgggtggaggtcctgggcctgggggtcggcaccggaaacggtacgcggctcgttgtggagaaagaacatccacagcttggtgccggtaccgtcctcctattgcgggcaggattttatgcggtgagttttcttagtgtggccgtaggcagcaccgtatactatcagggcaaatgtctgacctggaaagggccaagaaggcagctgcccgctgtcgttccggctccactaccccctccatgcggctcttcagcccatttgttacctccagtgcctgggggatag

SEQ ID NO: 196664 - DNA, 498 bp, synthetic construct
  misc_feature 1..498: note = Description of Artificial Sequence: Synthetic coding sequence
  source 1..498: mol_type = other DNA
atggcctggatgctgctgctgatcctgatcatggtgcaccccggcagttgcgctctatgggtcagtcagcccccggagatccggacactggagggctccagcgcattcctaccatgtagcttcaacgcctctcaaggacgcctggccattgggagtgttacttggttcagagacgaggtagtcccaggaaaagaagcggagctgcacatccgcgatgtaagaggtcacgacgcctcaatttatgtttgtagagtggaggtgttaggcctgggggtgggaaccggcaatgggacaaggctcgtggtggagaaagaacacccccagcttggggcaggaacagtgctgctcctccgcgccggcttctatgccgtgtccttcctgtccgtggctgtgggtagtaccgtttactaccagggcaaatgccactgccatatgggaacacattgccactcaagcgacggaccccgaggagtgatcccagaaccccgttgcccatag

SEQ ID NO: 196665 - DNA, 573 bp, synthetic construct
  misc_feature 1..573: note = Description of Artificial Sequence: Synthetic coding sequence
  source 1..573: mol_type = other DNA
atggcctggatgctgctgctgatcctgatcatggtgcaccccggctcttgcgcgctgtgggtctcccagcctccggaaatccggactctggaaggcagctccgcctttctgccctgctcttttaacgcttctcagggtagactggctattggatctgtgacatggtttcgtgacgaagtagtaccagggaaagaagtcaggaacggaacccctgaatttcgaggacggctcgcaccgcttgcaagctctcgttttcttcacgaccaccaggccgagctgcacataagagatgtgaggggtcacgacgcttccatctacgtgtgtcgggtggaggtattgggtttgggggtcgggactgggaatggtactcggctggtggtggaaaaagagcacccccagcttggcgcaggaactgtgctcctgctgcgcgctggcttttacgcggtaagcttcctctctgtcgccgtaggaagcaccgtttactaccagggcaaatgccactgccatatgggcacacactgccacagcagcgacggtcctcggggcgttatcccggagccgagatgcccttag

SEQ ID NO: 196666 - DNA, 534 bp, synthetic construct
  misc_feature 1..534: note = Description of Artificial Sequence: Synthetic coding sequence
  source 1..534: mol_type = other DNA
atggcctggatgctgctgctgatcctgatcatggtgcaccccggctcatgtgcactctgggtcagccagccccctgagatcagaaccttggagggaagttccgcctttctcccctgctccttcaacgcctcacagggcagactggctattggatctgtgacttggttccgggacgaggttgtccccggcaaagaagtccgcaacggaacacccgaatttagagggcgtctggccccactggccagttctcggttcctgcatgatcatcaggcggagctgcacatacgggatgtccgggggcacgatgcatctatttacgtttgccgggtcgaggtgttgggtctgggagtagggaccggcaatgggacaaggctcgtagtggagaaagagcacccacagctcggcgccgggaccgttctgctgctacgcgcgggcttctatgcagtttctttcctcagcgtggcagttggatctactgtgtattatcagggtaaatacgcaaagtccacactgagcgggttcccccagctttag

SEQ ID NO: 196667 - DNA, 573 bp, synthetic construct
  misc_feature 1..573: note = Description of Artificial Sequence: Synthetic coding sequence
  source 1..573: mol_type = other DNA
atggcctggatgctgctgctgatcctgatcatggtgcaccccggctcctgtgctttgtgggtaagccagccgcccgaaattcgtaccctggagggatctagcgctttcctaccttgtagtttcaacgcttcccagggccgcttagctatcggctcggttacctggttccgcgacgaagttgttccgggaaaggaagtgcgcaatgggacccctgagttccgaggccggctggctcctctggcctcttctaggtttctgcacgatcaccaggctgagctgcatatacgagatgtgaggggccacgacgcatcgatctatgtgtgccgcgtcgaggtactggggcttggagtgggaaccgggaacggaacaaggttggtggttgagaaagagcacccccagctgggagcaggcacagtcttgctcctacgcgcaggcttctatgctgtttcttttctgtcagtggcagtggggtccacggtgtactatcaaggcaagtgccactgccacatgggtactcactgccactcaagcgatggaccccgcggcgttatcccagaacctaggtgtccatag

SEQ ID NO: 196668 - DNA, 606 bp, synthetic construct
  misc_feature 1..606: note = Description of Artificial Sequence: Synthetic coding sequence
  source 1..606: mol_type = other DNA
atggcctggatgctgctgctgatcctgatcatggtgcaccccggcagctgcgcactctgggtgtcacaaccccccgaaatccggacattagaaggttcttccgcttttctcccatgtagctttaatgctagccagggaagactggctataggcagtgtcacgtggtttcgagatgaggtggttcctgggaaggaggttaggaacgggacgccggagtttcgaggtcgcttagcccctctcgcatccagccgatttcttcacgaccaccaagctgaactgcatatccgggacgttcggggccatgacgcatccatttacgtgtgcagagtagaagtgctggggctcggcgtcggaaccggcaatgggactcgcttggtcgttgagaaggagcacccacaactgggagctgggaccgttctcctccttagggcaggattctatgctgtttcgttcctgagtgtggctgtgggcagtacagtgtattaccagggaaaatgcttgacctggaaggggccacgtcgccaactcccagctgtcgtgcctgcccccctcccacccccttgcggcagcagcgcgcacctgctgcctcctgtcccagggggatag

SEQ ID NO: 196669 - DNA, 534 bp, synthetic construct
  misc_feature 1..534: note = Description of Artificial Sequence: Synthetic coding sequence
  source 1..534: mol_type = other DNA
atggcctggatgctgctgctgatcctgatcatggtgcaccccggcagttgcgcgttgtgggtgagtcagccacccgagattcgaaccctggaagggagcagcgcatttctaccctgcagctttaatgccagtcagggtagattagccattgggtccgtaacgtggtttagggatgaggtggtccccggaaaggaggtgcgaaatggtacaccagagtttcgcgggagattagcgcccctggccagcagcaggttcctgcatgaccaccaggctgaactccacatccgtgatgtgcggggccacgatgccagcatctatgtttgccgagttgaggtcttgggcctgggggtgggtactggtaatggtacaaggttggtggtggaaaaggagcaccctcagctcggggccggtaccgttctactgttgagagcaggcttctacgcggtctcctttttgagtgtcgcagttggatctacggtgtactatcagggcaagtacgctaagagcaccctgagtggctttccccaactgtag

SEQ ID NO: 196670 - DNA, 498 bp, synthetic construct
  misc_feature 1..498: note = Description of Artificial Sequence: Synthetic coding sequence
  source 1..498: mol_type = other DNA
atggcctggatgctgctgctgatcctgatcatggtgcaccccggctcatgtgcactttgggtgtcccagccaccggagatcaggactctcgagggcagcagcgcattcctgccttgctcctttaacgcaagccaagggagacttgccatcggctccgtcacctggttcagggatgaggtcgtccctggaaaggaggccgaacttcatatccgggatgtacgagggcacgatgccagcatatatgtgtgccgggtggaggtactcggactcggagtaggaacaggcaacggcacgcggctggtagtggaaaaagagcatcctcagcttggcgcggggaccgtactgctgctgagagccggtttttacgccgtaagttttctcagcgtggccgtcggttctactgtttactatcagggaaaatgccactgtcacatgggaacgcactgccacagttccgacggcccccgcggggttattcccgaaccccgatgcccatag

SEQ ID NO: 196671 - DNA, 573 bp, synthetic construct
  misc_feature 1..573: note = Description of Artificial Sequence: Synthetic coding sequence
  source 1..573: mol_type = other DNA
atggcctggatgctgctgctgatcctgatcatggtgcaccccggctcttgtgctctatgggtgtcacagcctccagaaattcggactttagaaggatcctcagctttcctgccctgctctttcaacgccagccaaggtcgtctcgcaatcggctctgtgacttggttcagagatgaggtcgtgcccggcaaagaggtgagaaacggaaccccagagtttcggggcaggctcgcccctcttgccagttcaaggttccttcacgatcatcaggcggaactgcacatccgggacgttcgaggccacgacgcctccatctacgtatgccgcgtggaagtgcttggattgggagtgggaaccggtaatggcaccaggctagtggtcgagaaggaacacccacaactgggtgcaggtacagtgctcctgctgcgggccgggttctatgccgtgtcattcctgtctgtggccgtagggtcaactgtgtactaccagggaaaatgccattgccacatgggcacgcattgccacagctctgacgggccaagaggggtaatacctgaaccacggtgtccgtag

SEQ ID NO: 196672 - DNA, 606 bp, synthetic construct
  misc_feature 1..606: note = Description of Artificial Sequence: Synthetic coding sequence
  source 1..606: mol_type = other DNA
atggcctggatgctgctgctgatcctgatcatggtgcaccccggcagctgcgcactgtgggtttcccagcctccggaaatacgcaccttggagggtagcagtgctttcttgccttgctcttttaacgcctcccaagggcgactggcgataggtagtgtcacctggtttagagatgaggtggtgcccggtaaggaagtgcgcaacggtacacccgagttccgtggacgattggcacccttagcctcatcgagatttttacacgatcaccaggccgagttgcacatccgcgacgtaagaggccacgacgctagtatatatgtgtgtagggtggaggtgctcggcctaggcgtgggaaccggtaacggtactcgcctggttgtcgaaaaagagcacccccagctgggcgccggaaccgttctgctactgagggcaggtttctatgcggtatcatttttgtcggtggccgtggggagtacagtttactatcagggaaaatgtctaacatggaagggaccacgccgtcagttgccggcggtcgtgcctgcccccctccctcccccgtgcggatcttcagcacatctgttgcctcctgtgccgggagggtag

SEQ ID NO: 196673 - DNA, 573 bp, synthetic construct
  misc_feature 1..573: note = Description of Artificial Sequence: Synthetic coding sequence
  source 1..573: mol_type = other DNA
atggcctggatgctgctgctgatcctgatcatggtgcaccccggcagctgcgctttgtgggtatcacagccacccgagatccgcaccctcgaggggtctagtgcattccttccctgttcctttaacgcttctcaggggagattggctatcggttctgtgacatggttcagggacgaggtggtgcctggcaaagaagtccggaatggcacacctgagtttagaggtcgactggcacccctggcgtcttccaggttcttgcatgatcaccaggccgagttgcacattagagatgttcgggggcacgatgcttcaatctacgtttgtagagtagaagtcctgggactgggggtcgggaccggcaacgggaccagactcgtagttgaaaaggagcacccacagctcggcgccggcaccgtactgctccttagagccggtttttatgctgtctcatttctaagcgtggcagtcggctctaccgtctattatcagggcaaatgtcactgtcacatggggacacactgccattcttccgatggcccaagaggagtcataccagagccccgttgcccctag

SEQ ID NO: 196674 - DNA, 498 bp, synthetic construct
  misc_feature 1..498: note = Description of Artificial Sequence: Synthetic coding sequence
  source 1..498: mol_type = other DNA
atggcctggatgctgctgctgatcctgatcatggtgcaccccggctcatgtgccctgtgggtaagccagcctcctgagattcgcactctagagggttcttctgcgtttctgccctgctctttcaacgcgtcacaggggcgactggcaatcggcagcgtcacctggtttcgggatgaggtggtccctgggaaagaagcagaattacatattcgcgatgttagggggcacgatgcttccatctacgtctgtcgagtagaggtactgggcctgggggtaggtacagggaacgggacacgcctcgttgtcgaaaaggagcaccctcagctgggcgcagggacagtgctcctgttgagagccggattctatgctgtgagctttctgagcgttgcagtagggtctaccgtctactaccagggaaaatgccactgccatatgggcactcactgccatagcagcgacggacccagaggagtgatcccagaacccagatgcccatag

SEQ ID NO: 196675 - DNA, 498 bp, synthetic construct
  misc_feature 1..498: note = Description of Artificial Sequence: Synthetic coding sequence
  source 1..498: mol_type = other DNA
atggcctggatgctgctgctgatcctgatcatggtgcaccccggctcctgcgctctctgggtgtctcagccgcccgagattcggaccctcgaaggcagcagcgctttcttgccctgcagttttaatgcctcccaggggaggctggccataggatcagtgacctggtttagggacgaagtggtccccggaaaggaagccgaactgcatattagggatgttagaggtcatgacgccagcatctacgtgtgccgagtcgaagtcctcggtctcggtgtcgggaccggtaatggtaccagattggtggtcgagaaggaacatccccagttgggggctggcaccgtgctcttgctgcgcgctggattttacgcagtgtcattcttgtccgttgccgtggggagcactgtatactatcagggcaagtgccactgtcacatgggcacccactgccacagctcagatggacctagaggcgtgatcccggaaccacgctgtccttag

SEQ ID NO: 196676 - DNA, 498 bp, synthetic construct
  misc_feature 1..498: note = Description of Artificial Sequence: Synthetic coding sequence
  source 1..498: mol_type = other DNA
atggcctggatgctgctgctgatcctgatcatggtgcaccccggcagctgcgccctctgggtcagccagccccccgagatcaggaccctcgaaggctcttctgcatttctcccttgcagcttcaacgccagccagggcagactggcaatagggagtgttacatggttccgagatgaggtggtgcctgggaaggaggcagagctccatatcagggatgttcgagggcacgacgcctcgatttatgtatgccgtgtggaggtgctgggactcggtgtgggcacaggaaatgggaccagactcgtcgtcgaaaaggagcacccacagctaggcgcaggcaccgtactgctgctccgggccgggttctacgcggtgtcttttctgtcagttgccgttgggagtaccgtgtattaccagggcaagtgccactgccacatgggtactcactgtcactcatccgatgggccacggggcgtcataccagaaccaagatgtccatag

SEQ ID NO: 196677 - DNA, 606 bp, synthetic construct
  misc_feature 1..606: note = Description of Artificial Sequence: Synthetic coding sequence
  source 1..606: mol_type = other DNA
atggcctggatgctgctgctgatcctgatcatggtgcaccccggcagttgcgcactctgggtgagccagccccctgaaatacgcactcttgagggcagcagtgcctttttaccctgtagcttcaatgccagccagggcaggctggcgatcggtagtgttacatggttccgcgatgaagtggtccctggaaaggaagtgcgcaatggaaccccagaattccgggggcgattagctcccctggcctctagccggttcctccacgaccaccaggctgagctccacattagagatgtcaggggccacgatgcctcgatttacgtgtgtcgagtggaggttcttgggctaggagtgggtaccggcaacggcactcgactggtagtggagaaagagcacccacagctcggagccggtaccgtgctgctacttagagctggtttctatgccgtgtctttcctgagtgtggctgtcggaagcaccgtgtactatcaggggaagtgccttacatggaaagggccacgaagacagttgccagccgtggtgccagcccccctgcctcccccttgcggttcttcagcccacttactgccacccgtacccggcgggtag

SEQ ID NO: 196678 - DNA, 606 bp, synthetic construct
  misc_feature 1..606: note = Description of Artificial Sequence: Synthetic coding sequence
  source 1..606: mol_type = other DNA
atggcctggatgctgctgctgatcctgatcatggtgcaccccggcagctgcgctctatgggtgtcacagccacctgaaattcgcactctggaggggtcaagcgcattccttccctgttcctttaatgctagccagggccggctggccattggcagtgttacatggtttcgggatgaagtagtgccaggcaaggaggtcagaaacggcaccccagaatttagagggaggcttgcccccctcgcctcctctagatttttgcacgatcaccaggcagaactgcatatcagggacgtccgagggcatgacgcaagcatatatgtgtgtagggtggaggtactcggcctcggagttggcaccgggaatgggacccgcctcgtggtggagaaagagcatcctcagcttggcgccggtacggtccttcttttgcgtgccggcttttatgccgttagttttctgtccgtggccgtcggttcaaccgtctattaccaggggaaatgtctaacatggaaggggcctcggaggcagctgcccgcagtcgtgcccgctccgttgccacctccctgcgggtcctccgctcatcttttgccaccggtgccaggaggatag

SEQ ID NO: 196679 - DNA, 534 bp, synthetic construct
  misc_feature 1..534: note = Description of Artificial Sequence: Synthetic coding sequence
  source 1..534: mol_type = other DNA
atggcctggatgctgctgctgatcctgatcatggtgcaccccggctcctgtgcactctgggtcagtcagccacctgagataagaactctcgaggggtcatctgcattcctgccctgttcctttaatgcttcccaggggcggctcgccattggaagtgttacatggttccgggacgaggtcgtccccggtaaggaggtgcgcaatggaacacccgaattcaggggacgcctggcccccttggcctccagtcgcttccttcacgaccaccaagccgaactgcacattcgcgacgtcagaggccacgatgcctctatctatgtctgtagagtcgaggtattagggttaggagttggaactggcaatggaaccaggctggtggtcgaaaaagaacatccccagcttggtgccgggaccgtgttgctactgcgcgcagggttctatgcagtgtcgttcctgtccgtggccgtgggaagtacagtgtattaccagggcaaatatgccaaatctacactcagcggtttcccacagttatag

SEQ ID NO: 196680 - DNA, 534 bp, synthetic construct
  misc_feature 1..534: note = Description of Artificial Sequence: Synthetic coding sequence
  source 1..534: mol_type = other DNA
atggcctggatgctgctgctgatcctgatcatggtgcaccccggcagctgtgccctgtgggtctctcagcccccggaaatcaggactctcgagggatctagcgctttccttccctgttcgttcaatgctagccagggtcgtctggctattggctccgtgacctggtttagagatgaagtggtgcctggcaaggaggttagaaacggaaccccggaattccggggcagactggcacctctcgcttctagccggttcctgcacgaccatcaagcggagctgcatatacgcgacgtccggggccacgatgccagtatttatgtttgccgcgtggaggtcctgggactaggagtgggaactgggaacggcacgagactggtggtggaaaaggagcacccacagctaggggccggaactgtactattgctccgtgctgggttttatgcggtgagttttctaagcgtggccgtgggctcaaccgtgtattatcagggaaagtacgctaaaagcacgctgagtggcttccctcagctgtag

SEQ ID NO: 196681 - DNA, 606 bp, synthetic construct
  misc_feature 1..606: note = Description of Artificial Sequence: Synthetic coding sequence
  source 1..606: mol_type = other DNA
atggcctggatgctgctgctgatcctgatcatggtgcaccccggctcatgtgctctctgggtctcgcagccccctgagatcagaacacttgaaggcagtagcgcatttctaccgtgttcatttaatgccagccagggcagactggcaatcggatccgtgacgtggttccgagacgaagtggtcccgggaaaagaggtgcgcaatggcacacccgaatttaggggaagactggcccctcttgcctcctccaggttcctgcatgaccaccaggctgagctacacatcagggacgtacgtggacacgatgcctcgatttacgtctgtcgcgtggaagtgctaggcctgggcgtcggcacaggcaatggtacacggttagttgtggagaaagaacacccacaactaggtgccggcacagtcctcttactgcgggcaggtttctacgccgtgagcttccttagtgtggcagtggggtccacagtttactatcagggcaaatgtcttacctggaagggccctcgccgtcagctgcctgccgtcgtgcctgctccactgccaccaccttgtggttcctcggcccacctgctgccaccagtaccaggaggatag

SEQ ID NO: 196682 - DNA, 534 bp, synthetic construct
  misc_feature 1..534: note = Description of Artificial Sequence: Synthetic coding sequence
  source 1..534: mol_type = other DNA
atggcctggatgctgctgctgatcctgatcatggtgcaccccggctcatgtgccctttgggtttcacaaccgcctgagatcaggactctggaagggtctagcgcgttcctcccctgttcatttaacgccagccagggccgactggcgattggctccgtgacttggtttcgcgacgaggtggtgcccggtaaagaggtccgtaacggaacccctgagttccgtggacggctcgcccctctggcgtcttctcgcttcctgcacgaccaccaagcagagcttcacatcagggatgtgcggggacacgatgcaagtatctatgtgtgcagggtggaggtgctgggcctgggcgttggcaccggaaacggtacccgattggtggtagagaaagaacatccacagcttggcgctggtactgtgctgctgctcagggctggcttttacgccgtctcatttttgagtgtggcagtgggctcaaccgtgtattatcaaggtaagtatgccaagagtactctcagtgggttcccccagttgtag

SEQ ID NO: 196683 - DNA, 573 bp, synthetic construct
  misc_feature 1..573: note = Description of Artificial Sequence: Synthetic coding sequence
  source 1..573: mol_type = other DNA
atggcctggatgctgctgctgatcctgatcatggtgcaccccggcagctgcgccttgtgggtatctcagccaccagagataaggaccctggaaggcagcagcgcattcctcccttgctccttcaacgctagtcaggggcggctggcaattggcagtgtgacgtggtttcgcgacgaagtggtccccgggaaagaagtcagaaatgggacccctgaattccgaggccgtctggcccccttggcttcaagccgatttcttcatgatcatcaggcggagctccacatccgtgatgtcagaggccatgacgcctcaatttacgtctgtagggtagaagtcctgggactgggcgtggggaccgggaatggcacaagacttgttgtagagaaggaacaccctcagttgggagctgggactgtactgctgctacgcgctggcttctatgccgtctcatttttgtcagtagcagtgggttccaccgtctattatcagggcaaatgccattgccatatgggcactcactgtcattcttccgatggtcctcggggagtcatcccagaaccccgctgcccctag

SEQ ID NO: 196684 - DNA, 606 bp, synthetic construct
  misc_feature 1..606: note = Description of Artificial Sequence: Synthetic coding sequence
  source 1..606: mol_type = other DNA
atggcctggatgctgctgctgatcctgatcatggtgcaccccggctcatgcgcactctgggtgtctcagccaccagagattcgaactctcgagggaagctcagcgttcctgccctgtagtttcaatgccagccagggtcggttggccatcggctcggtcacatggtttagagacgaagtcgtgccagggaaagaggtgagaaatggcacacccgaattccgcggccgcctcgcaccgctagccagttcacgattcctgcatgaccatcaggctgaactccacatcagagatgttagagggcatgatgcctccatctacgtttgcagggtggaagttttgggcttaggtgtgggaacagggaacggtacccggttggttgtggagaaagaacacccacagttaggcgccggcaccgtccttctcctccgcgccggattttacgcagtgtcctttctgagcgtggccgtaggctctacagtctattaccaagggaagtgtttgacgtggaaaggtcctagaagacagctccccgccgtagtgcctgcacccctgcctccaccctgtggctcatctgcccacttgctgccaccagttccagggggatag

SEQ ID NO: 196685 - DNA, 498 bp, synthetic construct
  misc_feature 1..498: note = Description of Artificial Sequence: Synthetic coding sequence
  source 1..498: mol_type = other DNA
atggcctggatgctgctgctgatcctgatcatggtgcaccccggctcttgtgcattatgggtgagtcaaccacctgagattcgcaccctcgaaggcagttcagccttcttgccgtgctcctttaacgcttcccagggccggctagccatcggctctgtcacttggttccgagacgaggtagtacccggaaaggaagctgagctgcacatcagagacgtgcggggacacgatgcctcgatctacgtatgtcgcgtcgaggtgctgggcctgggggtcggtacaggaaatggtacgagactggtcgtcgagaaggagcatcctcagttgggagccgggactgttctgctgctgcgcgcagggttttatgcagttagcttcctgtccgtggcggtgggcagcactgtgtactaccagggtaagtgccactgtcacatgggcacgcattgtcacagctccgacggtccaagaggcgttatcccagaaccccggtgtccttag

SEQ ID NO: 196686 - DNA, 534 bp, synthetic construct
  misc_feature 1..534: note = Description of Artificial Sequence: Synthetic coding sequence
  source 1..534: mol_type = other DNA
atggcctggatgctgctgctgatcctgatcatggtgcaccccggcagttgtgccctctgggtatcccagccaccggagattcgtaccttggaaggatcaagcgcctttcttccatgttcgttcaatgcatcccagggacggttggcgatcggctctgtcacctggttccgcgacgaggttgttccagggaaagaggttcgtaatgggacacccgaatttcgcgggcggcttgcacccctggcctcatcgagattcctccacgaccaccaggcagaacttcacattagagatgtcagaggccacgacgccagtatatatgtgtgtcgggtggaggtgctggggctgggagtcggcaccggaaatggcacgcgtttagtagtggaaaaagagcatccccagttaggcgctggaaccgtgctcctgctccgggccggcttctatgctgtcagttttctgtcggtggcggtgggatctactgtctattaccaggggaaatatgcgaaaagtacactctcagggtttcctcagctgtag

SEQ ID NO: 196687 - DNA, 573 bp, synthetic construct
  misc_feature 1..573: note = Description of Artificial Sequence: Synthetic coding sequence
  source 1..573: mol_type = other DNA
atggcctggatgctgctgctgatcctgatcatggtgcaccccggctcttgcgccttgtgggtttctcagccacctgaaatcagaactctggagggctcatctgccttcttgccttgcagcttcaacgcctctcaggggaggctggccatcggctcagtgacctggtttcgggacgaggttgtgccaggaaaggaagtacgtaatgggactcccgagtttagggggaggctggcacctctggcgagtagccggtttctgcatgaccaccaagcggaactccacatccgggatgtgcgcggacacgatgccagcatatatgtgtgccgcgtggaagtgctgggcctcggggttgggaccgggaacgggactcgacttgtggtcgaaaaggagcaccctcaattaggggccggcaccgtgctgctcctgagagccggattctatgccgtgtcatttctgtcggtggcagtggggtcaactgtctattaccagggtaagtgccattgccatatgggcacacactgtcattcctctgacggccccaggggcgtgattcccgaaccccgttgcccttag

SEQ ID NO: 196688 - DNA, 534 bp, synthetic construct
  misc_feature 1..534: note = Description of Artificial Sequence: Synthetic coding sequence
  source 1..534: mol_type = other DNA
atggcctggatgctgctgctgatcctgatcatggtgcaccccggctcttgtgccctctgggtcagccagccgccagagatacgcaccctggaaggctccagtgctttcctcccatgctcttttaacgctagccaggggcgactcgccattgggagcgtcacatggttccgcgatgaggtggtacctggcaaggaagtgcgcaacgggactcccgaattccgcgggcgcttagccccactggcgtctagcaggttcctgcatgatcaccaggccgaactccacattcgcgacgtgaggggtcacgatgcaagcatatacgtctgcagggtggaagtgctcggactgggcgtcggaaccggcaacggaacccgcctagtggtcgaaaaggagcatcctcagttaggagccggcaccgtattactgcttagagctgggttctacgctgtgtcatttctctcagtggccgttgggagcaccgtgtactaccagggcaaatatgcaaagagcacgctcagcggatttcctcagttgtag

SEQ ID NO: 196689 - DNA, 606 bp, synthetic construct
  misc_feature 1..606: note = Description of Artificial Sequence: Synthetic coding sequence
  source 1..606: mol_type = other DNA
atggcctggatgctgctgctgatcctgatcatggtgcaccccggctcatgcgcgctttgggtgtctcagcctcccgagatcagaactctggaagggtcaagcgcatttctaccctgttcattcaatgccagtcagggcaggctagccatcgggtccgttacatggtttagggacgaggtggtacccgggaaagaggtgcgcaatgggacaccagaattcagaggcagactcgctcctcttgcgagctccagattcctgcatgatcaccaggcggaacttcatatcagagatgtgagaggtcacgacgcttccatctacgtctgccgagtggaagtgcttggactgggtgtgggcacagggaacgggacccgtctcgtggtcgagaaggagcatccacagctgggggcaggtactgtactgctgctcagggcaggattttacgccgtctcatttctgagcgtcgctgtggggagtactgtatattaccagggaaaatgtctcacatggaaggggccacggagacaactacctgcagtggttccggccccactcccaccaccatgtgggtcttccgctcacttactgccgcctgtcccagggggatag

SEQ ID NO: 196690 - DNA, 573 bp, synthetic construct
  misc_feature 1..573: note = Description of Artificial Sequence: Synthetic coding sequence
  source 1..573: mol_type = other DNA
atggcctggatgctgctgctgatcctgatcatggtgcaccccggcagctgcgcactatgggtgagccagccgcctgagattcgcacactggagggatcctccgctttcctaccctgttcattcaatgcaagccagggaaggctggccattgggtccgtgacctggttccgcgatgaagtagtccctggaaaggaagtgcgaaatggcactcctgaattcagggggcggttagcacctttagcctcatctcgctttctgcatgaccaccaggctgaattgcatatcagagacgttaggggccatgatgcctctatctacgtgtgccgcgtggaggtcctgggcttaggggttggcacaggtaatgggacgcgccttgtggtggagaaggagcatccccaactcggggcaggaactgtacttctcctgagagcaggattttacgccgtcagtttcttaagcgtcgcagtgggaagtaccgtctattatcaggggaagtgccattgtcacatgggaactcactgccacagtagcgacggacctaggggcgtcatcccagagcctcgatgcccgtag

SEQ ID NO: 196691 - DNA, 498 bp, synthetic construct
  misc_feature 1..498: note = Description of Artificial Sequence: Synthetic coding sequence
  source 1..498: mol_type = other DNA
atggcctggatgctgctgctgatcctgatcatggtgcaccccggcagttgcgcactgtgggttagtcagcctccagagatcaggactctggagggttcctctgcctttctaccttgttcattcaacgcatcccagggtcgcctggccatcggcagcgtaacctggttccgcgatgaagtggtgcctggaaaagaggccgaactgcatatacgggacgtgagagggcatgatgcaagtatctacgtgtgtagggtggaagtccttgggctgggtgtgggaacaggaaacggtacacggctcgtcgtggagaaagagcatccccagctgggtgccggcacagtgctcctgttgagggctgggttttacgccgtctctttcctgagtgtggccgtcgggtctacggtctactatcaggggaagtgtcattgccacatgggaacccactgccacagctcagacggaccgcggggagtaatacccgagccgagatgcccttag

SEQ ID NO: 196692 - DNA, 498 bp, synthetic construct
  misc_feature 1..498: note = Description of Artificial Sequence: Synthetic coding sequence
  source 1..498: mol_type = other DNA
atggcctggatgctgctgctgatcctgatcatggtgcaccccggctcctgcgctctctgggtctcccagcctccagagattagaaccctagaggggtcaagtgcttttttgccctgtagtttcaacgcatctcagggccgactggctattggctcggtaacctggttcagggacgaagttgtgcctggcaaagaggccgaattgcatatcagagacgtcagaggccacgacgcttcaatctatgtgtgccgtgtggaagtgttgggacttggcgtcggtacaggaaatggcactcgcttagtcgtggaaaaggagcacccgcaactcggcgcaggaactgtcttgcttcttcgggccggtttttacgccgtctctttcctgtcggtggctgtgggaagcactgtgtattaccaaggaaagtgccactgccacatgggaacccactgccacagcagtgacggcccccgcggtgtgattccggaaccccgttgcccctag

SEQ ID NO: 196693 - DNA, 534 bp, synthetic construct
  misc_feature 1..534: note = Description of Artificial Sequence: Synthetic coding sequence
  source 1..534: mol_type = other DNA
atggcctggatgctgctgctgatcctgatcatggtgcaccccggctcttgcgccctttgggtgtcgcaacctcccgagatacgcacactggaggggagcagtgcttttctgccttgcagctttaatgcctctcagggccgcttggctatcggcagtgtgacttggttcagagacgaggtcgtgccaggaaaagaggtgcgcaatggaaccccagagttccgcgggcggctcgccccccttgcctcatcacgcttcctgcacgatcaccaggccgagcttcatattagagatgtgcgcggccacgatgcaagcatctatgtctgcagagtggaggttcttgggctgggcgtgggcacggggaatgggactcgtctagtggttgagaaagaacacccccagttaggagccggtaccgtcctgctcctgcgtgctggcttttacgctgtttcattccttagcgtcgccgtaggatcgacagtctattatcaggggaagtacgccaagtccacattaagcggcttcccccagctgtag

SEQ ID NO: 196694 - DNA, 573 bp, synthetic construct
  misc_feature 1..573: note = Description of Artificial Sequence: Synthetic coding sequence
  source 1..573: mol_type = other DNA
atggcctggatgctgctgctgatcctgatcatggtgcaccccggcagctgtgccctgtgggttagtcagccccctgaaatacgaaccttggagggctcctcagcgttcttaccatgctcctttaacgctagccaagggcgcttagctattggaagcgttacctggtttcgagatgaggttgtgccgggcaaagaagtgcgcaacgggaccccagagtttcgcgggagactcgcccccctagccagctcccggttccttcacgaccatcaggcagaattgcacatacgagatgtccgcggccatgacgcctctatctacgtatgcagagtggaagtgctgggtctcggtgtggggacaggcaacggtacccggctcgtggttgagaaagaacacccccagttgggggctgggacagtgcttctactacgtgctggtttctatgcggtctcttttcttagcgtcgccgtagggtccacagtctattaccagggaaaatgccattgtcatatgggaacgcattgtcattccagcgatggtcctcggggagtcatccccgaaccccgctgcccttag

SEQ ID NO: 196695 - DNA, 486 bp, synthetic construct
  misc_feature 1..486: note = Description of Artificial Sequence: Synthetic coding sequence
  source 1..486: mol_type = other DNA
atggacgacatctacaaggccgccgtggagcagctgaccgaggagcagaagaacgagttcaaagcagcctttgacatttttgtgcttggagcagaggatggttgcatctccacaaaggagctgggtaaagtgatgagaatgctgggtcagaaccctactcctgaggagttgcaggaaatgatcgatgaggtggatgaggatggctcaggcacagtagactttgatgaattcctagtaatgatggtcagatgcatgaaggacgattccaaagggaaaagcgaggaagagctgtcagatctcttccgcatgtttgacaagaatgccgacggatacattgatctggatgagctgaaaatcatgttgcaggcgaccggagagaccatcactgaggacgatatcgaagagctgatgaaagacggcgataagaataatgacggaagaattgattacgatgagtttctggagttcatgaagggagttgaatag

SEQ ID NO: 196696 - DNA, 315 bp, synthetic construct
  misc_feature 1..315: note = Description of Artificial Sequence: Synthetic coding sequence
  source 1..315: mol_type = other DNA
atgggcgcccaggaccggccccagtgccacttcgacatcgagatcaaccgggagccagtgggacggatcatgttccagctcttttccgacatttgcccaaaaacgtgcaagaattttctctgcctgtgctctggagagaagggactgggtaagacgaccggcaagaagttatgctataagggcagtacctttcatagagtcgtgaaaaacttcatgatacaggggggggatttttccgaagggaacggcaaagggggagaaagcatctatggtgggtatttcaaggagaacgtggtcttctgcaagatgaaatag

SEQ ID NO: 196697 - DNA, 2805 bp, synthetic construct
  misc_feature 1..2805: note = Description of Artificial Sequence: Synthetic coding sequence
  source 1..2805: mol_type = other DNA
atggccgtgcagcccaaggagaccctgcagctggagagcgccgccgaggtggggtttgtgagatttttccagggaatgcccgaaaaacctacaacgacagttcgactctttgaccggggggacttttacactgcccacggagaagatgcattattggcagccagagaggtgtttaagactcagggagtcatcaaatacatgggacccgccggggctaaaaacttgcagagcgtcgtgttgtctaagatgaactttgagtcatttgttaaggacctcctgctggttcggcagtaccgcgttgaggtctacaagaaccgggccggcaacaaagcttccaaggagaacgattggtacctggcatacaaggcttccccagggaacctgagtcaattcgaagacatcttgttcggcaacaacgacatgtccgcctcaatcggagtcgtcggcgtgaagatgtctgcagttgatggacagcggcaggtgggcgttggctatgttgacagcatccaacgtaagctcggtctctgtgaatttcccgacaacgaccagtttagtaatctcgaggcgcttcttatccaaattggacctaaggagtgtgtgctccccggcggggaaacggccggggatatggggaagttaaggcagatcattcagcggggaggaatcttgattacagagaggaagaaggccgatttctccacaaaagacatctaccaggacctcaatcggctgctgaaaggcaagaaaggagagcaaatgaacagcgccgtgttgcctgagatggagaaccaggtggcggtgtcttcactgagcgcggtcatcaaattccttgagctgctttctgacgactcgaattttggccagttcgagctaactacatttgattttagccagtacatgaagctggatatcgctgccgtgcgcgcacttaacctgttccagggaagtgttgaggatacaaccgggagtcagtccctggcagccctcctgaacaagtgcaaaacgccacaggggcagcgcctggtgaatcagtggataaaacaacccctgatggacaagaataggattgaggaacggctcaatctggttgaagcgtttgtggaggatgccgaactcagacagactctccaggaagatctgcttaggcgtttcccagacctgaatcgactcgcaaagaagttccagcggcaagcagcgaatctgcaggattgttaccgcctataccaaggcattaatcagctgcctaatgtgatccaggctctggaaaagcacgagggaaaacatcagaaactcctgctcgctgtcttcgtgactccgctcacagacctccgcagcgacttttcaaagttccaggagatgattgagactaccctcgacatggatcaggtcgaaaatcacgagttcttagttaaacccagctttgacccaaatttgtcggagctgagagagataatgaatgatctggaaaagaaaatgcagagcaccctcatcagcgctgcccgcgacttgggcctggaccccggaaagcaaatcaagctcgacagctctgcacaatttgggtattacttcagagtcacttgtaaggaggagaaggtccttcgaaataacaagaacttctccactgttgatattcagaagaatggtgtgaagttcaccaactccaagcttacctcactcaacgaggaatataccaaaaataagactgaatacgaagaggcacaagacgccatcgttaaagagatcgtcaacattagcagcggatacgttgagccaatgcagacactaaatgacgtcttggcacagttggatgccgttgtgagcttcgctcacgtgtctaacggcgctcctgtgccttacgtcagacctgcgatcttggagaagggccaaggccgtataattcttaaggcatcaaggcacgcctgtgtggaggttcaggacgaaatagccttcatacctaatgacgtgtattttgagaaggacaagcagatgttccatattattacaggccccaacatgggaggtaaaagtacctacatcagacaaaccggcgtgatcgtactgatggctcagattgggtgttttgtcccatgcgaatccgccgaggtttccattgtggattgtatcctcgctcgcgtgggagctggagactcacagcttaagggggtgtccacattcatggccgagatgctggagaccgcttcaatactgaggtctgcgacaaaggacagcctgatcatcatcgacgagctgggaaggggcacaagtacttatgatggcttcgggttggcctgggcgatcagcgaatatatcgcgacaaaaattggggctttttgcatgtttgctacccactttcacgaacttacggcactggccaatcagatccctaccgtgaacaacctgcatgttacagccctgacaaccgaggaaacacttacaatgctttaccaagtgaaaaagggcgtttgtgatcagagtttcggaatccacgtggccgaattagccaactttcccaaacacgtgatcgagtgcgccaagcagaaggcgctggagttggaggagttccagtatatcggtgagtcccaggggtatgacatcatggaacctgcggccaagaaatgctacctggaaagggaacagggtgaaaaaataattcaggaattcttgtcaaaggtgaaacagatgccattcaccgaaatgtctgaggaaaatataaccataaaactgaagcagttaaaagcagaagtaatcgctaagaataacagcttcgtgaacgaaatcataagtaggattaaggttaccacgtag

SEQ ID NO: 196698 - DNA, 435 bp, synthetic construct
  misc_feature 1..435: note = Description of Artificial Sequence: Synthetic coding sequence
  source 1..435: mol_type = other DNA
atgaccgaggaggtgatcgtgatcgccaagtgggactacaccgcccagcaggaccaggaactggacattaagaaaaacgagaggctttggctcctggacgattctaaaacttggtggagggtacgcaacgcggcgaatcgtacggggtacgttccttcaaactatgttgagcggaaaaacagcctgaagaaggggtctcttgtaaagaacttaaaagatacactcgggctgggaaagacacgaagaaagaccagcgcgagagatgcaagtcctaccccttccacagacgcggaataccctgcgaacggaagtggggccgatcgaatatacgaccttaacattcctgccttcgtgaagtttgcatacgtcgcagaacgcgaggatgaacttagtctcgtgaagggcagccgcgttaccgtcatggagaaatgttag

SEQ ID NO: 196699 - DNA, 1143 bp, synthetic construct
  misc_feature 1..1143: note = Description of Artificial Sequence: Synthetic coding sequence
  source 1..1143: mol_type = other DNA
atgaccgaggaggtgatcgtgatcgccaagtgggactacaccgcccagcaggatcaggagctggacatcaaaaagaacgaaagattgtggcttctggacgacagtaaaacgtggtggagggtgcgaaacgctgccaacagaactggttatgtccccagcaattatgttgaaagaaaaaattcactgaaaaaaggttcattggtgaagaacctgaaggatacactgggcctcggaaaaaccagaagaaaaacaagcgcgagagacgccagcccaacacccagtacagatgcagagtaccctgccaacggctcgggagcggatagaatttacgacttaaatattcccgcattcgttaaattcgcctacgtggctgagagagaagatgaactgtctctggtgaagggatccagggtcacagtgatggagaagtgctcggacgggtggtggagaggttcctacaatgggcagattgggtggtttcctagtaactatgtgctggaggaagttgacgaagccgccgcagagagtccttcctttctttccctcagaaaaggagctagcctttccaatgggcagggctccagggtgctgcacgtagttcagacactgtacccattcagcagcgtcaccgaagaagagttaaacttcgaaaaaggagaaaccatggaagtgatcgagaaacccgagaatgaccccgagtggtggaaatgcaaaaacgccagaggccaagttggcctcgtcccaaagaattacgtggtggttctttcggacggtccagcactccaccccgctcacgcaccacagatcagctacacaggacctagctcaagcggcagattcgccgggagagagtggtattatggaaatgtgacaaggcaccaagccgaatgtgccctgaacgagaggggagtcgaaggagacttcctgattcgtgattctgaatcctcaccttccgacttctccgtttccctcaaagcctccgggaaaaataagcactttaaggtgcagctcgtggacaacgtgtactgtatcggccagaggcggttccatactatggacgaactggtggaacattacaaaaaagcacctattttcacctccgaacacggcgagaagctgtacctggtgagggctctccagtag

SEQ ID NO: 196700 - DNA, 333 bp, synthetic construct
  misc_feature 1..333: note = Description of Artificial Sequence: Synthetic coding sequence
  source 1..333: mol_type = other DNA
atgaccgaggaggtgatcgtgatcgccaagtgggactacaccgcccagcaagatcaggagttagatattaagaagaacgagcgtctctggctgctggacgactccaagacatggtggcgagtgagaaatgccgctaacaggacgggttacgttccttctaactacgttgagcgcaaaaatagcctcaagaaaggttccttagtcaagaatttaaaggacaccctgggattgggcaaaaccagacggaagacatccgcaagagacgcaagcccaacaccctctactgacgcagagtatccagccaatggatccggcgcggaccggatatattag

SEQ ID NO: 196701 - DNA, 252 bp, synthetic construct
  misc_feature 1..252: note = Description of Artificial Sequence: Synthetic coding sequence
  source 1..252: mol_type = other DNA
atgaccgaggaggtgatcgtgatcgccaagtgggactacaccgcccagcaggatcaggaactggatatcaagaagaacgaaaggctatggcttttggatgatagtaagacatggtggagggttagaaatgccgccaacaggactggctatgttcccagcaactacgtggagagaaagaatagcctgaaaaaaggctccctggtaaagaaccttaaagacacacttgcccaacgtttgctccgggtcccatag

SEQ ID NO: 196702 - DNA, 252 bp, synthetic construct
  misc_feature 1..252: note = Description of Artificial Sequence: Synthetic coding sequence
  source 1..252: mol_type = other DNA
atgaccgaggaggtgatcgtgatcgccaagtgggactacaccgcccagcaggaccaagaactcgatataaagaagaatgagcgattgtggctgctcgacgactcaaagacctggtggagggttagaaacgcggctaatcgcacaggatacgtccccagcaactacgtcgaacggaaaaactccctgaaaaagggctcactcgtaaagaacctgaaagataccctggctcagaggctgctgcgagtgccctag

SEQ ID NO: 196703 - DNA, 2169 bp, synthetic construct
  misc_feature 1..2169: note = Description of Artificial Sequence: Synthetic coding sequence
  source 1..2169: mol_type = other DNA
atgtaccgggccctgtacgccttccggagcgccgagcccaacgccctggccttcgcagcgggcgagacctttctggtcctagagcgctcttctgcacattggtggctcgcggcaagagctcgtagcggggagactggttacgtgcccccggcctatcttcgaagacttcaaggtcttgaacaagatgtgctgcaagccattgaccgggccattgaagccgttcataatactgccatgcgtgatggtggcaaatactctttggagcagcgcggggttctacagaaactcattcaccaccggaaggagaccctgagccgtcggggaccatctgcctcaagcgtggccgtgatgactagcagtactagcgatcaccatctggatgcagctgccgctcggcagcccaatggggtttgcagggccggatttgaacgccagcattccctaccatcctcggaacaccttggcgctgacggcggcttataccaaatccccttgccctcatcgcagattccaccgcagcccagacgtgccgccccgacaacacctcccccccccgtgaagcgcagagacagggaagctttaatggcttccggcagtggtggccacaacacgatgccgtccggtgggaactctgttagttcaggctctagtgtgtcttctacctccctggatactctatacacatcgtcttccccgtccgagcccggctcatcctgctcaccgacacccccgccagtccctagaaggggcacccacaccacagtgtcccaggtgcagcccccaccttcaaaggcctccgctcccgaaccccctgcagaagaagaagtggccaccggcacgacatctgccagcgatgacctggaagcattgggaactctctcattggggaccaccgaagaaaaagctgccgctgaagctgcagtgcctcggaccatcggcgcagagttaatggaactcgtgcgacgaaatacaggcctttcccacgagctctgcagagtcgctattggcatcatcgtcggccacatacaagccagtgtgcccgcttcttcccccgtcatggagcaggtgttgttgtccttagtggagggtaaagatctgtccatggcactgccttctggtcaggtatgccacgatcagcagagactggaagtgatttttgccgacctcgcaagacgtaaagacgacgcacaacagcgttcatgggctctgtacgaagatgagggagtgatcaggtgttatcttgaagagctgctccacattctgactgacgctgaccccgaagtttgcaagaagatgtgtaagcgaaatgaatttgagtccgtgttagccctggtcgcgtactatcaaatggagcaccgcgcttcgctgcgtttgttgctccttaaatgtttcggagcaatgtgcagccttgatgctgcaattatcagcacattagtctccagtgtcctccctgtcgaactcgcccgtgacatgcagaccgacacacaagaccatcagaaactgtgctactctgcacttatcctcgccatggtgttctcaatgggagaagcagtgccctacgcccattacgaacacctgggaaccccatttgcccagttcctgctcaatattgtagaggacggcttgcctttggacacaacagaacagctgccagacttatgcgtgaacctcctcctcgcactgaaccttcatctgccggcggccgaccagaatgtcatcatggcagccctctcaaaacacgccaatgtcaagatcttcagcgaaaaactgctcctcctgctgaacagaggcgatgatcctgtgcgcatattcaaacacgaacctcaacccccgcactcagtcctgaagttcctgcaggacgtttttggaagccctgccaccgctgctatcttctatcacactgatatgatggcccttatcgatatcaccgtgcgccacatcgccgatctcagtcccggagataagctacgcatggaatacctttccctgatgcacgctatcgttaggacgaccccctacttgcaacaccgccacagacttcctgatctacaggcaatcttgcgccgtatcctgaacgaagaagagacaagccctcagtgccagatggatcggatgatcgtgcgtgagatgtgcaaagagtttctcgtgctgggcgaagcaccctcctag

SEQ ID NO: 196704 - DNA, 2169 bp, synthetic construct
  misc_feature 1..2169: note = Description of Artificial Sequence: Synthetic coding sequence
  source 1..2169: mol_type = other DNA
atgtaccgggccctgtacgccttccggagcgccgagcccaacgccttggcttttgccgctggtgagacctttttggtgctcgaacggtctagcgctcactggtggttggcggcacgggcaagatctggggagaccggttacgtaccgccagcttacctcagacgcctccagggactagaacaggatgtgctccaagcgatagatcgggcaattgaggcagtgcacaataccgctatgagagacggaggtaaatattccctcgagcagcgtggtgttctccagaagctcatccatcatcgcaaggaaacattatccaggcgcgggcccagtgcttcaagtgtggccgtgatgacatcttcaacgagcgatcaccatcttgatgccgctgcagcccgccaacccaacggtgtatgtcgggctggcttcgagagacagcattcccttccctcatctgagcacttgggagccgatggaggtttataccagatcccccttccctctagccagattcctccgcagccccggcgcgcagctcccacgacccccccacctcctgtcaagagacgagatcgggaggctctgatggcatccggtagtggcgggcacaatacgatgccgtccgggggcaactccgtgtcttccggcagctcggtaagcagcacctctctggatacactatataccagttcgtcgccctctgaaccaggcagctcctgttctccaacaccccctcctgtcccccggcgtggaacccacaccaccgtgagccaggtgcagcctcctccaagcaaagccagcgctcctgaaccgcctgctgaggaggaagtcgccactggtactacttcagcttccgatgacctggaagcactcgggactttgtctctgggcactacagaagaaaaggctgccgccgaggccgccgtcccccggaccataggcgccgagctgatggagcttgtccgcaggaataccggactgtcacacgagctgtgtcgcgtggcgattggcatcatcgtgggccatatacaggccagtgtaccagcatcatcccccgtcatggaacaggtactgttgtctctggttgagggaaaggatctgtccatggcacttcctagcgggcaggtctgccacgatcagcagcgcctcgaagtgatcttcgcggatctggcgcggcgaaaggacgacgcccaacagcgcagttgggccctgtatgaggatgaaggtgtaatcaggtgttatctggaagaactgctgcatattctgacagacgccgaccccgaggtgtgcaagaaaatgtgcaaaagaaacgaattcgagtccgtgttggccttagtcgcctattaccagatggaacatagagcgtctctgagactcctgctgctcaagtgttttggagccatgtgcagcctggacgccgcgatcatttccacattggtgtcatctgtactacccgtcgaactcgctcgggacatgcagaccgacacccaagaccaccaaaaattgtgttatagcgctctcatcctggcgatggtgttctcaatgggggaggctgtgccatatgcacactacgagcatctgggcaccccattcgcacagtttttgctcaacattgtggaggatggcttgcccttggatacgaccgaacagctgcctgatctgtgtgtgaatctactgctggccctaaacctccacctgccagccgccgaccagaacgtcattatggcagcgttgtctaagcatgcaaatgtgaagatttttagcgagaaactcctcctcttactgaaccggggtgatgacccagtcaggattttcaaacacgaaccccagccaccccacagtgtgctgaagtttctccaggatgtattcgggagccccgcaacagcagcaattttttaccatacagacatgatggctctgatagacataaccgtgcggcatattgccgaccttagtcccggggataaaggccccttcggtgcaggtcagcggccgtggcctggcgtcccgcggttgcttgaacccggctccactccttctcgtgagccccaccccgtggagcgatcaggagtcccagcactcactagctcctgggcatccggctgtccacgcccactgcatccggctctgcagttggtaattgacagtgcgttcggcggtcgatccgtgtag

SEQ ID NO: 196705 - DNA, 2148 bp, synthetic construct
  misc_feature 1..2148: note = Description of Artificial Sequence: Synthetic coding sequence
  source 1..2148: mol_type = other DNA
atgtaccgggccctgtacgccttccggagcgccgagcccaacgccctcgcctttgcggctggcgagacttttctggtgttggagcggtcatctgctcactggtggctggccgcccgggcccgcagcggcgaaacaggctacgtgccacccgcatatctgagaaggcttcagggccttgagcaggatgtcctgcaagcgattgaccgcgccatcgaagctgtccataatacagcaatgagagatggggggaaatactccttggagcagcgaggagtactgcaaaaactaatacatcatcgaaaggagacactgtcacggcgcgggccttctgcttcttctgttgcagtgatgacatcatccacctcagaccatcatctggacgccgccgccgcccgccaacccaatggagtgtgtagggcaggctttgagagacaacattcactgccatctagcgaacacttgggcgccgatggtggcctataccagattcctccgcagccccggagagcagcgccaaccactcctccacccccagtgaagagaagagatagggaggcactaatggcctccggcagcggcggtcacaacactatgcccagtgggggaaattcagtctcatctggatcatccgtgagctctacaagcctggacacactgtatactagctccagcccaagcgagccaggatcctcctgcagccctaccccacctcctgttccaagacgtggaactcacaccacagtttcacaagtacagcctcccccatcaaaagccagcgccccggagcctccagcagaagaggaagtggccacaggcactacatccgcctccgacgatctggaagcactgggcacattgagcctgggtaccaccgaggagaaagccgctgccgaagccgccgtgccccgaaccatcggtgctgagcttatggagctggtccgccggaacacgggtctatcccacgaattgtgccgagtagctatcggcattatcgtcggccacatccaggccagtgtgccagcgagctcaccggtgatggagcaggtcctgctgtcgctagtggaaggaaaggatttgtcgatggcgttacccagcggacaggtctgccacgaccagcagagactcgaggtgatattcgccgatttggccagaagaaaggacgacgcccaacagagaagctgggcactctatgaagacgagggggtaatccggtgctacctggaggagctcctacacattcttaccgatgccgacccggaagtgtgcaagaagatgtgtaagagaaatgagtttgagtccgtgctggcactggtggcatactatcagatggagcacagagcatcattgaggctacttctgctcaagtgttttggagcgatgtgctctttagacgccgccataattagtacgctggttagttcagttctgcccgtggagttagccagggacatgcagactgacacacaggaccatcagaagctttgttattcagccctgatactggcgatggttttttccatgggcgaggctgtaccatatgctcactatgagcatctcggcactccgtttgcccaatttctcctgaatattgtggaggatggtctacctctcgatactactgaacaacttccagatctctgcgttaatcttctcttggccttgaacctgcacttaccggcagcagaccagaatgtcattatggccgccctgagtaaacatgctaatgtcaagatcttctctgagaagctgctcttactgttgaatcgtggagatgacccggtgcggatatttaaacatgagccgcaacccccacacagcgtgcttaagtttttacaggacgtgttcgggagtcccgcgaccgcagcaattttctaccataccgatatgatggccctgatcgacattacagtcagacatatagctgacctatctcctggcgacaaacttagaatggagtatctttctttaatgcacgctatagtgaggaccacaccctacttgcagcacaggcaccggctgcccgacctccaggccattctgaggagaatcctgaacgaggaggaaaccagtccgcagtgccagatggatcgtatgatcgtgcgggagatgtgtaaggaattcctggttttaggggaggctccaagttag

SEQ ID NO: 196706 - DNA, 3405 bp, synthetic construct
  misc_feature 1..3405: note = Description of Artificial Sequence: Synthetic coding sequence
  source 1..3405: mol_type = other DNA
atgagccggagcgtgctgcagcccagccagcagaagctggccgagaagctcactatactgaatgataggggggtgggaatgttaacccggctctacaatatcaagaagcagggtcaggtttggaaagcctgtggcgacccgaaagccaagccttcttacctgattgataaaaatctggagtcggctgtgaaattcattgtgcggaagtttcctgctgtagagacccgcaacaataaccagcaactggcacagctccagaaggaaaaaagtgagattctgaagaatcttgccctgtactatttcacgttcgttgacgtcatggaattcaaggatcacgtctgcgagctcctgaataccatcgatgtctgtcaggtgttctttgatatcaccgttaactttgaccttactaagaattaccttgatctgatcatcacgtatactacattgatgatcctgcttagtcgcatcgaagagcgaaaggctattattggattgtataattatgctcacgagatgacacatggggccagcgatagagagtatcctagactaggacagatgatcgtggactatgagaatccactgaagaagatgatggaggagtttgtccctcacagtaagtctctgtccgatgccctcatctccctgcagatggtgtatccgaggcgaaacctctcagccgatcagtggaggaacgctcagctcctgtccctgattagtgcccccagcacaatgttaaacccagcacagtcagacaccatgccttgcgagtacctttccctggacgccatggagaagtggatcatcttcgggtttatcctgtgtcacggtatcctgaacaccgatgcgacagcccttaatctgtggaagctcgcactgcagagctccagctgtctatccctgttccgcgatgaagtgtttcacatacataaggcagcagaagacctctttgtaaatatccggggatacaacaaaaggattaacgatattagagagtgcaaggaagcagctgtgtcccatgctgggagcatgcacagggagaggagaaagtttctacgctcagctttaaaggagcttgccaccgtgctgagcgatcaaccaggcttactgggccctaaggccttgttcgtgtttatggccctgagcttcgcgagggacgaaatcatctggttgctgcgacatgctgacaatatgcctaagaagagtgcggacgattttattgacaagcacatcgctgagcttattttctacatggaggagcttcgcgctcacgtaagaaagtatggccctgtcatgcagcgttactatgtgcagtacctatcaggcttcgatgctgtggtgctgaatgagttggttcagaacctgagcgtctgccctgaagacgaatcaatcattatgtcatccttcgtcaacacaatgacgtcactgagtgtaaagcaggtggaggacggtgaggtgttcgactttagaggaatgaggttagattggttcaggttgcaggcatacacaagtgttagcaaagcgagcctggggttggctgatcatcgtgagctgggcaaaatgatgaataccatcattttccacaccaaaatggtggactcactggtggagatgctggtggagacatcagatctgagcatcttttgtttttattcccgggccttcgaaaagatgttccagcaatgtttagaattacccagtcagtctcggtactccatcgcatttccactgctctgcacccatttcatgagctgcactcacgagttatgtcccgaggaaaggcaccatattggcgaccggagcttgtcattatgtaacatgttcctggacgaaatggccaaacaggctcggaatttgattacagatatctgtacagaacagtgcacactgtcagaccagctgctaccaaagcattgtgctaaaacgatctcccaggctgtcaacaaaaaaagcaaaaagcagactggcaaaaaaggcgagcccgagagggagaagcccggtgtggagtccatgaggaaaaacaggctcgtggttaccaacctggataaactgcacactgcactgagtgagctctgcttctccattaattacgttccaaacatggtggtgtgggaacacacctttaccccgcgggaatatttaacaagccatctcgaaattagattcactaaatccatcgtgggaatgacaatgtacaaccaggcgacgcaggagattgccaaaccttcagaacttttaacctcagttagggcgtacatgaccgtactgcaatcaatcgaaaactacgtgcagatcgacattacgcgggtgtttaataacgtcttgctccagcaaactcagcaccttgatagtcacggtgagcccacaatcacctcattgtacactaattggtatctggaaactctgttgcgccaagtctctaatggacacatcgcttatttcccagccatgaaagcattcgtgaatttaccgaccgagaatgagctgaccttcaacgccgaagagtactctgatataagcgaaatgcgctcattatcggaactcttaggcccctacgggatgaagttcctgtccgaatctcttatgtggcatatctcgtctcaggtcgccgagctcaaaaagctggtcgtagagaacgtggatgtattaacacagatgagaacatcctttgataagccagatcagatggcggctctctttaaacgtctgagtagcgttgacagcgtcctaaagcgtatgactattattggggtgattctctcctttcggtcgttagcccaagaggcactgcgggatgtgctgtcttaccatatccccttcctggtcagctccatcgaggatttcaaggaccacatcccaagagagacagatatgaaggtggctatgaacgtgtatgaactctcctccgccgccggcctgccctgcgaaatagatcccgcactcgtggtggccttgtcttcacagaaatctgaaaacatcagccccgaggaagagtataagatcgcctgcctcctcatggtgttcgttgccgtgtctctacctactctggcatccaacgtgatgagtcaatatagccctgctatcgaaggccactgtaataacatccactgtctggccaaggccataaatcagatcgctgccgccctgtttacaatccacaagggatccatcgaagatcgcctcaaggaattcctggctctcgcttcgtcctccctgcttaaaatcggccaggaaaccgataagacaacgacacggaatagagaaagcgtgtaccttttgctcgacatgatagtgcaggaatctcctttcctgacaatggacctacttgagtcatgtttcccgtacgtgctgctgcggaatgcctatcacgctgtctacaagcaatctgtgacctctagtgcatag

SEQ ID NO: 196707 - DNA, 3387 bp, synthetic construct
  misc_feature 1..3387: note = Description of Artificial Sequence: Synthetic coding sequence
  source 1..3387: mol_type = other DNA
atgagccggagcgtgctgcagcccagccagcagaagctggccgagaagctcacgattcttaacgatagaggagtgggaatgctgacaagactgtacaatatcaagaaggcttgtggcgaccctaaggctaagcctagctacttaatcgataagaatttagaaagcgcagtcaagttcatcgtgaggaagttcccagcagtggaaaccagaaacaacaaccaacagctggctcagctacagaaagagaagtccgaaatcctcaaaaatctggcactctattattttacgtttgtggatgtgatggagttcaaggatcatgtgtgtgagttgttgaacaccatcgacgtgtgccaggtgttttttgacataacagtaaacttcgacctaactaagaactatctggatctcattatcacatatacaactctaatgattcttcttagccgaatagaggagcggaaggccatcatcggtttatataactacgcccatgagatgacccatggcgcgtccgatagagagtacccaaggctgggccaaatgattgtggattatgagaatcctctgaaaaaaatgatggaggagtttgtgcctcatagcaagtcactgtccgatgcactaatttccttgcagatggtatatccgagacggaacttgagcgcagatcagtggaggaacgcgcagctgctcagtcttatctccgcgcctagcaccatgctcaaccccgctcagagtgacactatgccctgcgagtatctcagccttgacgcgatggagaagtggatcatattcgggtttattctttgccacggcatcctcaatacagatgcaacagctctgaatctgtggaagttagccctgcagtcctcatcttgcctgagcctgttccgtgacgaagtatttcacatacataaggctgctgaggacctttttgtgaatatcagagggtacaacaagagaatcaatgacatacgggagtgtaaagaggccgcagtgtctcacgccggcagtatgcatcgcgagcgccgcaagtttttgaggtctgcgctgaaggagctcgctaccgtcctgagtgaccaacccggcctcctgggacccaaagcgctgttcgtttttatggccctcagctttgcccgggacgagattatctggttgctgcggcacgccgataacatgccaaaaaagtcagcggacgacttcatcgacaagcacatcgcagagctcatcttctacatggaagaattgagggcccacgtaaggaagtacgggcccgtgatgcagcggtactacgttcagtatctatctggcttcgacgcggtcgttttgaacgagctggtccaaaaccttagcgtgtgtccagaggatgagtctattatcatgtcgagcttcgtcaataccatgacaagcttaagcgttaagcaggtagaggacggagaagtctttgacttccgaggcatgcggctcgactggttccgcctccaggcgtacacctctgtgagcaaggcctcactgggcctggcagatcatagggaactgggaaagatgatgaatactattattttccataccaagatggttgactcactggtggaaatgttggtggaaacttctgatctgtcaattttctgcttctacagtcgggcattcgagaaaatgttccagcaatgcttagaacttccatcacagtcgcgctacagcattgcttttccactcctttgtactcactttatgtcatgtacacatgaactgtgtcctgaagaacgccaccatataggagaccgatcgctgagcctatgtaacatgttcctggacgaaatggctaagcaggctcggaatcttataactgacatatgtaccgagcagtgtacactttctgaccagctgttgcccaagcactgtgccaagaccattagtcaggccgtgaataagaagtccaagaaacagaccggaaaaaagggggagccagagagagagaagccaggcgtggaatcaatgcggaaaaaccgcctggtggtgacaaatctcgataagctgcacacagccctgagcgaattgtgttttagcatcaactacgtacctaatatggtcgtgtgggaacatacgtttacccccagggagtacttgacatcccaccttgagattagattcacgaagtccattgtgggcatgactatgtacaaccaggctacacaagaaatagcaaagcctagtgaactgttaaccagcgtgcgcgcgtacatgacagtcctgcagagtatcgagaactacgttcaaattgacattacacgcgtgtttaataatgttctgctgcagcaaacccaacatttagacagccatggcgaacccactatcaccagcctgtataccaactggtatttagaaactttacttcgtcaggtcagtaacggacatattgcgtacttccccgccatgaaagccttcgtcaatctgccaaccgaaaatgagctgactttcaatgctgaagagtattccgacatctcagagatgcgaagtctcagcgagctcctgggaccatacggtatgaaatttctctccgaatccctgatgtggcacatttcaagccaagtcgccgagctcaaaaaactggtggtggaaaacgttgatgtactgacacaaatgagaactagcttcgataagcctgaccagatggccgcactgttcaagcgtctctcgtctgtcgacagcgtactgaaaagaatgacgataatcggggttattttaagctttagatccctggctcaggaagcgttaagagatgtgctctcatatcatattcccttcctcgtgagctcgatagaggacttcaaggaccatatcccacgggagacagacatgaaagtggccatgaatgtttacgaactgagcagcgctgcaggactgccttgcgagatcgacccagccttggtcgtcgctctctctagccagaagagcgagaacatttcccctgaggaggaatacaagatcgcgtgtttgcttatggtttttgtggcagtttcattacccaccctggcctcaaacgtgatgagccagtattcacccgcaattgagggtcattgcaataatattcattgcctggccaaagccatcaaccaaattgccgccgccctctttaccatccataagggctccattgaggacaggctgaaggagttcctggctcttgcaagcagctctttgttaaagatcggacaagagactgataagaccaccacaaggaaccgagaaagcgtgtacctgctgctggatatgatcgtgcaagagtccccttttttgacaatggaccttttggaatcgtgcttcccgtatgttcttttgagaaatgcttatcacgccgtatataagcaatcagtgacatctagcgcctag

SEQ ID NO: 196708 - DNA, 2649 bp, synthetic construct
  misc_feature 1..2649: note = Description of Artificial Sequence: Synthetic coding sequence
  source 1..2649: mol_type = other DNA
atgcccgccctggcctgcctgcggcggctgtgccggcacgtgagcccccaggctgtgttgttcctcctcttcatcttctgtttattctcagtgttcatttctgcctactatttatatgggtggaagcgcgggctagagccttctgcagatgctcctgagcctgattgtggagaccctccgcctgtggccccgtcccggctgctacccctgaagcctgtacaggcagcaacaccatcacgaacagacccattagtcctcgtgttcgtagagagcctctattcccaattagggcaagaggtcgtggctattctggaatccagtagatttaagtacaggaccgagatagctcctgggaagggagacatgcccacactgaccgacaaaggccggggccgcttcgcgctgattatctatgaaaatattcttaagtacgtgaatctcgacgcctggaaccgggagctgctcgacaaatattgcgtcgcctacggggtgggaatcatcggatttttcaaggcaaacgaaaatagcttgctttccgcccagcttaagggttttccactgttcctgcatagtaacctgggactcaaggattgttccatcaacccaaaaagtcctttgttgtacgtcactcggccttcagaagttgagaagggtgtcctgcctggcgaagattggacagtcttccagtctaatcactcgacatacgaacctgtattactggcaaagacgaggtcgtcggaaagcatcccacatctcggtgctgacgcggggctccacgcagcacttcacgctaccgtggtgcaggacctggggctgcatgatggcatacagagagtcctatttggcaacaatctcaacttttggcttcacaagttggtgttcgttgacgctgtcgcatttctgaccggaaaacgtctgtctctgcctctggatcgatatatcctcgttgacatcgatgacatctttgtaggaaaggagggcacacgaatgaaagtggaagatgtgaaggctttatttgatacccagaatgagcttcgagcccacatcccaaattttacattcaatctggggtactcaggcaagtttttccacaccggaaccaacgcagaggatgctggtgacgatctgctcctttcttatgtgaaagaattttggtggttcccccatatgtggtcccacatgcagccccacctgtttcataaccagtcagtactcgccgagcaaatggctctgaataagaagtttgccgtggaacacggcatccctactgacatgggctatgcagttgcccctcaccatagcggagtgtatcccgtacatgtgcagctgtacgaggcgtggaagcaggtgtggagtattagggtgaccagcactgaggagtaccctcacctcaaacccgcccggtataggcggggtttcatacataacgggataatggtcttaccccggcagacttgcgggctctttactcataccatattctataatgaatacccagggggttcatccgagctggacaagattattaatggaggggagctcttcctgactgttctgctgaatccgattagtatcttcatgactcatctatctaactatggaaatgacagattagggctgtacaccttcaagcatctggttcggtttctccacagctggacaaacctcaggcttcagactttacctcccgtccaactggcacagaagtattttcaaatcttctccgaggaaaaagaccccctctggcaggatccgtgtgaagataaacgtcacaaggacatctggtctaaggaaaaaacctgtgaccgatttccaaagttgctcataatcgggcctcagaagactgggaccactgccttgtacttgtttctgggtatgcacccagatctttcttccaactacccttcttccgaaacatttgaggagatccagtttttcaatggccataattaccacaagggcatcgactggtatatggaatttttccctatcccatcgaatacgacgagcgatttttactttgagaaaagtgccaactacttcgattctgaggtggccccccggcgagccgccgcactacttcccaaagctaaagtcttgacaatcctgattaacccagccgaccgcgcatattcctggtatcagcaccagcgcgcacacgacgaccctgtggctttgaaatacaccttccacgaggtcatcactgctggatccgacgcctccagcaaactgcgggcgcttcagaacagatgcctcgttccgggatggtacgctacccacattgagcggtggttgagcgcctatcacgccaatcagatcctggtccttgacggtaagctcctgagaacagaaccagctaaagtgatggacatggtgcagaagttcctcggcgttacaaatactattgattaccataaaaccctcgctttcgaccctaagaagggattctggtgccagctcctggaaggagggaagactaaatgcctgggaaagtcaaaaggccgtaaataccccgagatggaccttgactctcgagcttttcttaaggactattaccgggatcataatatcgaactgagcaaactgctctataagatggggcagactctgccaacctggctcagagaagacctgcagaacaccagatag

SEQ ID NO: 196709 - DNA, 72 bp, synthetic construct
  misc_feature 1..72: note = Description of Artificial Sequence: Synthetic coding sequence
  source 1..72: mol_type = other DNA
atgcccgccctggcctgcctgcggcggctgtgccggcacgtgagccctcaggccgttctgtttcttctgtag

SEQ ID NO: 196710 - DNA, 480 bp, synthetic construct
  misc_feature 1..480: note = Description of Artificial Sequence: Synthetic coding sequence
  source 1..480: mol_type = other DNA
atgcccgccctggcctgcctgcggcggctgtgccggcacgtgagccctcaagcggttctttttctgctcttcatattttgtctcttttccgtgtttatcagtgcatactacctgtacgggtggaagaggggtctagaaccatcagctgacgcgccggaacctgactgtggggatccccctccggtcgctccatcccgccttctgccgcttaagcccgtgcaagcagcaacaccctcaaggactgacccacttgtgctggtgtttgttgagtccctctatagccaacttggacaggaagtcgtggctatcctcgagagttccaggtttaagtacagaactgagattgcccccggtaagggcgatatgccaacactcacggataaagggaggggtcggttcgcgttaattatctacgaaaacatcttgaagtatgtgaacttagatgcttggaatagggagctcctggacaagtattgctag

SEQ ID NO: 196711 - DNA, 207 bp, synthetic construct
  misc_feature 1..207: note = Description of Artificial Sequence: Synthetic coding sequence
  source 1..207: mol_type = other DNA
atgcccgccctggcctgcctgcggcggctgtgccggcacgtgagccctcaggctgtcttgttcttactgttcatcttttgcctattcagtgtgttcatttcagcctactatctgtacggctggaaacgcggactggagcctagcgccgacgccccagaaccagattgcggtgatcctccacctgtggctccttcaagactgctctag

SEQ ID NO: 196712 - DNA, 2283 bp, synthetic construct
  misc_feature 1..2283: note = Description of Artificial Sequence: Synthetic coding sequence
  source 1..2283: mol_type = other DNA
atgcccaccctgaccgacaacacccacggccggtacgtgctggtgatctacgaaaacctgctgaaatacgtgaaccttgatgcttggtcaagagaactcttggataggtactgcgtagaatatggtgtgggtatcatcgggttctttcgggcccacgagcactccctcctcagcgcgcaattaaaaggatttcccctctttttgcacagtaatctggggctgagggactatcaagtgaacccgtcggcccccctactacacctgacccggccgtcacgccttgagcccggcccgttgcctggagacgactggactatattccagtcaaaccactcaacttatgagcccgtgcttctagcatctctgaggccagcggaaccagcagtgcctggccctgtactccggcgggcgcgtttacccacggtagtgcaggatcttggactgcacgacggcatccaaagggtactgtttggacacggcctttctttctggttgcataaacttatctttgtcgacgcagtggcttacctcacagggaagcggctctgtttggatctggacaggtatattttggtcgatatagacgacatttttgtcggcaaggagggtacaaggatgaaggtagcagatgtggaagccctcctcacgactcagaacaaactgcggactctcgtgcctaacttcaccttcaatttgggattctctggaaagttctaccacaccggtacggaggaagaagacgcgggggacgacatgttgctgaagcatcgaaaagaattttggtggttccctcacatgtggtcacatatgcagccacacctgttccataaccgtagtgttcttgccgatcagatgcggctgaataagcagtttgcactggagcacggtatccccacagatctggggtatgccgttgccccacaccacagcggagtttatcctatccacacacagctttatgaggcttggaagtcagtctggggcatccaggttacatcaactgaggagtacccccacctgcgccctgctagatatcggcgagggtttattcataacgggattatggtcctgcctcgtcagacctgcggcctctttacccacaccattttttacaacgagtaccctggaggatctagagagcttgaccgctcaataagggggggcgaactgtttcttactgtgcttcttaatccaatcagcatctttatgacccatttatccaactacggcaacgatcggctggggctctacacttttgaaagtctcgtgcgcttcctgcaatgctggacaagactccgcttacagacgctacccccggtgcctctggctcagaaatacttcgaactctttccacaagagcgaagccctctgtggcagaacccatgtgatgataagaggcacaaggacatatggagcaaagaaaagacatgtgatagactcccaaaatttttaattgtcgggccccagaaaaccggcaccactgccattcatttcttcctaagtctgcatcccgctgtgacctccagtttcccaagccctagcacattcgaagagatccaattcttcaacagccccaattatcacaaggggattgactggtacatggactttttcccagtaccgagcaacgcttctaccgattttctgtttgaaaagagtgcaacgtatttcgactccgaagtggtccctcgaagaggtgcagccctcctgcccagggctaaaattattaccgtgttgaccaacccagcagaccgggcctactcctggtaccagcaccagagggctcacggggaccccgtcgccctgaattacactttttatcaggtcatttccgcctcatcacagacgcctctcgcattgcggtccctgcaaaaccgctgtctggtacccggatactattctacccatctccaacgctggttgacttattatcccagtgggcagctgctcattgtggatggacaagaactgaggactaatcccgccgcaagtatggagtcaatccagaaattcctgggcattacgccattcctgaattatacccgcacactgaggttcgacgacgacaaagggttctggtgtcaagggctcgagggcggcaaaacccgctgtctgggaagaagcaaaggtcgaagatatcctgatatggatacagagtcacgtctcttcctcactgactttttccggaaccataacctagaactatctaaacttctgtctagacttggtcagcccgttccctcttggctgcgagaagaattgcagcactcatccctaggatag

SEQ ID NO: 196713 - DNA, 2652 bp, synthetic construct
  misc_feature 1..2652: note = Description of Artificial Sequence: Synthetic coding sequence
  source 1..2652: mol_type = other DNA
atgctgcagctgtggaaggtggtgcggcccgcccggcagctggagctacacaggcttatcctgctgcttattgccttttcactcggtagtatgggctttctggcttattatgtctccacctctcccaaggctaaggagcccttacctctgccactgggcgattgttcatcgggcggcgcggctggcccggggccggctcggcccccggtgcctccccggccgcccagacctccagaaacagccaggacagaacctgttgtgctagtgtttgttgaatctgcatactcacagctcgggcaagagattgtcgctatcctggaatcatccagattcagatactccacagagctggcacccggaagaggggacatgccaactctgactgacaatacacacggcagatacgtgctcgtcatctacgagaatttgttgaagtacgtcaacctcgatgcctggagtagggagttgttggatagatactgcgtggaatacggagtcggaattattggtttttttagggcacatgaacacagcctcctttcagcacagctaaagggctttcctctctttctgcatagcaacctgggtctgcgggattatcaggtgaatccttcagccccgctgctgcatttaaccaggcccagtcggctagaaccaggccctctgccaggagacgactggacaatattccaaagtaaccattcgacttacgagccggtgctgctcgctagcctcaggcccgccgagcctgcagtaccggggcctgtgcttcgacgagcacgtttgcctacagtggtgcaggatctggggctgcatgacggtatccagcgcgtactcttcggacacggcctcagcttctggctgcataagctaatctttgtcgacgccgtggcttacttaactggaaagaggttgtgcctagatctagataggtatattctggtagacattgacgatatcttcgttggcaaagaggggacccgcatgaaggtggcggatgtggaagctctgctcaccacccaaaacaaacttcgcactttggtgcccaactttaccttcaatctggggttctccggcaagttctaccacactggaaccgaagaggaagatgccggcgacgatatgctgcttaaacatcgcaaggaattctggtggtttccacatatgtggagtcatatgcagccccacctgttccataaccgcagtgtgctggccgatcagatgagactcaataagcagtttgctctcgaacatggtatcccaacggacctgggatatgcagttgcaccccatcacagtggtgtatatccgattcatacccagctgtacgaggcatggaagtctgtgtggggcattcaggtcacatctacggaagagtatcctcatctacgacctgcccgttaccgtcggggatttatccataatggcatcatggtgttgccacgacagacctgcggcctattcacacatactatcttttacaacgagtatcctggcgggagccgtgaactggaccgcagcattcgaggcggagaactgtttctgaccgtcttactcaaccccatcagcattttcatgacacacctatcaaattatgggaacgaccgcctcggtctgtataccttcgaatccctggtcaggttccttcagtgttggactcgcctgcgcctacagaccttaccgcccgtgccccttgcccagaagtacttcgagctgttccctcaggagcggtctccactgtggcaaaatccctgcgatgacaagcggcacaaagatatatggagtaaggaaaagacgtgtgaccgactacccaagtttttgatcgtgggacctcagaagaccggcacgaccgctatacattttttcctatccctgcatcccgccgtgacatctagctttccctctcctagcacatttgaggagattcagtttttcaactccccaaactatcacaaaggaatcgactggtatatggatttctttcctgttccttctaatgcttctacagacttcttgtttgagaaatcagccacctatttcgatagcgaagtggtgccccggaggggagctgccttgctccccagggcaaagattataacagtgcttaccaatccggccgaccgagcctatagctggtaccagcaccagagagcccacggcgatcctgtggcactcaattataccttctatcaggttatctcagcgagcagccaaacacctttagcactgagatccctgcagaatagatgcctcgttcccggatactactctacacacctccaaagatggcttacatattacccatctggacaattactcatcgtggacgggcaggagttgcgaaccaaccccgctgcttctatggagagcattcagaaatttctgggaattactccgttcctgaactacactcgcacgctgcgcttcgatgacgacaaggggttttggtgtcaaggtttggagggtggcaaaacacgatgtcttggacgttctaaggggcggcggtacccagatatggacactgaatcgcgcttgttcctgaccgacttttttcggaaccacaacctcgagctgtccaaactgctatcacgacttggacagcctgtgccatcctggttgagggaggagctgcagcattcttctctggggtag

SEQ ID NO: 196714 - DNA, 450 bp, synthetic construct
  misc_feature 1..450: note = Description of Artificial Sequence: Synthetic coding sequence
  source 1..450: mol_type = other DNA
ggcgaccccgtggccctgaactacaccttctaccaggtgatcagcgcatcctctcagaccccactggcgttacggagcctgcaaaataggtgtttagtgccaggctactattcaactcatctacagagatggctgacctactatcccagcggccagcttctgatcgtggacggacaagaactgaggactaatcccgccgctagtatggaaagtatacagaagtttctaggtataacgcctttcctgaactacacaaggactttaaggtttgacgatgacaagggattttggtgccaaggattggagggcggaaaaacccggtgtcttggccgatcaaaaggacggaggtaccccgacatggataccgaggtcagtaaagcaagaggacgaggcattcctctccacttccaggacctgatcctgtgtcctacttcttaccatttttgttag

SEQ ID NO: 196715 - DNA, 696 bp, synthetic construct
  misc_feature 1..696: note = Description of Artificial Sequence: Synthetic coding sequence
  source 1..696: mol_type = other DNA
atgcgggtgcccgtgttcgaggacatcaaggacgagaccgaggaggaaaagatcggcgaggaagaaaacgaagaggatcaggtgttctataagccagtcatagaggatctttcaatggagctcgccagaaaatgtacagagttaatttcagatatccgctacaaagaagaatttaaaaaatccaaggataagtgcacgtttgtgacagacagtcccatgctcaatcacgtgaagaacatcggtgcctttatttcagaagccaagtacaaaggcaccattaaggcggatctgtccaattccctctataagagaatgccagcgacgattgactccgtgtttgccggggaggtgacacagctgcaatcggaagtggcatataaacagaagcacgacgcagcaaaaggcttctcggattacgcacatatgaaggaaccgcccgaagtgaagcacgcaatggaggttaataagcatcagtccaacattagctacaggaaggatgtgcaagacacccacacatactctgctgaactagatagaccagatataaagatggccacacagatatccaaaattatttcaaacgctgaatataaaaaaggtcagggtatcatgaacaaggagcctgcagttattggacgtccggatttcgaacacgctgtggaagctagcaaattgagctcacaagtaaggttatag

SEQ ID NO: 196716 - DNA, 3045 bp, synthetic construct
  misc_feature 1..3045: note = Description of Artificial Sequence: Synthetic coding sequence
  source 1..3045: mol_type = other DNA
atgcgggtgcccgtgttcgaggacatcaaggacgagaccgaggaggagaagatcggagaagaggaaaacgaggaggatcaggttttctataaaccggtgattgaggatctctccatggagttagcccggaaatgtaccgagctgatatccgatataaggtataaggaagagttcaaaaaaagtaaggacaaatgcactttcgttaccgactcaccaatgctgaatcatgttaaaaacataggagcttttattagcgaggccaaatacaagggaacaatcaaggcagacctgtcgaacagcctgtataagcgtatgcctgccaccattgatagcgtctttgctggcgaagtaacacaacttcagagcgaggttgcgtataaacagaagcatgacgcggccaaagggttctccgactacgcccacatgaaggaaccccccgaagtgaagcatgcaatggaggtcaacaagcatcagagcaacatctcctaccggaaggatgttcaggatactcacacatatagcgccgaactggatagacccgatatcaagatggcaacacagatttccaagataattagtaatgctgagtataagaaaggccagggcattatgaacaaagagcccgccgtgataggccgcccagattttgagcacgccgtggaggcgagcaagctgtccagccaaattaagtacaaggagaagtttgataacgagatgaaagataagaagcatcattataaccccctggagagcgcatcgtttcgacagaatcaactggccgctactctggccagcaatgtcaaatacaagaaagatatccagaacatgcatgaccccgttagcgatctaccgaatctcctattcttggatcacgtgcttaaggctagtaaaatgctgtctggccgagagtacaagaagctgttcgaggagaataaaggcatgtatcatttcgatgcggatgctgtagagcacttgcatcataaagggaacgcggtgcttcagagccaagtgaagtacaaagaggagtatgaaaagaataaaggaaaacccatgctagagtttgtggaaacaccaagttaccaagcgtccaaagaggcgcagaaaatgcaaagcgaaaaggtctacaaagaggacttcgagaaagaaatcaagggccgctcttccctggatctggacaaaacgcccgaatttctacatgtaaagtacataacaaatctgctccgtgaaaaagaatataagaaagatctggagaacgaaatcaagggcaagggaatggagctcaattctgaagtgttggacattcagcgggctaagcgggctagcgagatggcctctgagaaggaatataaaaaagatctggagagtataatcaaaggtaaagggatgcaggccggcacagacacactcgagatgcagcatgccaaaaaggctgcagaaatcgcctctgagaaagactacaagagagacctggagaccgagatcaagggcaagggtatgcaggtgtcaacggacactctcgacgtccagagagctaaaaaggcctcagagatggcaagtcagaaacagtacaaaaaagatctggaaaatgagattaagggcaaaggaatgcaggtgtccatggacataccagacattctgcgagctaaaaggacctcagaaatatattcccagagaaaatataaagacgaagcagagaaaatgctatctaactactccacaattgcagataccccagaaatacagagaattaagactacacagcagaacatcagcgccgtcttttataaaaaagaagtcggtgcaggcacagcggtcaaggattccccggagatagagcgcgtcaagaaaaatcagcagaatatatcgtctgtcaaatacaaggaagagatcaagcacgctaccgctatttcggaccctccggagctaaagcgcgtgaaggagaaccagaagaacatatctaatctccaatacaaggagcagaactataaggctaccccagtctcaatgacacccgagattgagcgagtgcgcaggaatcaggaacagctgtccgccgtgaagtacaaaggcgagctccagcggggcaccgctatcagcgatcccccagagctgaagagggctaaggaaaaccagaaaaacatatcaaatgtatattatcgcggacagcttggaagggcgacaactctgtcagttacacctgagatggaacgcgtaaaaaagaatcaggaaaacataagctcagtcaagtatacacaagatcacaaacagatgaaaggacgtcctagtctgatcctggacactcccgccatgagacacgtgaaagaagctcagaatcatattagtatggtcaagtaccatgaagacttcgagaaaactaaaggccgaggattcaccccagttgtggatgatcccgtaacagagcgtgtcagaaagaatacacaggtggtgagtgacgccgcctataagggagtacacccccacatcgttgaaatggaccggaggcctgggataattgtggatttgaaggtatggcgtacagacccaggttccatatttgatcttgaccctctcgaggacaacatccaatcccggtctctgcatatgctttcagaaaaggcctcccactatagacggcactggagcagaagccacagtagctcaacatttggcactggtctcggagacgacagaagtgagatctccgaaatctacccctcctttagctgttgttcagaggtcacccggccaagtgacgaaggggcacccgtcttgccaggcgcctaccaacagtctcatagtcagggatacgggtacatgcatcaaacctcggtttcctccatgagaagcatgcagcactcaccaaatttgcggacttacagagcaatgtacgactacagcgcccaggatgaagacgaggtgtcgtttcgtgacggagactacattgtcaacgtacaaccaatcgacgacggttggatgtatggtaccgtgcagcgtacgggccgtaccggcatgctacccgccaactatatcgaatttgtgaactag

SEQ ID NO: 196717 - DNA, 711 bp, synthetic construct
  misc_feature 1..711: note = Description of Artificial Sequence: Synthetic coding sequence
  source 1..711: mol_type = other DNA
atgctgcacttctactacgagtggctgcacagcggcagccggggcgctgtgcccaaacccttgcactaccccaaacagtcattcaccaccgttgcagacacccccgaaaaccttagactgaagcaacagtctgagttacaaagccaggtgaaatataaacgcgacttcgaggagtccaaggggcgtggattctccatcgttactgacacacccgagctgcagcgactgaagcgcactcaggaacagattagtaatgtgaaataccacgaagattttgaaaaaactaagggccgcggttttaccccggtcgtcgatgatcctgttaccgaacgggtgagaaaaaacactcaggtcgtcagtgatgctgcctacaagggcgttcatccccacatcgtcgaaatggaccgccggcctggtatcattgtggcgcccgtgctgcctggtgcttaccagcagtcccactcccaaggctacggttacatgcatcagactagtgtgtcttccatgaggtcaatgcagcattccccaaatttgagaacctacagagctatgtacgattactccgctcaagatgaggatgaagtgagcttcagggacggagactacatcgtgaatgtccagcccattgacgacggttggatgtatggtacagtacaaaggaccggccgcaccggcatgctgccagctaattacatcgagtttgttaattag

SEQ ID NO: 196718 - DNA, 813 bp, synthetic construct
  misc_feature 1..813: note = Description of Artificial Sequence: Synthetic coding sequence
  source 1..813: mol_type = other DNA
atgaacccccagtgcgcccggtgcggcaaggtggtgtaccccaccgagaaggttaactgcctggacaagtattggcacaagggctgttttcattgtgaggtgtgtaagatggcgctcaatatgaataattataagggctatgagaaaaagccatactgtaacgcccactacccaaagcagagttttacgacggttgcggacactcccgagaacttacgtctgaaacagcagagcgagttacagagccaggtgaaatataagagagatttcgaagagtccaaaggaagaggcttttcaatcgtcacagacacaccagaactgcagcgcctgaagcggactcaagaacagatctctaatgtgaagtatcacgaagattttgagaaaaccaagggacgaggcttcaccccggtggtagacgacccggttacggaaagagtgcgcaagaacactcaagtcgtgagtgatgcagcgtacaagggggttcacccgcacatcgtggaaatggaccgccgtcctggaataattgtggctcctgtccttccgggcgcttaccagcaaagccattctcagggatatggttacatgcaccaaacctcggtgagcagcatgcgctccatgcagcatagtccaaacttgaggacatacagggccatgtacgattacagcgcacaggatgaagacgaggtgagtttcagagacggcgattacatcgtgaacgtgcagccaatcgatgacgggtggatgtatggaacagtccaacgcacaggtcggactggaatgcttcctgccaattatatcgagtttgttaattag

SEQ ID NO: 196719 - DNA, 354 bp, synthetic construct
  misc_feature 1..354: note = Description of Artificial Sequence: Synthetic coding sequence
  source 1..354: mol_type = other DNA
atgcggaacaactgcaccgccagcctgatgaaggtgttctacaagcccgtcatcgaggacctgagcatggagttggcgcgaaagtgtaccgagctgattagtgacattaggtacaaagaggagtttaaaaagagcaaagacaagtgtacctttgtgaccgattcccctatgctgaatcatgtgaagaatatcggggcatttatctcagaagcgaaatacaagggcaccattaaggcggacctgtcaaactcactatacaagaggatgcctgctactattgacagtgtcttcgccggcgaagtgacccagctgcagtccgaggtggcgtataagcagaaacacgacgccgcttag

SEQ ID NO: 196720 - DNA, 20010 bp, synthetic construct
  misc_feature 1..20010: note = Description of Artificial Sequence: Synthetic coding sequence
  source 1..20010: mol_type = other DNA
atggccgacgacgaggactacgaggaggtggtggagtactacaccgaggaggtcgtgtatgaggaggtcccgggcgaaacaattactaaaatttatgagaccactacaacccggacctccgactacgagcagtctgaaacttctaagcctgccctcgcccagccagctctcgcccagcctgcgtcggcaaagcctgttgagcggagaaaagtgataaggaagaaagtcgacccaagtaaattcatgaccccctatatcgctcactcccagaagatgcaggacctgttctctcccaacaagtacaaggagaaatttgagaagaccaaagggcagccctacgccagcaccaccgataccccagagttacgaagaatcaaaaaggttcaggatcaattatcggaggtgaaataccgcatggacggcgacgttgccaaaactatttgtcatgttgacgagaaagcgaaggatatcgaacacgccaagaaagtaagccaacaggtaagcaaggttctctataaacagaattgggaagacacaaaagataagtaccttctgcctcccgatgcgcccgagctggtccaggccgtgaagaatactgccatgttttctaagaagttgtacaccgaagactgggaggcagacaagtctcttttttacccgtataacgacagtccagagctccggagagtggcacaggctcaaaaagctctctctgatgtggcttacaagaagggactcgcggagcaacaagcccagttcacaccactggctgatcctcctgacattgaattcgccaagaaagtcaccaaccaggtctcaaagcagaagtacaaggaggattacgagaataagatcaagggtaagtggagcgagacgccctgtttcgaggtggccaacgcacgaatgaacgcggataatattagcactcgcaaatatcaggaggactttgaaaacatgaaggaccaaatatacttcatgcagacagagacaccagaatataaaatgaacaagaaagctggcgttgcagccagtaaagtcaaatataaagaagattacgagaagaacaaaggtaaggctgattataacgtgctgccggccagcgagaaccctcagctgaggcaactcaaggcagcgggagatgctctctctgacaagctatacaaggagaactacgagaagacgaaggctaaaagcataaactactgtgaaaccccaaagtttaagctggacactgtgctgcagaactttagcagcgataaaaagtataaagactcatacctgaaagacattcttgggcactacgtgggctccttcgaggatccttatcactctcactgtatgaaagtaacagcacagaattccgataagaattacaaggctgaatacgaagaggaccgtggcaaggggttctttcctcagaccattacgcaagagtacgaagccattaaaaaattagatcagtgtaaggaccatacgtacaaggttcatccggataaaacaaaatttacccaagtcaccgactcccctgtgctcctgcaagcacaggtgaactcaaaacagctctccgacctgaattacaaggcgaagcacgaatctgagaaattcaaatgccatattcctccagacacccctgcctttatccagcacaaggttaatgcctacaacctttctgataacctctacaagcaagactgggaaaagtctaaagcgaaaaagtttgacatcaaggtggacgcaatccccctcctggctgccaaggctaacacaaagaacacttctgatgttatgtataaaaaggactatgagaagaataaggggaagatgatcggcgtgctatccattaatgatgaccctaaaatgcttcattcccttaaagtcgccaagaaccagtcagacagactctataaggaaaactatgagaaaaccaaagctaagtcaatgaattattgcgagactcctaagtaccaattggacacccagttgaagaacttcagtgaagctagatacaaggacctctatgtgaaagatgttctcgggcattacgtgggctcgatggaggacccctaccatacacattgtatgaaggtcgcggctcagaatagcgacaaaagctacaaagccgaatacgaagaagataagggaaagtgctacttcccacagactatcacacaagaatatgaggcgattaaaaaattagaccaatgcaaagaccatacctacaaggtgcatccagacaaaacaaagtttaccgccgttacagattctccagttcttctccaagcccagttgaataccaaacagctctcagacctcaactacaaggccaagcacgagggtgaaaagtttaagtgccacattccagctgatgctccacagttcattcaacaccgggtcaatgcgtacaatctatccgataacgtgtacaagcaggactgggagaagtctaaagccaagaaattcgatataaaagttgatgccataccgttgctggccgctaaagcaaatactaagaacacctcggatgttatgtataagaaggactatgaaaagtcaaagggcaaaatgattggcgccctgtcaattaacgatgatccgaagatgctgcattccttaaaaacggcgaaaaaccagtcggaccgtgagtaccgaaaggactacgagaagagcaaaaccatctataccgccccacttgacatgctgcaggtgactcaagccaagaaaagccaggctattgccagcgacgtcgattacaagcatatcctgcacagttacagttaccctcctgacagcattaacgtcgacctggccaagaaggcttatgctctgcaatccgacgtggagtataaagctgactacaattcatggatgaagggctgcggctgggttccattcggttctcttgaaatggaaaaagcaaaaagggccagcgatatactcaatgagaaaaagtaccgtcaacacccagacaccctgaagttcacttccattgaggatgcccctattactgtgcagtcgaaaataaatcaggcgcagcggtctgacatcgcctataaggccaagggggaagagatcattcacaaatacaacctcccaccggatctcccccagtttattcaggctaaagtgaatgcatataatatctcagagaatatgtataaagcagacctgaaggacctgtctaaaaaaggctatgacttgcggacggatgctatcccaatcagggcagccaaggccgcccgccaggctgctagcgatgtgcagtacaaaaaggattacgagaaagcaaaaggtaaaatggtaggcttccagtctctgcaggacgatccaaaacttgtgcactacatgaatgttgcaaaaatccagtcagacagggagtataaaaaagattacgaaaaaaccaagtcaaagtacaacactcctcacgatatgtttaacgtcgtcgccgcgaaaaaggcccaggatgtggtgtcaaacgtaaattacaaacattcactgcatcactacacatacctgccagatgctatggatctggagttgtcgaaaaatatgatgcagattcagtccgataatgtctacaaagaggattacaacaattggatgaaggggatcgggtggattccaatcggtagcctggacgtggagaaggtcaagaaagcaggagacgcactcaatgagaagaaatacagacagcatcctgacaccctgaagtttactagcattgtggacagccctgtgatggtacaagccaaacagaatacaaaacaagttagtgatattttatataaagcaaagggagaagacgtgaaacataaatatactatgtctccagacctgcctcaatttctgcaggctaagtgcaatgcctataatataagcgacgtgtgttacaagagggactggtatgacctcattgccaaggggaataacgtcctgggagacgccattccgatcacagcagccaaggccagtaggaacattgcatcggactacaagtacaaagaggcgtatgagaagagcaaaggtaaacatgtgggttttcgaagtctccaggacgaccctaagctggtgcactatatgaacgtcgctaagctgcagagtgaccgggagtataagaaaaattacgaaaatacaaaaacctcctaccatacacccggggatatggtaagtatcacagccgcgaagatggcacaggacgtagccaccaacgttaattacaagcagcctctacaccactatacttaccttccagacgccatgtctctggaacacacccggaatgtgaatcagatccagagcgacaatgtctataaagacgagtacaactcctttcttaagggcatagggtggatccctatagggtcactggaagtggagaaggtcaaaaaggccggggacgccctcaatgagagaaagtacaggcaacacccggatactgtaaaatttacatctgtgcccgacagcatgggtatggtgctagcgcagcataatacaaaacagctgagtgatctgaattataaagtagaaggagagaaactgaagcacaagtacaccatcgatcctgaactgccgcagttcatccaagccaaggtcaacgcgctcaacatgagcgacgcccattacaaagctgattggaagaaaacaattgccaaggggtatgatcttcggcccgacgccatccccatcgtggccgccaaatcaagccggaatattgcatctgactgcaagtacaaggaagcgtatgagaaggccaagggtaagcaggtgggctttctctctcttcaagatgaccctaagcttgtgcactacatgaatgtggcaaagatccagtctgaccgcgagtataaaaagggctacgaagccagtaagactaaataccatactcccttggacatggtcagcgtaactgcagccaagaagagtcaggaggtcgctaccaatgctaattaccgccagtcataccatcactacacgctgctaccagacgcattgaacgtagaacactcacgtaacgctatgcagatccagagcgataacctgtacaaatctgatttcacaaactggatgaagggtataggttgggttccaatcgagtctctggaggtcgagaaagccaagaaggcaggagagattctgtctgagaaaaagtatcgacagcaccctgaaaagcttaaatttacctatgctatggatactatggagcaggccctgaataaatcgaacaaattgaacatggataaacggctttacaccgaaaagtggaataaggacaagacgactatccatgtcatgccagatacccccgacattttactgagtcgggtaaaccagatcacgatgtcggacaagctgtacaaggccgggtgggaggaagagaaaaagaaagggtatgatttgaggcctgacgctatcgctatcaaagcggccagagccagtagggacatagcctcagattacaagtataaaaaggcctacgagcaagcaaaggggaaacacattggatttaggtcgcttgaggatgatccaaaactggttcattttatgcaagtggccaaaatgcagtccgatcgcgagtataagaaagggtacgagaagagcaagacaagtttccacacacccgttgacatgctctcagtagtcgctgccaagaaatcccaggaagtggcaaccaacgctaattacagaaatgtgatccacacttataatatgcttcccgacgcaatgtctttcgagctcgcgaaaaatatgatgcagattcagtcggataaccagtacaaggccgactatgcagactttatgaagggcattggctggctgcctctcggaagtctcgaagctgagaagaacaagaaagctatggagataatctctgaaaagaagtataggcagcacccagacaccctgaaatactcgaccctcatggacagcatgaacatggtgttagcacagaacaatgctaaaataatgaatgagcatctgtacaaacaggcctgggaagcagacaagaccaaggtgcacataatgcctgacattccgcagataattctggccaaggcgaatgcaattaacatgtccgataagctgtacaagttgtccctggaggagagcaagaagaaggggtacgaccttaggccggacgctattcccattaaggcagccaaagcaagcagggatatcgcctccgactataagtataagtataattacgagaaaggtaaaggcaagatggttgggtttcggtcactcgaagatgatccaaagctggtccacagcatgcaggttgcaaagatgcaaagtgatagagaatataaaaagaattatgaaaataccaaaacatcctaccacacccccgctgacatgttaagtgtcacagctgcaaaagatgcacaggccaacataaccaacacgaattataaacatctgatccacaagtatatactgttgccagatgcaatgaatattgaacttactaggaacatgaaccgaatccagagcgataacgaatacaaacaggattacaatgaatggtacaaaggcctggggtggtccccagccgggtccctggaggtggaaaaagccaagaaagccacggagtacgcttcggatcagaaatacagacaacaccccagcaattttcaattcaaaaaactaacggactctatggatatggtgttagccaaacagaacgcccacaccatgaataagcacctttatacaattgactggaataaggacaagacaaaaattcacgttatgccggatacaccggacatcctgcaggctaagcagaaccagacgctgtactcccagaaattgtataagctgggctgggaagaggcgttaaaaaagggttatgatctgcctgtggacgctatctcggtgcagttagccaaagcaagccgcgatatagcctccgactacaagtacaagcaggggtatcggaaacagctaggccatcacgttggctttaggtctctgcaggacgatcctaagctcgtgctgagcatgaacgttgcgaaaatgcagagcgagagggaatacaaaaaagattttgagaaatggaaaacaaagttcagctctcctgtggatatgctaggggttgtgttggccaagaagtgtcaggagctcgtaagcgacgttgactataaaaattatctccatcagtggacatgtttgccagaccagaatgacgtggtgcaggccaagaaggtttatgagctgcagagcgagaacttgtataagagtgacctggagtggttacggggcattggctggagcccgcttgggagtttagaggcagagaaaaacaagagggcgtctgaaattatttcagaaaaaaaatatagacagccacctgatcgtaataaatttacatctataccagatgcgatggacatcgtgctagcaaaaactaatgccaaaaataggtccgatagactttacagagaggcttgggacaaggacaaaactcagattcatattatgccagatactccggatattgttcttgctaaagcaaatttgatcaataccagtgacaaattgtaccggatgggctatgaagagttgaagagaaagggctacgatttgcccgtggatgcaattcctatcaaggcggcaaaggccagccgagagattgcatccgagtacaaatacaaggaagggttccgtaagcaattgggtcaccatattggggctcgcaatatcgaagacgatcccaaaatgatgtggagcatgcatgtggctaaaatccagtccgaccgcgagtacaagaaagattttgagaagtggaagacaaagttctcctctccagtggatatgctgggcgttgtcctggccaagaaatgccaaactctcgtgagtgatgtcgattataaaaattatctgcaccaatggacttgcttgcccgaccagagtgacgtcatccacgcaagacaggcgtatgacctccagtccgataatctgtataagtcagatttgcaatggttaaaaggtataggttggatgacgtccggttcactcgaggatgaaaagaacaagagggctacacagatccttagcgaccacgtctaccgccaacaccctgaccagtttaagttctcctccttgatggattccattcccatggtgttggcgaagaataacgccataacaatgaaccaccggctctacaccgaggcctgggataaagataaaaccactgtccacataatgccagacacgcccgaggttctcctggccaaacagaacaaggtcaattactctgagaagctgtataaattaggattagaagaggccaaaagaaaagggtacgacatgagagtggatgcaataccaattaaggccgctaaagccagccgcgacattgcgagtgagtttaagtataaagagggctatcgtaaacaactgggccaccacattggggctcgcgccatacgcgatgatccaaagatgatgtggagcatgcacgttgctaagatccagtctgatagagagtacaaaaaagatttcgaaaagtggaagactaagttttcgtccccagttgatatgctgggtgtggtcctcgccaaaaaatgtcagaccctcgtctccgacgttgactacaagaattatctccaccagtggacttgtctcccagatcagagtgacgtcatccacgcccgccaggcttatgatctgcagtctgacaacatgtataagagtgatctccaatggatgagaggtattggatgggtgtctatcggatcacttgatgtcgaaaaatgtaaacgggctacagagatcctctcagacaagatttatcgccagcctcctgatcgctttaagttcacatcagttactgacagccttgagcaggtgctggctaaaaataacgcaatcacaatgaacaagcggctgtacacggaggcatgggacaaagataagacacagattcatattatgcccgatacacccgagattatgctagcccgccagaataagattaactacagcgagaccctgtataagctcgccaacgaggaggctaagaaaaaggggtacgacctgaggtctgacgccatcccaatcgtggcggccaaggcctctcgggacgtgatctctgactataaatacaaagatgggtaccggaagcagcttggacaccacattggcgcccggaacatcgaggacgatcctaaaatgatgtggtccatgcatgttgccaagatccagtccgatcgcgagtataagaaggatttcgagaagtggaaaacaaagttctcttctcccgtcgatatgctaggcgtggttctggctaaaaagtgccaaacactcgtctcagatgtagattataagaactacctacatgagtggacttgtcttcctgatcagaatgatgtaattcatgctcgccaagcatatgacctccagagcgataatatctataagtcagacctccagtggctacgcgggattggctgggtaccaattgggtccatggatgtagttaaatgtaagcgagcagccgaaatcctgtcggacaacatctatcgtcagccgcccgataagctcaaatttacctctgtgaccgattccctggagcaggtgctagctaaaaacaatgcgttgaacatgaacaagcgtctttacactgaagcttgggacaaagataagactcaggtgcacatcatgccggacacaccagagattatgctcgcacgtcaaaacaaaatcaactattcggagtccttgtataggcaggccatggaggaggctaaaaaggaggggtatgatctacgcagcgacgctatcccaatagtggcggccaaagcttcccgtgacattgcatccgactacaagtataaggaagcatatcggaagcagctcggacaccacattggtgcacgagcagtgcacgacgacccaaaaatcatgtggtcacttcacattgctaaggtgcagtctgatcgcgaatacaaaaaggactttgaaaagtataaaacccggtatagcagccccgtcgacatgctggggatagtgctggcaaagaaatgccaaacattggtttccgatgttgactataagcacccgctccatgagtggatctgtttacctgatcaaaatgatatcatccacgcccgcaaggcttacgatctgcagtctgataacttgtacaagagcgacttagaatggatgaagggcatcggatgggtgcccattgattctctcgaagtggtgagagccaaaagggccggggaattgctaagcgatactatctaccggcagaggcccgagacactgaaatttacctctataaccgataccccagagcaggtgctcgcaaaaaataatgcgctgaatatgaataaacggctctatactgaggcatgggataatgataagaagacaattcacgtgatgcccgacacgccggagattatgctcgccaagctgaatagaatcaattattccgacaagctctacaaactggccctggaggaatctaagaaggaaggatacgacctacgtcttgacgccatcccgattcaggccgctaaagccagccgagatattgcttccgattacaagtacaaagaaggataccgtaaacagttgggccaccacattggtgcccggaatataaaggacgaccctaagatgatgtggtcgatccatgttgcaaaaatccagagtgacagagagtacaagaaggaatttgaaaagtggaagaccaagttcagcagccccgtcgacatgctcggtgtagtgcttgctaaaaaatgccagattctcgtctctgacatcgactacaaacatccactgcacgagtggacctgtctgcctgaccaaaatgacgtaatccaggcccgaaaggcatacgatttacaatctgacgccatctacaagtcagatctggagtggctccgaggaatcggatgggtgccgatcgggagtgttgaggtggaaaaggtaaagagggccggagagatcctgtccgatcggaagtacagacagccagcagaccaacttaagttcacctgcattaccgacacccctgagattgtactggcgaagaacaacgcccttacaatgagcaagcacctctataccgaggcctgggatgcagacaaaactagtatacacgtgatgccggatacacccgatatcctgttggcaaagtctaattcggcgaatatttcacagaaactgtacactaaaggttgggacgagtcgaaaatgaaagactacgacctccgcgccgatgccatttctatcaaatcagctaaggcaagccgggatattgcctccgattacaaatataaggaagcctacgaaaagcagaagggccatcatattggagcccagtctatcgaagacgacccgaaaatcatgtgcgccatccatgctgggaagatccagagcgagagagagtataagaaagaattccagaaatggaagacaaagttcagctctccagtcgatatgttaagcattctcttggcaaagaagtgccaaacactggtcactgatattgactatcggaactacctgcacgagtggacgtgtatgcctgaccagaatgatattatacaggctaaaaaggcctatgacttgcagagcgacgcgttatacaaggcagatttggagtggcttcggggcatcggttggatgccacagggctccccagaagtccttcgagtcaaaaatgctcagaatatcttttgcgactctgtgtatagaactcccgtggtgaatctgaagtacacttccatagtcgatacacctgaagtcgtcctcgccaagtcaaacgccgagaatatctctattcctaagtaccgcgaggtgtgggacaaagacaaaacaagcattcatatcatgcctgataccccagagattaacctcgctcgcgctaacgccttgaatgtgtccaataaactgtaccgcgagggttgggacgagatgaaagccggctgtgacgtgcgcttagacgctatccccattcaggcggctaaagcaagccgtgaaatagcttccgactataaatacaagttagatcatgagaaacagaagggccactacgtaggaactttgacagcccgcgatgacaataagatccgatgggccctgattgctgacaaattacagaacgagagagagtatcggctggactgggccaaatggaaggccaaaatccagagcccggtggatatgctcagcatcctgcatagtaagaacagccaggccttggtcagcgacatggactatcggaattacctgcaccagtggacttgcatgcctgaccagaatgatgtgatccaggccaagaaagcatacgaactccagtccgataacgtgtacaaggcagacctggagtggttacgaggtataggctggatgccgaatgatagcgtgtccgtgaatcacgccaagcacgcagcggatatcttcagcgagaagaaataccgaaccaagattgaaaccttgaatttcactccagtagacgatcgcgtcgattacgtcaccgccaagcaatccggagaaattctggacgacataaagtacaggaaggattggaatgcgactaaatcaaagtacacactcacggagactcctcttcttcacactgcacaggaggccgcaagaatcttggaccagtacttgtataaagaagggtgggaacgtcagaaagcaactgggtacatcctcccaccagacgccgttccttttgtgcacgcacaccattgcaacgacgttcagtctgagctcaagtataaagctgagcacgtaaaacagaaaggacattacgttggggtgcctacaatgcgtgacgaccctaagttagtgtggtttgagcatgccggtcaaattcaaaatgagaggctttacaaagaggactaccataaaaccaaggctaagatcaatattccggccgatatggtcagtgtcctggcagccaagcagggacagacactggtcagcgatatcgactatcgtaactacctccaccagtggatgtgccacccggatcagaacgacgtaattcaggccaggaaagcgtatgacctgcagtcagacaacgtgtaccgcgctgatctggaatggctccgtggaatcgggtggattccactcgattcagtagatcatgtaagggtgaccaaaaaccaagagatgatgagccagattaaatacaagaaaaacgctctcgaaaattatcccaatttcaggtcagtggtagatcctccagaaatcgtcctggccaagataaattctgtcaatcagagtgacgtcaagtataaagagaccttcaataaggctaaaggcaaatacactttctcgccagatactccacatattagccacagcaaagacatggggaagctctacagcaccattctgtacaaaggtgcatgggaggggacaaaggcgtacggatacactctggacgaacggtacatcccaatagtcggggcaaagcacgcggacttagtcaactctgaactgaaatacaaggagacttatgaaaaacagaaaggccattatctcgccggcaaggtcatcggagaattccccggcgtggtccactgcctcgattttcagaaaatgaggtctgcgctgaattatcgaaagcattacgaagataccaaagccaacgtccatatcccgaatgatatgatgaaccatgtcttagcaaagcggtgtcagtatatcctcagtgacttagagtacaggcactattttcaccagtggaccagcctgctggaagaacccaacgtgatccgagttagaaatgcccaggaaatattaagtgacaacgtatacaaggatgacctgaattggctgaaagggattggatgttacgtgtgggacacgcctcaaatcctgcatgccaaaaaatcttatgacctccagagtcaactccaatacaccgcagctggcaaggagaatctgcaaaactacaatttggtcaccgatacgcctctgtacgtaaccgctgtgcagtccggtatcaacgcaagcgaagtaaagtataaagaaaactatcatcagataaaagacaaatacaccacggtgctggagacggttgattacgatcgaaccagaaacttgaaaaacttatattcctcaaatctctacaaagaagcttgggaccgggtgaaagccacatcctatattctccctagctctacgttatcactgacacacgccaagaatcagaagcacctggcgtctcacatcaaatatagggaggagtatgagaagtttaaagcgctgtacaccctacccagatcggtggatgacgatcctaataccgccaggtgcctcagggtcggcaagctgaacatcgatagactctatcggtcagtttacgaaaaaaataagatgaaaatccatattgtccccgacatggtcgagatggtgactgctaaggattcacaaaagaaggtttcagagatcgactatcgcctgcgactccacgagtggatttgccacccagacctccaggttaatgaccatgtgcggaaagtgactgaccagatcagcgacatcgtgtataaagacgacctgaattggttgaagggcattggatgctatgtgtgggacactcccgagattttgcatgcgaagcatgcctacgacctaagggatgatatcaaatataaggctcatatgctaaagacacggaacgattataagttggttaccgacactcctgtctacgtgcaggcagtgaagagcggaaagcagctctccgacgctgtctaccactacgattatgtacactccgtgcggggtaaagtcgcccccaccactaagaccgtggacttggaccgcgcactgcacgcttataagctgcagtccagtaacttgtacaagacctctctccgcacgttacctaccggatataggctgcccggcgatactccacattttaaacatatcaaggatacccggtacatgagttcgtatttcaagtacaaggaggcctatgagcacactaaggcttacggctacactctcggccctaaggacgtcccgtttgttcacgtgaggagggtgaataatgtcactagtgagcggctgtatcgcgagctgtaccacaaactaaaagataagattcatacaactcctgataccccagagataagacaggtgaaaaaaactcaagaggccgtgtcagaactaatttacaagtccgacttctttaagatgcagggacatatgattagcttgccttacactccacaggtgattcattgccgatacgttggagacattacctcggatatcaagtacaaggaagacttacaggtgcttaagggtttcggatgtttcctatacgataccccagacatggtacggtcacgacacctccgcaagctgtggtctaactacctgtataccgataaagcgcggaagatgagggacaagtacaaggtagtgctggatacccccgagtatagaaaagtgcaggagctgaagacccacctctccgagcttgtctaccgggcagcaggaaaaaagcagaaaagcatcttcacgtcagtgcctgacacccccgatctcctaagagccaagcggggacagaagctacagtcacagtacctttacgtagaactggccacgaaggaacgcccgcaccaccacgcgggaaatcagactaccgccctgaagcacgctaaagatgttaaggacatggtctctgaaaaaaagtacaagatccaatacgagaaaatgaaagataagtatacccctgtgcctgacacacccattcttattagagccaagagagcctattggaatgcatccgatctccgatacaaagagacatttcagaagaccaagggtaagtaccacaccgttaaagacgccctcgacatcgtgtatcatagaaaagtcaccgatgacatcagcaagatcaagtataaagagaattacatgagccaactggggatctggcggtccattccagataggccggaacacttccatcacagggcagtgacagataccgtgagtgacgtaaaatataaggaagatctcacctggctgaagggcatcgggtgctacgcatatgatactccggactttacactggctgagaagaataagactttatactctaagtacaagtacaaggaggtgttcgagcggactaagagtgacttcaagtacgtggcggattcccctatcaatagacatttcaagtacgctacacagctgatgaatgagaaaaagtaccgggcagactatgaacaaaggaaggacaaataccaccttgtggtagatgagcctaggcacttgctggccaaaacagccggagatcagatctcccaaattaagtaccgaaagaactacgagaaaagcaaggacaaatttacttccattgtcgatactcctgagcaccttaggactaccaaagtcaataagcagattagtgatattctctataagctggaatataacaaggccaagcctcgcggctacaccactatccatgatactcccatgctgttacacgtcaggaaggtaaaggatgaagtttcggatcttaagtacaaagaagtgtaccagaggaacaagtctaattgcaccatagagcccgacgctgtgcacataaaggcagccaaggacgcttataaggttaataccaacctggactataaaaaacaatacgaagctaacaaagcccattggaaatggacgcccgaccgtcctgatttcctgcaggcggctaaatcttcgctgcagcagagtgattttgagtacaaacttgacagagaatttctgaagggatgcaaactaagcgttacagatgataaaaacactgtgctcgccctgagaaacacattgattgaatcggaccttaagtataaggaaaagcacgtgaaagaaagagggacctgccatgcagttcctgacacaccccagatccttcttgcaaagacggtatctaacctcgtcagcgaaaacaaatacaaggaccacgtgaaaaagcatctcgctcaagggtcctatacgacactgccagagactcgagatacagtgcatgttaaagaagtcacgaaacacgttagcgacacaaattacaagaagaaatttgtcaaagaaaaaggaaaatccaactatagcatcatgctggaacccccggaagtaaagcacgcaatggaggtggcaaagaaacagtcagatgtggcctatcgcaaggacgctaaggagaacctgcattataccacagtggctgacaggccagatattaagaaggctacccaggcggctaagcaggccagcgaagtggagtacagagcaaagcacagaaaagaaggctcccacggactgtcaatgttggggagacccgacattgagatggccaagaaagccgcaaagctcagttcccaggtcaagtaccgtgaaaatttcgacaaggaaaaagggaaaacccctaaatataatcctaaggactctcagctgtacaaagtcatgaaagacgctaacaaccttgctagcgaggtcaaatataaagcagaccttaaaaagctccataagcccgtgactgacatgaaggagtctttaattatgaaccacgtgctgaacacaagtcaactcgctagcagctatcagtataaaaaaaagtatgaaaagtctaagggacactaccacactattcctgataatctcgaacagctccacctgaaagaagcaacagaactccagtccattgtaaagtataaggagaagtatgaaaaagagcggggcaaaccaatgctggactttgaaactcctacttacattactgccaaagaaagccaacagatgcagtcaggcaaggaatatcgtaaggactacgaagaatccataaagggccgcaatctaacaggacttgaggttactcctgccctactgcatgtcaaatatgctacaaagattgcatcggaaaaggagtacaggaaggatttggaggaatcaatccgcggcaagggtttgactgaaatggaagatacccctgacatgctccgggcgaaaaacgcaacccaaatacttaacgagaaggagtacaaacgcgatttggagcttgaagtgaaaggccggggtctcaatgccatggctaatgaaactccagattttatgagggcaaggaacgctaccgatatcgcgagccagatcaagtataagcaatcagctgaaatggaaaaagcaaatttcacttcggtagtggacacccctgagattattcatgctcaacaggtaaaaaatcttagcagtcagaaaaagtataaggaagacgcagaaaagtccatgagctattatgaaactgttttagacacaccagaaatacagcgcgtccgcgaaaatcaaaaaaactttagtctgctgcagtatcagtgtgacctcaagaactcaaagggtaaaatcaccgtggtgcaggataccccagagatcctccgcgtgaaggaaaatcagaaaaatttttcttctgttctatataaggaagatgtgtctcccgggactgcaattggcaaaacacccgagatgatgcgggtgaaacagacacaagatcacatctcgtccgtcaaatacaaggaagctattggccaggggactcctatcccagacttgcctgaagtgaaacgcgtaaaggagacacagaagcacatctcatccgttatgtacaaggagaatctcgggacaggcatccccaccacagtgaccccagaaatcgagagggtgaaacggaatcaagagaatttcagttccgtgctgtacaaagagaatctgggaaaggggatcccgacgcccatcacccccgagatggaaagggtaaagagaaatcaggagaacttctcaagcgttctgtataaggaaaatatgggaaaagggacccccctcgctgtgacgcccgagatggaaagagtcaagcacaaccaagaaaacatttcgtcggtactgtataaggagaacgtgggaaaggccactgctacccccgtcacccccgagatgcagcgagtaaaaaggaaccaggagaacattagttcagtgctatataaggagaacctcggcaaagccacgcctactccctttacccctgagatggagagagtgaaacgcaaccaggagaacttttcgtccgttctatacaaggaaaacatgagaaaagccacacccaccccggtgacccctgaaatggagcgggcaaagagaaaccaggagaacatcagctcggtcctgtatagtgattcgtttagaaagcagattcaaggtaaagctgcttatgtgctagacacacctgagatgagacgggtgcgggagacccagcggcatattagtactgtgaagtatcacgaggatttcgaaaagcataaaggctgctttacccctgtcgtgaccgacccaataactgagagggtgaaaaagaacatgcaggacttttcagacataaactaccgaggcatccagaggaaggttgtcgagatggagcagaaacggaatgatcaggatcaagaaacaatcaccggcttaagagtctggcggacaaacccgggcagcgtttttgactatgatccagcagaggataatattcagtctcgctccctacatatgattaatgtgcaggcccagaggagatctcgtgaacagtcacggagcgccagcgccctatcaatcagtggcggtgaggagaagtccgagcattcagaggcgccagaccaccatctgtcaacttatagcgacggaggtgtctttgccgtctccactgcctacaaacatgccaagaccaccgagttgcctcagcagagatccagctctgttgcgacgcagcaaaccacagtcagtagcattccgtcccatcccagcacagccgggaaaatctttcgggctatgtatgattacatggccgcggacgcggacgaagttagctttaaggacggagatgccattattaacgtgcaggcgatcgacgaaggatggatgtatggcaccgtgcagcgaaccgggaggaccgggatgctgcctgctaactatgtcgaggcgatatag

SEQ ID NO: 196721 - DNA, 1503 bp, synthetic construct
  misc_feature 1..1503: note = Description of Artificial Sequence: Synthetic coding sequence
  source 1..1503: mol_type = other DNA
atggagcgggtgaagcggaaccaggagaacttcagcagcgtgctgtataaagaaaacctgggcacgggaatccccatcccgatcactccagaaatgcagcgcgtaaaacacaatcaggaaaatctgtcttccgttctttataaggagaacatgggaaaggggacaccactgcccgtgaccccagagatggagagggtgaagcataaccaggagaacatctctagtgtcttgtataaggaaaatatgggcaagggaaccccgttgcccgttaccccagaaatggagcgcgtcaaacataaccaggagaatatctccagcgtcttgtacaaagaaaatatggggaaaggtacacctttggccgtcacacctgagatggagagagtgaagcacaaccaggaaaatatttcctctgtcctttataaggaaaatgtcggcaaggcgaccgctactccagtcacaccagagatgcagagagtgaaacgcaaccaggaaaatatctcttctgtgctgtataaggaaaacttgggaaaagccacacccaccccatttaccccagagatggaaagggtgaagaggaatcaggagaacttcagctccgtgctatataaagaaaacatgaggaaagccacccccacccccgttactccagaaatggaacgcgctaaacggaaccaggagaacatcagctccgttttgtactcagactctttccgcaagcagattcagggaaaggctgcttacgtactggacactcccgagatgcgtcgcgtgagagagacccagcgacacatctcaactgtgaagtatcatgaggacttcgagaagcacaaaggatgcttcacaccggtggtaactgacccaataactgagagagtgaagaaaaatatgcaggacttttctgatatcaattatcgcggcatccagcggaaagtggtggagatggagcaaaagcgcaacgaccaggaccaggaaactataaccggtctccgcgtgtggcggacaaaccccggctccgtgttcgattacgatccagctgaggacaacatccagagccggtcccttcatatgatcaacgtgcaagcccaacgacgatccagggagcagagcaggagcgccagcgccctttccattagtggtggagaagagaagtcagaacacagcgaggccccagaccaccatctgtccacgtatagcgacggaggagtatttgccgtgtctaccgcatataagcacgctaaaaccaccgaattaccacaacagcgatcttctagtgtggctacccagcaaactacagtgtcaagtatccccagccaccctagcaccgccggaaagatttttagagccatgtacgactatatggccgcagacgccgacgaagttagcttcaaggacggggatgccatcatcaatgtccaagcaatcgacgaaggatggatgtacggaaccgtgcaacgcaccggcagaacggggatgcttccggccaactatgtagaggctatttag

SEQ ID NO: 196722 - DNA, 7878 bp, synthetic construct
  misc_feature 1..7878: note = Description of Artificial Sequence: Synthetic coding sequence
  source 1..7878: mol_type = other DNA
atgcccgacacccccgagatcaacctggcccgggccaacgccctgaacgtgagtaataagttatacagagaaggatgggatgagatgaaggctggatgtgatgttaggctggatgccatcccaatacaggcagctaaagctagccgtgaaatcgccagtgactataaatataagttggaccacgagaaacagaaaggacattatgttggcaccctgacggcccgagacgacaataagattcgatgggccctgatcgcagataaactgcagaacgagcgagagtaccgactggactgggcaaaatggaaggccaagatccagagtcccgttgacatgctcagcatacttcactcaaaaaacagccaggccctggtgagcgacatggactacaggaattatcttcaccaatggacatgtatgcctgaccagaatgacgttattcaggccaaaaaggcatatgagctgcagtcggataacgtgtataaggcagatcttgaatggctcagaggtatcgggtggatgcctaatgactctgtttcagtcaaccacgccaaacacgccgccgatatcttttccgaaaaaaagtataggaccaagatagagactttgaactttacacctgttgacgaccgagttgactacgtgacagccaagcaatctggtgaaattttagatgacattaagtaccgcaaagattggaatgccaccaagagtaaatacactctgacagaaacacccctgctgcacaccgctcaggaagccgcccgcatccttgatcagtacctctataaggagggttgggaacgacaaaaagctaccggttacatactccctcctgacgcagtcccttttgtccacgcgcatcattgtaacgacgtgcaatcagaactaaagtataaagcagaacatgtcaaacagaagggacactatgttggtgtgccgactatgagagacgatccaaagcttgtgtggttcgaacatgcagggcaaattcaaaacgagaggctgtataaggaagattaccacaagaccaaggctaaaatcaacattcccgccgacatggtcagtgttctcgcagctaagcagggacagaccctggtttcagacatcgactatcggaactatctccatcagtggatgtgccatccagatcagaacgatgtgattcaggcgcggaaagcctacgaccttcagagcgacaatgtgtatagagccgacttagagtggctgaggggcatcggttggattcccctggactcggttgaccatgtgcgcgtgacaaaaaaccaggagatgatgagccaaattaaatacaagaagaacgcccttgagaattatccgaacttccgttcagtcgtggatccccccgagattgtactggcgaagattaatagcgtcaatcagagcgatgtgaaatataaggaaacttttaacaaggctaaggggaaatacacgttctctcccgacaccccccacatcagccatagcaaggatatgggcaagctgtatagcaccatcctctacaagggggcgtgggaggggactaaagcttacggctatactctggacgaacggtacattcctattgtgggtgctaagcacgctgatctcgtaaactctgagctgaagtacaaagaaacttacgaaaaacagaaagggcattacctggccgggaaggttattggggaatttccaggggtcgtccactgccttgattttcaaaagatgagatcagccctaaactatagaaagcactatgaggatactaaggctaacgtccatattcccaacgatatgatgaaccacgttctggcgaaacggtgtcagtacatcctaagtgatcttgaatacaggcactactttcaccagtggacctcgttattagaagaaccaaatgttataagggtccggaatgcccaggagatcctttctgataatgtctacaaggacgacctcaattggctgaagggcatcggttgctacgtttgggatacacctcagattttgcacgccaagaaaagttatgacctgcagagccagttacagtatacagctgcaggcaaagagaacctgcagaactataacctcgtgacagacacccctctatatgtgactgccgtgcaatctgggatcaatgcctcagaggtgaaatacaaggagaattatcatcaaatcaaagacaagtacactacggtgcttgaaacggtggactatgatcgcacacgcaatctgaaaaatctgtatagctccaacctctataaagaggcgtgggaccgggtgaaagcaacctcatatattctgcctagtagtaccctgtccctaacacacgctaaaaaccaaaagcacttagcttcccacatcaaatatcgggaagaatacgaaaaattcaaggctctgtatacactccctcggtcagtcgacgacgatcctaacactgccaggtgtctccgagtgggtaagttaaatattgacaggctttatagaagtgtttacgagaaaaacaagatgaaaattcatatcgtgccagatatggttgaaatggtcacagccaaggattcccagaagaaggtgagtgagattgactatcgccttagactgcatgaatggatctgccatccagacctgcaagtgaacgaccacgtgcgcaaggtgacagaccaaatcagcgacattgtctataaagacgacttgaactggctcaaagggatcggctgttatgtttgggatacacctgagatcctgcacgccaagcacgcctacgacctgcgcgacgatatcaaatataaggctcacatgctgaagacaagaaatgattacaaattggtcacagatacacccgtctacgtgcaggccgtgaagtccggcaaacagctgtctgatgctgtgtaccactacgattacgtgcactctgtccggggaaaggtggctcctactactaagacggttgaccttgatcgtgccctgcatgcttacaagttgcagtctagtaatttgtacaagacgagcttgcgaaccctcccgactggctaccgcttgcccggcgacactccacacttcaagcacatcaaggatacgaggtatatgagctcttacttcaagtacaaggaagcctacgagcacactaaggcatatggttacacactggggcctaaggatgtgccctttgtgcacgtgcgacgggtgaataatgttacaagtgagcgactttatcgcgaactgtaccacaagctcaaggataaaatacacaccacccctgatacgcccgagatcagacaggtgaagaaaacgcaggaggccgtgagcgaattaatctataagtccgatttctttaagatgcaggggcacatgataagtttgccatacacaccccaggtcatccactgtcggtacgtgggagacattacatctgatattaagtataaggaggaccttcaagtgctcaaggggttcggctgcttcttgtacgacactcctgatatggtgcgcagccggcatcttcgcaaactctggtcgaattatttgtatacagataaggccaggaagatgcgagataaatacaaggttgtgctcgatactcctgagtacagaaaagttcaggaactcaagacccacttatctgaactggtctatcgagccgcaggaaaaaaacagaaatcaatcttcacatcagtccccgatacccctgatctgttgagggccaagcgcggacagaaactgcagtctcaatacctctacgtggaactggccacaaaggaaaggccacatcatcacgcagggaaccagaccaccgctctgaaacacgccaaagatgttaaggatatggtctcagagaaaaaatacaaaatccagtatgagaaaatgaaggataagtataccccagtgcccgacactcctattctgattagggctaaacgggcatattggaatgcctccgacctgaggtacaaggagacattccagaagacaaagggtaagtatcacacagtgaaagacgccctagacatagtgtatcatagaaaagtcacagatgacatttcaaagatcaaatacaaggagaactacatgtcccagctggggatctggcgctccataccggacagaccggaacactttcaccaccgcgctgtcacagacaccgttagtgatgtgaaatacaaagaagaccttacctggttgaagggcataggatgttacgcctacgacacgcccgattttacactggctgagaagaataaaactctttatagtaaatacaaatacaaggaagtgtttgaacggaccaaaagtgatttcaagtacgtggcagactctcctataaatagacacttcaaatatgcaacgcagctaatgaatgaaaaaaagtatagggccgattacgaacagagaaaagataaatatcatcttgttgtcgacgagccccggcatctgcttgctaagacagcgggggatcagatatctcagatcaagtaccgcaaaaattacgaaaagtctaaggacaagttcacctcgattgtggatacacccgagcatctcaggaccaccaaggtgaataagcagatcagtgatatcctgtataaactggagtacaataaggccaagccacgcgggtatacaactattcacgatactccgatgctgctgcatgtgaggaaagtcaaggatgaggtgtcagacctcaagtataaagaagtgtatcaaagaaacaaaagcaattgtacgatcgaaccggacgccgtccacataaaagcagccaaggacgcctacaaggtgaacaccaacctggactataaaaagcaatacgaagccaataaagcccattggaagtggaccccggaccggccagacttcctgcaagctgccaagagtagcctccagcaaagcgattttgaatacaagttggacagagaattcttaaagggctgcaagctgagcgttaccgatgataagaacaccgtgctcgccctgagaaatacactcatagagagcgatctgaagtataaagagaaacacgtgaaagaacgaggtacttgccacgccgtcccagacaccccccagatcctcctcgctaagaccgtatctaacctggttagtgaaaacaagtataaggatcacgtgaagaagcacctagcacagggctcctacaccaccctgcccgagaccagagacaccgttcacgtgaaagaggttactaagcacgtaagcgatactaattataagaagaaattcgtgaaagaaaagggcaagagcaactactcaatcatgttagagcccccagaagtgaaacatgcaatggaagtcgccaaaaaacagagtgacgtggcttatcgcaaggatgcaaaggagaatctacattatacaaccgtcgctgaccgacccgacataaagaaagctacacaggccgctaaacaggcatccgaagttgaataccgagctaagcaccgaaaggagggtagccacggcctgtccatgttgggccgcccagatatcgaaatggccaagaaggccgcaaaactgtctagccaagtcaagtaccgcgagaacttcgacaaagagaaaggaaaaaccccaaaatacaaccctaaagattcccaactctacaaggttatgaaggatgcgaataatttggcgtcagaagtcaagtataaggcggacctgaagaagttacacaaaccagtcaccgatatgaaagagtcactgatcatgaaccacgtactaaatacgtcccagctcgcgtctagctatcaatacaagaagaaatacgaaaagtctaagggccactatcacaccatccccgataacctcgaacagcttcatctgaaggaggcaacagagctgcagtcaattgtgaaatataaagaaaagtacgagaaggagagaggaaaacccatgctcgacttcgagacacccacctacataacagcaaaagagtctcaacagatgcaatccgggaaggaatatcgcaaggactacgaggaaagcatcaaaggacgaaatctgaccggacttgaagttacaccggccctgctgcacgtgaaatatgccaccaagatcgcctctgagaaggaataccggaaggatctggaggagtctatcaggggaaaggggctgacagagatggaggacacccccgatatgttgcgggcaaagaacgccacccagattctgaacgagaaggagtacaagcgtgaccttgaattagaagtcaagggtcgcggcctgaatgcaatggctaacgaaaccccagattttatgcgggcacgaaacgcaactgacatagcttcacaaattaagtataaacaaagcgctgaaatggagaaggctaatttcacaagcgtcgtggacacaccggaaatcatccatgctcagcaagtcaagaatctttcatctcagaaaaaatataaggaagacgccgaaaagtccatgagctactacgagactgtgcttgacacccctgagatacagagggtaagagagaatcagaagaatttcagcctgctgcagtaccagtgtgacctcaagaatagcaagggcaaaatcacagtagtgcaggatacgccagagatcctgcgagtcaaggaaaaccaaaagaatttcagctccgtgttgtataaagaggatgtgtcacctggcacggccattgggaaaacgccagagatgatgagggtgaagcagactcaagatcatatcagctctgtgaagtacaaagaggccattgggcaggggaccccaatccctgatctgccagaggtcaaaagagttaaggaaacacaaaagcacatctcatcagtaatgtacaaagaaaacctcggcacaggcatccctacaactgtgacaccagagatcgagcgcgtgaaacggaatcaagaaaacttctcctctgtcctgtataaagaaaatatggggaaaggtacaccactgcctgtaacccctgaaatggagagggttaagcacaatcaagaaaacatctcctctgtcctctataaggagaacgtgggcaaggcgaccgcgacccctgtgacacccgagatgcagcgtgtgaagcgaaatcaggagaatatttctagcgtgctatactcagattcttttcggaagcagatccagggcaaagctgcttatgtgctcgatactcccgagatgcgcagggtgagggaaacacagaggcacatttccactgtgaaatatcatgaggattttgagaagcataaaggctgcttcacccccgtggtcaccgatccaattacagaaagggtaaagaaaaatatgcaagacttttctgacattaactatcggggtattcagcgcaaagtcgttgagatggaacagaaacgcaacgaccaggatcaggagactatcaccggacttagggtttggcggactaatcccggctccgtgttcgactatgatccagccgaagacaatatccagtcccggagtctccatatgattaacgttcaggcccagagaaggagccgcgaacagagccggagtgcatccgcattgtcaatcagtgggggcgaggaaaagagcgaacattcagaagcccctgatcatcacctcagcacctatagcgatggcggtgtattcgctgtgtcaaccgcgtacaaacacgccaagacgacagagctcccccaacagcgatccagcagcgtggccacgcagcaaacgactgtcagctccattccctcacacccaagcacagctggaaagatctttcgagccatgtacgactacatggcagcagatgctgatgaggtgtcatttaaggacggagacgctattattaacgtgcaggccattgacgaaggatggatgtatgggacggttcagagaaccggtcgtaccgggatgctgcccgcaaactacgtggaggccatctag

SEQ ID NO: 196723 - DNA, 25578 bp, synthetic construct
  misc_feature 1..25578: note = Description of Artificial Sequence: Synthetic coding sequence
  source 1..25578: mol_type = other DNA
atggccgacgacgaggactacgaggaggtggtggagtactacaccgaagaggtggtttatgaagaagtgccaggagaaaccattacgaagatctacgaaaccactacaacacggacctctgactatgagcaatccgaaacctcaaagccagcactggctcagcctgcgttggctcagccagcaagcgccaaaccggtcgagagacggaaagtgatccgcaagaaggtggatccaagcaagttcatgactccctacattgcgcacagccagaagatgcaggatctcttcagccctaacaaatataaagaaaagttcgagaagactaagggccagccgtatgcgagcaccacagacaccccagaattgaggcgtataaagaaggttcaggaccagctgagcgaagtgaagtataggatggatggggatgtggccaagaccatttgtcacgtggacgaaaaggctaaagatatcgagcacgcgaaaaaggtgagtcagcaggtgtcaaaagttctttacaaacagaactgggaggacaccaaggacaaatatttactccccccagacgctccggagctggtgcaagcagttaagaacacagctatgttcagcaagaagctgtacactgaagactgggaagcggacaaatcactgttttatccatataatgacagtcccgagctgcgtagagtagcccaggcacaaaaagcactctccgatgtcgcctacaagaaggggttagccgagcagcaggcgcagttcacgcctctagcagacccacctgatatcgagttcgccaagaaggttaccaatcaagtctctaaacagaaatacaaggaagattatgaaaataagataaaggggaaatggtctgaaactccctgctttgaggtcgccaacgccagaatgaatgcagataatatttctacaagaaagtatcaggaggatttcgagaatatgaaggatcaaatatactttatgcagacagagactccggaatacaaaatgaacaaaaaggctggcgtcgccgcttcaaaagtcaaatacaaggaagactacgagaagaacaaaggaaaagctgattataatgtgctgcccgcctctgaaaatcctcagttacggcagctgaaggccgccggagacgctctttctgataaactctacaaagagaattacgagaagacaaaggctaagagtattaattactgtgaaacacctaagtttaagcttgataccgtgctccagaacttttcatcagataaaaagtataaagatagttacctcaaggatattttgggccattatgtggggtcctttgaagatccttatcacagccactgtatgaaggtcactgctcagaatagcgataagaactataaggccgagtatgaagaagaccgaggcaaagggttctttccccaaactatcacgcaagaatacgaggccataaagaaactggaccagtgtaaggatcatacctataaagtgcatcctgataaaactaaattcacccaggttaccgattcccccgttctactgcaggcccaagttaattcaaaacagctctctgatctaaactataaggccaaacatgagtccgagaagttcaagtgccatatcccaccagatacccctgccttcattcaacacaaggtcaatgcatataatctctctgataacctgtacaaacaggactgggaaaagagcaaggctaagaaattcgacataaaggttgatgccatcccactcctcgctgcaaaggcaaacactaagaatacaagcgacgtcatgtataaaaaggattatgagaagaataagggcaaaatgatcggcgtactctccatcaacgacgatccaaagatgctgcattccctcaaagtcgcgaaaaaccagtccgatcgtctgtacaaggaaaactatgaaaagacaaaggctaagagcatgaactactgcgagacaccgaaataccagttggacacacagctcaaaaacttttcagaagcccgttataaagacctgtacgtcaaggatgtgctcgggcactacgtaggctcaatggaagatccctatcacacgcactgtatgaaagtagctgcgcagaattcggataaatcttacaaggctgaatatgaagaggataaaggaaaatgttacttcccccaaactatcacccaagaatacgaggccatcaaaaagctggatcagtgcaaagatcacacctacaaagttcaccctgacaagacaaagtttactgcagtgaccgactcccccgtgttactccaagctcagttgaacacaaaacagctctccgaccttaactataaggccaagcacgaaggcgagaagtttaaatgtcatatacccgctgacgcaccccaatttattcagcatagagttaacgcttacaatctgtcggataatgtgtataagcaagactgggagaaaagtaaagccaagaagttcgatattaaagtggatgcgatcccgctattggccgccaaagcgaacactaaaaacactagcgacgttatgtataagaaggactacgaaaaatccaagggaaaaatgatcggcgccctcagcataaacgacgatcccaaaatgcttcattccttgaaaacggctaagaaccagtcagatcgcgagtatcgaaaagactacgagaagtcgaagacaatctacacagcccccctggacatgctgcaagtgacacaggcaaaaaaatcgcaggcgatagcaagtgatgtggactacaagcacatactacattcttacagttacccaccagattccatcaacgtggatttagcgaagaaagcctatgccctgcagagcgatgtggagtataaggctgactacaactcttggatgaaagggtgcgggtgggtcccgtttggcagcctggagatggagaaagccaagcgggcctccgacatcctaaacgaaaagaagtaccggcagcatccagatacgctgaagtttacctcaatagaagacgccccaatcacggtgcagagcaaaatcaaccaagctcagagaagtgacatcgcatataaggccaaaggagaagaaatcatccacaaatacaaccttccgccggacttgccacagtttatccaagcgaaggtaaacgcgtataatatttcggagaacatgtataaagccgatctcaaggacctaagcaagaagggctacgatttgcggactgacgctattcccatcagagcagcgaaggctgcgagacaggccgcctcagatgtccagtacaaaaaagactacgagaaggccaagggcaagatggtgggcttccaaagtttacaagacgatcctaagcttgtgcattatatgaacgtagcgaaaatacagagtgatagagagtataagaaggattatgagaaaacaaagtcaaagtataatactcctcacgatatgtttaatgtagtcgccgcaaagaaggcccaagacgtggtatctaatgtcaactacaaacacagtctgcaccactacacctaccttcctgacgccatggatctcgagctcagcaagaacatgatgcagatccaatccgacaatgtttataaggaggattacaataactggatgaaaggaatcggctggatccccatcggttcccttgacgtcgagaaggtcaaaaaggcgggagatgctttgaacgaaaagaaataccgtcagcatccagacactctgaagttcaccagtattgtcgacagtcccgttatggtgcaggcaaaacagaacacaaaacaggttagcgacattctctataaggccaaaggcgaagacgtgaaacacaagtatacaatgagcccagacttaccacagtttctccaggcaaagtgcaacgcttacaacatttcagacgtgtgttataagagggactggtacgaccttatcgctaaaggcaacaatgttcttggggacgccatccctatcaccgctgcaaaagccagccgcaatatcgcatccgattacaaatacaaggaggcttatgagaagagcaagggcaaacatgtgggattccggtcccttcaggatgaccctaagctggtccactacatgaacgtagccaagctccagtccgaccgggagtacaagaagaattacgagaatacgaaaaccagctatcacacacctggagatatggtctctatcaccgcagccaagatggcccaggacgtcgcaactaacgtgaattacaaacaaccgctgcatcattatacatacttgcctgacgccatgtcccttgaacatacccgaaacgtgaatcagattcagagtgataacgtctataaggatgagtataacagcttccttaagggcatcgggtggattcccatcggatctttagaggttgagaaggtgaagaaggctggggatgccttaaacgagcgcaagtaccggcagcaccctgatactgtcaaattcacttctgtgcccgacagcatgggtatggtcctggctcagcacaatacaaagcagctgagtgatctaaactacaaggttgagggggagaaactcaaacacaaatacacaatcgaccccgagctgccgcagtttattcaggccaaggtaaacgccttgaacatgagcgacgcacattacaaggccgattggaagaagaccatcgcaaagggctatgacctgcgcccagatgccatccccattgtggccgccaagagttcacgcaacattgcaagtgactgtaagtataaagaggcttacgagaaagccaaaggaaagcaagtgggtttcctctccttgcaggatgaccctaagctggtgcactatatgaatgtcgccaagatccaatccgatcgggagtacaagaaaggctatgaggctagtaaaactaagtaccatacgcccttagatatggttagcgtcacagccgctaagaagagccaggaagttgccaccaatgccaactaccggcagagttaccatcattacacgctactgcccgatgccttgaacgtcgaacactcccgcaatgcgatgcaaatccagtctgataatctgtataagtccgattttacgaattggatgaaggggatcgggtgggtgcctatcgaatctctcgaagtggagaaagccaagaaggctggagagatcctgagtgagaagaagtacagacagcaccccgagaagttgaagttcacatacgctatggataccatggagcaagcgctgaacaaatcaaataaattgaacatggataagcgactatacacagagaagtggaacaaggataagactactatacatgtaatgcccgacacccctgatattttactgtctagagttaaccagattaccatgagcgataagctttacaaagccggctgggaggaggaaaaaaagaagggctacgatttgcgcccagacgcgatcgccatcaaggctgcccgggcctcgagggatatcgccagtgattataaatacaaaaaggcatatgagcaagccaagggtaagcacataggattcaggagtctagaggatgaccctaaattggtccactttatgcaggttgctaaaatgcagtccgatcgggagtacaagaaaggctacgagaaaagcaagactagcttccatacccccgtcgacatgctgtcagtcgtggcagcgaaaaaaagccaggaggtggccaccaacgcaaactacaggaacgttattcacacgtataatatgttgccagatgcaatgtccttcgagctagccaaaaacatgatgcagatccagtcagacaatcaatacaaggctgactacgcagatttcatgaaaggaataggctggctaccccttggcagtctcgaggctgaaaagaacaagaaagccatggagattatctctgagaaaaagtaccgccagcatccggatacactcaagtacagcaccttaatggacagtatgaatatggtgctggctcagaataacgccaagatcatgaacgaacacctgtacaaacaggcctgggaggccgacaagactaaggttcatatcatgccagacatcccacagattattctggccaaagccaacgctatcaacatgtcagacaagttatataaactgtcgctggaggaaagtaagaagaaagggtatgatcttcgcccagacgcaatccctattaaggccgcaaaagcgtcacgcgatatcgcctccgactacaagtacaaatacaattacgaaaaggggaagggcaagatggtgggcttccgctcccttgaagatgatcctaagcttgtccattcaatgcaggtggccaagatgcagtcggacagagaatataagaagaactacgaaaatacgaagacctcctatcatacccccgccgacatgctcagtgttaccgctgccaaagacgcccaggcgaacataactaatacgaattacaagcatctcatccataagtacattttgttgcctgacgccatgaacatcgagctcactcgcaatatgaaccgtatccagagcgataacgagtataaacaagactataacgagtggtacaagggacttggctggtctcctgccggctccctggaggtggagaaagctaaaaaggctaccgaatatgcttctgaccagaagtaccggcagcatccatccaacttccagtttaaaaaactcaccgattcaatggatatggtgctggcaaagcagaacgcccatactatgaataaacatctgtacacaatcgattggaacaaagataaaaccaagatccatgtgatgccagatacaccggatatcctgcaggccaagcagaaccagactctgtattctcagaaactttacaaactcggatgggaggaggcactaaagaaagggtatgacctgcctgtggatgccatatccgtgcagctggccaaagcatccagggacatagcttcagattacaaatataagcaaggatatcgcaaacagctggggcatcacgttggcttcaggtctttgcaggatgatccaaagttggtactctccatgaatgtggctaaaatgcaatcagagcgagagtacaagaaagactttgaaaagtggaaaacaaaattctctagccctgttgacatgctcggcgtggtgctcgccaaaaagtgtcaagaactcgtgagtgacgtagactacaaaaactatcttcaccaatggacttgcctgcctgatcaaaacgacgttgtgcaggccaagaaagtgtatgaactacagagcgagaatttgtataagtccgatctcgaatggctgagagggatcggctggtcgccactaggaagcctggaggcagagaagaataagagagccagcgaaattatttctgaaaagaagtataggcagcctcccgaccggaacaagtttacgtcaattcctgacgctatggacatagttctggcaaagactaacgctaaaaaccggagcgacaggctttaccgggaagcttgggacaaagacaagacacagattcacatcatgccagataccccagatatagtgctggccaaggcaaatttgataaacacaagtgacaaactgtaccgcatgggatatgaagagcttaagcgcaagggatacgatttacctgtggacgcgatccccataaaagcagcaaaagccagcagagaaatcgcctcggaatacaagtataaagagggctttagaaagcagttgggccaccatatcggtgcaagaaatatcgaagacgatcctaagatgatgtggtcaatgcatgttgcaaagatccagtccgacagagagtataagaaggactttgagaagtggaagaccaagtttagctcacctgtggacatgctgggcgtcgttttagctaaaaagtgccagactctcgttagtgatgtggattacaagaactaccttcaccagtggacttgtctgcccgatcagagtgatgtgatacacgctagacaagcttacgatcttcaatcagataacctgtacaaatccgacttacagtggctcaaagggattggctggatgacatcagggagtctggaggacgagaaaaataagagagcaacgcagattctatctgatcacgtgtacaggcagcaccccgatcagtttaagttctcctcactaatggatagcatacccatggtattagccaagaataatgctatcacaatgaaccatagactgtacaccgaggcgtgggataaagacaagacgacagtccacataatgcccgataccccagaggtgttattggctaaacagaataaggtgaactattctgagaagctatataagctggggttagaggaggcaaaacgcaagggctatgacatgagagttgacgcaattcccatcaaagcagctaaggctagcagagatatcgctagcgagttcaagtataaggagggataccgtaagcagctaggacatcacattggagcacgcgctatacgagatgacccgaaaatgatgtggtccatgcatgttgccaagatacaatcagatagggagtataaaaaagatttcgagaagtggaagaccaagttctccagccctgttgacatgctgggagttgtccttgcaaaaaagtgtcagaccctggtgagtgacgtcgactataagaattacctgcaccaatggacgtgcctacccgatcaatccgacgtcatccacgctaggcaggcctatgacctgcagagtgataatatgtataagagcgacctgcaatggatgagagggatcggctgggtgagcattggctccctggatgttgagaagtgcaagcgtgccaccgagatcctgagtgataaaatttatagacagcctcccgaccggtttaagttcacatccgtgaccgactccctggaacaggtcctcgccaagaacaatgctattacgatgaataagagactctatacagaagcatgggacaaggataagacacagatccacatcatgccggacacccctgagatcatgcttgctcggatgaacaaaatcaattatagcgagagcctgtataagctggcaaacgaggaggctaagaagaagggatatgatctgcgatccgacgcaattcccatcgtggccgccaaagcgtcgcgagacatcattagcgactataaatataaggatggatactgtaaacagctagggcaccacatcggggccaggaatatagaagacgatcctaaaatgatgtggagcatgcatgttgccaagatccagagtgacagggaatataagaaggattttgagaaatggaaaaccaagttctcttccccagtggacatgctgggcgtcgtcctggctaaaaaatgccaaaccctagtctccgacgtggactacaagaattacctgcatgaatggacctgcttgccagatcagtcagacgttatacacgcccgtcaagcatatgacctgcagtcagataacatctataaaagtgatttgcagtggcttcgagggataggctgggtgcccatcgggagcatggatgtagtgaaatgtaagagagccaccgaaatcctctccgataacatttatagacaaccgccggataaactgaagtttactagcgtgactgattcattagagcaggtgctagctaaaaacaacgcactcaacatgaataaacgactctatacggaagcctgggacaaagataaaacccagattcacatcatgccagataccccagaaattatgcttgcacggcaaaataagattaattacagcgagactctgtataaactggcgaatgaagaggccaaaaaaaaaggctacgaccttaggagcgatgctattccaatcgtggcggctaaggctagccgtgacgtcatatccgattacaagtataaagacggttaccgcaagcagcttggacatcacattggggctaggaacattgaagatgatcctaaaatgatgtggagcatgcatgtagcgaagatccagagcgacagagagtacaaaaaagacttcgaaaaatggaagaccaaattttcttcccccgtcgatatgctgggggtggtgctcgctaaaaagtgccagacgctggtgtccgacgtggattacaaaaattatcttcacgagtggacgtgcttgcctgatcagaacgacgtgatacacgccaggcaggcctatgatctccaatcagataacatctataaatccgacctgcagtggctccgtggcatcggctgggtccccattgggtcaatggatgtggtgaagtgcaaacgtgctgccgaaatactgtcagataacatctatcgacagccacctgataagctaaaatttacctcagtgaccgactccctcgaacaggtactagccaaaaacaatgcccttaatatgaataaaagactgtataccgaggcctgggataaagacaaaacacaagttcacataatgcccgatacacctgagataatgctggcgcgccagaacaaaatcaattacagcgaatccttatatcgacaggctatggaggaagccaaaaaggaggggtacgatctgcgttccgacgctattcctatcgtggccgctaaggcttctcgcgatattgccagcgactataaatataaagaggcttatcgcaagcaactgggccaccatatcggcgcaagagcagtacacgatgatcccaaaatcatgtggagtttgcatattgccaaggttcagtccgaccgcgagtataaaaaggacttcgaaaaatacaagactaggtacagctcacccgtggacatgttgggaatcgttctagctaagaagtgccagaccttagtgtccgacgtggactacaagcatcccttacatgaatggatctgcctccccgaccaaaatgatataatacacgcgcgtaaggcctacgatctccaaagcgacaatctctacaagagcgacctcgagtggatgaaaggcatagggtgggttcctatagacagcctcgaggttgtgcgcgccaagcgggccggcgagctgctgagcgacacgatttacagacaacggcctgagacactcaaattcaccagtattactgatacacctgagcaggtgcttgctaaaaacaacgcgctgaatatgaacaagcggttatacacggaagcttgggataacgacaagaaaactattcatgtgatgcctgataccccggaaatcatgctagccaaacttaaccgaatcaactatagtgataagttgtacaagctcgccctcgaagaatctaagaaagaggggtacgacctacggcttgatgccattccaattcaggctgcgaaagcctccagggatatcgcaagcgactataagtataaggagggctacaggaaacagctgggccaccacataggtgcaagaaatatcaaagatgaccctaagatgatgtggagcatccacgtggcaaagatacagtccgaccgagaatataagaaagagttcgaaaagtggaaaactaaattttcctcaccagtggacatgctcggcgtggtcttggcaaagaagtgccagatcctcgtgagcgatattgattataagcatccattgcacgagtggacgtgcttacccgaccagaacgatgttatccaagcccgtaaagcttatgacctgcagtcagatgcaatatacaagtccgatcttgaatggcttaggggcattggatgggtgcctatagggtcagtcgaggtggagaaagtcaaacgggcgggggagatactatccgatcggaagtaccggcagccggctgatcagctcaaattcacctgcatcacagacacccctgaaatcgtcttggccaagaacaacgcactaacaatgtccaagcatctgtacaccgaagcatgggacgctgataagacttcaattcacgtgatgcccgatacacctgacattctgcttgccaagtcgaacagcgcaaatatctctcagaaactgtacacaaagggctgggatgagtccaagatgaaggactacgatctccgtgctgacgctatttccattaaaagtgcaaaggcttcccgcgacattgcttcggattataagtacaaggaggcgtatgaaaaacagaagggccaccacatcggcgcacaatccatcgaggacgaccccaagatcatgtgcgccattcacgcaggtaaaattcagagcgaacgagaatacaagaaggagtttcagaagtggaagaccaaattttcctctccagtcgatatgttgtctatcctcctcgccaagaaatgccagactctcgttacggacattgactatcgcaattacttgcacgagtggacatgtatgcctgatcagaatgatattatccaggcaaaaaaggcctacgatctacaatccgacagcgtgtataaggctgacctggagtggctacgcggcattggctggatgccggagggtagcgttgaaatgaacagagtgaaggtcgcacaggaccttgtgaacgagaggttatataggacaagacctgaagccctttcattcacatccattgtggacacccccgaggtggtcctcgccaaggctaactccctgcagattagcgagaaattgtaccaggaggcctggaataaggacaaatcaaatattactataccctcagacacaccagaaatgctccaggcccatattaatgccttgcagatctccaataaattgtatcaaaaagattggaacgacgccaagcagaaggggtatgacattagggccgatgcgatagagatcaaacatgccaaggcttcccgcgagatagctagtgagtacaagtacaaggaaggatatagaaagcaactaggccatcacatgggattccggacactgcaagatgatccgaaaagcgtctgggctattcatgccgcaaaaatccagagcgatcgagagtataaaaaggcttacgagaagtctaagggcattcacaacactccgcttgacatgatgtcgatcgtacaggcaaaaaagtgccaggtgctggtgtctgacattgactacaggaattacctccaccagtggacttgcctgcccgaccagaatgacgtgatccaagccaagaaagcatatgacctgcaaagcgataacctgtataaatccgacttagaatggttgaagggtattggctggctgcccgaaggaagcgttgaggtaatgcgcgtgaaaaacgcccagaatttactgaacgagcgcctgtacaggattaaacccgaggctcttaagttcacttccattgtcgatacaccagaagtgatccaggcaaagataaacgccgtgcagatctccgaacctttgtatcgtgatgcctgggagaaagagaaggcaaacgtgaacgtcccggccgacacccctttgatgttacagtccaaaatcaacgcactccagatctctaacaaaagatatcagcaggcttgggaagacgttaagatgactggttacgacctcagagcggacgcgatcggcatccagcacgcaaaagcctcacgcgacatagcttcggattacctctataaaaccgcttacgaaaaacagaagggtcactacattggctgccggtcggccaaagaggaccctaagctggtgtgggctgctaacgtcctgaaaatgcagaacgatcgattatacaagaaagcctataacgatcacaaggctaaaatctccattccagtagatatggttagcatcagtgcagctaaggagggacaggccttagcatcagacgtggattatcgacactacttgcaccactggtcatgcttccctgaccagaacgacgtgattcaggcacggaaggcgtacgacctgcagagtgactccgtctataaggctgaccttgagtggcttcgggggatcgggtggatgccggaaggatcagtggagatgaacagagtcaaagtggctcaggatttagtcaatgagcggctctatcggacacgtcctgaggctttatccttcaccagcatcgtcgatacccctgaggtcgtgttggccaaagccaactctctacaaatctcagagaaactgtatcaggaggcctggaataaagacaagagcaacatcaccatcccttcggacacacccgagatgctacaagctcatattaatgccctgcagatttccaacaagctataccagaaggactggaacgacactaaacagaagggctatgacattcgcgccgatgcaatcgagatcaaacatgctaaagcgagccgagagatagctagcgagtacaagtacaaggagggttacaggaagcagctgggtcaccatatggggtttcggacgcttcaggacgaccccaagtccgtgtgggcaatccacgctgcaaagatacagtcagacagggagtataaaaaagcctatgaaaaatctaaaggtatccataatacacctctggatatgatgtccatcgtgcaagcaaagaagtgccaagtgctcgtgtccgatatcgactaccgtaattacctgcatcaatggacatgcctgccagatcagaacgacgttatacaggcgaagaaagcttacgaccttcagtcggacaacctgtacaagagcgacctggaatggctaaaggggattgggtggctaccggaagggtccgtggaggtgatgagggtgaaaaacgcccagaatctgttgaacgagcggctgtaccgcatcaagcctgaggcactaaagtttacgagcatcgtagatactccagaggttatccaggccaagatcaacgccgttcagatctcagaacccctgtacagaaatgcgtgggaaaaagaaaaggctaacgtgaacgtacccgccgatacgcccctgatgttacagagcaagatcaatgcccttcagatatcaaacaagaggtatcaacaagcatgggaagacgtcaagatgactgggtacgacctgagagctgacgctatcggcattcagcatgctaaggccagcagagacattgcttccgactacctctacaagaccgcatacgagaaacagaaagggcattacattggatgcaggagtgcgaaggaggaccctaaactggtgtgggctgccaatgtcctgaagatgcagaatgatagactgtacaagaaagcttacaatgaccacaaggccaagatcagtatacccgtggacatggtcagcatatcagccgctaaagaaggccaggctctggcttcagacgtggattacaggcattacctgcaccactggtcctgcttccctgaccagaatgacgtgatccaggctaggaaggcctacgatcttcagagtgacagcgtatataaagccgatctcgaatggctgcggggtatcggctggatgcccgagggctctgttgaaatgaacagggtcaaggtggctcaggacctggtcaatgagcggttatatcggacgcgccccgaagccctgtctttcacgagcattgtcgacaccccagaggtggtgctggcaaaggctaacagtctgcagattagcgagaagctttatcaggaggcctggaataaagacaaaagtaacattaccataccctctgacaccccggaaatgctgcaggcccacatcaacgccttacagatctcgaacaaactgtaccagaaggattggaacgatacgaagcaaaaaggctacgatatccgggcggatgctatcgagattaaacatgctaaggccagccgcgagattgcaagcgaatataaatataaagagggctacaggaaacagctaggacaccacatggggttccgcaccctgcaggacgaccctaaatccgtatgggctatccatgcggctaaaatccagtctgaccgggagtataagaaagcctacgaaaagagcaagggcatccacaataccccccttgacatgatgtccattgtacaagccaaaaagtgtcaggtgctggtgtctgacatcgattacaggaattaccttcatcagtggacatgcctgcccgatcagaatgacgtgatccaggctaagaaggcgtatgacctgcaatctgataacttgtacaaatccgatcttgaatggttgaagggcatcggctggctgcccgaggggtccgttgaggtcatgcgagtgaaaaacgcacagaatctgttaaacgaacgtctgtataggatcaaacccgaagcgctcaagttcacaagtatagttgatacccccgaggtcatccaggcgaaaataaacgctgtacagatctcagagcccctttaccgcgacgcctgggaaaaagagaaagcaaacgtgaacgtaccagccgacactccactgatgctgcaatctaagattaatgctctacaaatctcaaacaagcggtatcagcaggcttgggaagacgtaaaaatgacagggtacgacctgagagctgatgctattgggatccagcacgcaaaagcctctcgggacatcgcctctgactacctgtataagacagcttatgaaaaacagaaaggccattacattggatgtcgctccgcaaaggaggacccgaagctcgtatgggctgctaacgtgctgaaaatgcagaacgaccgattgtacaagaaagcttataacgaccacaaggccaaaatttctatccctgtggacatggtttcaatcagtgcagccaaagagggccaggcactggcctcggacgtggattaccggcactacttgcaccgctggtcatgtttccccgaccagaatgatgttatccaggcccgtaaagcttatgacctgcagtctgacgcactctacaaagctgacctggagtggttacgcggcatcggatggatgccccagggttctccagaggtactgcgcgtaaagaacgcccagaatatcttttgcgacagtgtgtacaggactcccgttgtgaatctgaaatacacttcgatcgtggacacaccggaggtggttttggcgaaatccaacgctgagaatatctctataccaaagtaccgggaagtttgggacaaggacaaaacaagcattcacattatgcctgatacccctgaaattaatctggctagagcgaatgcccttaatgtctctaataaactgtatcgggagggctgggacgaaatgaaagccggctgcgatgtgaggctagacgctatccctatccaagctgcaaaggcttctcgtgaaatcgcctctgattataagtacaagctggaccatgaaaaacagaaagggcactatgtgggaactctgacggccagggatgataacaagattcgctgggctctcattgccgataaacttcagaacgaacgagaatataggctggattgggctaaatggaaggccaaaatccaatcccccgttgacatgctctcaattttgcactcaaaaaacagtcaggcccttgtctctgacatggattacaggaactatctccaccagtggacatgtatgcccgaccaaaacgacgtgatccaggcaaaaaaagcttatgagttacagtccgataatgtatataaggccgacctcgaatggctccgcggaatcggctggatgccaaatgattcagttagtgttaaccacgcaaaacacgccgcagacatcttcagtgaaaaaaagtacaggaccaagatagaaacattgaattttacacctgtggacgaccgagtggattatgtgactgccaaacagtcaggggaaatcctggatgatattaagtaccgcaaggactggaacgctaccaagtccaagtatacactgacggaaacccctctacttcatacagcccaggaagccgccagaatcctcgaccaatacctgtacaaggaaggatgggagaggcagaaagctactggctacatcctgcctccagacgcagtcccttttgtgcacgcccatcattgcaatgacgtgcagagtgagctgaaatataaggctgagcatgtgaagcagaagggccactacgtgggcgttcccactatgcgagacgatcctaagctagtgtggttcgaacatgccgggcagattcagaacgagagattgtataaggaggattaccacaaaactaaggccaaaattaatatacctgccgatatggtgtcagtgctggcagccaaacagggacagaccttggtctccgatattgattacagaaattacctacatcaatggatgtgccaccctgaccaaaatgatgtgattcaagcacggaaagcctacgatttgcagtcagataatgtgtacagagctgatctggaatggctacggggcattggctggatccctttagatagtgtcgaccacgtgcgagtaacaaagaaccaggaaatgatgagtcaaattaagtataaaaagaatgctctggaaaactacccaaatttccgcagcgtcgtggatccgcctgaaatagtgctcgcgaagatcaacagcgtcaatcagtcagatgtcaagtataaggagacgttcaacaaggctaaggggaaatacacctttagtcccgatactccacatatatcccacagtaaggatatgggcaagctttactctactattctgtacaagggagcttgggagggtactaaggcttatggctacaccttagatgagaggtacattcccattgttggtgccaaacacgccgatctcgtgaactccgaactgaagtacaaggagacctacgagaagcagaaaggccactacctggccggcaaggtgataggagaatttccgggcgtcgtgcattgcctagactttcagaagatgcggtcagccctgaactaccgtaaacactacgaggatactaaagcaaacgtgcacatccctaacgacatgatgaaccatgttctggccaagaggtgccagtacattctcagcgatctggaatacagacactacttccaccaatggacatcgttgctggaggagccgaatgtcatccgtgtgcgaaacgcccaggaaatcctgagtgataacgtctataaagacgacctgaactggctgaagggcataggctgctacgtgtgggacacaccacagatccttcatgctaagaagtcgtacgatttacagtcccagctgcagtatactgccgccggaaaagaaaatctgcagaactacaacctagtgactgacacacccctctacgtgacagccgttcaaagcggaatcaatgcctcggaagttaaatataaggagaattaccaccagataaaagacaaatacacgactgtgttagaaacagtggactacgaccgaacacgcaacctcaaaaatctgtacagcagcaatctgtataaagaagcgtgggatcgagtgaaggctactagctatattctgccatcctccaccctaagtctgacccatgcaaaaaatcaaaaacatttggccagtcatattaaatacagagaggaatatgaaaagtttaaagccctgtacacgctgccgcgaagcgtcgacgatgaccctaatacagccaggtgtttacgggtgggaaaactgaatatcgacaggctctacaggtccgtttatgagaaaaacaagatgaaaatacacatcgtgcctgatatggtcgaaatggttacagcgaaggactctcagaaaaaagtgtctgagatagactatcgcctaagactgcacgagtggatatgccaccctgacctccaggttaatgaccatgtccggaaagtgacagatcagatctctgacatcgtgtacaaagacgacctgaattggttaaaggggattggctgctacgtgtgggacactccagaaattctgcatgccaaacacgcctacgacctaagggacgatattaagtacaaagcacacatgctgaagacaaggaacgattataaactcgtgaccgacaccccagtctacgttcaggcagttaaaagcgggaaacagctgtccgacgccgtgtaccattatgactacgtgcacagcgtacgggggaaagtcgctcctaccactaagaccgttgacctggatagagctttgcatgcgtacaagttacagagcagcaacctgtacaagacctcccttcgcaccctccctactgggtacaggctgccgggcgacacccctcattttaaacatatcaaagacactcgctatatgtccagttacttcaagtacaaggaagcttatgaacacactaaggcgtacggctacaccctgggacctaaggacgttccttttgtgcacgtgaggcgcgtgaacaacgtgacatccgagagactgtatagagaactgtatcacaaactgaaggataaaatccacaccacacctgacacaccagaaatccgccaggtaaagaaaactcaggaggcggtctcagaacttatctacaagtccgatttcttcaagatgcagggacatatgattagcctgccctacaccccacaggtaatccactgccgctatgtaggagatattacttcagatatcaagtataaagaagacctccaggtcctcaaaggcttcggatgttttctttatgatactcctgatatggtgcggtcccgtcatctgaggaagctgtggagtaactacttgtatacggacaaagctaggaagatgcgtgataaatataaggtggtgcttgataccccggaataccgcaaggtgcaggaactaaaaactcatctctcggaactcgtttaccgggctgcaggaaagaaacagaagtccatattcacttccgtccctgatacacccgatctccttagagcaaagcgaggacagaagctgcaaagccagtatctgtacgtggagttggctacgaaggagaggccgcaccaccacgcagggaaccaaacaacagccctgaagcacgccaaggacgtgaaagacatggtgagtgagaagaagtacaaaatccagtacgagaaaatgaaggataagtatactcctgttccggacactccaatcctgattagggccaagagagcatactggaacgctagcgaccttaggtacaaggagacgtttcagaagactaaaggtaagtatcatactgttaaggatgcgctcgatatcgtctatcaccggaaagtgaccgatgacatttccaagattaaatacaaggaaaactacatgtctcagctgggtatctggcggtcaatccccgatagacccgagcacttccatcacagagcagtaactgatacagtctcagacgtcaagtacaaggaggatctcacatggctgaagggcatcggctgctacgcctacgatacccccgactttacactcgctgagaaaaataaaaccctctattccaaatacaaatacaaagaggtgtttgaaagaacgaaaagtgattttaaatacgtcgctgactctcccattaaccgacatttcaaatatgccacccagcttatgaatgagcgtaaatacaagtcatccgccaaaatgttcctccagcacggctgcaatgagatactgaggccagacatgctgaccgccctgtacaactctcacatgtggtctcagatcaaataccggaagaattatgagaaatctaaggacaagttcacatccatcgtggatacgccggaacacctgaggacaacgaaagtcaataagcaaatatccgatattctgtataaattagaatacaacaaggccaagccacgcgggtatactacgatccatgacacacctatgctgcttcatgttcgtaaggtcaaggacgaggtgagtgacctgaagtataaagaagtgtatcagcgtaataaatctaactgtactattgaaccggatgccgtccatattaaggccgcgaaagacgcctacaaggtcaacactaatctggactataaaaaacagtacgaagccaacaaggcccattggaaatggacacccgacaggcccgattttctccaagcggctaagagttctctgcagcaatcagattttgagtataagcttgatcgcgagttccttaagggttgtaagttgtcagtgaccgatgataagaatacagttttagcactcagaaatactctgatcgagtccgacctgaagtataaggaaaagcacgttaaagagagaggaacctgtcacgccgtaccagatacacctcaaattctcctggcgaaaacggtaagcaatttagtgagcgaaaataaatataaggatcacgtgaagaaacacttggcccaaggatcgtatacaactcttcctgaaacaagggacactgttcacgtgaaggaagtgaccaagcacgtgagtgatacaaattataagaaaaaatttgttaaagaaaagggtaaaagcaactactccattatgttggaacctcctgaggtcaagcatgctatggaagtcgctaaaaaacaaagcgatgtggcttatagaaaggacgcaaaggagaacctgcactacaccacagtagcagacaggcctgatataaagaaagctacccaggctgctaagcaggcgtccgaagtcgagtacagagccaagcaccgcaaggaagggtctcacgggcttagcatgctcggacggcctgatattgagatggctaaaaaggcagctaagttgtcctctcaggtgaagtatcgtgaaaatttcgataaagaaaagggaaagacaccaaagtacaatcctaaggatagccaactgtacaaggtgatgaaggatgcaaacaatttggcctcagaagtgaaatacaaagcagacctcaagaagctacacaagcccgtcaccgatatgaaagagagcctgatcatgaaccacgtgttaaacaccagccagctcgcttcctcttaccagtataagaaaaagtacgaaaagtccaagggccactatcataccatccccgataatctcgaacagctgcatttaaaggaggcaacagaactgcaatcaatcgtgaagtataaggagaagtatgaaaaggagcgggggaagcctatgttggattttgagacacctacatacatcaccgctaaggagtctcaacagatgcagagcggcaaggaataccggaaggactacgaagagtcaataaaggggagaaacctgacaggactggaagtcacgccagcgcttctgcacgttaaatatgccacgaagattgcttccgagaaagagtaccggaaagatcttgaggaatccataaggggcaaaggactgaccgagatggaggatacaccggatatgctcagagccaagaatgctacacagattctaaacgagaaagaatacaaaagagacctcgaactggaggttaagggtcgcggactgaacgccatggctaatgagacccctgacttcatgcgagcccgtaatgcgacagatattgcatcacagatcaaatacaaacagagcgcagaaatggaaaaggcaaattttacatcggttgtcgacacgcctgagatcattcacgcccaacaggtcaagaatttgtccagccaaaagaaatataaggaagatgccgagaagagcatgagttattatgaaaccgtgctcgatactccagaaatacagcgggttcgggaaaaccagaaaaactttagtttactccagtatcagtgcgatctcaagaatagcaagggcaagataacggtggtgcaagatacgccggaaattctgagggttaaagagaatcaaaaaaatttctcctccgtcctctacaaagaggacgtgtcccctggaaccgccattggcaaaacgcccgagatgatgagagtaaagcaaacccaagatcatatcagtagcgtaaaatacaaagaggccataggacaagggacccctatccctgacctccccgaggtgaaaagagtcaaagaaactcagaagcatatcagtagtgtaatgtacaaagagaacctggggacaggaatcccaacgactgtgaccccggaaatcgaaagagtgaagcgaaatcaggagaattttagttcagttctatacaaagaaaatttggggaaagggataccgaccccaattacacctgagatggagagagtaaagcgaaatcaggaaaatttttctagcatcttatataaagagaacctgagcaagggcactccgctgcctgtgaccccagagatggaacgcgtcaagctaaatcaggagaacttctctagcgtgttgtacaaggagaacgtgggaaaagggattcccatacccatcacaccagaaatggagcgtgtgaagcataatcaggagaacttttccagtgtactgtacaaggaaaatctgggaactggtatcccaatcccgataaccccagaaatgcagagggtgaagcacaatcaggagaaccttagttctgtcttgtacaaagagaacatggggaaggggacacccttacctgtcacccctgagatggaacgcgttaaacataaccaggagaatattagctctgttctgtataaggagaacatgggcaaggggactcctttgccagtcaccccagagatggaaagggtgaagcataatcaggaaaacatctcctctgttctttataaagagaatatgggaaagggaacccccctggcggtgaccccagagatggagcgcgtgaaacacaaccaagaaaacatcagttctgttctatataaggaaaacgtggggaaggcgacagctaccccagtcacgcctgagatgcagcgcgttaagcggaatcaagagaatataagcagtgtcttatataaggaaaatcttggaaaagcaacgcccactcctttcacgcctgaaatggagcgcgtaaagcgaaatcaggagaattttagttccgttctgtacaaagagaacatgcgcaaggctacaccaactcctgtgacccctgagatggagagggctaaaagaaatcaggaaaatatcagcagcgttctgtattccgacagttttcgtaaacagatccagggtaaagctgcctacgtgctcgacactccagagatgcgccgggtccgcgaaacgcagcgccatattagcaccgtcaagtatcacgaagactttgaaaagcataaaggttgtttcacacctgtggtaacagaccccataaccgaaagagtaaaaaagaatatgcaggatttctctgatatcaactatcgggggattcagcgcaaggtggtggagatggagcagaagcggaatgaccaggatcaggaaaccattaccgggctgagggtatggcggaccaacccaggatccgtcttcgactatgatccagcagaagacaatatccagtcgagatccctgcacatgataaacgtgcaggcgcagcgccgaagccgtgagcagtctagatccgcctccgccctgagcatatccggcggagaagagaagagtgaacattccgaagcaccggatcaccacttatcaacttactctgatggaggcgtgttcgcagtctccactgcatacaaacatgctaagaccaccgagctaccccagcagaggtcgtccagtgtagccacacaacaaacaacagtaagttcaatcccctctcatcctagcaccgcaggcaagatttttagggctatgtacgactacatggccgccgacgccgacgaggtgagttttaaagatggggatgcgatcatcaatgtccaggctatcgacgaaggatggatgtatggcactgttcaacggaccggccgtactggaatgctgcccgcaaattatgttgaggcaatctag

SEQ ID NO: 196724 - DNA, 20010 bp, synthetic construct
  misc_feature 1..20010: note = Description of Artificial Sequence: Synthetic coding sequence
  source 1..20010: mol_type = other DNA
atggccgacgacgaggactacgaggaggtggtggagtactacaccgaggaagttgtctacgaagaagttcctggggagaccattaccaaaatctacgaaacgacaacgaccaggacatccgactatgaacaatccgagacttcaaagcctgcactggctcagcctgcactggcccagcccgcttcagcaaagcctgtcgagcgccgaaaagtcatcagaaaaaaagtagatcccagcaagtttatgaccccctacattgcacactcccagaaaatgcaggacctgttttctcctaacaagtacaaagaaaaatttgagaaaacgaaagggcagccatacgcgagtactacagacacgccagaactgaggaggatcaaaaaagtgcaggatcagctgtccgaggttaagtacagaatggacggcgatgttgctaaaactatctgccatgtagacgaaaaagccaaggacatagagcacgccaagaaggtatcacagcaagtcagtaaagtgctatacaagcagaattgggaggacaccaaggacaagtacttattaccgcccgatgcccctgagttggtgcaggctgttaagaacaccgctatgttctctaagaagttgtacactgaggactgggaggccgacaaaagcctattttatccctataacgattcaccagagttgcgtcgggtagcccaagcacagaaggccctttcagacgtagcctataagaaaggcctggcagaacagcaagcccaattcactcctctcgccgatccgcccgacatcgagtttgccaagaaggtcactaaccaggtcagcaagcagaaatataaggaggattacgagaataaaataaaagggaaatggtcggagaccccgtgttttgaggtggctaatgccagaatgaatgccgacaacatttccaccaggaagtaccaggaagacttcgaaaatatgaaagatcaaatatacttcatgcagaccgaaacgcctgagtataagatgaacaaaaaggcaggggtggccgcatccaaggtcaagtacaaagaggactacgagaagaataaggggaaggcggattataacgttctgccagctagcgagaacccccagctccgacagcttaaggccgctggtgatgccctcagcgataaactttataaagagaattacgagaagactaaagcgaagtctatcaactactgcgagacaccaaagtttaagctggatactgtgcttcagaacttctcttccgataagaaatataaagactcatacctgaaggacattttgggacactatgtaggatcttttgaggacccttaccacagtcattgtatgaaagtcaccgcgcaaaacagcgacaaaaactataaggcagagtacgaggaggaccgaggcaagggcttcttcccgcagactataacccaagaatacgaggcaataaaaaagttggaccagtgcaaggatcacacgtacaaggtccacccggacaaaacaaaattcacgcaagtgactgatagccccgtactgctccaggctcaggtcaacagcaagcagctgtccgatctaaattataaagctaaacatgaaagtgaaaagttcaagtgccatattcccccggatacacccgcgtttatccaacacaaggtgaacgcctataacttgtccgacaacctatataaacaggattgggagaagtccaaggccaagaaatttgacattaaggtggacgccatcccgctgttagccgccaaggccaataccaagaatacctccgatgtcatgtacaaaaaggattatgagaagaataaagggaagatgatcggggttttaagcatcaatgatgatcccaaaatgctccacagcctgaaagtcgccaaaaatcagtccgacagattgtataaggagaattacgagaaaaccaaagcgaagagcatgaactattgcgagacgccaaagtatcaactggacacgcagttgaagaatttcagcgaggccagatataaggacctatatgtgaaggatgtgttggggcactatgtcgggtccatggaagatccatatcatacacactgtatgaaagtcgccgctcagaattccgataagtcttataaagcagaatacgaagaagacaaggggaagtgctacttcccacaaacaatcacccaggagtatgaggcaattaagaaattagaccaatgcaaagaccatacgtataaggtgcaccccgataaaacaaagtttacggccgttaccgactcccccgtgctgctgcaagcccaactgaatactaaacagttgtccgacctgaattacaaagccaaacacgagggtgagaaattcaaatgtcacattcccgcagacgctccacaattcattcagcacagggtgaacgcgtataacctgagcgataatgtgtataagcaggactgggagaagtcaaaggcgaagaagttcgacattaaggtcgacgccatccctctgctggcggcaaaagcaaacaccaaaaacacctctgacgtgatgtataagaaagattatgagaaaagcaaaggtaagatgatcggagccctgagcattaatgatgatcccaagatgctgcactctcttaaaactgctaagaaccaatctgatagggaataccggaaggattatgaaaagagtaagactatctacaccgctccccttgatatgctgcaggtgacgcaagctaaaaagtcacaggctatcgctagcgacgtggactacaagcacatcctacactcctatagctaccccccagatagcatcaatgttgaccttgccaagaaggcctatgcactgcagtctgacgtggagtataaggccgactataatagctggatgaaggggtgcggctgggtgccttttgggtccctggagatggaaaaagccaaaagggcaagcgatatcctgaatgaaaagaagtaccgtcagcacccagatacccttaagtttacatcaatcgaggacgccccgatcactgtgcagtcgaagattaaccaggcgcagcgctcagatattgcttacaaggccaaaggggaggagatcatacacaaatacaacctgccacctgaccttcctcagtttatacaagcaaaggtaaatgcatataacatcagcgagaacatgtacaaggctgatctgaaagatctgagcaagaagggatacgatctgagaacagacgctatcccaatccgcgctgctaaagcagcaaggcaggctgcttccgatgtgcagtacaagaaggattatgagaaggccaagggcaagatggttgggttccagtcacttcaggatgatcctaagttggttcattacatgaacgtggccaagattcaaagtgatcgggagtataaaaaagactacgaaaagaccaaaagcaagtataatactccccatgacatgtttaacgtcgtcgcggccaaaaaggcacaagacgttgtgtctaatgtcaactataaacactccctccatcactatacttatctgcctgacgccatggatttggaactgagtaaaaacatgatgcaaatccaatccgacaatgtatacaaagaggattataataattggatgaagggtatcggttggattccgattggctcacttgatgtggagaaggtgaagaaggccggtgacgctctgaatgagaaaaagtatcgtcagcacccggacacactgaaatttacatctatcgtggactctccagtgatggtccaggccaaacaaaataccaaacaagtctcagatattctgtacaaggccaagggagaggatgttaagcataagtatactatgtcccctgatcttccccaattcctgcaagccaagtgcaacgcatacaacattagcgacgtgtgctataaacgcgactggtacgatttaatagcaaagggcaataatgtactgggcgacgcaattcccattactgcagctaaggcttcccgcaacattgcctcggactataagtacaaggaggcttacgagaagtccaaaggcaagcacgttggcttcaggtcacttcaggacgaccctaagctagtgcattacatgaacgtcgcaaaactgcagagcgatagggaatataagaaaaactatgagaacacaaaaacaagctatcatacacccggggacatggtcagtattacagctgctaagatggcacaggacgtggctacgaacgtcaactacaagcagccccttcaccactatacatatctccccgatgccatgagcctggaacatacaaggaatgtaaaccagattcagtctgacaacgtgtacaaggatgaatacaactcttttttgaaaggcattggctggatacctatcggttccttagaggtggagaaagtcaaaaaggccggcgatgccttaaatgagcggaaataccgccagcaccccgatacggtaaaatttactagtgtccctgattccatggggatggtgctggcgcagcataataccaagcagctgtcggacctgaactataaggtagagggggagaaattaaaacataagtatacaatcgacccagagttgccgcagtttatccaagctaaggtcaatgctctcaatatgtccgacgctcattacaaagcggactggaaaaagactatcgccaagggttacgatctgaggccagatgccatccccatcgtggcagctaaatcaagccggaacattgccagtgactgtaagtacaaggaagcctatgagaaggcaaaaggaaagcaagtgggctttctgtctttgcaagacgacccgaaactcgtgcattacatgaacgttgcaaagatccagtccgaccgagagtataagaagggctatgaggctagtaagacaaagtaccatacccccctggatatggtaagtgtaacggccgctaagaaaagccaagaagtggcaaccaacgccaattaccggcaatcctaccaccactatactctcctgcccgacgctctgaacgtggaacacagccggaacgcaatgcagattcaaagcgataatctatacaagtccgactttacaaactggatgaaaggaatcggatgggtacctatcgaaagcttggaggtcgaaaaagctaaaaaggccggggagattctcagcgaaaagaagtatcgccagcacccggagaaacttaagtttacttacgctatggataccatggaacaagctttgaataaatccaacaaattgaacatggacaagcggctttacaccgaaaaatggaacaaggacaagaccaccattcacgtcatgcccgacacccccgacatactgttgtcccgggtgaaccagattactatgtcagataagctgtacaaagctggttgggaggaggaaaagaagaaaggctatgatcttagacctgatgccatcgccatcaaagcagcccgggccagtcgagatatcgcatctgactacaaatacaagaaagcttacgaacaagcaaagggtaagcacatcggatttcggagccttgaggacgaccccaagcttgtccacttcatgcaggtagcaaagatgcagtcagatcgcgagtacaagaagggttatgaaaagtccaaaacatcattccatacccccgtggacatgctgtctgttgtggcagctaagaagtcccaggaggtcgctaccaatgccaactacaggaacgtgattcacacatacaatatgctgcctgacgcaatgtcattcgagctagcaaaaaatatgatgcagatccagtcagataaccagtataaagcagattacgctgatttcatgaagggcatcggttggttgccattgggctcccttgaagccgagaaaaacaagaaggcaatggagatcattagtgaaaagaagtaccgacagcaccctgatactttgaaatacagcactctaatggactccatgaacatggtgctggctcagaacaatgccaagattatgaatgaacatctgtataaacaggcgtgggaggccgataagactaaagttcacatcatgcctgatatcccccagattatcctggctaaggcaaatgctatcaatatgtcagataagttgtacaagttgtcactcgaagaaagcaagaaaaagggctacgatctgcggccagatgctatcccaattaaagctgctaaggccagcagagacattgcttctgattataagtataagtataactacgagaagggtaagggaaagatggtaggatttaggtcactcgaagatgatccaaaactggttcactccatgcaggtggccaagatgcagagcgaccgggaatataagaaaaattatgagaacacgaagacttcctaccatacgccagccgacatgctgtccgtcactgcagcgaaagatgcccaggcgaatataaccaacacaaattacaaacacctgatccacaagtacattctgctcccagatgccatgaatattgagctcaccagaaacatgaacagaattcaatcagataacgagtataaacaggactacaatgagtggtacaagggcttaggctggtctccagccgggtcacttgaagtcgagaaagccaaaaaggcgaccgagtatgcaagtgatcagaaataccgccagcatccatcgaactttcagttcaagaagctcaccgactccatggatatggtactcgctaagcagaatgcacacactatgaataaacatctgtatactattgactggaataaggataagaccaaaatccacgttatgccagatacccccgatatactccaggccaagcagaaccagacactgtacagccagaagctgtacaagcttggttgggaagaagcactcaagaagggctacgatctgccagtggacgcaatttccgtgcagctagccaaagcatcacgcgatatcgctagtgattacaagtacaagcaaggctaccgcaagcaattgggtcaccatgttggtttccgctcgttacaagacgaccctaagttagtcctgagcatgaatgtggcaaaaatgcaaagcgagcgggaatacaagaaagattttgagaaatggaagactaagttcagttcccccgtggatatgctcggggtggtgttggctaagaaatgtcaagagttggttagcgatgtagattataaaaattacctgcaccagtggacatgcctgccagatcagaacgatgtggtccaggccaaaaaagtatacgaattgcagagtgaaaatctttacaagagcgatctggagtggctacgaggcatagggtggagtccattggggtccctggaagctgagaagaataaacgggcctccgaaattatctcggaaaagaagtaccgccagccccctgatcggaataaattcaccagtattccagacgcgatggacattgtcctcgccaaaaccaatgcgaaaaatagaagcgatcgcctgtaccgggaagcatgggacaaggataagactcagattcacataatgcccgacacacctgatatcgtgttggccaaggccaatctaataaacaccagcgataagttgtatcgaatgggctacgaggaactgaagaggaagggctacgacttaccagtggatgccatccccataaaagctgccaaagcaagccgagagatagccagtgaatacaagtacaaggaaggcttccggaagcagctcgggcaccacattggagcaagaaacatcgaggatgatcccaaaatgatgtggtcgatgcatgtggccaagatacagtccgacagagagtataaaaaggactttgaaaaatggaagaccaaattttcatctcccgtggacatgctgggggtggtactggccaagaaatgtcagacgttagtgtctgacgttgactataaaaactacctgcaccagtggacctgtctgcccgaccaatcagatgtgattcacgcgagacaggcatacgatctgcagagcgataacctctataaaagcgatttacagtggcttaaagggatcggctggatgactagcgggtctctcgaagatgaaaaaaataagagagcaacgcagattctctccgaccacgtgtatagacagcacccggatcaattcaagttttcctcgcttatggattccatccccatggttctggcaaagaacaatgccataaccatgaaccatcgtctgtatacagaggcatgggataaggataaaacaaccgtacacattatgcctgacaccccagaagtgctgttggcgaaacagaacaaagtgaactactcagagaaactgtacaagctaggattggaggaggcaaagcggaagggctacgacatgcgcgtcgatgcgatcccaatcaaagccgctaaggcttcccgtgacattgcatcggaattcaagtacaaggaaggctaccgcaagcagctcggacatcacatcggtgcaagggccattcgggacgaccccaaaatgatgtggagcatgcacgtcgccaaaatacagtctgacagagagtacaagaaggatttcgaaaaatggaagacaaagttttccagtcccgtcgatatgctaggcgtggtgctcgctaagaaatgccaaactctcgtttcagatgtggactataaaaactacctgcaccaatggacctgcctccctgatcagtctgacgtaattcacgcccgtcaggcatacgatttgcagagtgacaatatgtataaaagcgacttacagtggatgcggggcatcggctgggtatcaatcgggagcctcgatgtggaaaaatgcaaaagggctaccgagatcttaagtgacaagatctaccggcagccgcccgaccgcttcaaattcacatccgtgaccgacagccttgaacaagttctggccaagaacaacgccctcaacatgaataaaagactctataccgaggcatgggacaaggacaaaacacagatccatatcatgccagacacacccgagatcatgctggccagacagaataaaatcaattactccgagacactgtacaagctcgccaatgaggaggctaagaagaagggatatgacctgcgctccgacgctattcccatcgtggccgccaaggcttctagggacgtgatatccgactacaagtacaaggacggctatcggaaacagctcgggcatcatatcggcgcacgcaatatagaggatgatccaaaaatgatgtggtctatgcacgttgctaagatccaaagcgatagggagtacaaaaaagattttgagaagtggaagaccaagttctcttcacctgtagacatgcttggggtggtgctcgctaagaaatgtcaaactctggtgtccgatgtggattacaaaaactacctccatgaatggacctgcctccccgaccagaacgacgttattcacgctcggcaggcatacgacctgcagtccgacaacatctacaagagtgacctgcagtggttgcggggcattggttgggtgcccataggttcaatggatgtagtcaaatgcaaaagagcggcagagattctcagcgataatatttaccggcaaccccctgacaaactgaagttcacttccgtcaccgacagtcttgaacaagtgttggcaaagaacaatgcattgaatatgaacaagcgcctctacaccgaagcctgggataaggacaagacacaggtacacattatgcccgacaccccagagattatgttggcacgtcagaacaagattaattacagcgagtctctgtatcggcaagcgatggaagaggctaaaaaagagggctatgatctgagatcagacgcgatccccattgtcgccgctaaagccagccgagacatcgcttctgattacaagtataaagaggcttataggaagcagctggggcatcacataggagcccgagcggtacacgatgaccccaagataatgtggagcttgcacatcgctaaggtgcagtcagaccgggagtacaagaaagattttgaaaaatacaaaaccaggtattcttcaccagtggacatgctaggcattgtgttggccaaaaaatgccagaccctggtctcggacgtggactataagcaccctctgcacgaatggatttgtctcccggaccagaacgacattatccatgcaagaaaagcttacgatctgcaatcagataatttatacaagtcagacctggaatggatgaagggaatcggatgggtgcctatcgactcccttgaagtggtgagggccaaaagagctggggaactgctcagtgatacaatctatcgccagagacccgagaccctgaaattcacttcaataaccgacacacccgagcaagtgcttgctaagaataatgccctaaacatgaataaaagactctacactgaggcttgggacaacgataagaaaaccatccatgttatgcccgacaccccagaaattatgctggcaaaactcaacagaattaattatagcgacaagctgtataaactggcgctggaagagagcaagaaagaagggtatgacctgcgattggatgccatcccaatccaggccgcaaaggcatcaagggacattgccagcgattacaagtacaaggagggatataggaagcaactcggacaccacatcggggcaaggaatatcaaagatgatcccaaaatgatgtggagcatccatgttgctaagatccagagcgacagggagtacaagaaggaatttgaaaaatggaagacgaagtttagttctcccgtcgacatgctgggcgtcgtcttggcgaaaaagtgtcagatcctagtgtctgatattgattataagcatcctttgcacgagtggacttgcctaccggaccagaacgacgtcattcaggctcgcaaagcgtatgacctgcagagtgacgctatttacaagtcagacttagagtggctgaggggaattggatgggtgccgattggaagcgttgaggtcgaaaaggtcaaacgcgcaggcgaaatcctcagtgatcgcaaataccgacaaccagccgatcagcttaaattcacttgtattacagacactcctgaaatagtccttgctaaaaataacgctttgacaatgtcaaaacatctttacaccgaggcgtgggacgctgacaagacctcaatacacgtaatgccggatacgcccgatatcctcttggctaagagcaacagtgctaatatttcccagaagctatataccaagggctgggatgagtcaaagatgaaagattatgatctacgcgctgatgcaatctccatcaaaagcgcaaaggcctcaagagacattgcttcagattataagtacaaggaggcctatgagaagcagaaaggccaccatatcggagcccagagcattgaagatgacccgaaaataatgtgcgctattcacgctgggaagattcagtcagagcgggagtacaagaaggaatttcagaaatggaagacgaaattctcctctccggtggacatgctgtctatactgctggcaaaaaagtgccaaacactggttacagacattgactaccggaactacttgcacgagtggacatgtatgccagaccagaacgacataatccaggcaaagaaggcctatgatctgcagagcgatgccttgtataaggctgatcttgagtggttgcgggggatcgggtggatgccacaggggagccccgaggtgttgcgagtcaaaaacgctcagaatattttttgtgacagtgtataccgaacccccgtggtgaatcttaagtatacctccatcgtcgacactcccgaggtagtgctcgctaagtctaatgccgagaatatttcgatcccaaagtacagggaggtgtgggataaggacaagacctccatccatatcatgcctgatacccctgagattaatctggcgcgcgcaaacgccctgaacgttagcaacaagttgtaccgagagggctgggatgaaatgaaggccggttgtgatgtacggttggatgctatcccaattcaagccgctaaagcttcacgtgaaatcgcctctgactacaagtataagctagaccatgagaaacaaaagggtcactacgtcggaactttgactgctcgcgatgacaacaagatcagatgggcgctgatcgcagataaattgcagaatgaaagggagtatagacttgattgggctaagtggaaagccaaaatccaatctccggtcgacatgctgagcatactgcacagtaaaaatagccaggcattggtgtccgacatggattacagaaattatctgcatcagtggacgtgcatgcctgaccagaatgacgtcattcaggcaaaaaaggcatacgagctgcagagcgataacgtatacaaagccgacctggaatggctgagaggtattggctggatgccaaatgactcagtgtcagtgaaccatgccaaacatgcagccgacatcttctcggaaaaaaagtaccgcactaaaatcgagactctgaacttcactccggtggacgatcgagtcgattatgtaacagcgaagcaatccggggaaatcctggacgacatcaagtatcgcaaagactggaacgctacaaagtccaaatatacattgaccgagacgccactgctgcacaccgcacaggaggccgcgcgtatcctcgatcagtacctgtacaaggaaggatgggagcgccagaaggctaccggatacatcctgccacctgatgctgtccccttcgtgcacgcgcaccactgcaatgacgtgcaaagcgaactgaagtacaaggcggagcatgtaaaacaaaaagggcactatgtgggtgtcccaaccatgcgtgacgaccccaagctcgtgtggttcgagcatgcaggacaaattcaaaacgagcgcctatacaaagaggactaccataaaacaaaagcaaagataaatatcccagccgacatggtgtccgtgctggcagctaagcaggggcaaacactcgtgtccgacattgactaccgaaattacctccaccaatggatgtgtcacccagatcaaaatgacgtaattcaggcgcggaaggcttatgatctccagtctgataacgtctatcgagccgacctggagtggctgcgtggcattggctggatcccactggactcagtggaccacgtgcgtgtcacgaaaaatcaagagatgatgtcacagattaaatacaagaaaaacgcactagaaaactatccaaatttcagatccgtggttgaccccccggagatcgtgttggccaaaatcaactctgtgaaccagagcgacgtgaagtataaggagacattcaacaaggccaagggaaaatatacattttcaccagacacccctcatatcagccactctaaggacatggggaaattatattctacaattctgtataaaggggcctgggagggcactaaggcgtatggctacaccctggatgagcgttacattccgatcgtcggcgccaaacatgccgatctggtgaattcagagctgaagtacaaagaaacttatgagaaacagaagggccactacctggccggcaaggtcataggggaattccctggggtggtgcactgtctggacttccagaagatgcggagcgccctgaactacaggaagcactatgaggatactaaagctaatgtacacatcccaaacgatatgatgaaccacgtgctggcgaagcgttgccagtatatcctttccgatttggaatacagacactacttccatcaatggactagtttactggaagagcctaatgtcatcagggtgaggaatgcacaagagatcctcagtgacaacgtgtataaagatgaccttaattggctaaagggtatcggctgttatgtgtgggacactccccagatcttacacgctaagaaaagctacgacctgcagtctcaactgcaatacactgccgcaggcaaagagaacctgcagaattacaacctagtgactgataccccgttatatgtgacggccgtgcagtcaggcatcaatgcatcggaggtgaaatataaggagaattatcaccagataaaggataagtataccaccgtgctcgaaacagtggattacgatagaaccagaaacttgaagaacctctattcaagtaacctgtacaaggaggcctgggatcgggttaaggccacaagttacatattgccttcgtctacactcagtctgactcatgctaagaaccagaaacatttagcatctcatatcaagtacagggaggagtacgagaaatttaaagctctatatactctgcctcgctccgtggatgatgatccgaacacggctcggtgcctgcgggtcgggaagctgaatatcgatcggctgtatcggagtgtgtacgaaaaaaataagatgaagattcacatcgtgccagatatggtagaaatggtcacagccaaggactcacagaaaaaggtgtccgaaatcgactatcgactgcgtctccatgagtggatatgccatcctgacctgcaggtgaatgatcacgtgcgtaaggtgaccgatcagatcagcgacattgtctacaaggatgacttaaattggctcaaggggatcggatgttatgtttgggacacccctgagatattgcacgctaagcacgcatacgatctccgtgatgatattaagtataaagctcacatgctaaagaccagaaacgattacaaacttgttacagatacccccgtttacgtccaggcggtgaaatccggcaagcagctgagtgacgccgtgtatcactatgactatgtccatagcgtcagaggtaaggtagcgccaacaacaaaaaccgtagacctggaccgtgccctgcacgcctacaaactgcagtcaagtaacctgtacaaaacttcccttaggaccctgccaacaggctaccgtctgcccggggacaccccccatttcaaacacattaaagacactaggtatatgtccagttattttaagtataaggaggcttacgagcacacaaaggcttacgggtacactttagggcccaaggatgtgccattcgtgcacgtcagaagggtgaataacgtgacgagcgagcgactttaccgcgagctctatcacaaactgaaggacaagatccacacgaccccagatacacctgagatccggcaggtgaagaaaacacaggaggcggtttcagagctgatctacaaatctgacttctttaagatgcaaggacacatgatcagcttgccatatactcctcaagttatccactgccgatacgtcggtgacatcacctccgatatcaaatataaggaagatctgcaggtcctgaagggctttggatgctttctgtatgatactccagatatggtaaggtccaggcatttacgaaaactctggagcaattacctgtacaccgataaggcaaggaagatgcgggacaagtataaagtcgtcctagatactccagagtacagaaaagtgcaggagctcaaaactcacctgtcagagttagtttatcgagcagcagggaaaaagcagaaatcaatattcacttccgtgcccgatacaccagacctactcagagctaaacggggccagaaactccaatctcagtatctgtacgtcgaattggctaccaaggaacgccctcatcaccacgccggcaatcaaaccacagctctgaaacacgccaaagacgtgaaggatatggtctctgagaagaagtacaaaatccagtatgagaaaatgaaggacaaatatacccccgttcctgacacccccattttaattagggctaaacgagcttactggaatgcaagtgatctgcggtataaggagacattccaaaagactaaaggtaagtaccacacagtcaaggacgccttagacattgtttaccatagaaaagtcacagacgacatatctaaaatcaagtacaaggagaactatatgtcacagctcggtatttggcggtccattcctgatcggccagagcacttccatcacagggctgtgacagatacggtgtcagacgtgaagtacaaagaagatctgacatggctgaagggaattgggtgctatgcatacgatacgcctgacttcaccctggccgaaaaaaataagaccctgtactccaagtataagtacaaagaagtgttcgaaaggactaagtctgacttcaaatacgtggcagactcaccaataaatagacatttcaaatatgctactcagcttatgaatgagaagaagtatcgggctgactacgaacaacgaaaggataagtaccaccttgtcgttgacgagccccggcacttactggcaaaaactgctggggaccagatcagtcaaattaaatatcgtaagaattatgaaaagagcaaggacaagttcacttctatcgtcgataccccagagcacctcagaaccacgaaggtgaataaacagatctcagatattttgtacaaactggaatataataaggccaaaccacgagggtatactaccatacatgatacccctatgttattgcatgtccgcaaggttaaggatgaagtttctgaccttaaatataaggaggtatatcaacgaaataaatctaactgcacaattgaaccggacgcagttcatatcaaggctgccaaagatgcctacaaggtgaacacaaacttagactacaaaaagcagtacgaggccaataaggcccactggaaatggaccccggacaggcccgattttctgcaagccgccaagagctccctgcaacagtccgatttcgaatacaaacttgatagggaattcctgaaaggctgtaaattaagcgttactgacgataagaacacggtgctcgccctgcgcaacacccttattgaatcggacttgaaatacaaagagaagcatgttaaggagcgtggaacgtgccacgcagtccctgatacccctcagatcctgctggcgaagactgtgtctaacctcgtgtctgagaacaagtataaggaccatgtgaagaagcacctagcacaagggtcttatacaaccctgcccgaaacacgggataccgtacatgtgaaggaggtcacgaaacacgtctctgacactaattacaagaaaaaattcgtaaaggaaaaaggaaaaagtaattatagtattatgcttgagcccccagaagtcaagcacgctatggaggtcgcaaagaagcaatccgacgttgcctaccggaaggacgccaaggagaatctgcactacaccactgtggcggaccgccctgatatcaagaaggcgacccaggctgctaagcaggccagcgaggtggaatatcgggccaaacataggaaagagggcagtcatggcctgtcaatgctggggcggcccgatattgaaatggcgaaaaaagccgcgaaactgagctcacaggtaaagtaccgcgagaatttcgacaaggagaagggtaaaacaccgaagtacaatcctaaagactctcagctgtacaaagtgatgaaggatgccaacaatctggcctctgaagtcaaatataaggctgacctcaagaagctccataaaccggttactgacatgaaggagagtctcatcatgaatcacgtgctgaatacatctcagctcgcgtcttcctaccagtacaagaagaaatacgagaagtccaagggacactaccatacaattccagataacctggagcaactgcatctgaaggaggccacagaactgcagtcaattgtgaaatataaggagaagtatgagaaggaacgcggaaaaccaatgctcgacttcgaaacacccacgtacatcacggctaaagaatcccagcagatgcagtcaggcaaggaatatagaaaggattacgaagaatccatcaagggacggaatcttacgggtctcgaggtgacccccgcactgcttcacgtgaagtatgctacaaaaatagcctccgaaaaagagtatcgaaaggaccttgaggagtccattaggggcaaaggtcttacagagatggaagacacccccgatatgctcagagcaaagaatgctacacaaattctgaatgagaaagaatacaagcgggacctggaactggaggtcaagggtagaggattgaatgctatggccaatgaaactccagacttcatgagagcccgaaacgctacagacattgcatcacagatcaaatacaagcaaagcgcagagatggaaaaagcgaattttactagcgtggtcgacacaccagaaattatccacgcccagcaagtgaaaaacctttcttcgcaaaaaaaatataaagaagatgccgagaagagtatgtcctactatgaaaccgtccttgataccccagagatccaaagagttcgagaaaatcaaaaaaactttagcttactgcagtaccagtgcgatctcaagaactctaagggcaaaattacagtggttcaagatacgccagaaatccttcgtgtcaaagaaaaccaaaaaaacttctcttctgttttatacaaggaagacgtaagcccagggactgctatcgggaagacaccagagatgatgcgcgttaaacagactcaggaccatatcagctccgtgaagtacaaagaagccattgggcaggggacaccaattccagacctgccagaggtaaagagagtgaaagagacccagaagcacatctccagtgtaatgtacaaggagaacctgggaaccggaatccctactacagtaacaccagaaatcgagcgtgtgaaacgcaaccaggagaacttcagtagcgtcctgtacaaggagaatctggggaaaggcattcctaccccaatcacccctgaaatggaacgcgttaaacgaaatcaggagaacttcagctctgtactgtacaaggagaacatggggaaaggcactcccctggctgtgacaccagagatggaaagagttaaacacaaccaggagaacattagttcagtgctgtataaagagaacgttggcaaagccacggcaactccagtcacccctgagatgcagcgcgtgaaacgcaaccaggaaaatatctcctcagtactgtataaagagaacctgggcaaagctaccccgaccccatttacccctgaaatggagagagtaaagcgcaatcaagagaacttctctagtgtgctgtacaaagagaatatgcgaaaagccacgcctactccggtgacccccgaaatggagcgggccaagcgcaaccaggagaatatctctagtgtgttgtactccgacagcttccggaagcaaatccagggcaaagccgcttacgtgctggacacaccggagatgcggagggttcgggagacacagaggcacatttcaaccgtgaaataccatgaggactttgagaagcacaaaggctgtttcaccccagttgtcacagaccccatcactgaaagagttaagaagaatatgcaagatttttcagacataaactaccggggcatacaacggaaggtggtggaaatggagcagaagagaaatgatcaggaccaagagacaatcacaggcctgagggtgtggagaaccaatccaggcagtgtgttcgactacgatcccgccgaggacaatatacaaagtaggtcccttcatatgattaacgtgcaggcacagcgtagatctcgagaacaatcaaggtctgcgtcagccctttcaattagcggcggagaggagaagtccgaacacagcgaggcgcccgatcaccatctctcaacctacagcgacggaggggtctttgccgtcagtacagcatacaaacacgccaagaccacagagctccctcagcaaagatcttcctctgtggcgacacagcagaccacagtatctagtatcccgtctcacccgagcactgcagggaaaatatttagggcaatgtacgattacatggccgcagatgcagatgaggtctcgtttaaggatggggacgccatcatcaacgttcaggccattgacgaaggttggatgtacggaacagtgcagcgaaccggtcgaaccgggatgttgcccgcgaactatgtcgaggctatttag

SEQ ID NO: 196725 - DNA, 25578 bp, synthetic construct
  misc_feature 1..25578: note = Description of Artificial Sequence: Synthetic coding sequence
  source 1..25578: mol_type = other DNA
atggccgacgacgaggactacgaggaggtggtggagtactacaccgaggaggtggtgtacgaagaagtccctggtgagaccattacgaagatctacgagactaccaccacccgcactagcgactacgagcaatctgaaacttctaaaccagcgcttgcgcagcccgcccttgctcaacccgctagcgcaaaaccagtcgagcggcgtaaagtgatacgcaagaaagtcgacccatccaaattcatgaccccatatatcgcacactcacagaagatgcaagacctgttctcccccaacaagtataaggagaaattcgagaagacaaaggggcaaccctacgccagtaccactgacactcctgaactgaggcggataaagaaggtgcaggaccagcttagtgaggtgaaatacaggatggatggggatgttgctaagacgatctgtcacgttgatgagaaggctaaagatatcgagcacgcaaagaaagtatctcagcaggtgagcaaggtcctctacaagcagaactgggaagatacaaaggacaaatacctgctgccacccgatgctcctgaactggttcaagcagtcaagaacaccgcaatgttctctaagaaactttacacagaggactgggaagccgacaagtccttattttacccctataatgactcacctgaactgaggcgggtggctcaagcccagaaggccctgagcgacgtagcatacaagaagggactcgccgagcaacaggcccagttcactcctcttgcggacccaccagatatcgagtttgccaagaaggtgactaaccaggtcagtaagcagaagtacaaggaagattatgagaataaaatcaaagggaagtggtccgagacgccttgcttcgaggtggcaaacgcgcgaatgaatgccgacaacattagcactcgaaaataccaggaagactttgagaatatgaaagaccagatctacttcatgcagacagaaactcctgaatacaaaatgaataagaaggccggtgtggctgcctcaaaggtgaagtataaagaggattacgagaaaaataaaggcaaggcagactataacgtgctgcccgcgtccgaaaacccacaactgcgacagcttaaggcagcaggcgacgcactttctgacaaactctataaggagaattatgagaaaactaaagctaagagtataaactactgcgagactccaaagttcaagctcgatacagtcctacagaattttagttcagacaaaaagtacaaggattcttacctaaaagatatcctcggacattacgttggctcctttgaggacccttatcactcccattgcatgaaagtcacagcgcaaaattccgataagaattataaggccgaatacgaagaggataggggcaaaggtttttttccccagaccatcacacaagaatacgaggccatcaagaagctcgaccagtgcaaggaccatacttacaaggtacatccagacaaaaccaagtttacgcaggtgacagactctcctgtgctgctgcaggctcaggtcaattctaaacaactgtcagacctgaattataaggcaaaacatgagtcagaaaaatttaaatgccatattcctccagatactcctgcatttattcaacataaggtcaatgcatataaccttagtgacaatctttacaaacaggattgggagaaatctaaggctaagaagtttgatatcaaggtggatgccatccctctcctggctgcgaaggcaaatacaaagaatacctccgatgtcatgtataagaaggattacgagaaaaacaagggcaaaatgatcggcgtattaagtataaacgacgatcctaaaatgctccactctttaaaagtggctaagaatcaaagcgatcgactgtacaaggaaaattacgaaaagaccaaggctaagtccatgaactattgcgagacacccaaatatcagctggacacccaactgaagaacttttcggaggctaggtacaaggacctctatgtgaaagacgtgttaggacactacgtcggatcaatggaggacccttaccatactcattgcatgaaagtcgcagcacagaacagtgacaagtcgtacaaggccgagtacgaggaggataaagggaaatgctatttccctcagacaataacccaggaatatgaagccattaagaaactcgatcagtgtaaagaccatacctataaagtgcacccggataaaaccaaattcaccgcagttacggacagccctgtcctgctgcaggctcagctgaatacgaaacaattaagcgacctgaactataaagctaagcacgagggcgaaaaatttaagtgccacatcccggccgatgcaccccagttcattcagcaccgggtgaacgcatataacttgagtgacaatgtgtataagcaggactgggaaaaaagtaaggcgaagaagtttgatattaaggtggacgccattcccctcctcgccgccaaggctaacacgaagaataccagtgacgttatgtacaagaaagattacgagaagtctaaaggcaagatgataggggccctgagcataaatgacgaccccaagatgcttcactccttgaagactgccaaaaaccagagtgatagggagtataggaaagattatgagaagagcaagacgatctacaccgctcccctggatatgttgcaggtgacccaggccaagaaaagccaagccatcgcctctgacgtcgattataaacacatactccactcctactcctaccctcccgatagcatcaacgtcgacctggctaaaaaagcatacgcactgcagtctgatgtagaatacaaagctgactataattcatggatgaaaggttgcggttgggttccattcgggtcgcttgaaatggaaaaagctaaacgcgcctctgatattctgaatgaaaagaagtataggcagcaccccgatactctgaaatttacatcaatcgaggacgcaccaatcacagtccagagcaagatcaaccaggcgcagcggtctgacattgcctacaaggccaagggagaggagatcatacacaagtacaatctgcctcctgacctgcctcaattcatccaggctaaagtcaacgcctacaatatcagcgagaacatgtataaagctgatctgaaggacctgtccaaaaaggggtatgatctgcgcactgatgcgatcccaatcagggcagccaaggcggctcgccaggctgcgtccgacgtgcagtataagaaagattacgaaaaggcaaagggtaaaatggtgggatttcagagtctacaggacgatcccaaactggtacattacatgaatgttgctaagatacagtccgacagggaatataagaaggattatgaaaagacaaagagtaaatataacacaccccatgatatgtttaacgtggtggccgctaagaaggcacaggatgtcgtgtcaaatgttaattacaagcattcactgcatcactacacctatctgcccgatgccatggacctggagctctcgaaaaatatgatgcagatccagagcgacaacgtctacaaagaggattataacaactggatgaaaggcatcgggtggatccctatcggcagtcttgacgttgaaaaggtaaagaaagctggggatgctctcaatgaaaaaaagtatcgccagcacccggacacactgaaatttacatcgattgttgactccccggtgatggtgcaggcaaaacaaaacacgaaacaagtgtcagacatactttataaagctaagggcgaggatgtaaaacacaagtatacaatgtctcccgacctccctcagtttctgcaagctaagtgtaatgcgtacaatatctcagatgtgtgttataagagggattggtatgatctcattgcaaaaggcaataatgtgcttggagatgcaatcccaattacagcggccaaggctagccgcaatatcgcatcagactataagtacaaagaggcttatgaaaagtccaaaggtaaacatgttggattcagatctctgcaagacgaccccaagcttgtgcactatatgaacgtcgccaagctgcagagtgacagggagtacaagaaaaattatgagaacacaaagacatcttatcacacaccaggcgacatggtgtctattactgcagccaagatggcccaggacgtagcaactaacgtcaattacaaacagcctctccaccattacacctatctgcccgatgctatgtcactcgaacacacacgaaatgttaatcagattcagtcggataatgtttataaagacgaatacaattctttcctaaagggaatcggttggattcccattgggagcctggaggtcgagaaggtgaaaaaagctggggacgcgctgaacgaacgtaagtatagacagcaccccgacacggtcaagttcactagcgtccccgattccatggggatggtgcttgctcagcacaataccaaacagcttagtgatctgaattacaaggtggagggggaaaaactcaaacataagtatactattgaccccgagctgccccagtttattcaggccaaagtgaatgcccttaatatgagcgatgcacactacaaggctgactggaaaaagactattgccaagggttacgatttaaggccagatgccatccctattgttgcggccaaatctagccggaacatcgccagcgattgcaagtataaggaggcttatgagaaggctaagggaaagcaggttggctttcttagcctacaggatgatcccaaactggtgcactacatgaacgttgccaaaatacagagtgatagagaatacaaaaagggctacgaggcaagcaagactaaatatcacactcctctggacatggtgtccgtaacagccgccaaaaaatctcaggaggttgctacgaacgctaactaccggcagagctaccaccactatactcttctcccagacgcattaaatgttgagcactctaggaatgccatgcagatccagtcagataatctgtataagagcgacttcacaaactggatgaagggaataggttgggttccgattgagtccctcgaagttgaaaaggccaaaaaagcaggcgagattctttccgagaagaagtataggcagcatccagagaagctcaagttcacctacgctatggacacaatggaacaggccctaaacaagtccaataaactaaatatggataaaaggctgtacacagagaaatggaacaaggacaagacaactatccacgttatgcccgacaccccggatatcctactttcacgagtcaatcaaatcacgatgtctgataagctttacaaagccggatgggaagaggagaaaaaaaagggatatgatcttcggcctgacgctatcgccattaaggccgcacgggcgagccgcgacatagcgagcgactataaatacaagaaggcctacgaacaggctaagggcaagcatatagggtttcgcagtctggaagacgacccaaagcttgtacactttatgcaggtggccaagatgcagagtgatcgcgaatacaaaaagggctatgaaaagtccaagacctccttccacacgcccgtggatatgctctccgtcgtagccgccaaaaagagccaggaagtcgcgaccaatgccaattatagaaacgtcatacacacttataacatgctgcctgatgccatgtccttcgagctggccaaaaacatgatgcaaattcaaagcgataaccagtacaaagcggactatgcggacttcatgaaaggtatcgggtggctgccactgggatcactcgaggcagaaaagaacaagaaggctatggagatcatctccgagaaaaagtaccggcagcaccccgacaccctgaaatattcaactctcatggacagcatgaatatggtgctggcccagaataatgcgaagattatgaatgaacatctgtataagcaagcatgggaagctgataaaactaaggttcacattatgcccgacattccacaaatcattctggccaaggctaacgcaatcaatatgtccgataaactttacaagcttagtctggaagaatctaagaagaagggctatgatctccgacccgatgctatacctatcaaggccgcaaaagcctcccgtgacatcgcatcggactacaaatataagtataactatgagaaggggaaggggaagatggtgggttttcgatccctggaggacgatcccaagctggtacattcaatgcaggtagctaagatgcagagcgacagagagtacaagaagaactacgagaacacaaagacatcttaccatacccccgctgatatgctatccgttactgccgcaaaggacgcccaagctaacatcacaaatacaaactacaagcacctcatccacaaatatatccttttgccagacgcgatgaacatagagctgaccagaaacatgaatcgtatacagtctgacaacgaatataagcaggactacaacgaatggtacaaaggactcgggtggagtcccgccgggtctctggaggtcgaaaaggccaagaaagccaccgaatatgcttccgaccaaaaatacaggcagcatccctccaacttccagttcaaaaaactcaccgactccatggatatggtgctggctaagcaaaatgcacacacaatgaacaaacacttgtacactattgattggaacaaagacaagaccaagatacatgttatgcctgatactccggatatcctgcaagcaaaacagaaccagactttatatagccagaaactctataaactggggtgggaggaggcactgaaaaaaggttacgacctgcctgtggacgccatctcagtgcagttagcaaaggcctctcgggacattgcctctgactacaaatacaaacagggttaccggaagcagctgggacatcacgtgggcttcaggtcgttacaggatgaccctaagctggtactgtccatgaatgtcgctaagatgcaaagcgagagggagtacaagaaggatttcgaaaagtggaagaccaagttcagtagccctgtggacatgttgggggtagttctagccaagaaatgccaggagctagtgagtgacgttgattataagaactacctccatcagtggacctgcctgcctgaccagaacgacgttgtgcaggcgaagaaggtgtatgagcttcaaagcgagaatctgtacaaatctgatctagaatggctccgcgggatcgggtggtcccctctcggctcactcgaagccgagaagaacaagcgggcatcagagatcatcagtgagaaaaagtatcgccaaccgccggaccggaataagttcacaagcattcctgatgccatggacatcgtgctggccaagaccaacgctaaaaaccgctccgataggctgtaccgggaggcatgggataaggataagacccaaatacacattatgcccgacactccagacatcgtgctggccaaggccaatttaataaacacctctgataagctctaccgcatgggatacgaggagctcaaacgcaaaggatacgacctacctgtcgacgccatcccaatcaaggcagcaaaggcgagcagggaaatcgcatcagaatataagtacaaggagggttttaggaagcaacttgggcaccatatcggagcgcgcaacattgaggacgacccaaagatgatgtggtctatgcacgttgctaaaattcagagcgaccgagagtacaagaaagactttgaaaagtggaaaactaaattctcctcccctgtggacatgctcggggtggtcctggcaaaaaagtgtcagaccctcgtatctgatgtggattataaaaactacctgcaccagtggacgtgcctgcccgaccaatccgatgtaattcacgcccgtcaggcgtatgatctccaatccgacaacttatacaaaagtgacctacagtggctcaagggaatcgggtggatgacaagcggtagtctcgaagacgaaaagaataaacgcgccacgcagatcctctccgaccacgtttatcggcaacatcctgatcagtttaaattctctagcttgatggattctatccccatggtgctggccaaaaataatgccatcacaatgaaccatagattgtatactgaggcgtgggacaaggacaagaccaccgtccatatcatgccggacacaccagaagtactattagccaagcagaataaggtaaactactctgaaaaattgtacaagctggggttggaggaggcaaagaggaaaggctatgacatgagagtagacgccattcctatcaaagctgcaaaggcctcgcgcgatatcgccagcgagttcaagtacaaggagggctaccggaagcagctcggccaccatatcggagcccgtgcaattagggacgatcctaagatgatgtggtctatgcacgtggctaaaattcagtccgacagagaatataaaaaggatttcgagaagtggaaaaccaaattttcgtcgccggtggacatgttgggtgttgtgttagccaagaagtgccagaccctagtgtcagatgtcgattacaaaaactatttgcatcagtggacttgtttgcctgaccagagcgatgtcatacacgcccgccaggcctatgatctgcaatctgacaacatgtataagtccgatctccagtggatgaggggaataggctgggtgtctatcgggtccttggatgttgagaagtgcaagagagcaactgagatactgtccgacaagatctatcggcagccaccagataggttcaagttcacttctgtgacagactcactcgaacaggtgctggccaagaacaacgcgatcaccatgaataaaaggctctacaccgaggcctgggataaagataagacacaaatccacataatgccagatacacccgagatcatgctcgccagaatgaacaaaatcaactactctgagagcctttacaagctggcaaacgaggaggcaaagaagaaggggtatgatctgcgctccgacgctattcctattgtggctgctaaggctagccgcgatattatctcagactataaatacaaggacggctactgtaagcagcttgggcatcacattggcgccagaaatatcgaggatgaccctaagatgatgtggtctatgcatgtggctaagatccagtcagatagggagtataagaaagactttgagaaatggaagacaaagttcagctcacccgtcgatatgttgggcgtcgtattagcaaaaaaatgccagacactggtgtcagatgtggattacaagaactacctgcacgaatggacatgtctaccagatcagagtgatgtcattcacgcaagacaggcatacgatttgcagagtgacaacatctacaaatccgacctgcagtggctgcgtggcattggatgggttcctatcggctctatggacgttgtcaagtgcaagcgcgcgacagagattctatctgataatatctaccgacaacccccggataaactcaagttcacaagcgtgaccgactcactggagcaggtcctcgccaagaataatgccctgaatatgaacaagaggctgtacacggaagcctgggataaggacaaaacccagattcacattatgcctgacacacccgagatcatgcttgcgcgccagaacaagatcaattatagcgaaacgctgtacaagctggcaaacgaagaggcgaaaaagaaaggatatgacctgagatccgatgcaataccaattgttgctgcaaaagcatcccgagatgtgatctcggactacaaatacaaggacggctatcgcaaacagctgggccaccatatcggtgctcgaaacatcgaggacgacccaaaaatgatgtggagcatgcatgtggcaaagatccagagcgatcgcgaatataaaaaagatttcgagaagtggaaaactaagttttcaagcccggtcgacatgctgggagtggtactggctaagaagtgccaaactctggtgagcgatgtcgactacaagaactacttacacgagtggacatgtctgcctgaccagaatgacgtcattcacgcccgccaggcgtacgacctgcagtccgacaacatctataagtctgacttgcaatggttgagaggaatcgggtgggtcccaattggttccatggatgtggtgaaatgcaaaagagccgctgaaatcctgtctgataatatttaccgtcagccccccgacaagctcaaatttacctcagttacagacagcctggaacaggtgctggccaaaaacaatgctcttaacatgaataagcggttgtatacggaggcgtgggataaagacaaaacccaagtccacatcatgccagacacacctgagattatgctcgcccggcagaacaagatcaactactctgaatcactctataggcaggcaatggaggaagcgaaaaaggagggttacgatctccgtagtgatgctattcctatcgtcgccgcgaaggcctcccgagacatcgcaagcgactataagtacaaagaggcttataggaaacaattaggtcaccacatcggcgctagagcagtgcatgatgatcctaaaattatgtggtcgctacatatcgctaaggtgcaatccgaccgcgagtataagaaggattttgaaaagtacaagacacggtatagctcccctgtcgacatgctgggcatcgtgctcgcaaagaaatgccagacactggtttctgacgtggactataagcacccactgcatgagtggatttgtctaccagatcagaacgacatcattcacgcacgcaaggcctatgacctccagagcgataacctatataaatcagatttggaatggatgaagggtattggatgggttccaatagattctttggaggtggtgagagccaagcgtgcaggcgaactgttgtccgatactatttatcgtcagcggcccgaaactctcaagttcacaagcatcactgacacacccgaacaagttctagccaaaaacaatgctcttaatatgaacaagaggctgtataccgaggcttgggacaatgataaaaaaacgatccatgtaatgcctgataccccggagattatgctggccaagctgaatagaataaactacagcgacaagctgtacaaactcgccctggaggagtctaagaaggagggctacgacttacgcctggacgccattcccatacaggctgcaaaggcatcccgggatattgcatccgactacaaatacaaagagggctatcggaagcagttggggcaccacataggagctcgaaacatcaaagatgacccaaagatgatgtggtcgatccatgtcgctaagatccagtccgaccgcgagtacaaaaaggagtttgaaaagtggaagaccaagttctcttctccggtcgatatgctcggagtggtcctcgctaagaagtgtcagatcctggtgagcgacatcgactataagcatccactgcacgaatggacttgcctccctgatcagaatgatgtgatacaggcgcggaaggcttacgacttgcagagtgacgctatctacaagagcgatctggaatggctgcggggcataggatgggtgccgattggcagcgttgaggtcgagaaagtgaagcgcgctggcgagatcctaagcgaccgcaagtatagacagcccgctgaccagttgaaatttacgtgcattacagatacgcccgagattgtactcgcaaagaacaatgccctgacaatgtctaagcacctctacaccgaggcatgggatgctgacaaaaccagcatccatgtcatgcccgataccccagacatcctattagcaaagagcaatagcgctaacatctcccagaagctgtacactaaggggtgggacgagtctaaaatgaaggattacgacttacgggccgacgccatctcgattaagagcgccaaagcttccagagatattgcgtccgactacaaatataaggaggcttacgaaaaacagaaaggacatcatatcggagctcagtcaatagaggatgaccccaagattatgtgcgccatacacgcggggaagatccaaagcgagcgggagtacaagaaagaattccaaaaatggaagacaaagtttagttcaccggtggatatgctgagtattctgctggctaaaaagtgtcagactttagtgaccgatatcgattatcgtaattacctgcatgaatggacatgcatgccagatcagaacgatatcattcaagctaaaaaagcctatgatcttcagtctgactccgtgtataaggctgacttggaatggctgcgcggcattggatggatgccagaaggctctgtggagatgaatagggtcaaagtagcacaggatcttgtgaatgagcggctgtaccgcacacgacctgaggccttatcctttactagcatcgtagatacccccgaggtggtgcttgcaaaagccaatagccttcagatttctgagaagctgtatcaggaggcttggaataaagataagtcaaatatcacaatacctagtgacacacccgagatgctacaggcccacatcaacgctttgcagatcagcaacaagctgtaccagaaggattggaatgatgccaagcagaagggatatgatatccgggcggacgcgatcgagataaagcatgcaaaggcgtcccgtgaaatcgcctccgagtacaagtacaaagaggggtaccggaaacagttagggcatcacatgggctttcgtactctccaagacgatcccaaatcagtgtgggctattcacgcagcaaagatccagtccgatcgggagtataagaaagcctacgaaaagtcaaagggaattcataacactccattggacatgatgtcaattgtacaagcgaagaagtgtcaggttctggtctcagacatcgactacaggaattatctgcatcagtggacctgtctgccagatcagaatgacgtcattcaggcaaagaaggcctatgatttacagtcagataatctgtacaaatcagatctggagtggttgaagggcatagggtggctccccgaggggagcgtagaggtgatgcgggtgaagaatgctcagaatctcctcaatgagcgactgtatagaatcaagcctgaggcactcaaatttacatcaattgtagatacacctgaggtgatacaggcaaaaattaacgctgttcagatctctgagcccctctatagggatgcctgggagaaagaaaaagcaaatgttaatgttccagccgacacaccgttgatgttacagtcgaaaatcaacgcgcttcagatctccaacaagaggtaccagcaggcctgggaagatgtgaaaatgaccgggtatgacctcagggctgacgccataggtatccagcatgctaaagccagccgagatattgcctctgactacctctataaaactgcctatgagaagcagaagggccactacatcggctgcaggtccgcaaaagaagacccaaagttagtgtgggccgctaatgtactgaaaatgcagaacgatagattgtataaaaaggcttataacgatcataaggccaagatttccattccagttgatatggtctccattagtgccgccaaagaggggcaggcactggcatcagatgtggactaccgacattatctccatcactggtcctgcttccccgaccaaaatgacgttatccaagctcgaaaagcttatgacctccagtctgactcagtctataaggccgatttagaatggctacggggcatcggttggatgcctgagggcagcgtggagatgaacagggtcaaagtggcccaagatctggtaaacgaacgactttaccggaccaggcctgaagctctgagcttcacctccatagtggatacaccagaagtggtattggctaaggccaattcccttcagatttctgaaaagttatatcaggaagcctggaacaaagacaaaagcaatattaccatcccttcggatacaccagagatgttgcaagcccatataaatgctctgcaaatcagcaataagctctaccagaaggactggaacgacacaaagcaaaagggatatgatattagagccgacgccattgagatcaaacacgctaaagccagccgcgagattgcgtctgagtataaatacaaggaggggtatcgtaaacagctcgggcaccatatgggctttcggaccctgcaggatgatcccaaatctgtctgggctatccatgccgctaaaattcagtctgatagggagtacaaaaaggcttatgagaagtctaaggggatccacaatactcccctggatatgatgtccatcgtacaagcaaagaagtgtcaggtactcgtgtctgacatcgactaccgcaactacctccatcagtggacttgtctgccagatcagaatgacgtgatccaagccaaaaaagcctatgatcttcagtctgacaacctgtacaagagcgatctggagtggttgaaggggatcggatggctgccagagggaagcgtcgaggtcatgagagttaagaacgcacagaacctgcttaacgaacggctttataggattaagcccgaggccctgaaatttaccagtatagttgacacccccgaggttatccaggctaaaattaatgcggtgcagataagcgaacccctatatcgcaatgcttgggagaaagagaaagcgaacgtgaatgtccctgctgacactcctctcatgctccaaagtaaaattaatgcactccagataagcaacaagcggtaccagcaggcgtgggaagatgtgaagatgaccggttacgatttgcgggccgatgctattggcatacaacatgctaaggccagccgcgatattgctagtgattatctatataagactgcatatgaaaagcagaaaggccactacatcggctgtaggagcgctaaagaagaccccaagctcgtgtgggcagcaaacgtgcttaaaatgcagaatgacagactctataagaaagcatataacgaccataaggccaagatcagcatccccgttgatatggtctctatcagcgcagctaaagaagggcaggccctcgcttctgatgtagattatcgccactacctgcatcactggtcttgtttccctgaccagaacgatgttattcaagcccggaaggcatacgacctgcagtctgacagtgtgtacaaggccgacctcgaatggctcagaggtatcggttggatgcctgaaggatctgtggagatgaaccgcgtcaaggtggcccaggatctcgtcaacgaacggctctatcgaactagaccggaagcgctgagcttcacatccatcgtggatacgcctgaagtcgtgttggcaaaggcaaatagccttcaaatatccgagaagttgtatcaagaggcttggaataaggacaagagcaacattactatcccatccgacacaccagagatgctgcaggctcacattaatgcactacaaatctctaacaaactgtaccaaaaggattggaacgatacaaagcagaaaggctacgacataagggccgatgcgatagagattaaacatgccaaggcctcccgggaaattgcatccgaatacaaatacaaagaaggataccgcaagcagctggggcaccacatggggtttcgcacgctgcaagatgaccctaagtctgtctgggccatccacgccgcgaaaatacaaagcgatagggagtacaagaaggcctacgagaagtcgaagggcatccataatactcccctggacatgatgagcatcgttcaggctaagaagtgccaggtactggttagcgatatcgactatcgcaattacctacatcagtggacctgcctacctgatcagaatgacgtgattcaggcaaagaaggcatacgacctgcagagcgacaatctgtacaagagcgatcttgaatggctgaagggcataggctggctgcctgagggatccgtggaagtcatgcgagtaaagaatgcacagaacctgctcaacgaaaggctctaccgcattaagccagaagctctgaaattcacttctatagtggatacccccgaggtgatacaggcgaagataaacgccgtgcagatatctgaaccactctatcgcgacgcctgggaaaaagaaaaagcgaacgtgaatgtccccgctgacactcctttaatgttgcagagcaaaattaatgccttacagatcagcaacaagaggtatcagcaggcatgggaagacgtgaagatgactggctatgatttgcgtgccgatgccatcggaatccaacatgctaaagcttctagagacatcgcctccgattacttgtacaaaactgcctacgaaaagcaaaaaggtcactacatcggctgtaggtcggccaaggaagatcccaagctggtgtgggccgcgaatgttcttaaaatgcagaacgaccgcctctataaaaaggcatacaacgaccacaaggccaagatcagtatcccggtcgacatggtttcaatttcagccgccaaagaggggcaggcattggctagtgacgtagattatcgccactacttacatcgttggtcctgcttccctgatcagaacgacgtgattcaggcccgtaaggcgtacgatttgcagagcgatgctctttataaagctgacttagaatggctcagggggattggatggatgccccaaggtagcccagaggtcctgagagtgaaaaatgcccagaacattttctgcgattccgtgtataggactcccgtggtgaatctcaagtatacatcaatcgtggacacaccagaagttgtgctggcaaaaagtaacgccgagaatatttctattcccaagtaccgggaggtttgggataaagataagacctctatacatattatgccagacaccccagaaatcaatcttgcccgagcaaatgctttgaacgtgtcgaacaaactttatagagaaggatgggatgaaatgaaggctggatgtgacgtaagactggacgctatccctatccaagccgctaaagcttctagagagattgcatccgattacaagtacaaactggaccatgagaagcagaaaggccattacgttgggacgcttacagccagggacgataataaaatccgatgggcactgatagcagataaattgcaaaacgaaagggaatatcgcttagattgggctaagtggaaggcaaagattcaaagtcccgtcgatatgctgagtattttgcattctaagaactcccaggccctagtgtcagacatggattaccgtaattacctccaccagtggacatgtatgcccgaccagaacgatgtgattcaggccaaaaaggcgtacgaacttcagagtgacaatgtgtacaaggcggatctcgagtggctgagaggaatcggctggatgcccaatgactctgtctctgtgaatcatgctaagcacgccgctgacatcttttcagagaagaaatatcgtaccaaaatcgaaaccctgaactttacgcctgtggatgaccgggtggactatgtcaccgccaagcaaagcggggagatccttgacgatattaaatatagaaaggactggaacgccacaaaaagcaaatatacacttactgagacacctctgctccatacagcgcaggaagcagccagaattctcgaccagtatctgtacaaggagggctgggaacgtcagaaggccacggggtacatcctcccgcccgacgcagtgcccttcgtccatgctcaccattgcaatgacgtgcagtctgaactgaagtataaggctgagcacgtgaaacagaaggggcattacgtaggtgtccccactatgagggacgatccgaaactcgtgtggtttgagcacgcaggccaaatacagaatgagcggctttacaaagaggactaccataaaacaaaagcaaagatcaatattcctgccgacatggtgtccgtcctggccgcaaagcaaggccaaaccttagtgtctgatattgattaccgcaattacctccaccaatggatgtgtcatcccgatcagaacgacgtgattcaggcaagaaaagcttatgacctccagagcgacaatgtctatagggctgacctggagtggctgcgcggaatcggttggatccctctcgacagcgttgaccatgtcagagtgaccaagaaccaagagatgatgagtcaaatcaagtacaagaagaacgctcttgaaaattaccccaatttcaggtcagtggtggatccacctgaaatcgtgctggcaaagataaattctgtaaaccagtctgacgtcaagtacaaagagactttcaataaggccaagggcaagtacaccttttctccagacacaccgcatataagtcatagcaaagatatgggtaaactctacagcactatcctctataagggcgcatgggaaggaacgaaagcgtacggttacacgctcgatgagcggtatataccaatagtgggcgcaaagcatgctgatctcgtgaacagtgagctgaagtacaaagaaacttatgaaaagcagaaggggcactacctcgcggggaaagtcataggcgagtttcctggggtggttcattgtcttgacttccagaaaatgaggagtgcattaaactatcgcaaacactatgaagacaccaaagctaatgtccatatcccaaatgacatgatgaaccatgtgctggccaaacgttgtcagtacattttatctgacctggagtatcggcattactttcaccagtggacttcattactagaggagccgaatgtcattcgggtccggaacgcccaggaaatccttagtgacaacgtatataaggatgacttgaattggctgaaaggtattggatgctacgtttgggatacaccccaaatactccacgcaaagaaatcttacgatctgcagtcccagctccagtatacagcagccggtaaggagaatcttcagaactataacctggtgacagacacccctctgtacgtgacggcagttcagagtgggataaacgcctccgaggtgaagtataaagagaactatcaccaaattaaagacaagtacaccacagtgttggaaacagtggactatgacaggacaagaaatttgaaaaacctgtatagttccaacctctacaaagaggcctgggatcgcgttaaagccactagttacattctcccatcatccacgctctcgctcacacacgctaaaaatcaaaagcacttggccagtcacattaagtatcgcgaggaatatgagaagttcaaggctctgtatacgttgccgcggagcgtcgacgacgacccgaacaccgccaggtgtctgcgcgtaggcaagctgaatatagaccggctgtacaggagcgtgtatgagaaaaacaagatgaagattcatattgtgccagacatggttgaaatggtgaccgcgaaggactctcaaaagaaggtgagcgagattgattatagattgagactgcacgagtggatctgtcacccagacttacaggtgaacgatcacgtgcggaaagtgaccgatcagatttctgacatagtgtataaagatgacttaaactggctgaagggaatcgggtgttacgtctgggatacaccagaaatcctccacgcgaagcacgcctacgaccttcgggatgacataaagtacaaagctcacatgctaaaaactcgcaacgactataaactggtgaccgacactcctgtgtacgtccaggccgtgaagagcggcaagcaactcagtgacgccgtttaccactacgattacgttcatagtgtccgcggtaaggttgctccgactactaagaccgtggatttggaccgagccctccatgcttacaagttacagtccagcaacctgtataagacttcactccgtaccctgccaacaggatacagactgccaggcgatacaccgcatttcaagcatatcaaagacactcgctatatgagctcttattttaaatataaagaggcttatgagcacactaaggcgtacggatatacactgggtccaaaggacgtgccctttgtccatgttaggcgcgtgaataacgtaactagcgaacgattgtacagagaactgtaccataagctgaaagataaaattcacacaacccccgatacgccagagatccgccaagtgaaaaaaacccaagaggctgtttcagaacttatatataagtcagacttctttaagatgcagggacacatgatttctttgccatataccccacaggtgattcactgcagatacgttggggacattacgtctgatatcaagtataaggaggacctgcaagtactgaaaggatttggctgtttcttgtacgacacccctgatatggtgcgctctcgtcacctaagaaaactgtggagcaactatctctacaccgataaagcccgaaaaatgcgggacaaatacaaagtcgtgttggacacccccgaatacagaaaagtccaggaattgaagactcatctttcagaactggtctatcgggccgctggcaaaaagcagaaatcaatcttcacgagtgttcccgacaccccagacctcctgcgggcgaagcggggccaaaaactacaatcgcagtacctctacgtggagttagctaccaaagagagacctcatcaccatgccgggaaccagactactgcattgaagcacgccaaggacgtaaaagacatggtgagcgagaaaaaatacaagatacagtacgagaaaatgaaagacaaatataccccggtccccgacacgccaatcctcatcagggcgaagcgcgcttattggaatgcatccgatcttcgttataaagagacattccaaaagacaaaggggaaataccacactgtcaaggatgccctggatattgtgtatcaccgaaaagtcaccgacgatattagcaaaataaagtataaggaaaactatatgtcacaactgggcatctggagaagcatccccgacagacccgagcacttccatcaccgcgccgttacagacacagtgagcgatgtgaagtacaaggaggaccttacctggcttaagggcatcggatgctacgcctacgatacaccagactttactctggccgaaaaaaacaaaacactttacagtaaatataaatataaagaggtctttgagaggacaaaaagtgactttaaatatgtggcagatagcccaattaaccggcacttcaaatacgctacccagttaatgaatgagaagaaatatcgggctgattatgagcagcggaaggacaaataccacctggtggtcgacgagccacgccatctgttagccaagactgctggtgatcagatctctcagataaagtacaggaagaactatgaaaagagtaaggacaagttcacctctatcgtggacacacccgaacacctgagaacaactaaagtcaacaaacagatttctgatatattgtacaagttggaatacaataaagcaaaaccccgcgggtatacgacaattcacgatacaccaatgcttttgcatgtgaggaaggtgaaagacgaggtcagtgacttaaagtacaaggaggtgtaccagaggaataaaagtaattgtacaattgaacccgacgctgttcacattaaagcagctaaggacgcatacaaggtaaacacaaaccttgactacaagaaacagtacgaggccaacaaagcccattggaaatggacacccgaccggccagactttctgcaggccgcaaagagcagtttgcaacagtcagattttgaatacaaacttgaccgggagttcctgaagggatgcaaactgagcgttaccgatgacaagaataccgtgctggctctgcgaaacactctcattgagagtgatctcaaatacaaggagaaacacgtgaaggaacgggggacctgtcacgccgttccggacacaccccagatattattggccaagactgttagtaaccttgtgagcgagaacaaatataaggaccacgtgaagaaacatcttgcgcagggttcttacacgacattacccgaaaccagagacaccgtgcacgtaaaggaggtgacaaaacatgtctccgatacaaactataagaagaagttcgtgaaagagaagggtaagtctaattactcaattatgctggaacccccagaggtgaaacacgctatggaagtggctaagaagcagtctgacgtggcatatcgaaaggatgcaaaagagaatcttcactacaccactgtggcggaccgcccagacatcaaaaaagcgacacaagcagcgaagcaggcttccgaggttgaataccgtgccaaacaccggaaagagggctcccacgggctgagcatgttgggacgcccagatatcgagatggctaagaaagcagctaagcttagctctcaggtgaagtatcgggagaatttcgataaggaaaaggggaaaacccctaagtataatcccaaagactctcagctgtacaaagttatgaaagatgcaaataacctagccagcgaggtaaaatacaaggccgacttgaagaaattgcataaacccgtcaccgacatgaaagaatctctgattatgaatcatgtgctcaatacctctcagctggcttcttcctatcagtataagaaaaaatatgagaaaagtaaaggccactatcacaccatccctgataatctagagcaactccacctgaaggaggccaccgagttgcagtctatcgttaagtacaaagaaaaatacgagaaggaaagaggtaagccaatgcttgatttcgaaaccccaacttatattacagcaaaggaaagtcagcagatgcagagcggcaaggaataccggaaggactacgaggagtctatcaaaggcaggaacctcacaggcctggaggtgaccccagccttacttcatgtgaaatacgcgacaaaaatagctagcgagaaggaatatcgaaaagacctagaggaaagcatcaggggtaagggacttactgagatggaagacacaccggatatgctccgcgcaaagaacgctacccaaatacttaatgagaaggaatacaaacgggatctcgaactggaagtcaagggaaggggactgaatgcgatggccaacgaaactccggattttatgagagctcgcaacgccacagatatagcctcacaaatcaagtacaagcaatccgccgaaatggagaaagccaactttacctccgtggtggacactccagaaattatacacgcccaacaggtaaagaacctgtcgagccagaagaaatacaaggaagacgccgaaaagtctatgtcctattacgagaccgtcctggacacgcccgagatccagagagttcgcgagaaccaaaaaaacttctcacttctgcaataccagtgcgatctgaaaaattccaaagggaagatcacagtcgtacaagacaccccagagatcctcagggttaaggaaaatcagaagaatttctcctctgtcctgtataaggaagacgtctctcctggcaccgcaataggcaagacacctgaaatgatgagagttaaacagactcaggaccatatctcttcagtgaagtacaaggaggcaatcggccaggggaccccgattcctgacctgcccgaggtgaagcgagttaaagagacccaaaaacacattagtagtgtgatgtataaagaaaatcttggcaccggcatccccaccactgtaactcctgagatcgagagagtgaaacgtaatcaagaaaacttttctagcgtactctacaaggagaatctgggcaagggcatccctaccccaatcactccggagatggagcgagttaagaggaatcaggagaactttagttctatactttataaggaaaacttatccaagggaactcctttaccagtgacaccagagatggaacgagttaagctgaatcaggagaatttcagcagcgtcctgtacaaagagaatgtgggcaagggtatcccaattcctataacccctgagatggaacgcgtcaagcataaccaggaaaacttctcatccgtgctgtacaaagagaatttaggaactggcattcctatcccaatcacccctgagatgcagcgcgtaaagcacaatcaggagaatctttcatctgttttatataaagagaatatgggcaagggaacaccgctgccagtgacgcctgagatggaaagggttaaacataaccaggagaatatttcgagcgttctgtacaaggagaacatgggcaaaggtaccccactcccagtgacccctgaaatggagcgcgtgaagcacaatcaggaaaacattagctccgtgctatataaagaaaatatgggcaaaggcacccctttagccgtcactcccgaaatggagcgggtgaagcataatcaggagaacattagctccgttctctacaaggagaatgtgggtaaagcaactgctacacccgtgaccccagagatgcagcgggtgaagcgcaaccaggaaaatatctcttctgtgttgtacaaggagaatttaggcaaagcaacaccgacaccgtttacacccgagatggaaagagtgaaacgtaaccaggagaactttagcagtgtgctttataaagaaaatatgcgcaaagctacccctacccccgtgactcctgagatggagcgtgctaaaagaaatcaggagaacatttcatctgtcttgtacagcgactcatttcggaaacagatccagggaaaagccgcatacgtgttggacacgcccgagatgaggcgggtgagagaaacacagaggcacatcagcaccgtgaagtatcacgaagattttgagaagcacaagggctgttttacccctgtcgtgacagatcccataactgagcgggtgaagaagaatatgcaggatttctccgacataaactatcgcggcattcaaagaaaggttgtcgagatggaacaaaaaagaaacgaccaggatcaggaaacgataacaggattgagagtctggcggacgaatcctggctctgttttcgattatgatccggccgaagataacattcagtctagatcccttcatatgatcaacgtgcaggcccagagacgttcacgcgagcagagcaggagcgcatccgctctaagcattagcgggggggaagaaaaatctgagcactccgaggcaccggatcaccacctcagtacttattctgatggcggtgtgtttgccgtgagcaccgcttataaacatgctaaaaccacagaacttcctcagcaacggtcctcttccgtggctacacagcaaacgaccgttagttcaattccaagccatcccagcacggcaggtaagatcttccgggcaatgtatgattacatggccgccgatgccgatgaagtctcgtttaaggatggagacgccattattaacgttcaggccatcgacgagggctggatgtatggtaccgtccagcgtacagggcgaaccgggatgttaccagccaactacgtggaagccatctag

SEQ ID NO: 196726 - DNA, 864 bp, synthetic construct
  misc_feature 1..864: note = Description of Artificial Sequence: Synthetic coding sequence
  source 1..864: mol_type = other DNA
atggccgacgacgaggactacgaggaggtggtggagtactacaccgaagaggtcgtctacgaagaagtgccaggtgaaaccattactaaaatctatgagaccaccacaacgcgcacaagcgactacgaacagagcgaaaccagcaagcccgcactagcccagcccgcactggcacagcctgccagtgccaaacctgtggagagaaggaaagtcattagaaagaaggttgatccctccaagttcatgaccccatatattgcccactcacagaagatgcaggacctcttttcaccaaacaagtacaaagaaaagttcgagaaaaccaagggacagccctatgcatctactacagacacgcctgaactcagaaggatcaagaaggttcaggaccagctcagcgaagtcaagtatcgcatggacggcgatgtagctaagacgatctgtcatgtcgacgaaaaagctaaggatatagaacatgctaagaaagtatcacagcaagtgtcaaaagtcctgtacaagcagaattgggaggacacaaaagataagtacctcctgcccccagatgcgccagagctggtgcaagctgtcaaaaatacagccatgtttagcaagaagctctatacagaagactgggaggcggataagtcacttttctatccatacaacgatagtcccgagcttcggcgcgttgcccaggcccagaaggccctctcggacgtcgcctacaagaagggcctcgcagaacaacaagcacagttcaccccactggcagacccacccgatatagaattcgctaaaaaggtgacaaaccaggtgagtaaacagaaagaaaagaagaggaagaaaaaaagaaaaaaagtgtag

SEQ ID NO: 196727 - DNA, 1317 bp, synthetic construct
  misc_feature 1..1317: note = Description of Artificial Sequence: Synthetic coding sequence
  source 1..1317: mol_type = other DNA
atgatgcgggtgaagcagacccaggaccacatcagcagcgtgaagtacaaagaagccatcgggcagggtacccccatacccgacctgcccgaggtaaaacgcgtgaaggagacccagaagcacattagcagcgtgatgtataaggagaacctcgggacgggaataccgactacagttaccccagagattgaaagagtgaagaggaaccaggagaacttctcctccgtcctctataaggagaacatgggtaaaggtacaccactggccgtcacacctgagatggaacgagtcaaacataatcaagaaaacatatcctcagtgttatacaaagaaaatgtcggcaaggccacagctacccccgtgacccctgagatgcagagggtaaagcgaaaccaggagaacatctcttccgtgctgtataaagaaaacatgcgcaaagctacccccactcccgtcactccagagatggagagggccaagcgcaatcaggaaaacatctcatccgtgctctattccgactcatttcgcaaacagatccaaggcaaggccgcatatgttcttgacacccctgagatgaggcgggtgagagagacccagcgacacatttccaccgtgaagtatcacgaagactttgagaaacacaagggatgtttcacacccgtggttaccgaccccattacagagcgggttaagaagaacatgcaggatttctcggatatcaactacagagggatacagagaaaagttgtggaaatggagcaaaagcggaacgatcaggaccaggagacgatcaccggcttgcgcgtctggaggaccaatccaggctccgtctttgactacgatcctgcagaagataacatccagagccggtctctccacatgattaatgtgcaggcccagcggcggagtcgggaacagagtcgatccgcttcggccctttcaatatctggcggggaagaaaagtccgagcattccgaagcacccgaccaccaccttagtacctactctgatggaggggtctttgcagtatcaaccgcatacaaacatgctaaaacaactgaactgccccagcagcggagctcatcagtggctacccagcagaccacagtctcctccatcccctcgcacccctcaaccgcgggaaagatttttcgagccatgtacgactatatggccgccgatgcagacgaagtcagctttaaggacggagatgctataattaacgtgcaagctatcgatgagggttggatgtacggcaccgtgcaaagaacagggagaactgggatgctccccgccaattatgtagaggctatttag

SEQ ID NO: 196728 - DNA, 1014 bp, synthetic construct
  misc_feature 1..1014: note = Description of Artificial Sequence: Synthetic coding sequence
  source 1..1014: mol_type = other DNA
cagaagtacaaggaggactacgagaacaagatcaagggcaagtggtccgaaacaccttgcttcgaagttgctaacgcacgaatgaacgctgataacatctcaacacggaagtatcaagaggattttgaaaatatgaaggatcagatctacttcatgcaaaccgagacacccgagtacaagatgaataaaaaagctggggtggctgccagtaaggtcaagtacaaagaagactacgagaagaataaaggaaaggccgactacaatgtgctgccggcaagtgaaaacccccaactgaggcagcttaaagctgccggagatgccttatcagacaagctgtacaaagaaaattatgagaagacaaaagccaagagcataaactactgtgaaacccccaagttcaagctggacaccgtgttgcagaacttctccagcgataagaaatacaaggacagctatttaaaagacattcttggtcactacgtaggatcatttgaagatccctaccattctcactgcatgaaggtcaccgcccagaattccgataagaattacaaggccgaatacgaggaggatcggggcaagggctttttccctcaaacgatcacgcaggagtacgaggccataaaaaagcttgaccagtgtaaggaccacacttacaaggttcatcctgataagaccaagtttactcaagtgaccgattcacctgtgctactgcaagcccaggtaaactccaaacagctaagtgacttgaactataaggctaagcacgaatcggagaagtttaaatgccatatccccccggacactcctgcctttattcagcataaagtaaacgcctataacttgagtgataatctgtataaacaggattgggaaaaatctaaggctaagaagttcgacataaaagtcgacgcaatacctctcctggccgcaaaggccaacactaaaaacaccagcgatgttatgtacaagaaagactatgaaaagaataaggttaaggtgcagcagcgctag

SEQ ID NO: 196729 - DNA, 5193 bp, synthetic construct
  misc_feature 1..5193: note = Description of Artificial Sequence: Synthetic coding sequence
  source 1..5193: mol_type = other DNA
atgaacgtgcagccctgcagccggtgcggctacggcgtgtaccccgccgagaagatatcttgtattgatcagatttggcataaggcatgcttccattgcgaggtgtgcaaaatgatgctctccgtcaacaacttcgtgagccaccaaaagaagccctattgtcacgctcataatccaaaaaacaacacattcacatccgtgtaccatacccctctaaatttgaatgtcagaaccttccccgaggcaatctcaggcatacacgaccaggaagatggtgaacagtgtaagagtgtattccactgggacatgaagtcaaaagataaagaaggagcccccaaccgccagcctttggcgaatgagcgggcatactggacgggatacggggagggaaatgcgtggtgccctggagcacttccggacccagaaattgtgcgaatggtggaggcccgcaaaagcctgggtgaggagtacaccgaggattatgagcagccgcgcggaaagggctctttcccagctatgatcaccccggcgtaccagcgcgccaagaaggctaatcagctcgcctctcaggtggagtataaaagaggccatgatgaacggatttcccgtttctcgactgttgtggacacaccagagcttctcagatccaaagccggcgcccaactgcagagcgatgtcaggtacactgaggattacgagcagcaacgggggaaagggagcttcccagccatgatcaccccggcatatcagatcgcaaagcgggctaatgagcttgcatcagatgtgcgataccatcaacaataccaaaaagagatgcgcggcatggccgggcccgctataggggccgaaggcatactgactagggaatgcgcagaccaatatggccaggggtatccggaagaatacgaggaacaccgaggtaaaggtagctttcccgctatgataacccctgcatatcaaaacgctaagaaggctcacgagctggccagcgacatcaaatacagacaggacttcaacaaaatgaagggggcagctcactatcacagcttaccagcgcaggacaatctggtacttaagcaagcccagtctgtcaataaactcgtgtctgaagtggagtataaaaaggacctcgaatcctcacgcggacatagtattaactactgcgagacccctcagtttaggaatgtgagcaagatctccaaattcacctcagacaataaatacaaggagaactatcagaaccatatgaggggcagatacgaaggcgtgggcatggatcgacggacactgcatgccatgaaagtcggatctctcgctagcaatgtggcgtacaaagccgactataagcacgatatagtcgattacaattaccccgctacactcacccctagctaccagaccgccatgaaactggttccgctgaaagacgctaactataggcaatcaatcgataagcttaaatactcatccgtgaccgacactccccagatcgtgcaagcaaaaattaatgctcagcagttgagtcatgttaattacagggcagattacgagaaaaataaactaaattacacacttcctcaggatgtcccacagttggtgaaagcaaagaccaacgcgaaattgttctctgaagtcaagtacaaggagggatgggagaagaccaaaggtaaaggcttcgaaatgaagctcgatgcaatgtcattgttggctgctaaagcctccggcgagctcgcctccaacattaaatataaggaagagtatgagaaaaccaaggggaaggccatgggaacagcggattctcgcctgctgcattccttgcagatagcaaagatgtcgtctgaggtcgaatacaaaaaggggtttgaggaatccaaaactcgctttcacctgcctatggacatggtgaatatcaggcatgccaagaaggctcagacgctcgcctccgaccttgattatcgaaaaaagcttcacgagtatacagtccttcctgaggacatgaagacacagtgggccaaaaaagcatacgggctgcagagtgagctccagtacaaagccgatttggcttggatgaaaggggtgggctggctcaccgagggttctctgaatctggagcaggcaaaaaaggcaggtcagctcgttagcgaaaagaattaccggcagcgtgtcgacgagctaaaatttacatccgtgaccgattccagccagatggaacacgccaagaaaagtcaagagttgcagtctggggtggcttataaagctggcaacgagcagagcgtgcaccagtacaccatcagcaaagatgaaccactctttctccaggctagagcgaacgctgcaaacctgtccgaaaagctgtataaatcatcatgggagaaccaaaaagcaaaaggattcgagctgcggctggacagcctcacgttcctcgcggcaaaggccaagcgggacctcgcttccgaggtcaaatataaggaggactacgaacgctcacgcggaaaactgataggggcaaaagatgttcaaggtgacagccaaatgtcccactcgctgcaaatgagcaagttgcagtctgagttggagtataagaagggatttgaagacacgaagtctcagtgccatgtgtccctggatatggtccatttggtgcacgctcgtaaggctcagcacctagcaactgacgttgggtacaaaacagcagaacatcacttcaccgctctcccaacagacatgaaagtggagtgggccaagaaggcctacggactacagagtgacaatcagtatcgggctgatgtgaagtggatgaagggtatgggatgggtcgccacaggctctctgaacgtggagcaggcgaagaaggccggtgaactaatctcagagaagaaataccgccagcacccagacgcccttaagttcacttccattaaagacacacccgagatggtccaggctaggatttcgtatactcaagccgtggatcgcctgtatcgggaacagggcgagaacatcaagcaccattatactcccaccgcagacctcccagaggtgctcctcgcaaagctaaatgcgatgaacatctctgaaacacggtataaggagagctggtccaaactccgcgatggggggtataagctccgactggacgccttgcctttccaggccgctaaagcgagcggggaaattatcagcgattacaagtataaagaggcttttgaaaaaatgaaagggcaaatgttgggaagccggagtttggaggacgatatcagtctcgcccactccgtgtatgccacctccctccagtcagacgtgaattataagaagggattcgaacactctaaggcccaatttcatctccccctcgatatggctgctctggtgcacgcaaagaaagcccagacccttgccagcaaccaggattataagcacccactgccacagtacacctcgctggccgaggacctccggctttcttgcgcaaaaaaggctcataagcttcagagcgagaatctctatcgcagcgaccttaactttatgagaggcgtggcttgtgtcatccccggcacactggaaatcgaggggcggaaaaaggcgagtgagctgatatctgagtcaaagtacagacagcacccccacagttttaagtacactgccgtgaccgatactcctaacctgctgcacgccaagttttctaaccagataaccaatgagcgattatacaaagctgccggagaggatgcccgccatgagtataccatgactcttggactgcctgagtttatccgggccaagactaacgccgccaacctctcagacgcaagatacaaagagagctggaggaatcttagggcccagggttataaacttactattgaggccttgcccttccaggctgctagggcttcgggcgacatcgcaagcgactttttatataggcatgactttgtaaaagagagagggaagctgatcggtccacagagtgtgcgcgatgatccccggattcagcattgtcgccgcatggggcagttgcagtccgaactgcaatatcggcgtggcgctacatcaagccaggcgcagttccacctgccaatggatatggtgcatctggttcatgcgaagaatgcccaggcgcttgcttcagaccacgattacagaacgcagtaccacaagttcacagcactccctgaggatctgaagatggcctgggctaagaaagcccacgcgctgcaaagtgagctgagatataagtctgatttaattggtatgaagggcattggatggctggcccttcgcagcccccagatggagtcagcaaaaaaggcaggcgagttgatctccgaaactaagtatcgcaagaagccagatagtatcaaatttactacggtagtagattcccctgacctagtgcacgctaagaatagttacatgcactgtaatgagcgcatgtataggagcggtgatgccgaatcccttcacagatacactctcattccggaccatcctgatttcactcgggcccgcctaaacgcactgcacctgtcagacaaggtatataggaactcctgggaacagacaagggccggatcctatgatttccgactcgacgccattcccttccagactgcacgggcgtcccgggaaattgcgagcgacttcaggtacaaggaagcctttttgagagaccgcggcctgcagatcgggtatcggtccgtggacgatgacccccggatgaagcattttcttaatgtgggcaggctgcagagtgacaacgaatacaagaaggattttgcgaagtcccgaagccagttccacagcagcaccgaccagcccggtcttctgcaggcaaaaaggtctcagcagttggcctcggatgtgcactatcgccaaccattaccccagccaacttgcgatcctgagcagcttggcctgcggcacgcacagaaagcccaccagcttcagagcgatgtgaaatataaaagcgacttgaacctcactcggggagtggggtggacgcctccaggctcctataaggttgaaatggcccggcgtgccgccgaacttgcaaatgcacgaggcttggggctgcagggtgcatacaggggggccgaagccgtggaggctggggaccatcagtcaggggaggtcaaccccgatgctaccgaaattctgcacgtgaagaaaaagaaagccttattactgtag

SEQ ID NO: 196730 - DNA, 5088 bp, synthetic construct
  misc_feature 1..5088: note = Description of Artificial Sequence: Synthetic coding sequence
  source 1..5088: mol_type = other DNA
atgaacgtgcagccctgcagccggtgcggctacggcgtgtaccccgccgagaagatatcttgcattgatcagatatggcacaaagcgtgcttccactgtgaagtgtgcaaaatgatgctgtctgtcaacaactttgtatcacaccagaagaagccatattgtcacgctcacaacccaaaaaacaacactttcacaagcgtctaccatacaccactcaatttaaacgtgcgtacttttccagaggctatcagtggcattcacgaccaggaggatggtgagcagtgtaagtccgtctttcattgggacatgaaaagcaaggataaggaaggggcccccaaccgccagccgctcgccaacgagcgtgcctattggacgggctacggagaagggaatgcatggtgccccggtgcattaccagatccagaaattgtgcgtatggtagaggcaagaaaaagcttaggggaagagtacaccgaggattatgaacaaccacgcggtaaagggagttttccagctatgatcacccccgcctatcagagggccaaaaaggctaaccagctggcttcgcaagtggagtacaaaagagggcatgacgagaggattagccggttctcaacagttgtggacacccccgagctactgcggtctaaggctggcgctcaactgcagtctgatgtcagatacactgaggattatgaacagcagagaggaaagggaagtttccctgctatgattactccagcctaccagattgccaaacgagccaacgagcttgcctccgatgttagataccaccagcagtaccagaaggagatgcggggcatggccggacctgccatcggagccgagggtatcctgacccgcgaatgcgccgaccagtacggccagggctatcctgaggagtatgaggagcataggggaaagggtagctttccagccatgatcacacccgcataccagaatgccaagaaagctcacgagctggcttctgacatcaaatatagacaggacttcaacaaaatgaagggcgcagcacattaccactcattgcccgctcaggataacctggtactgaagcaagctcagagtgtcaataagttggtgagtgagaataagtataaggagaattatcagaaccatatgaggggacgctatgagggcgttggcatggacaggcggacgttgcacgcaatgaaagtaggaagcctggcatcaaacgtggcctacaaagctgattataaacacgacattgtcgactacaactaccctgctaccctcaccccaagctaccagaccgccatgaagttagttcccctgaaagatgcaaattacagacaatctatagataagctcaagtacagctctgtcacagacacaccacagattgtgcaggcgaaaataaatgctcaacaactgtcccatgtgaactatagggctgattacgagaagaataaacttaactataccctcccccaggacgtacctcagctggttaaagccaagaccaacgcaaagctcttttccgaagttaagtacaaggaaggctgggagaagaccaaaggtaaaggttttgaaatgaagctggatgctatgtccttgctggcggccaaggcttctggcgaactagcgagcaacatcaaatacaaggaggagtacgagaagacgaagggcaaggccatgggcacagcagatagtaggcttctccatagcctgcagatcgctaagatgtcatcagaggtggagtacaaaaaaggctttgaggagtccaaaaccagattccacttgcccatggacatggtgaacattaggcacgctaagaaagcacagacattggcgtccgatctcgactacagaaagaagctgcatgaatacacggtgctgcctgaagacatgaaaacccagtgggctaaaaaagcctatggccttcagtccgagcttcagtataaagctgacctggcatggatgaagggagtgggctggcttaccgagggatccctcaatctagagcaggcaaaaaaagccggccaactggtatccgagaagaattatcgccagagagtggatgagctcaaatttacttcagttacagacagctctcagatggagcatgcaaaaaaaagccaggagcttcagtccggcgtagcttacaaagcaggaaacgaacagtctgtgcatcagtataccatatctaaggatgagccattgttcctgcaagcccgcgccaatgctgctaacctttccgaaaaactatataagtccagctgggagaatcagaaagctaaaggattcgagttacggctcgatagtttgaccttcttggcggccaaagccaagagagacctggccagtgaggtgaagtacaaggaggactacgagaggagccgaggcaaactgatcggggccaaagacgttcaaggagattcccagatgtcgcactcccttcagatgagtaagctgcagagcgaactggagtacaagaaagggtttgaggacactaaaagccagtgccacgtttctctcgacatggttcacctggtgcacgcgcgaaaagcccagcaccttgcaacagacgtggggtacaagacagcggagcatcatttcacagctctgccaactgacatgaaggtggagtgggccaaaaaggcctacggcttacaaagcgataaccaataccgggccgacgtcaagtggatgaaagggatgggctgggtggcaactggctccctgaatgtagaacaggccaagaaggccggggagttaattagcgaaaaaaagtaccgacagcatccagacgctctaaaatttacttctatcaaagatacacctgagatggtgcaggctcgaatcagttatacccaggctgtcgatcgcctgtatagagaacagggagaaaacatcaaacatcactatacccctaccgccgaccttccagaagttttactggccaaactgaatgccatgaatatttctgaaacaaggtataaagaaagctggtcaaaactgagagatggcggctataaattgcgcttagacgcgctgccttttcaggcagccaaagcttctggcgagattatctcagactataagtataaggaggctttcgagaagatgaagggtcagatgttagggtctcgtagcctggaggacgacatttctctggcgcactccgtatacgcaacatcattgcagagcgacgttaactataaaaagggttttgagcactccaaggcccaattccaccttcctctggacatggccgcactggtgcatgcgaagaaggcccagacccttgcttcaaatcaggactacaagcacccactgccacaatatacttctctggctgaggacttgcggctgtcttgtgccaagaaggcccataagctgcaatcagagaacctgtacaggtcagacctcaattttatgagaggcgtggcatgcgtaattccaggtaccctcgagattgaagggagaaaaaaggcaagcgagctcataagcgaatcaaaatatagacaacatccacactctttcaagtacacagcagttaccgatacacccaacctgctccatgccaaattcagcaatcagattactaacgagcggctgtacaaagcagcaggggaggatgcacgacatgaatacaccatgacactgggcctccccgaattcatcagagcaaaaaccaatgccgctaatcttagcgacgctagatacaaggagtcatggcgcaacttgagggctcagggatataaactgaccatcgaggcactgccctttcaggccgcgagagctagtggggatattgctagtgatttcctctatcgtcatgatttcgtgaaagagcggggcaagctcataggtccccagtcggtcagggatgacccccgtatccagcattgccgtcgaatgggacaacttcagagcgaactgcagtaccgccgaggggcaacctcttctcaggctcaattccacctgccaatggacatggtccacctcgtccatgcgaagaatgctcaggctctagccagtgatcacgactatcgaactcaatatcacaagtttaccgccctgccagaggacctcaaaatggcgtgggcaaagaaagcacatgctttacagagtgagctgaggtataaaagtgatcttattggaatgaagggcatcgggtggctggcgctgagatctccacagatggagagtgccaaaaaggcaggtgagcttattagtgagactaaataccggaaaaagcccgactctattaagtttacgacagttgtcgactctcccgatctcgtgcatgccaaaaattcatacatgcactgcaatgaacggatgtacaggtccggcgacgccgaaagtctgcacaggtacactcttatccccgatcacccagactttacccgggcccggttgaacgctctgcatttgagtgataaggtctaccgtaacagttgggaacagaccagggccggcagctacgactttcgattggacgcaatacctttccagactgctagagcaagtcgagagatcgcatccgatttccgctacaaggaggcattccttcgagatcgaggacttcagatagggtatcggagtgtggacgatgatcccagaatgaagcattttctgaacgtgggtcggttgcagagcgataatgagtacaaaaaggattttgctaagtcaaggagtcaatttcacagctccacagatcaacctggcctcctgcaggcaaagcggagtcagcagctcgcctccgatgtccactaccggcagccccttcctcaacccacatgcgacccagaacagctgggcctgaggcatgcccagaaagcccaccagttacagtcggatgtgaaatataagagcgatctgaacttgacccgcggagtcggctggacccctccagggtcgtataaggtcgagatggctcgtagggccgccgagctggccaacgcccgtgggctgggactgcaaggggcttatcgtggagccgaggcagtagaagccggcgatcaccagtcaggtgaagtgaaccctgatgctactgaaatcctccacgtgaaaaagaagaaggccctgcttctgtag

SEQ ID NO: 196731 - DNA, 2559 bp, synthetic construct
  misc_feature 1..2559: note = Description of Artificial Sequence: Synthetic coding sequence
  source 1..2559: mol_type = other DNA
atgcggggcatggccggccccgccatcggcgccgagggcatcctgacaagggaatgcgctgaccaatacggccagggttatcccgaagagtacgaggagcaccgtggaaaaggatcctttcccgccatgattacccctgcttaccagaatgccaagaaggcacatgagttggcctctgacatcaagtacaggcaggattttaataagatgaagggggccgcacattatcatagcctccccgcccaggacaaccttgtcctgaaacaggcgcaaagcgtcaataaactggtttctgaagttgaatacaagaaggaccttgagtcttcacggggccactccatcaattactgcgaaactcctcaatttaggaatgtgtctaagatctccaagttcacctctgacaacaagtacaaggaaaactatcagaaccacatgagagggaggtacgagggcgtcggtatggataggcgaactctgcatgcgatgaaggtgggctcgttagcaagcaatgtggcatataaggcagattacaaacacgatatcgtggactataactaccccgccacccttactcccagctaccagacagcgatgaagcttgtgcccctgaaggacgctaactaccggcagtctatcgataagttgaagtactctagcgtgactgatacgccccagattgtgcaggccaagataaatgcccaacagctcagccacgtaaactatagggctgactatgagaaaaacaagctgaattacactctcccccaggacgtgcctcagctggttaaagcgaagaccaatgctaagctctttagtgaagtgaagtataaagaggggtgggagaagaccaagggaaaaggtttcgagatgaaattggacgcaatgagtctgctggccgcaaaagcgagtggtgaactcgctagtaacgttcatttgctgctctccctgaaaatcaaatacaaagaagagtacgaaaagaccaagggcaaggctatgggaactgccgactccaggttgctccattctctgcagatcgcaaaaatgtcctccgaagtcgagtataagaaaggatttgaagagagcaaaacacgcttccatctgcctatggatatgggcgtgggatggctaactgaaggcagcctgaacttggaacaggctaaaaaagcaggccagctggtttccgaaaagaattaccggcagagggtcgatgaactgaaattcacttccgtgaccgactcaagtcagatggaacatgcaaagaaaagccaggaacttcagtcgggcgtggcttacaaagcaggcaatgaacaatcggttcaccagtataccatatccaaagatgagccgcttttcctacaggctagagctaacgccgctaacttgtcagaattcctgtatcgccacgactttgtgaaggagcgcggaaagctgataggcccacagtcggtcagggatgaccctcgcatacagcactgtagacggatgggacaacttcaatccgagctccaatatcgtcggggggccacatcatctcaggcccagtttcacctgccaatggacatggtgcacctggtccacgccaagaatgcacaggcccttgccagcgatcacgactacaggacgcagtaccataagtttacagccctgccagaggacttgaagatggcatgggcaaaaaaagctcacgcattacagtctgaactgaggtacaagagtgatctgattggcatgaaggggattgggtggctcgccttgagatcgcctcaaatggagtcagctaaaaaagccggggagctgatcagcgaaaccaaatatcggaaaaaacccgatagcattaagttcactactgtggttgactcacccgatctggtgcacgccaagaattcgtacatgcactgtaatgagcgaatgtatcggtccggcgacgccgagtccctgcatcgctacacactcatcccagaccaccccgacttcactcgcgcacggctcaacgctttgcatctctccgacttccgctataaagaggcattcctgcgcgatagaggcctgcagattgggtataggtccgtcgatgatgaccctaggatgaaacattttttgaacgtggggagactccagagcgacaacgagtacaaaaaggactttgcgaagtcaagatcgcagttccattcctccacagaccagccaggcttgctgcaggcaaagcgaagtcagcagctcgccagcgatgtgcactatcggcagcctctgcctcagccaacatgtgaccctgagcaactcggactgaggcatgcccagaaggcccaccagttacagtccgatgtgaagtataagagcgacctgaaccttacgcggggcgtgggatggacaccccctggatcttacaaggtggaaatggcacgcagagccgccgagctcgcaaacgccagagggctggggctccagggcgcctatagaggagctgaagctgtcgaggcaggggaccaccagtccggcgaggttaatccggacgcaaccgagatcctacatgtcaagaagaagaaagctctgctgttgtag

SEQ ID NO: 196732 - DNA, 5217 bp, synthetic construct
  misc_feature 1..5217: note = Description of Artificial Sequence: Synthetic coding sequence
  source 1..5217: mol_type = other DNA
atgaacgtgcagccctgcagccggtgcggctacggcgtgtaccccgcggaaaagattagttgcattgaccaaatatggcacaaagcatgtttccactgtgaagtttgtaaaatgatgctctctgtgaataactttgtcagccatcagaagaaaccttactgtcacgctcacaatcccaaaaacaacacttttacctcagtgtaccacactcctttgaacctgaacgttcgcacgtttccagaagctatctccgggatccacgaccaggaggacggagagcagtgtaagtctgtctttcactgggatatgaagtctaaggacaaagagggtgcaccaaacagacaaccattggccaacgagcgggcttactggacaggttatggggaaggaaatgcctggtgcccaggagctctgccggatcccgagatcgtgcggatggtagaggcgcgaaagagtctaggagaggagtatactgaggattacgaacagcctcggggtaaaggctctttccctgccatgattacccctgcttatcaacgggcgaagaaggcgaaccagctcgcttcacaggtggaatacaagcgcgggcacgacgaacgaatatctaggttctcaaccgtggtggacactccagagctgctccgcagcaaggccggtgcgcagctccaatcagacgtgagatacaccgaggattacgagcagcagagaggcaaaggcagctttcctgccatgatcaccccagcctatcagattgctaaaagagcaaatgagttagcatccgatgttaggtaccatcagcagtaccagaaggaaatgcggggaatggcagggccagccatcggagctgagggcatactgacccgagaatgtgcagatcagtatgggcaggggtatccggaggagtacgaagagcacaggggcaagggctcctttccggccatgattacccccgcataccaaaacgcaaaaaaagcccatgaattggcatccgacattaagtatcgacaggatttcaacaagatgaagggggcagcccactaccacagcctgcccgcacaggacaacctggtgctgaagcaggcccaatccgtaaacaagcttgtttccgaagttgagtataaaaaggatctggagagtagcagaggccattcgataaactactgtgagacaccccagttcaggaacgtgagtaagatcagtaagtttacatccgacaacaagtacaaagaaaattaccaaaatcatatgcggggaaggtatgagggcgtgggcatggacagacggactctacatgcaatgaaggttggaagcctcgcaagtaacgtggcctacaaagcagactataagcacgatattgtggactataattacccagctactctcacccctagttaccaaaccgccatgaaacttgtccctctcaaagacgcaaattaccggcagagtattgacaagctgaaatacagctccgtcactgatactccccagatcgtccaggctaaaatcaatgcgcagcagctatcccacgtaaactaccgcgcggattatgagaagaacaagttaaactacacactgccacaggacgtgcctcagctcgtgaaagcaaaaacaaacgcaaaattgttcagtgaggtaaaatataaggaaggctgggagaagaccaagggaaagggtttcgaaatgaaactggacgcaatgtctttgttagcagctaaagcaagtggtgaactggcaagcaacgttcatctgctgctgtcattgaagattaagtacaaggaggagtatgagaagaccaagggcaaagccatgggcacggccgattccagactgttgcactccctgcagattgctaaaatgtcttccgaagtcgagtacaaaaagggctttgaagaaagtaaaaccagattccacctgcccatggatatggtgaatatccgtcacgctaagaaagcacagacgcttgcaagtgacttggactatcgcaagaagctccatgaatataccgtgctgcccgaagatatgaagactcagtgggccaagaaagcttatggattacagtccgaactgcagtataaggctgaccttgcgtggatgaagggcgtcgggtggctgacagagggcagcctgaacctggaacaagcgaagaaggccggacagctagtgagcgaaaagaactatcgacagagagtcgatgagctaaaatttacgtctgtgaccgacagcagccagatggagcacgctaagaaatcacaagagctgcagtcgggggtcgcttacaaggccgggaacgagcagtcagtgcaccaatatacaatatcaaaggacgagcctctgtttttacaagctcgagcaaacgccgccaacctgtccgagaaactttataagtcttcctgggaaaaccaaaaggcgaaaggcttcgaactgcgattggatagcctcacttttttggcggccaaggccaaaagagatttggcttctgaggtcaaatacaaggaagattatgaacggagcagaggtaagctcattggggccaaagatgtccagggcgattcccaaatgagccacagcctgcagatgtcaaaacttcagtcggaattggaatataaaaagggattcgaggacacaaagagccaatgtcacgtctccctggatatggtccaccttgtccatgctagaaaggcccagcatctcgccactgacgtgggttacaaaactgccgagcatcactttactgccttgcccacagatatgaaggtcgagtgggcaaagaaagcctatgggctgcagtcagacaatcagtacagggccgatgtgaagtggatgaaagggatgggctgggttgcaactggatctctgaatgttgagcaggctaagaaggctggggaactgatcagcgagaagaaatatagacagcatcccgatgccctgaaatttactagtatcaaagatacacccgagatggttcaggcccgaatctcgtatacacaggccgtggaccgactttatagagaacagggggagaacattaaacatcactataccccaactgctgatttgcctgaggtactgcttgcgaagctaaatgctatgaacatcagtgaaacccgctacaaggagtcttggtctaaattacgggatggcggatacaagttaaggctcgatgccttgcccttccaagccgccaaggcttccggggagataataagcgactacaaatataaggaggcatttgagaagatgaagggccagatgctgggcagccggagcctggaggatgatatcagtctggcccactctgtctacgcaacaagcttgcagagcgacgttaattacaaaaagggcttcgaacacagcaaggcacagttccacttgcctctcgacatggcagctctggtgcatgctaagaaagctcagaccctcgcctcgaaccaggattacaaacacccactcccacagtacaccagtttggccgaggaccttagactgagctgcgccaagaaggctcataagctccagtcagagaacttgtatcgatccgacttaaatttcatgaggggtgtggcttgtgtcatacctgggaccctggagattgagggacgcaagaaagcctctgagctgatttcagaaagcaagtaccgacagcaccctcacagcttcaaatatactgcagtcaccgatactccaaacctgctccacgcgaagtttagtaatcaaatcaccaacgagaggctctacaaggcagcaggcgaggacgctaggcacgaatacaccatgactttaggcctgcctgaatttataagagccaaaaccaacgcagcaaatctctccgatgctcggtacaaagaaagttggaggaatctccgagctcaaggttacaagctgacaattgaggcactaccgttccaggcagcccgcgcctccggagatatcgcctccgactttctgtacaggcatgactttgtgaaggagcggggcaagttgattgggcctcaatctgtacgcgatgaccctcggatacaacattgtcgccgcatggggcagctccagtccgagctccagtaccggcgcggggccacttccagccaggcccagtttcacttaccaatggacatggtgcatctggttcacgcgaagaacgcccaggctttggcttcagaccacgattaccgcacccagtaccacaagttcactgccctgccggaagacctcaaaatggcatgggccaagaaagctcatgccctgcagtctgagctccggtataaatccgacttaatcggcatgaaaggcatcgggtggctagcactgagaagcccgcagatggagagtgccaaaaaagcaggggagctgatctctgaaacaaaatacaggaaaaaaccagacagcatcaagtttacgacagtggtggactcaccagaccttgtccacgccaaaaacagctacatgcactgcaatgaacggatgtatcgctccggcgacgctgaatccctccatagatacacactgatcccagatcatccggactttacaagagctaggttaaatgccctccatctttctgataaagtgtaccgtaactcttgggagcagacaagagccggttcttacgactttagactagatgccatcccctttcagactgctcgcgcttcaagggagatcgcgtcagacttccggtacaaggaagcttttctgagagaccggggacttcagatcggctaccgcagcgtggatgatgaccctaggatgaaacacttcctgaacgtgggaaggctgcagtctgacaacgaatacaagaaagattttgccaaaagccggtctcaattccactcttcaaccgatcagcccggtctgcttcaagccaaaaggagtcaacagctggctagcgatgtccactaccggcaaccactgccacaacctacatgcgatccagagcagctgggattgcggcacgcccagaaagcacaccagctgcagagcgatgttaagtacaaaagtgacctgaatctcacccgcggtgtgggttggacgccaccagggtcatacaaggtggagatggctcggcgtgctgcagagctcgcaaatgcaagaggattggggttgcagggcgcctacagaggggcagaagccgtcgaggccggggatcaccagtcgggtgaggttaatcctgacgcaaccgaaattctgcatgtgaaaaagaagaaggctctcttactctag

SEQ ID NO: 196733 - DNA, 5112 bp, synthetic construct
  misc_feature 1..5112: note = Description of Artificial Sequence: Synthetic coding sequence
  source 1..5112: mol_type = other DNA
atgaacgtgcagccctgcagccggtgcggctacggcgtgtaccccgccgagaagattagttgcatagatcagatctggcacaaagcgtgcttccactgcgaagtctgcaagatgatgctgtccgtcaataatttcgtctcccatcagaagaaaccatactgccatgcccacaaccccaagaataacacttttacctccgtgtaccatacacccctgaatcttaatgttcggactttccctgaggccatctcgggtatccatgatcaggaagacggggaacaatgcaaaagtgttttccactgggatatgaagtcaaaggacaaggagggggcccctaaccggcagccactggcaaacgagagagcatattggacaggctacggcgagggcaatgcctggtgtcctggagcactccctgatcccgagattgtaaggatggttgaggcccggaaatctcttggtgaagagtacaccgaagactatgaacaaccccggggcaaggggtcattccccgcaatgatcacgcctgcataccaacgagctaagaaggcgaatcagctggcaagccaggtggagtataaaagaggtcatgatgagaggatctccagattctcgactgtggtggatacccctgagctgctgcgctccaaggcgggggcccagctccagagcgatgtgcggtatacggaagactatgagcagcaaagaggcaaggggtcttttcccgcaatgattacacctgcttaccagatcgctaaacgagcaaacgaactcgcctcagatgtgcgttaccaccagcagtaccagaaagagatgagaggcatggcaggccccgccatcggcgctgagggcatcttaacacgtgagtgtgccgatcaatacgggcaaggttaccctgaagaatatgaggagcatagagggaagggctcattccccgccatgatcacccccgcctaccagaacgcaaagaaagcccacgagctggcaagtgatattaagtacaggcaggacttcaataaaatgaaaggcgccgcccactaccatagcttaccagcccaagataatttggtccttaagcaggcccagtctgttaacaagctggtgtccgagaacaaatataaagagaactatcaaaaccacatgaggggacgatacgagggggtaggcatggatcgaaggactttacatgcaatgaaggtcgggtccctcgcctcgaatgtcgcatataaggccgactacaagcatgatattgtggattacaactacccagcaaccctgacaccctcctaccagactgctatgaagctggtaccacttaaagacgccaactaccggcaatctatcgacaagttgaaatacagttcagtgacagacacgccccagatcgtgcaggcgaagatcaacgcccagcagctttctcacgtgaattaccgggcagactacgaaaaaaataaactgaattatactctacctcaggatgtgccccaactggtcaaggcaaagacaaacgctaagctgttttctgaagtgaagtacaaggagggatgggagaaaacaaaggggaaaggattcgaaatgaagctagacgctatgtctctgttggcagctaaagcctctggcgagcttgcgtcaaatgtccaccttctcctgtccctgaaaatcaagtacaaagaggagtacgagaagacaaaaggtaaagctatgggtaccgcagactcccgcctgcttcactcactccagattgccaaaatgagttccgaagtcgaatacaaaaaaggtttcgaggagagcaagactcgatttcacctgcccatggatatggtaaacattagacacgcaaaaaaagcccagaccctggccagcgatctcgactaccgcaagaagttgcatgagtataccgtgctccccgaggacatgaagactcagtgggcgaaaaaagcctacggcctgcaatccgagctacagtacaaagctgaccttgcttggatgaagggcgtgggctggctgacagaaggcagcctgaatctcgaacaggctaagaaagcgggtcagctcgttagtgagaaaaattaccgccagcgggttgacgagctgaaatttaccagcgtgacagacagcagtcagatggagcacgctaagaagtctcaggagctgcaaagtggagtcgcatataaggctgggaacgagcagtccgttcatcaatatacaatatcaaaagatgagccattgttcctgcaggcaagagcgaacgcggcaaacctgagcgagaaattatataaatcatcctgggaaaaccagaaagctaagggctttgagctgcgactggattctctgacgtttctcgcagccaaagctaagcgggatcttgcttcagaggtgaaatataaggaagattatgagaggtcgcggggaaagctgatcggcgcgaaggatgtgcagggtgactcacaaatgtcgcactctctacaaatgagcaaactccaaagcgagttggaatacaagaagggcttcgaagacaccaagagccagtgtcatgtgtcactcgacatggttcaccttgtgcacgctagaaaggctcagcatctggccaccgacgttgggtacaaaactgctgagcatcacttcactgcgcttcctaccgatatgaaggttgaatgggcaaagaaggcctacgggcttcagagcgataaccagtaccgggctgacgtgaaatggatgaaaggcatggggtgggtggctaccgggtccctgaacgttgagcaagccaagaaggctggcgagctgatttcagaaaaaaaataccgccagcatcctgatgctctaaagttcacaagtatcaaagacacgcccgaaatggtccaagcacggatctcttacacccaggcggtggatcggttgtatcgtgagcagggcgaaaatattaagcaccactatacaccaaccgccgaccttccggaagtcctgctggctaagctgaacgcaatgaatatatctgagacgcggtacaaggaatcctggagcaagctgagagacggcggatacaaactgcgtctcgatgcgctcccttttcaggccgctaaggcgagcggcgaaatcattagcgattacaaatacaaggaggctttcgagaagatgaagggccaaatgctggggagtcgcagcctggaagacgatatatctcttgctcacagcgtctatgcaacgagtctccagtcggatgttaattataagaagggttttgaacattcaaaggcccagtttcatcttccacttgatatggccgctctggttcatgcgaagaaagctcagaccctggcttccaatcaggattacaaacaccccttgcctcagtacacgtctttggccgaggatttaaggctcagttgcgccaaaaaagcacataagctacagtctgagaatctctaccgaagcgacttaaactttatgcggggagtagcgtgcgtgatcccaggaactttggagatcgaaggtaggaaaaaggcaagcgaactgattagtgagtcaaaataccgccaacatccacattcgtttaaatatacggctgtaaccgatacccctaacttgttgcatgctaagttcagcaaccagattacaaacgaacgcttatataaagcggctggggaggatgcccgtcatgaatataccatgactctcggcctgccggagtttatcagagctaagaccaacgcagccaatctgtcggatgctagatacaaggaatcttggcgcaacctacgggctcaaggctacaaactcaccattgaggcgctgccattccaggcggcccgtgcttccggggatattgcctctgattttctctatcgccacgactttgtcaaggagcgcggaaaactgatcgggccacagtctgtgcgagacgaccccagaatccagcactgtagacgcatgggtcagttgcagtccgaattgcaatatcggcggggcgctacttcatcacaagcacagtttcaccttccaatggacatggtgcatctggtgcacgctaaaaatgcacaggccctggccagcgatcacgattacagaacgcagtatcacaagttcaccgctttgccggaggacctgaaaatggcctgggcaaagaaagctcacgcgctgcagtcagaactcagatacaagagtgatctgattgggatgaagggtatcggatggttggcgctgaggtctccccaaatggaaagcgccaaaaaggcgggagagctcatctctgaaaccaagtataggaagaaacccgatagcatcaaattcacaacagtggtagacagcccagacctggtccatgccaaaaattcctacatgcactgtaacgagcgtatgtatcgcagcggagatgccgagagtttgcatcgttatacactgatcccagatcaccccgattttaccagggctcggttgaacgcactccacctgtccgacaaggtttacaggaatagctgggagcaaactcgtgcaggctcatatgatttccggttggacgctattcccttccaaaccgcccgggcttctcgtgaaatagccagcgatttccgctataaggaagccttcctaagagaccgaggtcttcagatcggatatcggtcggtggacgacgatccccgcatgaaacatttcctcaatgtggggaggctacagagcgacaacgagtataagaaggattttgccaagagcagaagtcagttccattcgtccaccgatcaacccggcctcctgcaggccaagagaagtcagcaattagcctccgacgtgcactatcgacagccacttccacagccgacctgtgacccggagcaactgggattaagacacgcacagaaagctcaccagttgcaatccgacgttaaatataagagcgacttgaatcttaccagaggtgtgggatggaccccaccggggtcgtataaagtggagatggcgaggagagcagccgaactagcaaacgctcggggcctgggcctgcagggagcttaccgtggagccgaggcggttgaggccggagatcaccagagcggcgaggttaatccagatgccaccgagattctgcacgtgaaaaagaaaaaagcgctgctgctctag

SEQ ID NO: 196734 - DNA, 828 bp, synthetic construct
  misc_feature 1..828: note = Description of Artificial Sequence: Synthetic coding sequence
  source 1..828: mol_type = other DNA
atggccaccgagctggagtacgagagcgtgctgtgcgtgaagcccgacgtgagcgtgtacagaattccaccccgtgcctccaatcgaggctacagagcgtcagattggaagctggatcaaccggattggaccgggcggctgcgaattacctccaagggcaaaacagcctacatcaagctcgaggataaggttagtggtgaactgttcgcacaagcccccgtcgagcagtaccccggtatcgctgtcgaaaccgttacagacagctcccgctacttcgtgataaggatccaggatgggactggccgcagcgcattcatcggcatcggcttcactgaccgcggggatgcattcgacttcaatgtgagcttgcaagatcactttaaatgggtgaaacaggaaagcgagatctctaaagaaagtcaggaaatggatgctagaccaaagcttgacctcggatttaaggagggccagacgatcaagctatgtatagggaatattactaacaagaaaggcggcgcatctaagcctaggaccgccaggggtggcggtctgtctcttctcccccctccaccaggtggcaaggtgactatacctcccccatctagctcagttgcaatctcaaatcatgttaccccccctcccatcccaaaatcgaatcacggcggaagcgacgctgacattcttctggacctggactcaccagctccagtaactacaccagctcccaccccagtgtcagtcagtaatgacttgtggggcgatttttcaacagcctcaagctctgtccctaaccaagctccacagccatccaactgggttcagttttag

SEQ ID NO: 196735 - DNA, 402 bp, synthetic construct
  misc_feature 1..402: note = Description of Artificial Sequence: Synthetic coding sequence
  source 1..402: mol_type = other DNA
atggacgcccggcccaagctggacctgggcttcaaggagggccagacgattaaattgtgcataggaaacataacgaataagaaaggcggcgccagtaagccacgtactgcaaggggcggtggattatccctactgccccctccacccggtggtaaggtcacaattccccccccatcttcctccgtggctatcagtaaccacgtgacacctcctcctattcccaagtctaatcacggaggcagcgatgccgacatacttctggacctggactccccagcacccgtgacaaccccagcacctactcctgtcagcgtttccaatgacctttggggagacttctctaccgctagcagctccgtcccaaaccaagccccacagccttctaattgggtccagttctag

SEQ ID NO: 196736 - DNA, 828 bp, synthetic construct
  misc_feature 1..828: note = Description of Artificial Sequence: Synthetic coding sequence
  source 1..828: mol_type = other DNA
atggccaccgagctggagtacgagagcgtgctgtgcgtgaagcccgacgtctctgtgtacaggatacctcctcgggccagcaataggggttacagggcaagcgattggaaacttgatcagccggattggaccgggcgcctacgcataacttcaaagggtaagacagcatatatcaagctggaggataaggtgagtggtgagttattcgctcaggcacccgtggaacaatatcctgggatcgcggttgaaactgtgaccgatagttcccggtactttgtcattcgcatccaagacggtaccgggagatcagcattcataggaatcggttttaccgacaggggtgatgctttcgattttaatgtgtccttgcaagatcatttcaagtgggtgaagcaggagagtgagatatctaaggagtcccaagagatggatgctagacctaagctggaccttggttttaaggaaggacagactataaagttgtgtattggcaacattaccaataaaaagggcggagccagtaaaccccggacagctcgcgggggagggctttccctcctgcctcccccacctgggggcaaggtaaccataccgcccccctcatcttcagtagccataagcaaccacgtgacccctccaccaatcccaaaaagcaaccatggagggtctgatgctgacattttattagatctggatagccccgcccctgtgactacccctgcccccaccccggtatctgtttccaacgacttatggggcgacttttctactgcatcctcttctgtccccaaccaggcgccacagccttcaaactgggtgcagttctag

SEQ ID NO: 196737 - DNA, 558 bp, synthetic construct
  misc_feature 1..558: note = Description of Artificial Sequence: Synthetic coding sequence
  source 1..558: mol_type = other DNA
atggaggagagcggctacgagagcgtgctgtgcgtgaagcccgacgtgcacgtgtacaggataccgccaagggccaccaataggggatacagggccgccgaatggcagctggatcagcctagctggagtgggagactgcggattacagccaaaggtcaaatggcatatatcaagctcgaagacaggacctccggggaactgttcgcgcaggccccagtggaccagtttcccgggaccgctgtcgagagtgttacagactcttcacgctacttcgttatacgaattgaggatggtaacggccgtagggcctttatagggattggattcggtgacaggggcgatgcctttgattttaacgtggctctacaagaccacttcaagtgggtgaaacaacaatgtgaattcgccaagcaggcacaaaaccccgatcagggaccaaaacttgacctgggttttaaagagggccagacaattaagctaaatattgctgtgggcttgggcaatattaacagacgttgctcttgcaccttagccacagcccagtcgtgccattgctag

SEQ ID NO: 196738 - DNA, 792 bp, synthetic construct
  misc_feature 1..792: note = Description of Artificial Sequence: Synthetic coding sequence
  source 1..792: mol_type = other DNA
atggaggagagcggctacgagagcgtgctgtgcgtgaagcccgacgttcacgtctacaggatcccacctcgagccaccaatcgcggctacagagcagcagagtggcagcttgatcagccttcttggtctgggcgattaaggattaccgccaaggggcagatggcatatattaagttggaggaccgcactagcggagaacttttcgcccaagcccccgtggatcagttccccggaaccgctgtcgaaagcgtgacagatagctctcgctatttcgtgatccgaatcgaggacggcaatggtcgccgcgcgtttatcggtatcggttttggtgaccgcggtgacgcctttgatttcaacgtagctctgcaggatcatttcaaatgggtgaagcagcagtgcgagttcgccaagcaggctcagaatcctgaccaaggccccaaactggatctgggttttaaggagggccagacaatcaagttgaatattgcaaacatgaagaagaaagagggagccgcgggcaatcctagagttcggccagcttctacaggcggcctctctcttttgccgcccccaccgggtgggaaaacatccacccttattccaccaccaggcgaacagctggccgtcggcggttccctcgtgcagcctgctgtggctcctagctccgggggggcccctgttccatggccacagccaaatccagccaccgctgacatctggggtgacttcacaaagagcactggcagcacatccagccagacccaacctgggacagggtgggtgcagttttag

SEQ ID NO: 196739 - DNA, 792 bp, synthetic construct
  misc_feature 1..792: note = Description of Artificial Sequence: Synthetic coding sequence
  source 1..792: mol_type = other DNA
atggaggagagcggctacgagagcgtgctgtgcgtgaagcccgacgtgcatgtctacaggatccccccccgggccactaacaggggctaccgcgctgccgaatggcaattagatcagccctcttggagcggcaggctccggattactgccaaagggcagatggcatacataaagttagaggaccgcacgagcggggagctgtttgcacaggcgccggttgaccagtttcctggaactgctgttgaatctgttacggactcctctaggtacttcgttataagaatagaggacggcaatggaaggcgggccttcatcggtatcggctttggcgatcggggggatgcattcgactttaacgtagcgctccaggaccatttcaagtgggtaaaacagcagtgtgagttcgccaaacaagcacagaatccagaccaggggccaaagttggacctcgggtttaaagagggacagaccattaaattgaatattgctaatatgaaaaaaaaggagggcgccgccggaaatccaagagtacggcccgcctccacaggagggttatcactgctgccccctcctcccggaggtaaaacctccacactgataccacccccgggagagcagctggccgtcggagggagcctggtacagcctgctgttgccccctcttccggtggggcccctgtgccttggccacagccaaaccccgccacggccgacatctggggagacttcacaaaaagtacaggcagtacctcctcgcagacccagcccggcaccggctgggtccagttctag

SEQ ID NO: 196740 - DNA, 822 bp, synthetic construct
  misc_feature 1..822: note = Description of Artificial Sequence: Synthetic coding sequence
  source 1..822: mol_type = other DNA
atggaggagagcggctacgagagcgtgctgtgcgtgaagcccgacgtgcatgtttatagaattcctcctagggccactaatcgcggataccgggcagccgaatggcagctcgatcagcccagttggtctggccgattgaggatcaccgccaaagggcaaatggcttatatcaaactcgaggataggacgagtggagagctgtttgcccaagctcccgtcgaccagttccccggcaccgctgtggaatccgtgacagatagttccaggtattttgtgattaggatcgaggacggcaacggccgcagggcattcattggaattgggttcggggaccgaggcgacgccttcgatttcaatgtggccctgcaggaccacttcaagtgggtgaaacagcagtgtgagttcgccaagcaagcgcagaacccagaccaggggccaaagctggatctgggattcaaagaaggtcagactattaaattaaacatcgctaacatgaagaagaaggaaggggcagcaggaaatccccgcgtgagaccagcctctactgggggactgagtctgttacctcccccccccggtggaaagactagcactctcatcccgccccccggtgagcaattagctgtagggggttcccttgtgcaacccgccgtggcaccaagctccgatcagcttccagcgagaccgtcccaggcacaggcggggtctagctcggatttgtctacagtgtttcctcacgtgacatctggaaaagctctaccacacctggggcagagaaaagaggacgaagcactgctcagctggccagtgttcggggcttag

SEQ ID NO: 196741 - DNA, 714 bp, synthetic construct
  misc_feature 1..714: note = Description of Artificial Sequence: Synthetic coding sequence
  source 1..714: mol_type = other DNA
atggaggagagcggcgccgccgagtggcagctggaccagcccagctggtccgggcggctgagaattaccgccaagggacagatggcatatattaagctggaggaccggacttctggcgaactgtttgcccaggcgccggtagaccagttcccagggaccgccgtagagtcagtcaccgatagtagtcggtactttgttatccgcatcgaggacggcaacggccgtagagcttttattggtatcgggtttggcgaccgtggtgacgcattcgatttcaacgtcgccctgcaggatcactttaagtgggtgaaacagcaatgcgaattcgcgaagcaggcccagaaccccgaccagggccccaagttagaccttggatttaaagaggggcagacgatcaagttaaacatcgcaaatatgaagaagaaggagggagccgcggggaaccccagggtgcggcctgcctcaacaggcggactgtcactcttgcctccacccccgggaggtaagacttcgactctgatcccgccacctggggaacagctggccgttggcggaagtctcgtccagcccgccgtggccccatcgtccggaggggctcctgttccctggccccaacctaatcccgcaaccgcagacatctggggggatttcaccaaatcaactggatctacctcttcccagacgcagccaggtacgggctgggtgcagttctag

SEQ ID NO: 196742 - DNA, 792 bp, synthetic construct
  misc_feature 1..792: note = Description of Artificial Sequence: Synthetic coding sequence
  source 1..792: mol_type = other DNA
atggaggagagcggctacgagagcgtgctgtgcgtgaagcccgacgtgcacgtgtacaggatccctccaagagcaactaacagggggtatcgcgccgcagaatggcaattggatcaaccgtcttggagtgggcggctgcgcatcaccgccaaaggccagatggcttatattaaacttgaggatcgaacatcaggagagttgttcgcccaagctcccgtcgaccagttccctggcaccgcagtggagtccgttacagactcttctcggtactttgttatcagaattgaggatggaaacggcagacgcgcctttatcgggattgggttcggggataggggtgacgcctttgatttcaacgtcgccctccaggatcatttcaaatgggtgaagcagcaatgcgaatttgctaagcaggcacaaaaccctgaccagggcccaaaactggatctgggatttaaagagggccagactataaaacttaacatagctaacatgaagaaaaaggaaggagcagcggggaaccccagggtgaggcccgcctccacaggcgggctttcattgttgccaccgccaccgggcggcaaaacctccacgttaattcctcctccaggagagcagcttgctgtggggggatctcttgtacagccagccgtcgccccatcttctggtggggcccctgtcccttggccgcaaccaaaccccgctacagccgacatctggggagactttaccaagtcaactgggagtacgagttctcagacccaacccggtactggctgggtgcagttttag

SEQ ID NO: 196743 - DNA, 966 bp, synthetic construct
  misc_feature 1..966: note = Description of Artificial Sequence: Synthetic coding sequence
  source 1..966: mol_type = other DNA
atgagcgagcagagcaaggacctgagcgaccccaacttcgccgccgaagctcccaacagcgaggtgcactcatcaccaggggtgtctgagggagttcctcccagcgctacactcgccgaacctcagagcccgcccctggggcccacggccgcgccccaagccgctccccctcctcaggctcccaatgacgagggcgatcctaaggcactgcagcaggccgccgaagagggacgggctcatcaggccccctcagccgcgcagccaggtcctgcaccacctgctcccgcccaactggttcagaaagcacatgagctcatgtggtacgtcctcgtgaaagaccagaagaagatgattatttggtttccagacatggtcaaggacgtaattggctcatataagaaatggtgcagatctattctgcggcgcactagcctgattctcgcacgggtgttcgggctgcatctgcgcctaacatctctgcacacaatggaattcgccctggtcaaggccctggagcctgaagaacttgacagggttgctctctccaatcgtatgcccatgacaggacttctgcttatgatcctctcactcatctacgttaaaggccgcggtgctcgtgaaagtgcagtgtggaatgtactgcggatactcggactgcggccttggaagaagcattccacatttggggatgttcgcaaactgattacagaagagtttgtccagatgaactatctcaaataccagcgggtcccctacgtagagccccctgagtatgagttcttctgggggtcaagggcatcccgcgaaatcacaaaaatgcagattatggagtttctggcaagggtgtttaaaaaggacccccaggcctggccttcaaggtatagggaggccctggaagaagcccgagctttgcgcgaggcaaacccaactgcccactatccacgttccagcgtctccgaagattag

SEQ ID NO: 196744 - DNA, 915 bp, synthetic construct
  misc_feature 1..915: note = Description of Artificial Sequence: Synthetic coding sequence
  source 1..915: mol_type = other DNA
atgctgcagaagccccggaaccggggccggagcggcggccaggccgagagggatagagattggagtcactccggcaatcccggtgctagcagggctggcgaggatgcccgggtattgagagacggttttgctgaggaagctccatccacttccaggggccctggtggaagccaggggtctcaggggccgtccccccagggcgcacgaagggcacaggcggcaccagccgtaggacctcgttcccagaaacagctggaactcaaggtctccgaactcgtccagtttctgctgattaaggatcagaagaagatccctataaaaagagccgacatcctgaaacacgtcataggagattacaaggatatcttcccagacctgttcaagcgcgccgccgagaggctgcaatatgtcttcgggtataagctcgtggaactggaacctaagtctaatacatacatcctgattaacacattggagccagttgaagaggatgcagagatgaggggcgatcaaggtactcccacaactggcctgcttatgatcgtgttggggctgatattcatgaagggaaataccatcaaggaaacagaggcatgggactttcttcgtcgtttgggagtgtatcccaccaagaagcacctaatcttcggtgacccaaagaaactcatcactgaggattttgtacgccaacgctatttagaataccgacgcatcccgcacaccgacccggtagattatgaatttcagtggggtccaaggaccaacctagagacctccaagatgaaggtactgaaattcgtggcgaaagtgcacaatcaggatcctaaggactggcctgcccagtattgtgaagcactggctgatgaggaaaatagggctcgacctcagcctagcggtccagccccaagttcttag

SEQ ID NO: 196745 - DNA, 666 bp, synthetic construct
  misc_feature 1..666: note = Description of Artificial Sequence: Synthetic coding sequence
  source 1..666: mol_type = other DNA
atggccctggccctggccgccctggccgccgtggagcccgcctgcggaagccgctaccaacagctgcaaaacgaggaagagtccggggagcccgagcaggcagccggtgatgcaccacctccctacagctctatatccgcggagagcgccgcctattttgattataaggacgaatccggatttccaaagccgccctcatataacgtagccaccaccctgccttcctacgatgaagccgaacggacaaaggccgaggcaaccatccccctggtgcccggaagagacgaggactttgtgggcagagacgactttgatgatgccgatcaactgcggattggtaacgatggaattttcatgttgacattcttcatggccttcctctttaactggatcggttttttcctgtctttttgtctcaccacctctgcagccggaaggtacggcgccatttctggcttcggtctctccctgataaaatggatactaattgtgcgcttctcgacttacttccccgggtacttcgacgggcaatactggctttggtgggtctttctggtgttgggctttctgctttttctgaggggatttatcaactacgccaaggtgaggaaaatgcctgaaacattcagcaacctgcccagaacgcgcgtgttattcatctactag

SEQ ID NO: 196746 - DNA, 462 bp, synthetic construct
  misc_feature 1..462: note = Description of Artificial Sequence: Synthetic coding sequence
  source 1..462: mol_type = other DNA
atggccctggccctggccgccctggccgccgtggagcccgcctgcggctctagatatcagcaactacaaaatgaggaggaaagtggtgaacccgaacaggctgcgggagatgcacctcccccctactcctctattagcgccgagtccgcagcctactttgattacaaagatgaatccggcttccctaaaccaccttcctataatgtggcgaccaccctccctagctgcttttatgacatttcccacttaatcttcttcatattttacctgaggaatatgaagaagaaatacactaagatggttaagctcttacataaatctgccccagctcagtccgacagttgtaaatgcccgtttatttgttgcgtttgcatctcgcgtatttcaataggctccagatctggttaccagtacattatgcacagaagcgtgggatgccttaaagccaaacaggagaactag

SEQ ID NO: 196747 - DNA, 3138 bp, synthetic construct
  misc_feature 1..3138: note = Description of Artificial Sequence: Synthetic coding sequence
  source 1..3138: mol_type = other DNA
atgcaccagaagacccccgagatctacagcgtggagctgagcggcaccaaggatatcgtgaagactgataaaggtgatgggaaggagaaatatcgcggtcttaagaacaattgtttggagttgaagaaaaaaaatcataaagaagagtttcaaaaagaattacatctggacgatcataaactgtccaatagagagctagaagaaaagtatgggacggatatcatcatgggactctcctccacaagagctgccgaactcctggcccgggacggaccgaattcactcacaccaccgaaacaaacacccgagattgtaaaatttctcaagcagatggtaggggggttttcgattttactgtgggttggggctttcctgtgctggatcgcttatggcattcagtactcctccgacaagagcgccagccttaacaatgtttacctgggttgcgtcctcgggctggtagtcatcctcacggggattttcgcttactaccaggaagctaagagcaccaatattatgagttctttcaacaaaatgattccacagcaggccctagtcatccgcgattcagaaaagaaaactattcctagtgagcagctcgttgtgggcgacattgtcgaagtgaaaggaggggatcaaattcctgctgatattagagtactgtcatcacaggggtgtagagtggacaatagctcccttaccggcgagagcgaacctcagcctagatcttccgaattcacccacgaaaatcctttggaaactaaaaacatctgcttttactccaccacatgcctcgaagcctcgacttccccagtcggaaccgtgacaggcatggtgatcaacaccggcgaccgaacaattattggtcatattgcctctctcgctagcggggtgggcaatgagaaaactccaattgccatcgaaatcgagcatttcgtgcacattgtagctggcgtggcagtgtccattggtattctcttctttattatcgccgtcagcctgaagtaccaggtcttagacagcatcatctttctgataggaattatcgtggccaatgtgcctgagggactgttagccactgtcactgtaactctttctctgactgcgaagcgtatggccaaaaaaaactgcctggtgaagaacttagaggctgttgaaacgctcggctccacctcaattatatgcagcgacaaaacgggcaccctcacacaaaaccggatgacagtggcccacctgtggtttgataatcagatcttcgtggcggatacttctgaggatcacagcaaccaggtgtttgatcagagctcccgaacctgggccagcctgagtaaaataatcaccctgtgtaacagggctgagtttaagccaggccaggagaatgtgcctataatgaaaaaggctgtgatcggagatgcttctgagaccgccctgctcaaattcagcgaggtgatcctgggtgatgtgatggaaattaggaaaagaaacaggaaggttgccgaaattcctttcaattccactaataaattccagctctcaatccatgagatggacgaccctcacggtaaaaggttcctgatggtcatgaagggcgctcctgagaggatactcgaaaagtgcagtacaattatgattaacggagaagaacacccattagacaagagtaccgccaaaacatttcacactgcttacatggagctaggaggcctcggcgagagagtcctgggtttttgccatctgtatcttcccgcagacgagtttcccgagacatattctttcgacatcgacgcgatgaacttccccacatccaacttgtgctttgttggcttgctgagtatgattgatcctcctagaagtacagtaccagacgctgtgacgaaatgcaggagcgcagggattaaggtgattatggttacgggggatcatcccattaccgctaaggctatagctaaatcagtgggcatcatatcagccaatagcgagaccgtggaggacattgcacatcgtctgaacattgccgttgaacaggtgaacaagcgagatgccaaggcggctgttgtaaccgggatggagttgaaagacatgtcctctgagcaactggatgaaattctggcaaattaccaggagatcgtatttgcgcgcacatcacctcagcagaaacttattattgtcgaagggtgccagcggcaggacgccgtggtggcagtgacaggggacggtgtcaacgattcccctgcactaaaaaaggctgacatcggaattgccatgggcatcgcaggatctgacgcggcgaagaacgctgccgatatggtcttactggatgataatttcgcgtcaatcgtgactggcgtggaagagggccgcctgattttcgataatctgaaaaaaaccatagcttacagtctgaccaagaacatcgcggagctgtgtcccttcctcatttatataattgttggactgcccctgcccattgggactatcacaatcttgttcattgatctcgggacggatataatcccctcaatagctctcgcttatgagaaagccgagtctgatatcatgaaccggaagcctaggcacaagaataaggaccgactagttaaccagccgctggccgtctattcatatttgcacataggcctgatgcaagcactgggtgctttccttgtgtattttactgtgtatgcccaggaggggttcctccctcggacccttatcaatctgagggtggagtgggagaaggattacgtaaatgacctgaaggattcctacgggcaggagtggactcggtatcagagggagtacctggaatggactggctacaccgcatttttcgtcggcattctcgttcagcagatagccgatctcattatcaggaagactagacgaaatagcatatttcaacaaggtctttttagaaataaggttatttgggtcgggattacatcacagatcattatcggcttaattctgagttatggccttgggtctgttaccgccctgtcctttacaatgctgcgcgcgcagtactggttcgtagccgttccccacgcgatccttatatgggtgtatgacgaagtacgcaagctgttcatcagactctatccgggtagctggtgggacaaaaacatgtattactag

SEQ ID NO: 196748 - DNA, 1605 bp, synthetic construct
  misc_feature 1..1605: note = Description of Artificial Sequence: Synthetic coding sequence
  source 1..1605: mol_type = other DNA
atggcccagctgggcaagctgctgaaggagcagaagtacgaccggcagctcagactctggggcgaccacggccaggaagcccttgagtctgcacatgtgtgcctgattaatgccaccgctaccggcaccgagatactcaagaacttggtcttgcccgggatcgggtcgttcaccatcatcgatggtaaccaggtttcaggcgaggacgctggtaacaatttcttcctgcaacggagcagcattgggaaaaacagagcggaggctgctatggagttcttacaggaactcaatagcgacgtgtctggcagcttcgtagaggaaagtcctgaaaatctgctggataacgacccaagttttttctgccgatttactgtggtggtggcaacccagctgcctgaatccacaagcctgcggttagctgacgttctctggaatagtcagatccccttattgatttgccgaacttacggcctcgttgggtacatgcgcatcatcatcaaggagcaccctgtaattgagagtcacccagacaatgcactggaggatcttcgcttagataagccctttcccgagttaagggaacatttccagagctatgacctagaccacatggaaaaaaaggaccactcgcacaccccttggatcgtgataattgccaagtatctcgcccaatggtacagtgagactaatggacgcattccaaaaacatacaaagagaaagaagactttcgcgacctcattcggcagggaatactgaaaaacgaaaatggggctcccgaagatgaagaaaacttcgaggaagcaataaaaaatgtgaatactgcgctcaatacgacacagataccttcttccatcgaggacatcttcaacgatgatcgatgcataaatattacaaagcaaactccaagcttttggatcctcgccagggcgctgaaggagttcgtagccaaggagggtcaaggtaacttacctgttaggggcactattcccgatatgatcgctgacagcggcaagtacattaagctgcagaatgtctatcgtgagaaagcgaaaaaggacgctgcagcagtaggaaatcatgttgccaagctccttcagagtattggtcaggccccagagtccatttctgaaaaggagctgaagttgctgtgctccaattctgcatttctgcgcgtggtgcggtgccgcagtctggccgaggaatatggtctggatactatcaacaaagatgagatcattagctcaatggataacccagataacgaaatagtgctctacctgatgctccgcgcagtagatcgattccacaaacagcaaggaaggtaccccggcgttagcaattaccaggtggaagaagatatagggaagctgaaatcatgtctaaccggcttcctccaggagtacggattatccgtaatggtgaaggatgattacgtacatgagttttgtagatacggggcagccgaacctcacaccatcgctgcttttttgggtggggctgccgctcaagaagtgattaaaatcatcacaaagcaatttgttatctttaacaatacctacatttattcagggatgagtcaaacatcggctacatttcaattatag

SEQ ID NO: 196749 - DNA, 1587 bp, synthetic construct
  misc_feature 1..1587: note = Description of Artificial Sequence: Synthetic coding sequence
  source 1..1587: mol_type = other DNA
atggacgcccagcagaccaagaccaacgaggcccggctgtggggcgatcacggccaggaggccctcgaatctgcccatgtgtgcctcatcaatgccacagccaccggaaccgaaatcttaaagaatttagtactgcccggcatcggcagcttcactatcattgacgggaatcaggtttcaggcgaagacgccggcaacaacttttttttgcagcgtagtagcatcggcaaaaatcgagcagaagccgccatggagtttctgcaggagttaaattcagacgtctctggatcgttcgtggaggaatcccctgagaatcttcttgataacgatccttcctttttctgcaggtttactgttgttgtggccacacagctccccgagtctacttcccttcgactggcggacgtgctttggaatagtcagattcctctcctgatctgccgcacttacggattagtggggtatatgcggatcatcataaaagagcaccccgtgattgaaagtcatcccgacaatgcgctggaggacttgcgcctggacaagccgttcccagagctgagagaacatttccagagctacgatttggaccacatggaaaaaaaagatcacagccatacaccctggatagtgattatcgctaaatacctggctcaatggtactccgagaccaatggccgcatccccaaaacatacaaggagaaagaggatttccgagatttgatacggcaggggatactgaaaaatgagaatggagctcccgaagacgaagagaactttgaggaggcaatcaagaacgtgaatactgcccttaacacaacgcagatcccgtctagtattgaggacatctttaacgacgataggtgcattaacattacgaaacaaacccctagcttctggattctggcccgagccttgaaggaatttgtcgccaaggaaggacaggggaatcttcccgtgcggggtacgattcctgacatgatcgctgatagtggcaagtacatcaaactccagaacgtgtaccgcgaaaaggcaaagaaagatgctgccgcagtaggcaatcatgtcgcgaagctcctgcagagcattggacaagctcctgaatcgatctccgagaaggaacttaagctcctgtgttcaaattctgcatttctgcgcgtggtcaggtgcagatcactagctgaggaatacggactggataccatcaacaaggacgaaatcatctcaagtatggataatcccgacaacgaaattgtgctgtatctgatgctccgagctgtggaccgattccacaaacagcagggtcgctaccctggagtctccaactaccaggtcgaagaagatatcggaaagctcaagagttgtctgacgggctttctccaggaatacggtttgtcagtcatggtgaaggatgattacgtacacgaattctgtcggtatggggcggccgaacctcacaccattgccgctttcctgggaggcgccgcagcccaggaagttattaagatcatcactaagcagtttgtcattttcaacaatacctatatctacagtggtatgagccagacgagcgcaacattccagctgtag

SEQ ID NO: 196750 - DNA, 1338 bp, synthetic construct
  misc_feature 1..1338: note = Description of Artificial Sequence: Synthetic coding sequence
  source 1..1338: mol_type = other DNA
atggagttcctgcaggagctgaacagcgacgtgagcggcagcttcgttgaggaaagccccgagaatctcctggacaatgacccttcattcttttgcaggtttaccgttgtcgtggccacacagctgccggagtcaactagtctgcggttagccgatgtcctctggaacagccagattccactcctgatttgtcgaacctatggcctggttggttacatgcggattatcatcaaggagcatcctgtcattgaaagccacccagacaacgccctggaggacctgcggctcgacaaacccttcccagaactgagagaacatttccagtcatatgaccttgaccacatggaaaagaaggatcacagccacacaccctggattgtgattattgctaaatatctggcccagtggtacagcgagacgaacggaagaattccaaaaacctacaaggaaaaggaagactttcgagatctgatccgccaggggattctgaaaaacgaaaacggcgcccccgaagacgaggagaatttcgaggaagccatcaagaatgtgaataccgccctcaacaccacacaaattccctccagcatagaagacatctttaacgatgatagatgcattaatatcactaaacaaacgccctcattttggatcctggctagagcgcttaaggaattcgtggctaaggagggccagggaaacctcccagtgcggggtaccataccagacatgattgccgacagcgggaagtacataaaactccagaacgtgtacagggaaaaagccaagaaggatgctgctgcggttgggaaccatgtcgccaaattgctgcaaagcattggtcaggcgccagagtcgatctccgagaaggagctgaaactcctgtgcagcaactctgcatttttaagagtggttaggtgtcgctcattagctgaagagtacggtctggacaccatcaataaggatgaaataatctcatcaatggataacccagacaatgaaatcgtactgtatcttatgctacgtgctgtggacaggtttcataagcagcagggcaggtatcccggcgttagtaactaccaggtcgaagaagatatcggaaagctcaaatcctgcctcacagggtttctgcaagagtacggcttgtctgtgatggtgaaagacgactacgtgcatgagttttgtcgctatggggcggcagaaccacacaccatagcagctttccttggcggcgcagcagcacaagaggtgattaaaatcatcacgaagcaattcgtgatatttaacaatacttatatttattcgggcatgtctcaaacgagcgcaacattccaactgtag

SEQ ID NO: 196751 - DNA, 2901 bp, synthetic construct
  misc_feature 1..2901: note = Description of Artificial Sequence: Synthetic coding sequence
  source 1..2901: mol_type = other DNA
atggagccccaggtgaccctgaacgtgaccttcaagaacgagatccagtcctttctcgtgtcagaccctgagaacaccacctgggcagacatagaggcgatggttaaggttagtttcgatctaaatacgatccaaattaagtaccttgatgaggaaaatgaagaggtgagtataaacagccaaggcgagtacgaggaagctctcaaaatggcagtgaagcagggcaaccagcttcaaatgcaggtgcacgaggggcatcacgtcgtggatgaagctccacctccagttgtaggagcgaaaaggttagcagccagagcagggaagaagcccctggcccactactccagcttggtccgcgtcctgggatcagacatgaagaccccagaggaccccgctgtgcagagctttcctctggttccatgtgacacagaccagccccaggataagcctcctgactggttcacatcttacttggaaacattccgcgagcaggttgtgaatgagacagtggaaaagttagaacagaagctgcacgagaagctggtcctccagaacccatctctcggatcttgtcctagtgaagtaagtatgccaacatcagaggagaccctgttccttcccgagaaccagttctcatggcacattgcgtgtaataactgtcaaaggcgcatcgttggagtgaggtatcagtgttcactttgcccgagttataatatatgcgaggactgcgaggctgggccttacggacacgatactaaccatgttctacttaaactgagaaggccggtggttggttcatcagagcccttttgccattccaagtactcaaccccacgtctgccagccgccctggaacaggtccggttacagaaacaggttgacaagaattttctgaaggccgaaaagcagcggctacgcgccgaaaaaaaacagcggaaagcagaggtgaaggagctcaaaaaacagttaaaactccaccgtaaaatccacctttggaattctatccatggcttgcaatcccccaaatctccccttggcaggcccgaaagtcttctccagagcaacactcttatgcttccactgcaaccgtgcacaagcgtgatgccaatgctgtcagccgccttcgtcgacgaaaatcttccagacgggacccacctgcagccgggaaccaaatttatcaaacactggcgaatgaaaaacaccggtaacgttaaatggtccgcagacacgaaacttaagttcatgtgggggaatctgaccttagcgtccactgagaaaaaagacgtgctcgtaccctgtctgaaagccggccacgtcggtgtggtgtccgttgagtttatcgcgccagccctggaagggacatacacaagccactggaggttgtcacacaaaggacaacagttcggtcctcgggtttggtgcagcatcatcgtggatccattcccttcggaggagtcacccgataatatcgagaagggaatgatttcctccagcaagactgacgacttgacctgtcagcaggaggagacgttcctcctggcaaaggaagagagacagctgggggaggtgactgaacagactgaaggcacagcggcatgcattccccaaaaagctaagaatgtagccagtgaaagagagttgtacattccatcagtcgatttactaacagctcaggatctactgtccttcgaactacttgatatcaacattgtccaggagcttgaacgcgtgccccacaatactccagtggacgtgaccccttgtatgtcccccctgccccacgattcacctctcatagaaaaacctgggctgggacagatcgaagaggaaaatgaaggcgccggtttcaaggccttgcctgattctatggtgtccgttaaacgcaaagcggaaaacattgcaagcgttgaagaagccgaggaggacctgagcggaacccagtttgtgtgcgaaaccgtgatccggtcactgacgttagacgcggcccctgatcacaatccaccctgccggcagaagtcccttcaaatgacctttgctctgcctgaagggcctctgggtaacgagaaagaggagatcatccatatcgctgaagaggaggccgtcatggaagaggaggaggacgaagaggacgaggaagaggaggatgaactaaaagatgaggtccagtcccaatccagcgcctcgtccgaagactacatcatcatcctgcccgagtgtttcgatacttctcgccccctcggcgacagcatgtactcttcagctctgtctcagccaggtctcgagagaggcgccgaggggaaacccggagtggaagccggccaggagccagcggaagctggcgaacgcctgcctggcggggagaatcagccccaggaacactctatatccgacatattgactacgtctcagaccctggaaacagtcccactgatcccggaggtggttgagctgcctccctcgctcccaaggtcctccccttgcgtccaccatcacggcagtccaggggtagatctgccagtcaccatcccggaagttagctctgttcccgaccaaattcggggcgaaccgagaggtagctccggtctggtcaattctcgccagaagagctacgaccactctcgccatcatcacggatcttccatcgccgggggcctcgtcaagggggccttgtcagtcgcggcgtcagcgtacaaggcactgttcgccggcccaccagttacagcacaacctatcatttccgaggatcagaccgccgctttgatggcacacttgttcgaaatgggcttttgcgatcgccaacttaatctccgtctgttaaaaaagcataattacaatatcttacaggttgtgactgaacttcttcagctaaataacaatgactggtatagccagcgatattag

SEQ ID NO: 196752 - DNA, 2814 bp, synthetic construct
  misc_feature 1..2814: note = Description of Artificial Sequence: Synthetic coding sequence
  source 1..2814: mol_type = other DNA
atggagccccaggtgaccctgaacgtgaccttcaagaacgagatccagagtttccttgtgagtgaccccgaaaatacaacttgggccgacatcgaagccatggttaaggtctcatttgatctgaatactattcagatcaaatacctcgacgaggaaaatgaggaggtcaagattgtccttcttggggagtacgaggaagccctgaagatggctgtcaaacaggggaaccagctgcagatgcaagtgcatgaaggacaccatgtcgtcgatgaggcccccccaccggtggtgggggccaagcggcttgccgcgcgcgcggggaagaagccattggcccattattccagccttgtcagggtgctggggagtgacatgaagacaccggaagatcccgcagttcagagctttccactcgtgccttgcgacactgatcaacctcaagacaagccacccgattggtttacatcgtatctggagacatttcgcgaacaggtagtgaatgagacagttgaaaagttggaacagaaattacacgaaaaactggttctgcagaatcccagtctgggttcatgtccgagcgaagtgtccatgccaacctccgaagaaacacttttcctcccggagaaccagttttcatggcacatcgcatgcaacaattgtcagagacgcatcgtgggagtccgttatcagtgttccttgtgtcctagttataatatctgtgaagattgtgaggccggaccttacggacatgatacgaaccacgtgcttttaaagctgagacggcccgttgtcggaagcagtgagcccttctgccattcgaagtacagtacaccaagacttcctgccgccctggagcaggttcggctgcagaagcaagtggacaaaaactttctcaaagctgaaaagcagcggctcagggctgagaaaaagcaacggaaggcagaggtaaaagagctcaagaaacagctcaaactccaccggaagatccacctgtggaatagcattcacgggttgcagtcacctaaatctcctcttggcaggcccgagtcactgctccaaagcaataccctgatgctgccattgcagccgtgcacgtccgtgatgccgatgctgagcgccgcctttgttgatgagaatctcccagacgggacacacctgcaacccgggaccaagttcatcaagcactggagaatgaagaacactgggaatgttaagtggtcagccgatacaaaactcaaatttatgtggggtaaccttaccctggcctcaaccgagaagaaggacgtgctcgtgccgtgtctgaaggcagggcacgtgggagtcgtttccgttgagttcattgcccctgccctggaaggaacatacacgtcccactggaggctgtctcacaaaggccagcagtttggacccagggtctggtgctccatcattgtagatccattcccgagcgaggaatccccagacaatatcgagaagggaatgatctcctctagcaagacagatgatctgacctgtcagcaggaagagacctttttgttggcaaaggaagaaagacagctcggagaggtcactgagcagacggagggtaccgccgcgtgcatccctcagaaggctaagaatgtcgccagcgaaagagagctgtatattcccagtgtggatcttctgactgctcaggatctgctgtcattcgagcttcttgacatcaacattgtccaggaactggaaagagtcccccacaatactcccgtggatgtcacgccctgcatgagccctctgccgcatgattcacctttgatagagaaacctgggctcggtcaaatagaggaggaaaatgagggcgcaggatttaaagccttgccagacagcatggtctccgttaagcgaaaggccgaaaatattgcctctgttgaggaggccgaggaggacttgtccgggacccagtttgtgtgcgagacagtgatcaggtctctcaccttagacgccgcacctgaccataaccccccctgtagacagaaaagcctgcagatgacttttgctctcccagaaggccctttgggaaatgaaaaagaggagatcatccacatagccgaggaagaagcagtcatggaagaggaagaggatgaagaggacgaggaggaggaggacgagttgaaagatgaagtgcagtcccagtcaagtgcttcttccgaagactacatcataatcctgcctgaatgcttcgacacttctcgccccctgggggattcaatgtatagcagtgccttgagccagcccggcctggagaggggggccgagggaaaacccggtgttgaagccgggcaggaaccggcggaggccggagagcgcctgccgggcggagaaaaccagccgcaggagcatagtatctccgatatcttgaccacgagccagactctggaaacagtgcctctgatacccgaggttgtagagctaccaccttccctgccccggtcctcaccatgcgttcaccaccatggctccccaggcgtcgacctgcctgttaccataccagaggtgagctctgtgcccgaccagattaggggtgagccgcgcgggtcatcgggattagtgaactctaggcagaagagttacgaccactcccgacatcaccatggctcctctattgccgggggactggtgaaaggcgccctgtctgtggcagcatcggcctataaggccttatttgctggcccccccgtcaccgcacagggtctgtgggggcttcttagttttctccacctggccaagaaatgcttctttcttaaagcgccgagcgaggccttcagctggttttag

SEQ ID NO: 196753 - DNA, 2901 bp, synthetic construct
  misc_feature 1..2901: note = Description of Artificial Sequence: Synthetic coding sequence
  source 1..2901: mol_type = other DNA
atggagccccaggtgaccctgaacgtgaccttcaagaacgagatccagagtttcctggtttccgaccctgagaacaccacctgggctgacattgaagcaatggtcaaggtttccttcgacttaaacaccattcaaataaaataccttgacgaagaaaacgaggaagtcaagattgtgcttctgggggagtatgaagaggcattgaagatggctgttaagcagggcaaccagttgcagatgcaggtgcacgagggacaccacgtcgtagacgaggcacctccgcccgtggtcggggccaaacggttggctgctcgggccggcaaaaagcctttggcacactacagctcactggtccgcgtactgggtagtgatatgaaaaccccagaagatcccgccgtgcagagcttccccctggtgccttgcgatactgatcagccccaggacaagcctccagactggttcacttcttacctagagaccttcagggagcaagtagtgaacgagaccgttgagaagctggagcaaaagttgcacgagaagctcgtcctacagaaccccagcttgggctcctgccccagcgaggtgagtatgcctacctcggaggagaccctgttcttgccagagaaccaattctcatggcatattgcctgcaacaattgtcagcggagaatcgtgggcgttaggtatcagtgttccctctgccccagctataacatttgtgaagactgcgaggcaggaccttacggacatgacactaaccatgtgctgctaaagctaaggcgcccggtggtggggtcatccgagcccttttgccattccaaatattcgactcccagactcccagcggctctggaacaagtcagactgcaaaagcaggtagacaagaatttcctcaaagcggagaaacagaggctccgggccgaaaagaaacagcgtaaggccgaggttaaggagttaaaaaagcagttgaagctccacagaaagattcacctgtggaatagcattcacgggttgcaatccccaaagtctccattaggacgtcccgagtcacttctgcagagcaacaccctgatgctccccttacaaccctgcacttccgtgatgccaatgttatcagccgcgtttgtggacgaaaatctgcccgatgggacacatctgcaacctgggaccaaatttatcaagcactggagaatgaagaataccgggaacgtgaaatggagtgctgacacaaaactcaaatttatgtgggggaatctcacactagcctccactgaaaaaaaagatgtactggtgccttgcctaaaagctggacacgtgggagttgtgtccgttgagtttatcgctccagcacttgagggtacatacacctcacactggcggttgtcacacaaggggcagcagttcggacctcgcgtatggtgcagcataattgtagaccccttcccctccgaggagagccctgacaatatcgagaaagggatgatcagctccagtaaaacggacgacttaacctgccagcaggaagaaaccttcctcttggcgaaggaggaacgccagctcggagaggtgacggaacaaacggaaggtaccgcagcttgcatcccccagaaagctaagaatgtggctagcgaaagagagctgtatataccttcggttgaccttctgaccgcccaagacctactttcttttgaattgctcgatattaacatagttcaggagctcgagagagtgccacacaacactcctgtagatgtcacgccttgcatgtctcccctgccacacgacagcccactcattgaaaaaccgggcctcggccagatagaagaagagaacgaaggcgccgggttcaaggctcttcccgactctatggtttccgtcaaacggaaggccgaaaatattgcctccgttgaagaggccgaagaggacctgtctgggacccagttcgtgtgtgaaacagtgatacgaagcctgaccctggacgcagcacccgaccacaacccaccctgtcgccagaagtccttgcagatgacttttgcactgccagaaggacctctgggcaacgagaaagaagaaataatacatattgcggaagaggaggctgtcatggaagaggaagaagacgaagaggatgaggaggaggaagacgagcttaaggatgaggtccagtcccaaagcagcgcgtccagcgaagattatattatcatcctccctgagtgctttgatacttcaagacctctcggcgactcaatgtattcttcagccctgagtcaacccgggttggagagaggtgccgagggaaagcctggcgtcgaagcagggcaagagccagcagaagcaggggagaggttgcctggaggtgagaaccagccccaagaacactcaatcagcgacattttgaccaccagccagacactagagaccgtccccctgatccccgaggtagtggagttaccgccatctctgcctcgaagctctccctgcgtccaccaccatggctcgcccggcgtggatttgcctgtcaccattcctgaggtttcatcggtgcccgatcagattcgaggcgagccgcggggaagcagtggcctagtgaactcaaggcagaaatcctatgaccactcgagacatcatcacgggagctccatcgccggcggcctggtgaaaggggccctatcagtcgccgcttctgcctacaaagctctctttgctggccccccagttaccgcccaacccatcatttctgaggaccaaacagccgcactgatggcccatctgtttgagatggggttctgcgacagacagctgaacctccgcctgctgaagaagcataattacaacatcctgcaggtcgtcaccgagctgctccagctcaataataatgactggtacagccagcgctattag

SEQ ID NO: 196754 - DNA, 2901 bp, synthetic construct
  misc_feature 1..2901: note = Description of Artificial Sequence: Synthetic coding sequence
  source 1..2901: mol_type = other DNA
atggagccccaggtgaccctgaacgtgaccttcaagaacgagatccagtcattcctggtgagtgaccctgagaacaccacgtgggccgatatagaggctatggtgaaggtctccttcgatctgaataccatccagattaaataccttgatgaggaaaatgaagaagtttcaattaatagccagggtgaatatgaagaagcactcaagatggccgtcaagcagggtaatcaactgcaaatgcaggtccacgagggccatcacgtagtggacgaagccccccctcctgtggtgggcgctaaacggctcgctgcaagggctggcaaaaagccactagcccattattcctctttggtcagggtactggggagcgacatgaagacccccgaagacccagctgtccagagtttccccctggtgccctgtgacaccgatcagccccaggataagccaccagattggttcacctcatacctcgagacctttcgcgagcaggttgtgaatgagaccgtggaaaagctcgagcagaaattgcatgagaagcttgtgctgcagaatccatctctgggcagttgcccctccgaagtcagcatgcctacatcagaggagaccctgttcctgcccgagaaccaattttcttggcacattgcctgcaataattgccagagaagaatcgtgggagtcagatatcagtgcagtctatgcccctcctataatatttgtgaggattgtgaggcgggtccttatggccacgacaccaaccacgtacttctaaaattgcgcagacctgtggtggggtcctctgagcctttctgtcattcaaagtattctactcctagactgcctgcagcactagagcaagttcggcttcagaagcaggtggataaaaacttcctgaaggcggaaaaacagaggctcagagccgagaagaaacagcggaaggccgaggtgaaagaattgaagaagcagttaaaactccataggaagatccacctttggaattcaatacacggacttcagtctcctaaatcgcccttggggaggcctgagtctctgttacagtcaaataccctaatgctcccgcttcagccctgcactagcgtcatgccaatgctgtcagcagcttttgtcgatgaaaacctacccgacggcacgcatttgcagcctggtactaaatttattaagcactggcgtatgaaaaacacgggtaacgtgaaatggagtgccgacaccaaacttaagtttatgtgggggaatctgaccctggcctccacggagaaaaaggatgtcctggtaccgtgcctcaaggcaggccacgtgggcgttgtgtccgtagaattcatagcaccagccctcgaaggaacttacactagccattggcggctcagtcataaaggccagcaatttggaccacgcgtttggtgcagcatcatcgtggatccgttcccgagtgaggaatcccccgataacattgagaaaggaatgatctcctcttctaaaactgacgacttgacctgccagcaggaggaaacatttcttctggccaaagaggaacgccaactgggtgaagttacagagcagactgaaggaacagctgcttgcattccgcagaaagcgaagaatgtagcatccgagcgagaactctacattccctctgttgatctgttaacagcacaggacctattgtcttttgagctgctggacattaatatagtgcaagagttggagagagtcccgcacaacacacctgtcgatgtgactccttgcatgagtccgctgccacacgatagcccactgatcgaaaagcccggacttggccagatcgaggaggaaaacgagggggctggattcaaagctctccccgattctatggtgtctgtgaaacggaaggccgaaaacatagccagtgtggaggaggcggaagaggatctatctggaacacaatttgtctgcgagactgtcattaggtccctgaccctggatgctgctccagaccacaacccaccctgtcggcaaaagagcttgcagatgactttcgctctcccggaagggcctctgggcaatgaaaaggaggagatcatccacatcgctgaggaggaagctgtcatggaagaggaagaagatgaagaagatgaagaggaagaagacgaattgaaggacgaagtccagtctcagagctccgcttcatccgaggactacataatcattctgcctgagtgctttgatacatcgagacctttgggagactcaatgtatagctcagccctttctcagcctggacttgaaagaggagcagaagggaagcctggggtggaagctggacaggaacctgccgaggcaggggagcgcctcccgggcggcgagaaccagccacaggagcattccataagcgacattctgaccacgtcccagactcttgaaactgtgccgctaattcccgaggtggtggagctgcccccctctctgccccgaagttctccatgtgtgcatcaccatggatctccgggtgttgatctgccagtgactatacctgaagtgtccagcgttccagaccaaataagaggagaaccccgcggttcctctggcctggtaaatagccgacagaagagctacgatcacagccgacaccaccacgggtcatcgattgccggaggtctggtgaagggcgccttaagcgtagcagcttctgcttacaaggcattgttcgccggacctccggttacagcccagccaataatctcagaggaccagactgcggccttgatggctcacctttttgagatgggcttttgcgataggcagcttaacctacgtctgctaaagaaacataactacaatattctccaggtggtgactgagttactgcagttgaacaataatgactggtactcacaacgctattag

SEQ ID NO: 196755 - DNA, 654 bp, synthetic construct
  misc_feature 1..654: note = Description of Artificial Sequence: Synthetic coding sequence
  source 1..654: mol_type = other DNA
atgtacagcagcgccctgagccagcccggcctggagcggggcgccgaaggaaaaccgggtgtcgaggcaggtcaggaacccgcagaggctggtgaacgtctgccgggaggtgaaaatcagcctcaggagcattcaatcagcgacatcctcacgacaagtcagaccctagagaccgtgcccctgattcctgaagtggtggagttgccgccgtcgttgcctcgctcttctccttgcgttcaccatcacgggagccctggcgtcgacctacccgtgactataccggaggtgtctagcgtgcctgatcagattcgcggagagccaaggggatcttccggactggtcaatagccgtcaaaaatcttacgatcattcccgacaccaccacggcagttccatcgcaggaggcttggtgaagggtgccttgagtgtcgcagcttccgcatacaaggctttgttcgccggaccccctgtcaccgcccagccaataatcagcgaggaccagacagccgcattaatggcccacctcttcgagatgggcttctgtgaccggcaattaaatctgcgtctactgaaaaagcataactataatatcttgcaagtggttaccgagttgctgcagttaaataacaatgactggtattcacaaaggtactag

SEQ ID NO: 196756 - DNA, 2514 bp, synthetic construct
  misc_feature 1..2514: note = Description of Artificial Sequence: Synthetic coding sequence
  source 1..2514: mol_type = other DNA
atggagccccaggtgaccctgaacgtgaccttcaagaacgagatccagtcctttctggtgagcgatcccgaaaatacaacgtgggcagatatcgaagcaatggtgagcatcaattctcagggcgaatatgaggaggcactgaagatggccgttaaacagggaaatcagttgcagatgcaggtccacgagggccaccacgttgtcgacgaggcccccccccctgtggtcggtgctaagagactggccgcacgggcggggaagaagcctctcgcacattactcctcactcgtccgggtgctgggctccgatatgaaaacccctgaagatccggcagtgcagagtttccctttggtaccctgcgacacagaccagcctcaggacaaaccccccgactggtttacgagttatttagagacatttcgggagcaggtcgttaacgagacggtcgagaagctggaacagaagctccatgaaaagctggttcttcagaatcctagtttaggcagctgccccagcgaggtgtccatgcctacctcagaggaaactctgtttttgcccgagaaccagttttcatggcacatcgcctgtaacaattgtcagagaagaattgtgggtgtccgttaccagtgcagcctttgccccagttacaatatttgcgaggattgcgaagcaggcccatatggacatgacaccaaccacgtcctccttaagctgaggcgccctgtggtgggcagttctgagcctttttgtcattcaaaatattcaacccctcgcttacccgccgcactcgaacaggtacgtcttcagaaacaggtggacaaaaatttcctgaaggccgagaaacagagactacgggccgagaagaagcaacgaaaagctgaagtaaaggagctgaaaaagcagctgaagctgcatagaaagatacacctttggaactcaatccacggccttcagtccccaaagtcccctttgggaagacccgagagcctcctgcagtccaacactcttatgcttccattgcagccctgcacctcagttatgcccatgctgtccgccgctttcgtggacgagaacctccctgacggtacgcacctgcaacccggaaccaaattcattaaacactggcgtatgaaaaataccgggaatgtgaagtggagcgccgatactaaactcaagtttatgtgggggaatctgaccctggccagcaccgaaaaaaaagacgtgcttgtgccttgtctgaaagccggacacgtgggcgttgtcagcgtggaattcatcgcaccggccctagagggtacatacacgagccattggcggctgtcgcataaaggacagcagttcggccccagggtatggtgtagcattatagtggaccctttccccagcgaggagtccccagataatatcgaaaaggggatgatctcttcatcaaagacagatgacctgacctgccagcaggaggaaaccttcttgctcgccaaggaggagcgccagctgggcgaggtcaccgaacagacagaaggcaccgccgcttgcatcccacaaaaagccaagaacgttgcctcggagagagaactttatatcccatcggtagacctgctaacagctcaggatctgttatcattcgagttattggatatcaacatcgtgcaagagctagaacgggttccccacaatactccggttgacgttacaccttgcatgagccctctaccccacgacagtccactcatcgagaagcctgggttaggccagattgaggaggagaatgaaggcgcaggctttaaagctctgccagatagtatggtgtctgtcaaaagaaaggctgagaatatcgcatctgtggaggaggccgaggaagatctttcagggacccagttcgtatgcgagacagtcattcgctctttaacactcgacgcagccccagaccacaaccccccatgccgacagaaatccttacagatgacattcgccttgccggaggggccattggggaacgagaaggaggaaataatacacatagctgaggaggaggctgtgatggaagaagaagaagatgaggaggatgaagaggaggaggatgaacttaaggacgaggttcaatcgcagtccagtgcctcatctgaagactatattattattctcccggaatgttttgataccagccggccgctgggagacagcatgtattcctcggcgctgagccagcctggcttggaacgtggtgccgagggcaaacccggggttgaggccggccaggagcctgccgaggccggtgagcggctccctggcggggaaaatcagccacaggaacactcaattagcgatatcctcaccacttcgcagactcttgaaacagtgccgctcatcccagaagtcgtagagctcccacctagtttgccacgctctagtccatgcgtacaccaccatgggtcacccggagtggacctccctgtaacaatacctgaggtgagctccgtgcccgaccagatcagaggggctaacaatttctag

SEQ ID NO: 196757 - DNA, 2262 bp, synthetic construct
  misc_feature 1..2262: note = Description of Artificial Sequence: Synthetic coding sequence
  source 1..2262: mol_type = other DNA
atgcccatggacctgatcctggtggtgtggttctgcgtgtgcaccgcgcgcacagtggttggcttcggcatggacccggatctgcaaatggatatcgtgactgagttggacttagtgaacactaccctgggagtcgcccaggtgtcaggtatgcataacgcatccaaggccttcctgttccaggacatcgagcgggagattcacgctgccccccacgtatcggagaaactgattcaattgtttcggaacaaatccgagttcaccatcctagcaaccgtgcagcaaaagccctcaacctcaggagtgatcctgagtattcgagaactcgaacatagaatttacgagagggtaattgacccacccgataccaatttgccccccggcataaacctgtggctaggtcagcgtaatcagaagcacggcttatttaaggggatcattcaggacggcaagatcatctttatgcctaatgggtatattactcaatgtccaaatctcaatcatacatgtcccacgtgctcagatttcctgagcctggtgcaggggatcatggacctgcaagagctgctcgcaaaaatgaccgccaaactgaactatgcagagaccagactgtctcaactggaaaactgtcactgtgagaagacatgtcaagttagcggccttttataccgtgaccaggattcttgggtggatggcgatcattgtcgcaattgcacatgcaagtctggggcggtggaatgccgccggatgtcgtgtccgccactcaattgctccccagattcactccccgtccacatcgctggacagtgttgtaaggtttgccgcccgaagtgtatatacggcggcaaggttttggccgagggacagcgcattctgactaagagctgtcgagagtgtaggggaggcgtgcttgtcaagataactgagatgtgtccacccctgaactgttcagaaaaggatcacatcctgccagaaaaccagtgctgcagagtgtgcaggggacacaatttttgtgctgagggacctaaatgtggagagaactctgagtgcaagaattggaatacgaaggccacctgcgagtgtaagtccggatacatttcagttcagggggattcggcctactgcgaagacattgatgaatgtgccgctaagatgcattactgtcacgccaacactgtgtgtgtaaatttgcctggtctttaccgttgcgattgcgtgcccggctacatcagggttgatgactttagctgcactgaacatgacgagtgcggaagcggacaacacaattgcgatgagaatgccatttgcacaaatacggtacaggggcacagctgcacatgcaaacccggatacgtaggcaacgggacaatttgcagagccttttgtgaagaaggttgtagatacggtggtacgtgcgtagcaccaaacaagtgtgtctgcccatctgggtttactggctctcactgtgagaaagacattgacgagtgcagcgaaggcattatcgagtgccacaaccatagccgttgtgtgaacctacctggctggtaccattgtgaatgtagatcgggctttcacgatgacggcacttactctctcagcggcgagtcttgcatagatatcgacgagtgtgcactgcggacacacacctgttggaacgactctgcatgcattaatttggccggcggcttcgattgcctgtgtcctagcggcccttcttgtagcggcgactgtccccacgagggcgggctgaagcataacgggcaagtctggacgctcaaggaggaccgttgttctgtgtgcagctgtaaggacggcaagattttttgcagacggacagcctgcgactgccagaatccaagcgccgacctcttctgttgccccgagtgcgatacgagagtcacaagccagtgcttagatcaaaatggacacaaactctaccggagcggggacaactggacacacagctgtcagcagtgccggtgcctagaaggcgaagtagactgttggcccctcacttgtccaaacctaagctgtgagtataccgctatcctggaaggggagtgctgcccccggtgtgtgtctgatccctgtctggccgacaacatcacatatgatattcgcaagacttgcctggattcctacggtgtcagccgccttagcgggtctgtctggaccatggctggtagtccttgtacaacgtgcaagtgtaaaaacgggcgcgtgtgctgctccgtcgacttcgagtgccttcagaacaactag

SEQ ID NO: 196758 - DNA, 2433 bp, synthetic construct
  misc_feature 1..2433: note = Description of Artificial Sequence: Synthetic coding sequence
  source 1..2433: mol_type = other DNA
atgcccatggacctgatcctggtggtgtggttctgcgtgtgcaccgcaagaaccgtggtgggctttggaatggatccagatctgcagatggacatcgtaacagagctggacctcgtgaacaccactctgggggtcgcccaagtgagtggcatgcacaatgcgagcaaagctttcctatttcaagatatcgagagagagattcatgctgctccgcacgtctcagagaagctaattcaactgtttagaaacaagtctgaattcacaatcctggcaaccgtccagcagaagcccagtaccagtggggtcattttgtcaatacgggaattggagcattcatattttgagcttgaatcctctgggctaagggacgaaattaggtaccattatatccacaatggtaaacccaggactgaggcgctgccatataggatggccgacggccagtggcataaggtggccctgtctgtgtccgccagtcacctgctgcttcatgtggactgcaaccgtatatacgaacgggtcattgacccacctgatactaacctcccccccggaattaacctgtggctcgggcaacggaatcagaagcacgggttgtttaagggaattatccaagatgggaagatcatttttatgccaaatggctacataacccagtgtccgaacctgaatcatacctgtcctacctgctccgacttcctgtctctcgtacaaggtatcatggacctacaggagctgcttgcaaaaatgacagccaaactcaactatgcagagacccgtctgagccaactcgagaattgtcactgcgagaagacatgtcaggtgtccgggcttctgtatcgggaccaagacagttgggtcgatggcgatcactgtcgaaattgtacgtgcaagtccggggctgttgagtgcaggaggatgagttgccccccattgaattgcagcccggactccctgccagttcacatagctgggcagtgttgtaaggtctgtagaccgaagtgtatctacgggggcaaagttttagccgaaggacagaggatccttactaagtcgtgccgagagtgtagaggcggtgtgctcgtgaagatcactgaaatgtgccctcccctgaactgctctgaaaaggaccacattttgcctgaaaaccagtgttgccgcgtgtgtcggggtcataatttctgcgccgaggggccgaagtgcggcgagaattcggagtgtaaaaattggaatactaaagctacgtgcgagtgcaagagtggctacatctctgttcagggcgacagtgcttactgcgaggacatagacgagtgcgcagccaaaatgcactactgccacgccaacacagtatgcgtgaatctccctggcctgtaccgctgtgactgtgtaccagggtatattagggtcgacgatttcagctgcaccgagcatgacgagtgcggctccggtcagcataactgcgatgaaaatgccatatgtaccaatacagttcagggtcactcctgcacatgtaagcctggatacgttggtaatgggacgatctgcagggctttctgcgaggaaggctgtcggtatggggggacatgcgtggcacccaataagtgtgtttgcccatccgggttcactggatctcactgcgagaaggacattgatgaatgcagcgaaggaatcattgagtgccacaaccactcccgctgcgtaaacctaccaggctggtaccactgcgagtgtcgctccggattccacgatgatggaacatatagcctctccggggagagctgcatcgatattgatgaatgtgcactgcgcacacacacctgttggaatgatagcgcatgtatcaacttagctggcgggttcgactgtttgtgtccttccggacctagttgtagtggagactgtccccacgagggtggcctcaaacacaatggccaggtttggactctcaaagaggacagatgcagcgtctgtagttgtaaggacggtaagattttctgcagacgcactgcatgtgattgtcaaaacccctccgccgatttgttttgttgccctgagtgcgatacgcgggtaacatcacaatgcctcgatcaaaatggccacaaattatatagaagtggggacaactggacacattcctgccagcaatgtcgatgcctcgagggagaggtcgactgctggccactgacgtgcccaaatctctcctgtgaatacaccgctatactcgagggtgagtgctgcccccggtgcgtctctgacccatgcctcgccgacaatataacctacgatatccgtaaaacttgtctcgactcgtatggggtgtcacgactctccgggagcgtttggaccatggcaggcagcccatgcacaacctgcaagtgcaagaacggaagagtctgttgcagcgttgactttgagtgcttgcaaaacaattag

SEQ ID NO: 196759 - DNA, 2292 bp, synthetic construct
  misc_feature 1..2292: note = Description of Artificial Sequence: Synthetic coding sequence
  source 1..2292: mol_type = other DNA
atgcccatggacctgatcctggtggtgtggttctgcgtgtgcaccgcccgaacagtggtgggctttggcatggatccagacttgcaaatggacatcgtgacagagctcgacctggtgaacaccactcttggtgtggcacaggttagcgggatgcataatgcctctaaggcttttctgttccaggatatcgaacgtgagatccacgccgcacctcatgtgagtgagaagttaatccagcttttcaggaataagagcgagtttaccatcctggcaactgtccagcagaaaccatctaccagtggcgtgatcctcagtatacgagagctcgagcattcttactttgagctggagtcctctgggctgcgggatgaaattcgataccactacattcataatggcaaacctcgcactgaggccctgccttatagaatggcagatggccagtggcacaaagtggccctgagcgtctctgcctctcatttgcttctccatgtggactgcaaccgaatttatgaacgggtaatcgatcctcccgatactaatctgcccccaggaatcaacctgtggttaggccagcgcaaccagaagcacggactgttcaaaggcatcattcaggacggtaagatcatcttcatgcctaatgggtacataactcagtgcccaaatttaaatcatacctgtcctacatgctcagactttctgtctcttgtccagggaatcatggacttacaggagctgctggcgaaaatgaccgctaaactgaactacgctgaaacgaggctgagtcagctggaaaactgccactgcgaaaaaacatgccaggtgtcagggctgctatacagagatcaggactcctgggtggacggagaccattgcaggaactgtacatgtaagagcggtgctgtagaatgtagaagaatgtcgtgcccacccctgaattgtagccctgactccctgccagtgcatatcgccggccagtgctgtaaagtttgtaggccgaaatgcatttatgggggtaaggttctggcagaaggccagaggattctgactaagtcatgtcgcgaatgtaggggaggagtcctggtaaagattacggaaatgtgcccaccgctcaattgttctgagaaggaccacatactacctgaaaatcagtgctgtagagtgtgtcgcggtcacaacttttgtgctgaggggcctaagtgtggtgagaattcggagtgtaaaaattggaatacaaaagccacttgtgagtgtaaatctggctacatctccgttcaaggagacagtgcctactgcgaagacatcgatgagtgcgcagccaagatgcactattgtcatgcaaacaccgtctgtgttaacttgccaggactgtatcgctgcgactgcgtgccaggatacattcgggtagacgactttagctgtaccgagcatgatgagtgcggctcaggacagcataattgtgatgaaaacgcgatttgtaccaacactgtgcagggccactcctgcacttgcaaaccgggatacgtgggaaacggaactatttgccgagccttttgcgaagagggctgtagatacggcgggacctgtgtcgcccccaacaagtgcgtgtgtccttctgggtttacaggatcacactgtgaaaaagacatcgatgagtgcgcactgcgaacccatacttgctggaacgattcggcttgcataaatctcgctggaggatttgactgtctgtgcccaagcggcccctcatgtagcggggactgtccacatgaaggagggcttaagcataatgggcaggtttggactctgaaggaagatcgatgctctgtgtgctcatgcaaagatggaaagatcttttgtaggcgaacagcttgcgactgtcagaaccctagcgcagatctgttctgttgccccgagtgtgacaccagggtgacatctcagtgtttggaccagaacggccacaagctatatcggtctggcgacaactggactcatagctgccagcagtgcaggtgtctggagggtgaagtcgattgctggccgctcacctgccctaatctatcatgcgagtacacagcaatcctggaaggggaatgctgcccacggtgcgtaagcgatccttgccttgcggacaatatcacatacgatatccgaaagacatgccttgactcctacggggtatcacgtctctccggcagtgtctggaccatggcaggatccccatgtactacctgcaaatgtaaaaatggccgcgtctgctgtagcgtggattttgagtgcttgcagaacaactag

SEQ ID NO: 196760 - DNA, 2520 bp, synthetic construct
  misc_feature 1..2520: note = Description of Artificial Sequence: Synthetic coding sequence
  source 1..2520: mol_type = other DNA
atgagcatccggcggctgctgatcctgatcctgaagatcggccggaggtggaccgagcttattagaactatggagtcgcgcgtgcttctgcggactttctgtcttatcttcggccttggcgcagtgtgggggctgggcgtggacccttctctccaaatcgatgtgcttaccgagctggaacttggggagagtacaacaggtgttcgtcaggttccaggcctccataatggcactaaggcttttctctttcaggataccccccggtcgattaaggctagtaccgctactgccgaacagttcttccaaaagttacggaacaagcatgaatttacgattctagtgaccttgaagcagactcatcttaatagcggcgtgattctcagcattcatcacctcgaccataggtacctagaactggaaagctctggccatagaaatgaagtgcggcttcactacagatcaggatctcatagaccccacacagaggtcttcccgtatatactcgctgacgacaagtggcacaagttgagcctcgcaattagtgccagtcatctaatactgcacattgactgcaataaaatctacgaaagagtggttgaaaagccatctacagacctcccactaggcacaaccttttggctgggacagaggaataacgcccatggatatttcaaaggaatcatgcaagacgtacaactgctcgttatgcctcaaggattcatagcccagtgcccagatctgaacagaacctgccctacctgtaatgatttccatggtttagtacagaaaattatggagctccaagacatcctagccaagacatctgcgaagctatcaagggctgaacaacgcatgaaccggcttgaccagtgctattgtgagagaacatgcacaatgaagggcacaacatatcgcgagtttgagagttggattgacggttgcaagaattgtacttgcctcaatggcactatccagtgcgaaacactcatttgtcctaatcctgactgccccctgaaaagcgctctggcctacgtagatggtaagtgctgcaaggaatgtaagtcaatctgccagttccaaggtcgcacctactttgaaggcgagcgcaatacagtgtattcgtcgtcaggcgtctgcgttctatacgagtgcaaggatcagacaatgaaactggttgagtcatctgggtgccctgccctggactgtcccgagtctcatcagatcacactatcccattcctgttgcaaggtttgtaagggctacgacttctgctccgaaagacacaactgcatggaaaattcaatctgtcggaatctgaacgatagagctgtgtgtagctgtagggatggtttccgggccctacgggaagacaacgcgtactgtgaggatattgatgagtgtgccgagggcagacattattgtcgggagaacaccatgtgcgtgaacaccccaggaagttttatgtgcatctgtaagactggctatataagaatagatgactatagttgtactgagcacgacgaatgcatcacaaaccagcataattgcgacgagaatgcgctgtgcttcaataccgtcggtggccataattgtgtgtgcaaacccggctatacaggaaacggaacaacgtgtaaagccttttgtaaggatggttgtcgcaatggcggggcgtgcattgccgcaaacgtctgtgcctgtccacagggctttacaggaccaagttgtgaaacggacatagacgaatgctccgatgggtttgtgcaatgtgactccagggctaactgtatcaacttaccaggttggtatcattgtgaatgtcgcgacggttaccatgacaacggcatgtttagtccctccggcgaaagctgcgaggacatcgatgagtgcggaactggtagacattcctgcgctaatgatacgatctgctttaacctggatggcggctatgattgcagatgtccccacggcaagaactgtacgggtgattgtatacacgatggaaaagtcaaacacaatggacagatttgggtacttgaaaacgatcggtgtagcgtgtgctcctgtcagaacggcttcgtaatgtgtcggcggatggtatgcgactgcgagaatcctactgtcgatcttttttgctgtcccgaatgcgacccacgtctgtcatctcagtgtttgcatcagaatggcgagaccctgtataactcaggcgacacctgggtccagaattgccagcagtgccggtgtctccagggggaagtggactgttggccccttccgtgtcccgacgttgagtgcgaatttagcattctgccagaaaacgaatgctgccctaggtgcgtgacagatccttgccaggctgataccatccggaatgacataacaaagacttgtttggacgagatgaatgtggtccgctttaccggctccagctggattaagcatggcacagaatgtaccttgtgccagtgcaagaatgggcacatctgctgctccgtggatccacaatgcctacaggagctctag

SEQ ID NO: 196761 - DNA, 2448 bp, synthetic construct
  misc_feature 1..2448: note = Description of Artificial Sequence: Synthetic coding sequence
  source 1..2448: mol_type = other DNA
atggagaccggcctgggcgcccccctgttcaaggcctggctgctgatcagcgtatggggccttggggttgatcctagccttcagatcgatgtgttaacggagttggaactcggggagtccaccacaggagtgagacaggttcccggcttacacaacggaactaaggcctttctcttccaagataccccccgctccattaaggcgagcactgctaccgccgagcagtttttccagaagctcagaaacaagcacgagttcacaatactagtcaccctgaagcagacacatctgaacagtggggtcattctgagtattcaccacctggaccaccgatacctcgagctggagtcaagtgggcacaggaatgaggtcagattgcactatagaagcggatctcataggccccataccgaggtttttccatacatactggccgacgacaagtggcataaactgtctctggccatttctgctagccacctcatactgcatatcgattgcaacaagatctatgagcgtgttgtggaaaaacctagcactgacttaccactcggaaccactttctggctgggtcagcggaataatgctcatggctatttcaagggcatcatgcaggacgtccagctgctcgtgatgccacagggattcatcgcacagtgccccgatcttaacaggacatgcccaacatgtaatgacttccacggcctggtgcagaaaattatggaactgcaggatattctggccaagacatccgccaagctttctcgtgctgagcagaggatgaatcgcctagaccagtgttattgtgagcgtacctgcacaatgaaggggactacctatcgcgagttcgaatcctggatcgatggctgcaaaaactgcacttgccttaacggaacgatccaatgcgagacgctaatatgccccaaccctgactgccccctaaaaagtgcgctggcctacgtcgacggaaaatgttgtaaggaatgtaaatccatctgtcagtttcagggcaggacctacttcgagggagagcggaacacagtctattcttcttccggcgtctgtgtactatacgaatgcaaagatcagaccatgaagctggtcgagtctagcggatgcccggcattggactgtcccgaaagccaccagatcacactttcgcactcctgttgcaaagtgtgtaagggctacgacttctgttccgaacgtcataactgcatggaaaacagtatttgtcgtaatctgaacgatagggcggtgtgcagctgccgagacggatttcgagcattgcgcgaagacaacgcctattgcgaagatatcgatgagtgcgccgaaggcagacactactgtcgcgaaaacacaatgtgcgttaacacacctggctcatttatgtgtatctgcaaaacaggttatatcagaatcgacgactactcctgcaccgagcatgatgagtgtatcacgaatcagcacaattgcgacgagaacgcactctgtttcaatacagtgggaggccacaattgcgtttgcaaaccggggtacactggtaatggaacgacttgtaaggctttttgcaaggatggctgccgcaacggcggcgcctgtatcgctgcaaatgtgtgcgcctgtcctcagggatttacaggaccatcttgcgagactgatattgatgagtgcagcgacgggttcgtgcaatgcgattctcgagccaattgcattaatcttccaggttggtatcactgcgaatgtcgggatggctaccatgacaacggcatgttctccccctcaggggaatcttgcgaggacatcgatgaatgtggcaccggccgccactcgtgcgccaatgacacaatctgcttcaacctagatggtggttatgactgcagatgtccacacggcaagaactgcactggtgattgtatccatgatgggaaggtgaaacataatgggcagatctgggtcctggaaaatgaccgatgttccgtatgctcctgccagaacggattcgttatgtgtcggcggatggtctgcgactgcgagaacccgaccgttgacctcttctgctgcccagaatgcgacccaagattatcctcacagtgcctacaccaaaacggtgaaactttgtataactccggcgatacttgggtgcagaactgtcaacagtgcagatgtctgcaaggggaggtagattgttggccactgccttgccctgatgttgagtgtgagtttagcattttgcccgaaaacgagtgctgtcctcggtgcgttactgacccctgtcaagctgacaccattcgcaatgacattacaaaaacctgcctggacgagatgaacgtggtgagattcaccggaagttcctggattaaacacggaaccgaatgcaccctttgccagtgcaagaacgggcatatttgctgcagcgtagatcctcaatgtctgcaagagttatag

SEQ ID NO: 196762 - DNA, 2451 bp, synthetic construct
  misc_feature 1..2451: note = Description of Artificial Sequence: Synthetic coding sequence
  source 1..2451: mol_type = other DNA
atggagagccgggtgctgctgcggaccttctgcctgatcttcggcctcggcgcagtgtggggtttaggcgtcgaccctagcctccagatcgacgtccttactgagctcgagctaggagagtccactacaggagtccggcaggtccccggactccataacggcactaaggcctttttgtttcaggatactccgagatctatcaaagcttccacagccactgctgagcaattcttccaaaaattaagaaataagcacgaatttactatactcgtgacacttaaacagacccacttaaactcaggtgttatcttgtccatccaccacctcgatcaccgatatctggaactggagagcagcggccaccggaatgaagtaaggctgcattacagatccggaagccaccggccacatactgaggtcttcccgtacatcctcgccgacgataagtggcacaaactgagcctggcaatctcagccagtcaccttattctacacatcgactgcaacaaaatctacgaaagggtggtggagaaaccgagcaccgacctccctttaggcactacattttggctgggccagaggaacaacgcacatggatactttaaaggaattatgcaggatgtccagctactggtgatgccccaaggcttcatcgcccagtgcccggacttaaatcgtacctgcccaacctgtaacgactttcacggtttggtgcagaaaattatggaacttcaggacatcttggcgaagacttccgctaaactcagccgcgcagagcagcgtatgaatcgtttggaccagtgttactgcgaacgaacatgtactatgaagggcaccacctaccgggagtttgaaagctggatagacgggtgcaagaactgcacatgtctgaatggcaccatccagtgcgagactctaatttgtccaaatccagattgtccactgaaaagcgccttggcatacgttgacgggaagtgttgtaaagaatgcaagtcgatctgccagttccaggggagaacttacttcgaaggagagcgtaacacagtgtattcttcatccggtgtttgcgtcctctacgagtgtaaggaccaaacgatgaagttggtggagagctccggctgcccagctctcgattgtccagagtctcatcagatcacgctaagccattcctgctgcaaggtctgcaagggctacgacttttgttctgaacggcataactgcatggagaattccatctgtcgaaacctaaatgacagagccgtatgtagctgccgagatgggttccgtgcactgcgagaggataatgcgtattgtgaagatattgacgaatgtgccgaggggcgccattactgcagagagaacacaatgtgcgtgaatacccccggctcattcatgtgcatctgcaagacggggtatattcggatagacgactactcatgtaccgagcacgatgagtgcattaccaaccagcataattgtgatgagaatgcactctgtttcaacactgtcggcgggcacaattgcgtttgcaaacccggatacaccggcaacgggacaacatgtaaagcattctgcaaggatggctgccgcaatggcggagcctgtattgccgcaaacgtgtgcgcctgccctcaaggatttactggtcctagctgcgaaacagatatcgatgaatgtagtgatgggtttgtccagtgcgattcccgggcaaattgtattaatctacctggctggtatcactgcgagtgcagagatggatatcatgacaacggcatgttctctccttccggggagtcatgtgaggacatcgacgaatgcggcacggggcggcattcctgcgctaatgatacgatttgttttaatctggacgggggctacgactgtaggtgtccgcacggaaagaactgtacaggcgactgtatccatgacggtaaggtgaagcacaacggccagatctgggtgctggaaaacgatcgctgctcagtatgctcctgccagaacggcttcgttatgtgccgacgtatggtctgtgattgcgagaaccctactgtagacctcttctgctgtcccgaatgtgacccaagactttcctctcagtgtttgcatcagaacggtgaaacactctacaattcaggggatacttgggtgcagaattgccaacagtgcagatgcttacagggcgaggtggactgctggcctctgccatgcccggacgtggagtgtgaattctccattctgcccgagaatgagtgctgccccaggtgtgttacagacccttgccaggccgatacaattcgcaatgacattaccaaaacatgtttagacgaaatgaacgtggttcggtttacgggctcttcttggattaagcacggaaccgaatgtaccctctgtcaatgtaagaacgggcacatttgctgttccgtggacccacagtgtcttcaggagctctag

SEQ ID NO: 196763 - DNA, 2601 bp, synthetic construct
  misc_feature 1..2601: note = Description of Artificial Sequence: Synthetic coding sequence
  source 1..2601: mol_type = other DNA
atgggcttcccccccctgctgaagggccaggccagcgccacccggtcttcactcgcctcgtgctcatgggtggttttcttcttaagctgcctgagtcgacatgcccctgaaatagagggggggcgccgatggaccgaactgatccgtaccatggaaagtagggtcttgttacgcaccttttgtctaatttttgggctcggtgctgtctggggtttaggcgtggacccaagtctgcaaatagacgtgctcaccgagctggagctcggagagtctacaactggggtgcggcaggttccaggactgcacaatggcacaaaggcatttctctttcaggacactccccgtagtataaaggccagcaccgctacagctgagcaattcttccagaaattgcggaacaagcacgagttcaccatcctggtgaccctgaaacaaacccacctgaactccggggttatattgagcatacatcatctcgaccaccggtatctcgaactggaatccagtgggcatagaaacgaggtgcggttacattaccggtcaggaagtcacaggccccatacagaagtttttccctacattctcgccgatgataaatggcacaagcttagcctggccatctctgctagccatctcattttgcatatcgattgcaataagatatacgagagggtggttgaaaagccctccacggacctgcctctgggcactaccttttggcttggtcagaggaacaatgctcacggctattttaagggaatcatgcaggacgtgcagcttttggttatgccccaggggttcatagctcaatgtcctgatctcaacaggacctgccctacatgtaatgattttcatggactggttcagaaaatcatggagcttcaagacatactggccaagaccagcgccaagctgagccgtgcggagcaacgaatgaataggctcgaccagtgctactgcgagcgaacgtgcactatgaagggcactacttatcgagagtttgagagctggatagacgggtgcaagaattgcacctgtttgaacggtacgattcagtgtgagacattgatctgccccaatcccgactgtcctctgaaatcagcccttgcttatgtcgacgggaaatgttgcaaggaatgcaagtctatatgccagttccaaggccgaacatactttgagggagagcgtaacaccgtctactcatcttctggcgtctgcgtgctttacgagtgtaaggatcaaaccatgaagctcgtcgagtcttcagggtgccctgcccttgattgcccagaatcgcatcagatcaccctctcccacagctgttgtaaagtctgtaagggttatgacttctgctctgaaaggcacaactgtatggaaaattcgatttgccgaaacttaaacgatcgcgccgtttgctcctgtcgagatggcttccgcgccttaagagaggataacgcatattgcgaggacatagatgaatgtgctgagggacgtcattactgccgcgagaacaccatgtgtgtcaataccccggggtcattcatgtgcatctgtaagactggctacattcgaatcgacgactacagctgtaccgagcatgacgagtgtattactaatcagcacaactgtgacgaaaacgcactctgtttcaatacagttggtggacacaactgcgtgtgtaaacctggttatactggcaacggtactacttgcaaagcgttttgtaaggacggctgccggaacggcggtgcgtgtatagccgccaatgtgtgcgcatgtccccaggggttcaccggcccaagctgtgagactgacattgacgaatgctccgatggatttgtacaatgcgattcaagggcaaattgtatcaatttgcccggctggtaccactgtgaatgtcgggatggataccatgataacggtatgttcagccctagtggcgaaagctgtgaggacatcgatgagtgcgggacgggaaggcatagctgcgctaatgacaccatctgtttcaacctggacggcggctacgattgtaggtgcccgcatggaaaaaactgcaccggtgattgtatccatgacggtaaggtgaagcacaatggacagatctgggtcttggaaaacgacagatgctccgtatgttcctgtcagaacggcttcgtcatgtgtaggagaatggtctgcgactgtgaaaaccctaccgtggacttgttttgttgtcctgagtgcgatccgagactctccagccagtgtcttcaccaaaatggagagaccctgtacaatagtggggacacttgggtccaaaattgtcagcagtgcagatgcttacagggcgaagtcgattgttggcctctcccatgccccgatgtagaatgcgaattttctattctccctgaaaacgagtgttgtccccggtgtgttaccgacccgtgccaggctgacaccatacgaaatgacataacaaaaacatgtttggacgagatgaacgtggtgcggtttacgggatccagttggatcaaacatggcacagagtgcacactatgtcaatgcaagaacggacacatctgctgcagcgtcgacccacagtgccttcaagaactctag

SEQ ID NO: 196764 - DNA, 2451 bp, synthetic construct
  misc_feature 1..2451: note = Description of Artificial Sequence: Synthetic coding sequence
  source 1..2451: mol_type = other DNA
atggagagccgggtgctgctgcggaccttctgcctgatcttcggccttggtgcagtgtgggggctgggggttgatccttctcttcagatcgatgtgctgactgagctagagctcggtgagtctacaaccggggtcaggcaggtacccgggctgcacaatggcacaaaggcttttttgttccaagataccccacggtccattaaggcgagcacagccaccgcagagcaattctttcagaagctgaggaataaacacgaatttacgatactggtcaccctgaaacaaacccaccttaattctggtgtcattctatctattcatcacttagatcatagatatctcgagttggagtccagcggacatcggaatgaggtgcgcctccattatcggagcgggtctcaccgcccacataccgaagttttcccatacatactggctgatgataagtggcacaagctgtctctcgcgatttccgcgagccacctaatcttgcatattgattgtaacaagatctacgaacgggttgttgaaaaaccctcgaccgatttgccccttggaaccacattctggctcgggcaacgcaataacgctcacggctactttaagggtatcatgcaagacgtacagctgctggtcatgcctcaggggtttattgctcagtgtccagatctcaatcgcacatgtcccacctgcaacgatttccacggtttggtacagaagataatggaactgcaggacatcctggctaagacttctgctaaactaagtagagccgagcaacgcatgaacagattggaccagtgttattgcgaaaggacctgtacaatgaaaggtacaacatacagagagttcgagtcatggattgacgggtgtaagaactgtacctgtctgaatggaacgatacagtgtgaaacactcatctgtccaaatcccgactgtccccttaagtccgccctcgcgtatgttgacgggaagtgttgcaaggaatgcaaaagcatctgtcagtttcagggcagaacctatttcgagggcgagcggaacaccgtgtactccagttccggtgtgtgcgtgctctacgagtgcaaggaccaaaccatgaaactggtagagagctctggctgcccagccctcgactgtccagaatctcatcagatcaccctcagccacagctgttgtaaggtgtgcaagggctatgacttctgctctgaaagacataactgtatggagaattctatctgcaggaacctgaacgatcgggctgtgtgttcttgcagagacgggttccgcgcactgagggaggataacgcatattgtgaggacatagatgagtgcgccgaaggccggcattactgtagagaaaatacaatgtgtgtaaacactccaggcagctttatgtgcatttgcaaaacagggtatattaggatcgacgactattcctgcacagagcatgatgagtgtattaccaatcagcacaattgtgacgaaaatgctctttgtttcaacacagttggtggtcacaactgcgtgtgcaagcctgggtatacggggaatggaaccacgtgcaaggcattttgcaaagatggctgtaggaatggtggcgcttgtatcgctgccaacgtatgcgcctgcccccagggcttcacaggtccctcttgtgagacagacattgatgagtgcagcgatgggttcgttcagtgcgacagtagggccaattgtataaatctgcctgggtggtaccactgcgaatgtcgggacgggtatcatgacaatgggatgtttagcccatcaggggaatcctgcgaagacatcgatgagtgcgggacggggaggcactcttgtgctaatgacactatatgctttaacctggacggggggtacgattgtcggtgtccccacggaaagaattgcactggcgattgtatccacgatggcaaagttaaacacaacggtcagatatgggtattagagaacgatcgctgctctgtttgctcttgccaaaacggatttgtgatgtgcagaagaatggtgtgtgactgtgagaatccaacagtggacttattttgttgccctgaatgcgatcccaggctaagctcccagtgcctccatcagaatggggagactttatataacagcggagacacatgggtgcaaaattgccagcagtgccggtgtctccagggcgaggtggattgttggccactgccctgcccggatgtcgagtgcgaattttctattttacctgagaatgagtgctgccccagatgcgtgaccgacccttgtcaagcagataccatacgtaacgacattactaaaacttgtcttgatgagatgaatgtggtgagattcaccggaagcagttggattaaacatggcaccgaatgtacactctgccaatgtaaaaacggccacatatgttgtagcgtcgatccgcagtgtctccaggagctctag

SEQ ID NO: 196765 - DNA, 1734 bp, synthetic construct
  misc_feature 1..1734: note = Description of Artificial Sequence: Synthetic coding sequence
  source 1..1734: mol_type = other DNA
atggagaccggcctgggcgcccccctgttcaaggcctggctgctgatcagcgtatgggggctgggcgtggatccttcccttcagatcgacgttcttactgagctggagctgggcgagagtacaaccggcgttagacaggtgcctggcctgcataacggcactaaagcatttctgttccaggataccccgagatccatcaaggcatctactgcgaccgccgagcaattcttccagaagttgagaaataaacacgaattcactatcctggtgaccctgaagcagacgcacctgaattctggcgtcattctaagcattcaccatctggaccatagatacttggagctggagtcttcaggacatcgaaacgaagtgcggctgcactataggtctggcagccaccgaccgcacacagaggttttcccctatattctcgctgacgacaagtggcacaagcttagcctcgctatatctgcgtcccacttgatcctccatatcgactgtaacaagatctacgaacgagttgtcgaaaagcctagtacggacctgcccttgggtactactttttggctgggtcagcgaaataacgcgcacggatacttcaaagggatcatgcaagatgtgcagctactggtgatgccccagggctttatcgcacagtgtcctgatctgaatagaacgtgcccgacgtgtaacgattttcacggcctggtgcagaaaatcatggaactgcaggacatccttgccaagactagtgccaaactgagtagagccgaacagcgcatgaatagactcgaccagtgctattgcgaacgaacctgtacaatgaagggaactacatacagggaatttgaatcatggatagacggatgtaagaactgcacctgtcttaatggtacaatacagtgtgaaaccctgatctgcccaaaccctgactgtccacttaaaagtgcgttagcatacgtggacggaaaatgctgtaaagaatgcaagtcgatctgccagttccagggaaggacttacttcgaaggcgagaggaataccgtatactcatcgtcaggagtatgcgtgttgtacgaatgcaaagatcagaccatgaagctggtggaaagctccggttgccctgcactggattgtccagaatctcaccagatcactctgtcacactcttgctgcaaggtgtgcaaaggctacgatttctgttccgaacgccacaactgcatggaaaattcaatctgtcgaaacttaaatgaccgcgctgtttgcagctgccgggacggcttccgcgctctgcgggaggacaatgcatactgtgaggacatagatgaatgtgctgagggccgacactactgcagggaaaataccatgtgcgtaaacacccccggctcatttatgtgcatttgcaagactggttatatcaggatagacgattactcgtgcactgaacacgacgaatgcatcacaaatcagcacaactgtgacgaaaacgcactgtgtttcaacaccgtgggcgggcataactgcgtttgtaagccaggctacaccggcaatggaactacttgtaaggccttttgtaaggacgggtgtagaaatggcggtgcctgtattgccgcaaacgtctgcgcctgcccacaaggatttaccggacccagttgtgaaaccgatatcgacgaatgctcagatggattcgtgcagtgtgactcacgcgctaactgcatatgtctggttcctctctag

SEQ ID NO: 196766 - DNA, 333 bp, synthetic construct
  misc_feature 1..333: note = Description of Artificial Sequence: Synthetic coding sequence
  source 1..333: mol_type = other DNA
atggagaccggcctgggcgcccccctgttcaaggcctggctgctgatctctgtgtggggtcttggggtcgatccctctctgcaaatcgatgtgctcactgagttggaactgggggaatctacaactggggttaggcaagtgcctggcctgcataacggcacgaaagcattcttgttccaagatacgccccgctcgattaaggcttccacagccactgcggagcaattctttcagaagctgcgcaataaacatgaatttaccatactggtgaccctcaagcagacacacctcaactctggagtgatcctctcaatccaccaccttgaccattag

SEQ ID NO: 196767 - DNA, 2448 bp, synthetic construct
  misc_feature 1..2448: note = Description of Artificial Sequence: Synthetic coding sequence
  source 1..2448: mol_type = other DNA
atggagaccggcctgggcgcccccctgttcaaggcctggctgctgatcagtgtgtggggcctgggtgtggacccgagcttgcagatcgacgtgcttaccgaactggaacttggcgagagcacgactggggtgcgtcaggtgcctggtttgcacaatggcaccaaagcattcttatttcaggacacccccagatcgatcaaggcctctaccgcaacagctgagcaatttttccagaaacttcgtaataagcacgagttcacaattctggttactctgaaacagacccatctgaattccggggtgatcttgtccatccaccacctcgaccacagatacttagagttagaatctagcggacaccgaaacgaggttcggcttcactaccgctctgggagtcaccgccctcataccgaagtttttccatacatacttgctgatgacaagtggcacaaattgagcctggccatcagtgcgagccacctgatactgcacatcgactgtaacaagatttacgaacgcgtggtggaaaaaccgagtacggacctcccactgggaactacattttggctggggcaaagaaacaatgcgcatggctactttaagggcatcatgcaagacgtgcagctgctcgtcatgcctcagggattcattgcacagtgtcccgacctaaatcggacatgccccacttgtaatgattttcacggtctggtgcagaagatcatggaactgcaggatatccttgctaagacaagcgcaaagttatccagagccgagcagcggatgaaccgtttggaccaatgttactgtgaaaggacatgtactatgaaagggaccacttacagagaatttgagtcctggattgacggctgtaagaattgtacatgtctcaacggcacgatccaatgtgagacactcatctgtcccaatcctgactgcccgcttaaaagcgcactggcttacgtggatggcaaatgctgtaaagaatgtaaaagcatatgccagttccagggacgcacctatttcgagggcgagcgaaatacagtctacagttcatccggcgtgtgcgttctgtatgagtgtaaggatcagactatgaaacttgtcgaaagttctggttgtcctgccttggactgccccgaaagccatcagatcactctctcacattcgtgttgtaaggtctgcaaggggtacgatttctgctctgaaaggcataattgcatggaaaacagtatctgccgaaacttgaatgacagggccgtctgcagctgtcgagatggattccgagccttaagagaggacaatgcctattgcgaagatattgacgagtgtgccgaaggccgccactactgtagggagaataccatgtgcgtaaacacccctgggtcctttatgtgcatctgcaaaaccggctacatccggatagatgattacagctgcactgagcatgacgagtgcatcactaaccagcacaactgcgatgaaaacgctctttgtttcaatacagtaggaggccataattgcgtttgtaaaccaggctataccgggaatggtacaacatgcaaggctttctgtaaggacggatgccggaacggcggggcttgtatcgctgccaatgtgtgcgcctgccctcagggatttaccggtccgtcctgcgaaaccgatatcgacgaatgttccgatgggttcgtccagtgtgatagcagagcaaactgtatcaatctgcctggctggtaccactgcgaatgccgagacgggtaccacgataatgggatgttctcgccctcgggtgaatcctgtgaagatatcgacgagtgcggtacgggtcgacacagctgtgcaaacgacaccatttgcttcaacctggatggaggatatgactgtcgatgccctcacggcaagaactgtaccggcgattgtattcatgacgggaaggtgaagcacaacggacagatctgggtactagaaaacgaccggtgctccgtttgtagctgccaaaacggatttgtgatgtgcaggcgtatggtttgcgattgcgagaatcctactgtcgatttgttttgctgtcccgagtgtgatccccgactgtcctcccagtgcctgcaccagaacggagagacgttgtataatagtggagatacctgggtgcaaaattgtcagcagtgtaggtgtctccagggcgaggtggactgctggcctttgccatgccctgatgttgagtgcgaatttagtatacttcctgagaatgaatgctgcccaagatgcgtgaccgatccctgccaggccgacaccatccggaatgatattaccaaaacctgcctggacgaaatgaacgtggtcaggttcactggctcatcttggatcaagcatggaaccgaatgtacgctctgccagtgcaagaatgggcatatatgctgctctgttgatccccaatgtttgcaggagctttag

SEQ ID NO: 196768 - DNA, 69 bp, synthetic construct
  misc_feature 1..69: note = Description of Artificial Sequence: Synthetic coding sequence
  source 1..69: mol_type = other DNA
atggagagccgggtgctgctgcggaccttctgcctgatcttcggcctgggtgctgtgtggggcttatag

SEQ ID NO: 196769 - DNA, 966 bp, synthetic construct
  misc_feature 1..966: note = Description of Artificial Sequence: Synthetic coding sequence
  source 1..966: mol_type = other DNA
atggagagccgggtgctgctgcggaccttctgcctgatcttcggcctgggggctgtgtggggactcggcgtggatccctctctgcagatcgacgtactgacagaactcgaactcggcgagtccacaacgggggtgcggcaagtacccggcctacataatgggacaaaagcatttctatttcaggatacccctcgatctatcaaagccagcacagccacagcagagcagttttttcagaagctgaggaacaagcacgagtttaccatcctggtgaccctcaagcaaacacatctgaatagtggagtaatactgagcattcaccatctcgaccaccggtacttggagcttgagtccagtggccacaggaatgaggtccggctacattaccggtctggttctcatcgcccccatactgaggtgttcccatacatccttgcagatgacaagtggcacaagctgtctctggccatctcggcgagtcacctgattcttcacatcgattgtaataaaatctatgagagagtggtggaaaaaccaagtacagacctacctctggggaccacattttggctggggcagaggaacaacgcccacggttacttcaagggaattatgcaagatgtgcaacttttggtgatgccacaggggttcattgctcagtgtccagacctgaatcggacctgtcccacctgtaatgactttcacggactggtgcagaaaatcatggaactccaggatatcctagctaaaaccagtgcaaagctcagtcgggctgaacagcgtatgaacagactcgatcagtgctattgcgaacgcacatgtacaatgaagggcacaacatatcgcgagttcgaatcatggatcgatggatgcaagaattgcacctgcctgaatggcacaattcaatgtgagactctaatctgtccaaaccctgactgccccttgaagagcgctctggcatactag

SEQ ID NO: 196770 - DNA, 4386 bp, synthetic construct
  misc_feature 1..4386: note = Description of Artificial Sequence: Synthetic coding sequence
  source 1..4386: mol_type = other DNA
atggccgccgagcggggcgcccggcggctgctgagcacccccagcttctggctgtactgtctcctgctgcttggtcggagagcccccggcgcagccgctgccagatccggtagcgcaccccagagccccggagccagcattagaacattcactccattctacttcctggtggagccagtcgacaccctgtctgtgcggggttcctcggtgattctgaattgttccgcgtactccgagccatctcctaaaattgagtggaaaaaagacggcacctttctaaacctggtgagtgacgataggcgacagctgctgccagacggtagtctgttcatttctaacgtagtacactctaagcacaataagcccgacgaaggctactatcagtgtgttgcaaccgtggagtctctgggcacgatcatcagcaggaccgccaaactgattgtggccggccttcccaggttcacttcccaacccgaaccctccagtgtgtatgcgggcaataatgcaattctaaattgcgaggttaatgcagatttagtccctttcgtccgatgggagcagaacagacagccgctgttgctggacgatcgcgtgattaaactgcccagtgggatgctagtaatttctaacgcgaccgaaggcgatggcggcctgtaccggtgtgtggtggagtctggaggacccccgaagtattctgatgaagtggaattaaaggtgctgcctgatccggaggtgatttccgaccttgtgttcctgaagcaaccatcacctctcgtgagagtgatcgggcaggacgtagtcttaccctgcgtagcatccggtctgccgacccccactattaagtggatgaaaaatgaggaggcactggacacagagagttcggagagactcgtattgctggcaggaggaagcctggagatttcagatgtcactgaggacgacgcgggcacttacttctgcatcgcggataatggcaacgaaacaatcgaggcacaagctgagctcacggtacaagcgcaacctgagttcctgaaacaaccgacaaatatctatgcacatgaatctatggatatagtgttcgagtgtgaggttacaggaaaacctacgccgaccgtcaagtgggtaaagaacggcgatatggtcataccatcggattattttaagattgttaaggagcacaacctgcaagtactgggtctggtcaaatccgatgagggattctaccagtgcatcgctgagaacgacgttggaaacgctcaagccggggcccagctgatcatactggaacacgcccccgccactacggggcctctgccatcagcgccacgcgatgtggtggccagcctcgtgagcaccagatttatcaaactgacgtggcggacccccgcttcagatcctcacggtgacaaccttacttacagcgtgttctacaccaaagaagggattgccagggagagagttgagaacacatcccatccaggagagatgcaggtcacaatccagaatctcatgccagcaaccgtgtatatttttagagtgatggctcagaataaacacgggagcggcgagagttcagccccattgagggttgagacacagcctgaggtgcagcttcccggcccggcccccaatctcagagcctacgctgcctctcccacgagcataacagtgacgtgggagactcctgtttcgggcaacggggaaatacagaattataagctttactacatggagaagggaaccgataaggaacaagacgtggatgttagtagccactcttacacaatcaatgggctgaaaaaatatacagaatacagttttcgagtggtggcatacaataagcatggacccggcgtgagcactcctgatgtggctgtgaggacccttagcgacgttccaagcgctgctcctcagaatttgtccttggaggttaggaatagtaaaagtattatgatccattggcaacctcctgctccagctactcagaatggtcaaattaccggttacaaaatccggtaccgaaaagcgagcagaaaaagtgacgtgacagagaccctcgtttccggaactcaactgtctcagctcatcgagggactggatcggggtaccgaatacaacttccgagtggcagcactcacaatcaatggcacaggtccagcgacagattggttgagcgctgagaccttcgagagcgacctggatgagacccgggtgcccgaggtccctagcagccttcacgtgcggccccttgtgactagtatagtagttagttggacaccgcccgagaaccagaatattgtggtcaggggctacgcaatcggttacggtataggtagcccacatgcacaaaccattaaagtcgattataagcagcggtattacactattgagaacctggacccttcctcccattacgtgatcacgctcaaggctttcaataacgtaggagaaggaattccgctgtacgaatcagccgtgacgagaccccacaccgacactagtgaggtagatctgttcgtgatcaatgctccatacacacctgttccagatcccacccccatgatgccacctgtcggtgtgcaggcctccatcctcagtcatgatacaattcggatcacttgggccgataactcactccctaagcaccagaaaatcacagactcaagatattacaccgtgaggtggaaaactaatataccagccaatacaaaatacaaaaatgccaacgcgaccactttgagctatctcgtaacgggattaaagcccaataccctgtacgagtttagcgtgatggtcaccaagggcaggagaagcagtacctggtccatgaccgcccacggaaccaccttcgaactcgtgcctacgtcaccccctaaagacgttacagtcgtcagcaaggaaggaaagccaaagactattatagtgaactggcagcctcccagcgaggccaatggtaagataactggatatatcatatactactccacagacgttaatgccgaaatacacgactgggtaatcgagccagtggtgggtaaccggttgacccaccagatccaggagctgactttggacaccccttactattttaagattcaagcgcggaattccaaaggaatgggccccatgtccgaagccgtgcagtttagaactccaaaggctgatagcagcgacaagatgccaaatgatcaagcctccgggtctggcggaaaaggaagccgcctgcctgatctcggttccgactacaagccacccatgtctggatccaattcgcctcatggatctcccacctctcctctcgattctaacatgctgcttgtcattattgtatccgtgggggtgattaccatcgtcgtagttgtgatcatcgccgtgttctgcaccagaaggactacttcccaccagaaaaagaaacgggctgcatgtaagtccgtgaatggctcacataaatataaaggcaactcaaaagacgttaaaccaccagatctgtggatccaccacgagcgtttagagctgaaacctattgacaaatcaccggaccccaacccaataatgactgatactccaatccctagaaattctcaggacattacccctgtagacaacagtatggattcgaacatccaccaacgacggaactcctataggggacatgagtcagaagactccatgagcactctcgcagggcggagaggtatgcgaccaaagatgatgatgcctttcgactcccaacctccacagcccgtgattagcgcccatcctattcactctctggataatccacaccaccacttccacagctcctctctcgcatcccctgctcgttctcacctttatcatcccggctcaccgtggccaataggaaccagcatgtctctgtctgatcgcgcaaattctaccgagagcgtgcgcaatactccttcaacggacactatgcccgcatcttcttctcagacttgttgtacagatcatcaggatcccgagggcgctacgagctcaagctatctggcctcctcccaggaagaggatagcgggcaaagtctgccgacggcacacgtcagaccctctcacccccttaaaagctttgccgtccccgccatccctccccctggtccccctacgtacgatcccgctctgccctccacacccctcctatcccagcaggccttaaaccatcatatccatagcgtgaagacggctagcatcggaacactgggacggagcaggcctcccatgcctgtggtggtcccgagcgcccctgaagtgcaggagacaaccagaatgctcgaggactccgagtcatcttacgagccagacgagcttaccaaggagatggctcatctggaaggcctcatgaaagacctgaacgctataactaccgcgtag

SEQ ID NO: 196771 - DNA, 4386 bp, synthetic construct
  misc_feature 1..4386: note = Description of Artificial Sequence: Synthetic coding sequence
  source 1..4386: mol_type = other DNA
atggccgccgagcggggcgcccggcggctgctgagcacccccagcttttggttgtattgtttgctgctactcggacggagagcgcctggagctgctgccgcacgttcaggaagtgcacctcagtctccaggtgcttccatcagaaccttcactccattttatttcctcgtcgaacccgtggacaccctgtccgtaagaggttctagcgtgatactcaattgtagcgcgtacagcgaaccctctcccaagatcgagtggaaaaaagacggtacctttctcaatctcgtgtctgatgaccgccggcagcttctaccagatggatcgctgttcatttctaacgtagtgcactcaaagcataataagcccgacgagggatactatcagtgcgtagcgacagtcgagagtctggggacaattatttcccggacagctaagctcatagtcgccgggttgcccagatttacgtcccagcccgagcccagctccgtctatgccggcaataatgccattctaaattgcgaggttaacgccgatctggtgccatttgtgcgctgggaacaaaacaggcagccactccttctggacgatcgcgtcattaaacttccatctggcatgctggtgatttccaacgctacagaaggcgatgggggattgtatagatgcgttgtggagagtggaggtccccccaagtacagtgatgaagtggagctcaaagtgctccccgacccagaggttattagtgaccttgtgtttctgaagcagccttcacctctggtgcgggtgatcggccaggacgtggttctgccatgtgtggcttccggtctcccaactccgaccattaaatggatgaagaatgaagaagccctcgataccgaatctagtgagcggctcgtgctgcttgccggaggatctttggagatttcggatgtgactgaggatgacgctggaacctatttttgcatcgccgacaacgggaatgagaccatagaggctcaagcggagctgaccgtgcaggctcagcctgagttcctgaagcagccaacaaatatctatgcccatgagtccatggatatagttttcgagtgcgaggtgactggaaaaccgacaccaaccgtgaaatgggttaaaaacggcgacatggtcatcccttcagactactttaaaatcgttaaagagcacaatcttcaagtgttagggctggtgaagtccgatgaagggttttatcagtgtattgcggaaaacgatgtaggtaacgcccaggctggggcacagcttatcatcctagagcatgcccccgccactactggtccccttccctcggctccaagggatgtggtcgcctcactggtttctacccgatttatcaaactgacctggcgcactccagcttcagacccccatggcgacaatttgacctacagcgtgttctacaccaaggagggaatagcacgtgagcgagtggagaacaccagtcacccgggagagatgcaggtcacgattcagaacctgatgcctgcaaccgtttacatcttccgcgtgatggcgcagaacaagcatggcagtggagagagttctgccccactacgcgttgagacacagccggaggtacagctgcctggcccggccccgaatctacgagcatatgcggccagcccgaccagcattacggtgacctgggaaacaccggtctctggcaacggcgaaattcagaattacaaactgtactacatggagaaaggcacggataaagaacaggacgtcgacgtgtcatcccacagctatactatcaatggcttgaaaaaatacacagagtacagcttcagggtggtggcatacaataaacatggtcctggcgtgagtacacctgacgtggcagtgcggactctgagcgacgtccctagtgcagctcctcagaacctttccctcgaggtgcggaatagtaaatcgatcatgattcactggcaaccacccgccccagcaacacagaacggacagattaccggctacaaaatccggtaccggaaggctagccggaagagcgacgtcactgagacgctggtgagcggcacccaactctcgcagctgatcgagggtttagataggggtacagagtacaactttcgggtagccgcgctgacaatcaacgggactggtccggccacggattggctgtcagctgagacatttgaaagtgatctggacgaaaccagggtacctgaggttcctagttctctgcacgtccgccccctggtgacctcaattgtggtgagctggactcctccggagaaccagaacattgtggtaagaggctacgctatcgggtacggaatcgggtcacctcacgcgcaaaccattaaggttgactataagcagcgctactatacgatagaaaacctggacccctcctcccactatgtcattaccctcaaggcgttcaacaatgtgggtgaaggaattccgctttatgagagcgcagtcaccagaccccatacagatactagcgaggtggacctgtttgttatcaacgctccgtatacacctgttcccgatccgacccccatgatgccccctgtaggagtgcaagcctctatcctgagtcatgatacaatccgcattacatgggccgataattcgttaccaaagcatcagaagataactgattcccgctattacactgtccgatggaagactaacattcccgcaaataccaaatataagaatgccaatgcgaccactttgtcctacttagtgaccggcctaaaaccaaataccctatatgaattctcggtcatggtcactaagggcaggcggtcctctacctggtccatgaccgcacacggaacaaccttcgagttagtgcctacgtctccccctaaagatgtcaccgtggtgagtaaagaaggcaaacccaagacaatcattgtcaattggcagccacccagtgaggctaacgggaaaataacgggatacatcatctattattccacagacgtgaatgccgagatacatgattgggtaatagaacccgtggtgggaaatagactgacacatcagatacaggagctcaccttggacaccccatactactttaaaattcaggcccggaactcaaaggggatggggccaatgtccgaagcagtgcagttccgaacaccaaaagccgactcctctgacaaaatgcccaacgatcaagcatcgggctccgggggcaagggaagccggctgcctgacctgggatctgattacaagccccccatgtcaggctcaaatagccctcatggttcccccacctctcctctggactctaatatgctcctcgtaatcatagtgtctgtgggggttattactatagttgtcgtggtaattattgctgttttttgtactcgcaggaccacctctcatcaaaaaaaaaagcgggcggcgtgcaagtccgtcaacggttcccacaaatataagggcaactcaaaggatgtgaaaccaccggacctctggatacatcacgaacgtctggagctcaaaccaattgacaaaagtccggatccaaaccccatcatgacagatacacccatcccccgaaactctcaggacattacacctgtcgacaattcgatggactcaaatatacatcagcgtaggaacagttacaggggccacgagtctgaggacagcatgtccactctcgcaggcagaagaggaatgcggccaaagatgatgatgccctttgattcccagccgcctcagccagtgatctctgctcatcctattcatagtttagataaccctcatcaccacttccactcaagttccttggccagtcccgcacgctcacacctataccaccccggtagcccctggccaatcggaacatctatgtctctgagtgatagggcgaactccacggagtctgtaagaaataccccaagcactgacaccatgcctgcctcttcatcccagacatgttgtactgaccatcaggacccggagggagccaccagctctagctacctggccagttcacaagaagaggattccgggcagtcactgcctactgcccatgtccgcccaagccaccccttgaaaagctttgcagtgcccgccatccccccacccggccctcccacatacgatcccgcacttcctagtacaccgctactctcacaacaggcgcttaatcaccacatccactccgtaaaaactgcaagcatcggcacgcttggtcggagtcggccgccaatgcctgttgtggtaccaagtgcccctgaggtgcaggagacaactagaatgcttgaggattccgaatcgtcttacgaaccagatgaattgacgaaggagatggctcatctggagggtctgatgaaagacttaaacgccattactaccgcatag

SEQ ID NO: 196772 - DNA, 3519 bp, synthetic construct
  misc_feature 1..3519: note = Description of Artificial Sequence: Synthetic coding sequence
  source 1..3519: mol_type = other DNA
atgaagaacgaggaggccctggacaccgagagcagcgagcggctggtcctcctggcagggggatccctggaaatcagcgacgtcactgaagatgatgctggcacctacttttgcatcgctgataacggaaacgaaacaatagaggcccaggccgagcttaccgtgcaggcacaacccgagtttctaaaacagcctacaaatatttatgcacacgagtccatggatatcgtctttgaatgcgaagtgaccggcaaacccaccccaacagtcaagtgggtcaagaacggagatatggttatcccctctgactactttaagattgttaaggagcacaacctgcaggtgctgggcttagtcaaatccgatgaaggtttctatcaatgcatagccgaaaatgatgtgggtaacgcccaggcaggggcccagcttatcattctggagcacgacgtcgcgattcctactctacccccaactagcttgacctcagcgacaacagaccacctcgcgcccgccaccacgggccccctcccctcggctcctcgcgatgtcgtggcgtcgctggtctctacacggtttattaaactcacctggcggacaccagctagtgacccccatggcgataaccttacctacagcgtgttttatacgaaagaggggattgctcgagagcgtgtggaaaacaccagccacccaggcgagatgcaagttactatccagaatctgatgcctgcaactgtatacattttccgtgtcatggcccagaacaagcatggttctggtgaaagcagcgcccccctgagagtcgagactcagcctgaagtgcagttaccaggacctgcacctaatctgagggcatacgccgctagccccacctccatcacagtgacatgggaaacacccgtcagtgggaacggggaaatccaaaactataagctttactatatggaaaagggaaccgacaaggagcaggatgtggatgtctcaagtcactcttacaccatcaatggactaaaaaaatacactgaatatagctttcgtgttgtcgcctacaataagcatgggcctggagtctctacccccgacgtcgccgttagaaccttatcagatgtgccttctgccgctccccagaacctgtctttggaggtgcgaaatagcaaaagtatcatgattcattggcagcctcctgcacccgcaacgcaaaatgggcagataaccgggtataaaattaggtaccgaaaagcctcccggaaatccgacgtgactgagaccctagtcagcggaactcagttgtctcagctaattgaaggccttgatagaggcaccgaatataatttccgtgtagcagctttaactatcaatggaactggcccagctaccgattggctaagcgcagagactttcgagagcgatcttgatgagacccgcgtgcccgaagtccccagttctctgcacgttaggccacttgttacctccatcgtcgtttcttggactccccctgagaatcaaaacatcgtggtgcgcggatacgcaataggctatggcattggttcacctcatgcacagaccatcaaggtcgactacaagcaaaggtactataccattgagaatttggatccctcgtctcattacgttatcaccctgaaggccttcaacaacgtcggcgagggaatccccctgtacgaatcagctgtcactcgtccgcatactgtacccgaccccactcctatgatgccaccggtaggagtccaggcctctatcttaagccacgatactatccgcatcacatgggccgacaacagcttgccgaagcaccagaagattaccgattcccgctactatactgtacgctggaagactaatatacccgctaataccaagtacaaaaacgctaacgcaaccactctgtcctacttggtcaccggactgaaaccaaacaccctgtacgagttctctgtgatggtgaccaagggtcgcaggtcatctacctggagcatgacagcccacggaacaacgttcgaactggtccccaccagtccccctaaagatgtcaccgttgtgtcaaaagaaggtaaacccaagaccatcatcgttaactggcagcctccctccgaggcaaatgggaaaatcaccggatacatcatctattatagcacagatgttaatgcggaaatccatgactgggtcattgagcccgtcgtggggaataggttgacccatcagatccaggaactcacactggacactccttattacttcaaaatccaggctaggaacagtaaaggcatggggcccatgagcgaggctgtgcaatttcggaccccaaaggcaagtgggtcagggggcaaggggtctagactgccggatctaggaagtgattataaaccgccaatgagcggatccaacagccctcacggatcccctaccagccccctggactctaatatgctcctcgtgattatcgttagcgtgggggtgatcacgattgtggtagtcgtgatcatcgccgtgttttgcacgcgtcgcacaacatcacatcagaaaaaaaaacgcgcagcttgtaagagcgtcaatgggtcacacaagtataaaggtaacagtaaagacgtaaaacctcccgacctgtggatccatcacgagagactggagcttaaaccaatcgacaaatcccccgatcccaatccaattatgaccgatacaccaataccacgaaattctcaggacattacaccggtggacaattcaatggacagcaacatccaccaacggcggaactcctaccggggacatgaatctgaggattccatgtccacccttgcggggagaaggggcatgagacccaaaatgatgatgcccttcgactcccagcccccacagcctgtgataagcgcacaccccatacacagcttagacaaccctcatcaccattttcacagtagtagccttgcaagccctgcgcgatcccacctttatcacccgggttccccgtggcctattggtaccagtatgtctctgtccgatcgtgcaaacagtaccgagtcagttaggaatactccttctactgacaccatgcccgctagttcgagtcagacttgctgcaccgatcaccaggatcccgagggggctacgtccagctcatacctcgcaagcagccaagaagaagattccggtcagtcactgcctacggctcatgtgcgacctagccaccccttaaagagttttgccgtgcccgcaatcccacctcccggacctcccacatatgaccctgccctgccttctaccccactcctgagccaacaggcactcaaccaccacatacattcggtgaaaaccgcctctattggaactttagggaggtccaggccccctatgcccgtggtggtgcccagcgcgcctgaggttcaggagactactagaatgttagaggattcagagagcagctacgaacccgacgagctgaccaaggagatggctcacctggaaggactgatgaaagatctgaacgcgatcacgaccgcctag

SEQ ID NO: 196773 - DNA, 4353 bp, synthetic construct
  misc_feature 1..4353: note = Description of Artificial Sequence: Synthetic coding sequence
  source 1..4353: mol_type = other DNA
atggccgccgagcggggcgcccggcggctgctgagcacccccagcttctggttgtattgcctcctcttgctcggcaggcgggcccccggcgcagcagccgctaggtcaggatcggccccccagagccccggggcttccatcaggacattcacccctttctattttctggttgagcccgtggacactctctccgtgaggggctcaagtgtcatcctcaactgctccgcctattcagagccgagcccgaagattgagtggaaaaaggatggaacctttctgaacctggtgagtgacgaccgccgtcagttgcttcctgatggatccctattcatttctaacgtggtgcattccaagcacaacaaaccggatgagggatactaccagtgtgttgccacagttgaaagcttggggaccatcatttcgaggactgcgaagttgatagttgccggcctgcctcggttcaccagccagcccgaacctagcagtgtctacgcgggaaataacgccatccttaattgcgaggttaatgcagacctcgtcccttttgtgcggtgggagcagaaccggcagcctttgctgttggatgaccgggtgatcaagctgccctcgggaatgctggtgatctccaatgccactgagggggatggaggactgtaccgctgtgtcgtggaatctggcgggccgcccaaatattccgatgaggtggagctgaaagtactgcccgaccccgaagtcatctccgatctggtgtttctgaagcagccctcgccattagtgcgggtcatcggtcaggatgtcgtcctcccctgcgtcgcaagcggcttacccaccccaacgataaagtggatgaagaatgaagaagccctggacaccgagtctagcgagcggcttgtgctgctggcaggcgggtctttagagatcagcgacgtaaccgaggatgatgccggcacctatttctgtatagccgacaacggaaatgaaactattgaggcccaagctgaactgactgtccaggctcagcctgaattcctgaaacagccaactaatatttacgctcacgaaagcatggacatcgtgttcgagtgtgaagtaacgggcaagcctaccccaaccgtcaagtgggtcaagaatggggacatggtgatcccatccgattacttcaaaattgtgaaagagcataaccttcaggtcctcggactcgtgaagtcagatgagggtttttatcagtgcatcgcagagaatgacgtgggcaacgcacaagctggggcacaacttatcatcctggaacacgcacctgcgaccaccggccctcttcccagtgctcccagagacgttgtagcaagcctcgtgtctacccgttttattaagctgacgtggcggacccccgcctccgatcctcatggcgacaacctgacatatagtgttttctatacgaaggagggcattgccagggaaagagtagaaaacacctcccaccccggggagatgcaggtcactatccaaaacctgatgcccgcgaccgtctacatctttcgcgtcatggctcaaaataaacatgggagcggagagagttcggcaccactgagagttgaaacccagcccgaagtgcaacttccaggaccggcgcccaaccttagggcttatgccgcaagtcccaccagcataaccgtgacttgggaaacccccgtgtctggaaacggagagattcaaaactataaactctactatatggaaaaggggactgacaaggaacaggacgttgatgtaagttctcacagctataccatcaacggtctgaaaaagtatacagagtacagctttcgggtggttgcctataacaagcatggaccaggagtttctactcccgacgtcgctgtgcggactttgtcagacgtgccatccgccgccccacagaacctatccctcgaagttaggaatagtaagtctatcatgatccattggcaaccacccgcacccgcgacacagaacggacagattacgggctataaaatccgctacagaaaggcatcccgaaagtccgacgtgaccgagacgttggtgtctggcactcagctctctcagctgatcgaaggtctggatcgtggaaccgaatataacttccgggtagcagctctaacaatcaatggtactggtcccgccaccgactggctctccgcagaaacgttcgagtcagatctggatgaaactcgggttccagaggtcccttcatctctgcacgtgcgtcccttggtgacatcaatcgtcgtgtcatggactccacccgagaatcagaatatagttgtgcgtggatacgccattggctatggcatcggctcaccgcatgctcaaaccataaaagttgattataaacaacgttattacacaattgaaaacttagacccctccagccattatgtaatcacattgaaagcttttaataacgtaggagaaggaatcccgctgtatgaaagcgccgttacaaggccccacacagacactagcgaagtggacctcttcgtcatcaatgcaccttacacccccgtccccgaccctacccctatgatgccccccgtgggtgtgcaggcctcaatcctatctcacgacacaatccgaatcacgtgggcagacaatagcctacccaagcatcagaaaatcacagattcccgttactacactgtaagatggaaaacgaacattccagcaaatacaaaatacaaaaatgcaaatgcaaccaccctgagctacctggtaacaggcctcaagccaaatacattgtacgagttttcggtgatggtcactaaaggacggcgctccagcacatggtctatgactgcccatggaactactttcgagctggtgcccaccagccccccgaaggacgtgactgtcgtctctaaagagggcaagcccaagacaattatcgtgaattggcaacctcctagcgaggctaacggtaaaatcacaggatacataatttactactcaaccgatgtgaatgccgaaatccatgactgggtcatcgagcccgttgtaggaaatcgcctgacacaccaaatccaggaacttacgctggacaccccctattattttaaaatccaggccaggaattccaagggcatggggcctatgagcgaagctgtgcagtttaggacacctaaagcttcaggatcaggtggtaagggatccaggttgccagaccttggaagcgattacaaacccccaatgagtggtagcaattcaccccacggctcacccacctcacctttggactcaaatatgctcttggtgataatcgtgtccgtcggggtaatcacgatcgttgtcgtagtgattatagccgtgttttgcaccaggcgaactacctctcatcagaaaaaaaagagggcggcttgcaaaagcgttaatgggtcccataagtataaagggaactcaaaagatgtcaaaccacctgacctttggattcatcatgaaaggctcgagctgaaacccattgacaaatcgcctgatccaaatcccattatgaccgatacccccatccctaggaacagccaggatatcacaccggttgataactccatggacagcaatatccaccagcgcagaaattcctatcgcggccacgaatccgaagactctatgagcaccctggctggcagaagaggcatgcgtccaaagatgatgatgcctttcgactcccagccacctcagcctgtcatctctgcacacccaatccactcgctggacaacccccatcatcactttcactcctcgagccttgcatcacctgcgcggagccatctttaccatccaggttctccgtggccaatcggaactagtatgagccttagcgatcgtgctaactctactgagtctgtacgaaacacaccttccaccgatactatgccagcatcttcttcccagacatgttgcacagatcaccaggatcctgagggcgccaccagcagctcctatcttgcttccagtcaggaagaagattctggtcagagcctcccgactgcacatgtaagaccttctcaccccctcaagtcctttgccgtgcccgccatcccgcctcccggcccacctacgtatgatcccgccctgccatcaactcctctactttctcagcaagcccttaaccaccacatacattcagtgaagacggcctcgattggcacgctcggtcgttcacgacctccaatgccagtggtggtaccctccgcgccggaggtacaggagacaaccaggatgctggaggactcagaaagcagttatgagcccgatgagctgaccaaagaaatggcccacttggagggactgatgaaggatctgaacgcaataacgacggcctag

SEQ ID NO: 196774 - DNA, 4227 bp, synthetic construct
  misc_feature 1..4227: note = Description of Artificial Sequence: Synthetic coding sequence
  source 1..4227: mol_type = other DNA
atggccgccgagcggggcgcccggcggctgctgagcacccccagcttttggctctattgccttctgctgctgggacgcagagcgcctggcgcggctgctgcacggtcgggttccgctccacaaagtcccggcgccagtattagaactttcacacccttttattttttagtggagcctgttgatacactttcagttcgcgggagcagcgtcatcctgaattgtagcgcctattccgagccgagcccgaagatagaatggaagaaggatggtacctttctcaatctggtaagcgacgatcgccgtcaactgctacctgacgggtcactgttcatctccaatgtggttcactcaaagcacaataagcccgacgagggttactaccagtgcgtcgcgaccgtggaatctcttggcaccataatttcccgcacagctaagttgatcgtggccggccttccgcggtttacgagccaacccgagccttcctcggtttacgcaggcaataacgcaattctgaattgcgaggtgaatgccgacctggtacctttcgtgcgatgggaacagaaccgccagccgcttctgctggatgatcgagtgatcaaactaccctccggaatgctggtcatttccaacgccaccgaaggagacggcggactgtacaggtgcgttgtcgaatctggcgggcctcccaagtactccgacgaggttgaactaaaggtgctccccgaccccgaggtgatatcggatctggtcttcctgaaacagccatctccactcgtacgggttatcggccaagacgtcgttttgccttgtgtcgcatccgggcttcctacacctaccatcaagtggatgaagaatgaagaggccttggacactgagtcctctgaacgtctggtgcttctagcagggggatcgctggagatttctgacgtgacggaggacgacgctggtacatatttctgcatagctgataatggaaacgagaccatagaagcccaggccgagctgaccgtgcaggctcagcctgagttcttgaaacagccaacaaatatctatgcacatgagtcgatggacatcgtattcgaatgcgaagtgaccgggaagccaactcccacagtgaagtgggtgaaaaatggcgatatggtgatcccctctgactattttaaaatcgtaaaggaacacaaccttcaggttcttgggctggtgaaatctgatgagggcttttaccagtgtattgccgaaaatgatgtcggcaacgctcaggcaggagcccagcttatcatcctggagcacgcaccggcaactacagggcccttgccaagtgcaccccgcgatgtggtagcaagcctcgtgagcacacgctttattaaattgacctggcgaacccctgccagcgacccccacggggataatcttacatactcagttttctatacgaaggaagggattgcgagagagagggtcgaaaatacatcccaccccggcgaaatgcaggtcaccatacaaaatctgatgcctgccacagtttatatattcagagtgatggctcagaataagcacggatcaggggaatcaagcgcacccctcagagtcgagactcagcccgaagtgcaactccctggaccagcccccaatttgagggcctacgccgccagcccaacgagtataacggtcacctgggagactccagtctccggcaacggagaaatacagaattacaagctgtactacatggaaaaaggcacagataaggaacaagacgtggatgtgagcagtcactcctacactatcaatggcctgaagaagtacaccgaatattcctttagagtagtagcatataataaacacggccccggagtcagcaccccagatgtcgcagtgagaaccctgagtgacgtgccatctgccgctcctcagaacctgtctctcgaagtgcggaacagcaaaagtattatgattcattggcagccacctgcccccgctactcagaatgggcagataaccgggtacaagatacgctataggaaggcgtctagaaaaagtgacgtgacagaaacattggtgagcggaacccagctcagccaactgatagaggggctcgaccgcggcaccgagtacaatttccgggtcgctgcgctgaccatcaatggaacaggtcctgcaactgactggctgtccgctgagaccttcgagtccgacctcgacgagacgcgcgtacctgaggtgccctcctctcttcacgtcaggcccctcgtcacgagcatcgtggtcagctggacccctcctgagaatcaaaatatcgtagtgagaggctacgctatcgggtacggcattgggtcgccccatgcccaaactattaaagtggattataagcagagatactacaccatcgagaacctggatccctcctcccattacgtgatcacgctgaaggcatttaacaatgtcggggaagggattccattgtacgaatctgctgtgacccggccccatactgatacctccgaagtagacctctttgtcattaacgcgccgtatacccctgtgcccgatccaactccgatgatgccaccggtcggcgtgcaagcctctatcttgtcccatgatacaatccggataacctgggccgacaacagtctccctaagcatcagaaaatcaccgactcccggtattacactgtgcgctggaaaactaatattccggccaatacgaaatataaaaacgccaacgcgacaaccctgagttatctcgtgaccgggctgaagcctaataccctttacgagttttctgttatggttaccaaaggccggcgatccagcacttggtctatgaccgcgcacggaacaacctttgagcttgtgccgacttctccacccaaggatgtgactgttgtttccaaagaaggcaagccaaaaacaatcatcgtcaactggcagcctccttcggaagctaacggcaagatcaccggctacattatctactactccactgacgtgaatgccgagatccacgactgggtgatcgaacccgtagtcggaaatcggctaacgcatcagatccaggaattgaccctagataccccttattacttcaaaatacaggccagaaactctaaaggcatgggccccatgagtgaagccgtgcaatttcgtactcccaaggccgactcatcagacaagatgcccaacgaccaggccagcggatcaggcggcaagggatctaggctccccgacctcggaagcgactataagcctccaatgtcggggtcgaattccccccacggctcaccgactagcccactcgactctaacatgctcctggtcattatcgtgagcgtcggagtgatcaccatagttgttgtcgtgatcatcgctgtgttttgtactaggcggactacctcccaccagaagaagaaaagagccgcctgtaaatccgtgaacggtagtcataaatataaaggaaacagtaaggacgtcaaaccgcccgatctgtggatccaccacgagcggctggaattaaagcccatagacaagtcccctgatccaaacccaatcatgacggatactccaataccgcgcaatagccaagatatcacgcctgtggacaattcaatggactccaatattcaccagcggaggaattcctaccggggccacgaaagcgaagattccatgagcaccttggccgggcgacgcggtatgcggcctaagatgatgatgcctttcgattcccagccccctcagcagtcagtacggaacaccccatcaaccgacacgatgccagctagcagttcacagacctgctgtacagaccatcaggatcccgagggcgccacgtcttcctcatacttagcttcatcccaggaagaagatagcggccagtccctgcctaccgcacacgtgcgtccctcacatcctctgaagtcctttgctgtgcctgccattcctccgccgggccctccgacatatgatcccgctctgcccagtacaccattgttgtcacagcaagcactgaaccaccatattcatagcgtgaagactgcaagtattggcaccctcgggagatctcgcccgccgatgcccgtggtagtaccatcagctcctgaggtccaggagactaccagaatgctagaggactcagagagttcctacgagccagacgagctgactaaggaaatggcccacctcgagggattgatgaaagacctgaatgccataacaacggcttag

SEQ ID NO: 196775 - DNA, 1074 bp, synthetic construct
  misc_feature 1..1074: note = Description of Artificial Sequence: Synthetic coding sequence
  source 1..1074: mol_type = other DNA
atgcagagcgtgcagagcaccagcttctgcctgcggaagcagtgcctatgtctcacctttctgctgctgcatctgctcggccaggtcgccgccacacagcggtgtcccccgcaatgtccagggcgttgtccagctacacctccaacatgcgcgccaggggttcgcgctgttctcgatggctgctcatgctgcctagtatgcgcccggcagagaggagagagctgcagcgacctggagccttgcgacgagtccagcggcctgtactgcgatcggagtgccgacccctctaatcaaaccggcatctgcacagcagtggagggagataattgcgtgtttgatggcgtgatctatcgttctggcgaaaagtttcagcccagttgtaagtttcaatgtacttgccgcgacggacagatcgggtgcgtgcccaggtgccagctcgatgttttgctgcccgaacctaactgcccggcgccccgcaaggtggaagtgcccggggaatgctgtgagaaatggatttgcggtccagacgaggaagactctttggggggccttactctggctgcctatcgacctgaagccactcttggcgtcgaagtctctgattcctccgttaattgtatcgagcagaccaccgaatggactgcctgttctaaaagctgcggaatgggctttagtactcgagtgaccaacagaaaccgccagtgtgagatgttgaagcagacacgactctgcatggtaaggccgtgtgaacaggaaccagaacagcctacagataagaagggtaagaaatgcctgcgaacgaagaagtcactgaaggcgatacatctgcagtttaaaaactgtacctcattacatacttataaaccgcgcttctgcggcgtgtgttctgatggacggtgttgtactccacacaacactaagactatccaggccgagttccagtgttctcccggccaaatcgtaaagaagcccgtcatggtgatcggaacctgcacgtgtcatactaattgccctaaaaacaatgaggccttcctgcaggaactagagctcaaaacaactcgcggaaagatgtag

SEQ ID NO: 196776 - DNA, 2202 bp, synthetic construct
  misc_feature 1..2202: note = Description of Artificial Sequence: Synthetic coding sequence
  source 1..2202: mol_type = other DNA
atgctggcccggcggcagcgggaccccctgcaggccctgcggcggagaaaccaagagctgaagcagcaggtggactccctgctgagcgagtctcagctgaaagaagcactggagccgaataaaaggcagcacatctatcaaaggtgtatacagctgaaacaagctatcgacgagaacaagaatgccctgcagaagctgagtaaagccgacgaatccgcacccgtcgcaaactataatcagcggaaggaagaggagcacaccctcctagacaagcttacacagcagctccagggcctcgccgtgacgatctcccgagagaacatcaccgaagttggggcccccacagaggaggaagaggaatccgaatcagaagatagcgaggatagtggtggggaagaagaggacgctgaggaagaagaggaagaaaaggaggagaatgagtctcataagtggtcaactggtgaagagtatattgctgtgggtgacttcacagctcagcaggtgggggatctgaccttcaagaagggagaaatcctgctggttatcgaaaagaaacccgatggctggtggatcgccaaggatgccaaaggcaatgagggtctggtgccacgcacttatctcgagccgtatagcgaagaggaagaaggccaggaaagctccgaagagggcagtgaggaggacgtagaagcagtggatgaaaccgctgacggtgctgaagtaaagcaacgaacagacccacattggtccgccgtacaaaaggctatttctgaggccgggatattctgtctggtcaatcacgttagcttctgctatctaattgtgctgatgcggaataggatggaaactgttgaggatacaaacggtagtgaaactggattccgagcatggaacgtccagagcagaggcaggattttcctcgtatctaaacccgttttgcagcaaattaatactgttgatgttctgaccacaatgggagctattccggcaggcttccgccctagcaccctgtcccaactgctggaggagggaaatcagtttagggctaattattttctgcaacccgagttaatgccttcccagttggccttccgcgacctgatgtgggacgccaccgagggcacaattcgctcgcggccctcccggatatcccttattctgacgctctggtcatgtaagatgattcctctgccggggatgtcaattcaggtactgtcacggcatgtgcggctgtgcctttttgacggcaacaaagtgttgagcaatattcacacagtgagagctacctggcagccgaaaaaacctaagacctggaccttcagccctcaagtgacacgaattctgccctgcctgttggatggggactgctttatccggtctaactcggcaagtccagacctggggatcttgtttgagttggggatcagctacattaggaatagcaccggtgaaagaggcgaactctcatgcggatgggtgtttctcaaattattcgacgcctctggggttcccatccctgccaagacttacgaactcttcctcaatggggggacaccctatgaaaagggcatcgaagtggatccttccattagcaggcgggctcacggcagtgtcttctaccagattatgaccatgcgtaggcagccacagcttttagtgaaattacggtctctgaacagacggtctcgcaacgttctgtctttacttccggaaacattgattggaaacatgtgctcgattcatctgctgattttctatcggcagatcctgggtgatgtgctgctgaaggacagaatgtccttgcagtcgaccgacctgatttcgcaccccatgttagcaacctttcctatgctgctggagcagccggatgtgatggacgccctgcgatcctcatgggctggcaaagagtctactctgaagcggagtgaaaaacgggacaaggagtttctcaaatcgacattcctcctggtgtaccacgattgcgtcctcccgctgctacattctaccagactgcctccctttagatgggctgaggaagagactgagacagcgcgatggaaggtcatcaccgattttctcaaacagaaccaggagaatcagggagctcttcaggcactgctgagcccagacggggtacacgaacctttcgatctctccgagcagacatatgattttctgggagaaatgcggaaaaatgccgtctag

SEQ ID NO: 196777 - DNA, 1845 bp, synthetic construct
  misc_feature 1..1845: note = Description of Artificial Sequence: Synthetic coding sequence
  source 1..1845: mol_type = other DNA
atgctggcccggcggcagcgggaccccctgcaggccctgcggcggcgtaaccaagagctgaagcagcaggtggactccctgctgtcagagagccagttgaaggaagcacttgaacccaataagcgccaacacatctatcagcgcgtgggcgctccaacggaggaggaagaggagagtgagtctgaggacagcgaggattccgggggcgaggaggaggacgcagaagaggaggaggaagaaaaggaggagaatgagtctcacaaatggagcactggagaggaatatattgctgttggcgattttacagcacagcaggtaggagatctgacctttaaaaagggcgaaatcctccttgtcatcgagaaaaagcctgacggttggtggatcgcaaaggatgctaaaggcaacgaggggctcgtccctagaacgtacctggaaccgtactccgaagaggaggagggtcaagagtcaagtgaagaagggtctgaggaggacgttgaggcagtggacgagacggccgatggggccgaggttaagcagcggacggacccccattggagcgccgtacagaaagcaatatcagaaatcaacacagtcgatgtcctgactacaatgggagcaatccccgccggattcagacccagtactttgtcccagctcctcgaggaaggaaatcaattccgggccaactacttcctacagcctgagctgatgccttcccagctggcatttcgagacctgatgtgggatgcaaccgaaggcaccattcggtcacggccatcacggatttccctgatcttgacactgtggagctgcaaaatgatcccacttcctggcatgtccatccaggtcctgtcacgccatgtgaggttgtgcctatttgacgggaataaagtgctttccaacatccatacagtcagagctacttggcagcctaagaaacctaagacatggacgttctcccctcaggtgacccgtatcctcccttgcctgctagacggtgattgttttatcagaagtaactctgctagtcctgatttgggaatcctgtttgaactcggaatctcatacattagaaactctacaggggagcgaggcgaattgagttgcggctgggtgttcctgaagctcttcgatgcctccggcgtgcctatccctgctaaaacctacgagctgtttttgaatggaggaacaccctacgaaaaaggaatagaggtagatccatctatatctcgtagggctcacggtagcgtcttttatcaaattatgactatgcgcaggcagccacaattactagtgaagttacggagtctcaatagaaggtccaggaacgtactgtcattgctgcccgaaactctgatagggaacatgtgcagtattcaccttctgatattttatcgtcaaattttaggcgacgtgctactgaaagatcggatgagtcttcaatcgactgatctcataagccaccctatgctggccactttccccatgctcttggaacaaccggacgtcatggacgcactgcgatctagttgggccgggaaagaaagtactctgaaaagatcagagaagcgtgataaagagtttctaaagagtacctttctcctagtctaccatgactgtgtcctccccctccttcatagcacaagactcccgcctttccgctgggccgaagaggaaacagagacagctagatggaaagtgattaccgactttctgaagcaaaaccaggaaaatcagggagctctgcaagccctactatcccccgatggcgtgcacgaaccttttgatttgtccgagcagacctatgatttcctcggcgagatgcggaaaaatgccgtgtag

SEQ ID NO: 196778 - DNA, 2199 bp, synthetic construct
  misc_feature 1..2199: note = Description of Artificial Sequence: Synthetic coding sequence
  source 1..2199: mol_type = other DNA
atgctggcccggcggcagcgggaccccctgcaggccctgcggcggaggaaccaggaacttaaacagcaggtcgacagtctgttgagcgagtctcagctaaaagaggcccttgaaccaaataagcgccagcacatttatcagagatgtattcaattaaagcaggctatagacgagaacaaaaatgctctgcagaaactgtccaaggctgatgaatcagctcctgtcgctaactacaatcaacgcaaggaggaggaacataccctgctcgataaactgactcaacagcttcagggccttgccgtgacaatttctcgcgagaatatcaccgaggttggtgcacctaccgaggaggaggaagagagcgagagtgaggactcagaggacagcggcggggaagaagaggacgcggaagaagaggaggaggagaaagaagagaatgagtcacataaatggtccaccggtgaggagtacatcgccgtgggcgattttaccgcccaacaggttggagatctcacctttaagaaaggcgagatactgttggttatcgaaaagaagcctgatgggtggtggattgcaaaagatgccaaggggaacgaggggctggtccccaggacatacctcgagccttattctgaggaggaggagggccaggaatcgtctgaggagggctctgaagaggacgtggaggcagtggatgagaccgccgatggggcggaagtcaagcagcggacagatccacattggagcgccgtgcagaaagcgatatcagaagccggcattttctgcctcgtgaatcacgtatccttctgctatctgatagtgttaatgagaaatcgaatggagaccgttgaggatactaacggtagcgagaccggctttcgggcctggaacgttcagagtcgcggaaggatatttttagtgagcaagcccgtgctacagataaataccgtggatgtgctcacaacaatgggggcaattcctgctggtttcagaccatcaacattgagccaactgctggaggagggtaatcagtttagagcaaactacttcctacaacctgagctgatgccatctcagctcgcttttcgggatttaatgtgggatgctactgaagggaccatccgatcgcggcctagtcgtatctccttgatccttactctctggtcctgcaagatgatccccctgcccggcatgagcatacaggtgctgagcagacatgtccgattatgtttattcgacggtaataaggtactctccaacatccatacagtgagggctacctggcagcccaagaagcccaagacatggaccttctctccgcaggtgacacgcatactaccgtgtctgctagacggcgactgctttattaggtctaactcagccagcccagacctgggcatcctctttgaactaggcatctcctatatccgaaattcaaccggggagcgcggggagttgtcatgtggctgggtgttcctgaaactctttgatgcaagcggtgttcccatacccgccaagacctatgaactcttcctaaatgggggaactccttatgaaaaagggatagaggtcgatccaagcattagtcgccgcgctcacgggtcagtgttttaccagatcatgaccatgagacgccagcctcaacttctggtgaagctgcgaagcctgaatagaaggtcgaggaatgtcctttctttgttgccggagaccctgatcggaaacatgtgcagcatccatctgctcattttttatagacaaatcttgggcgatgtgctcctgaaggatagaatgagcctccagtcgactgatttgatttcgcatcctatgctcgctacctttcccatgctgctagaacaaccagacgtgatggacgctctgaggagttcttgggccggcaaggagagtacacttaaacggtctgagaagagagataaggaattccttaagtccacttttttgcttgtatatcacgattgtgtgcttccactattacacagtacaaggcttcccccttttcggtgggcagaggaggagaccgaaaccgctaggtggaaagtgatcacagactttctgaagcagaatcaagaaaaccagggcgccctgcaagcgcttctatcccccgacggtgtccacgaaccctttgacctttccgaacaaacctacgattttctcggagaaatgagaaagaacgccgtctag

SEQ ID NO: 196779 - DNA, 2034 bp, synthetic construct
  misc_feature 1..2034: note = Description of Artificial Sequence: Synthetic coding sequence
  source 1..2034: mol_type = other DNA
atgctggcccggcggcagcgggaccccctgcaggccctgcggcggcggaatcaggagcttaaacagcaggtagacagtcttctgtccgaatcgcagctcaaggaagctcttgaacctaacaagcgccagcacatctaccagaggtgtatccaactgaagcaggccatcgatgaaaataagaacgccctccagaagcttagtaaggcagacgagtccgctccggtggctaactataaccagcgcaaggaagaagagcacaccctgctcgacaagctaacacagcagctccaaggcctggccgttaccatatcacgggagaatataacagaagtgggggcgcctacagaggaggaggaggagtccgagagcgaggattcggaggacagcggtggtgaagaggaagatgcagaggaagaggaagaagaaaaggaagagaacgagtcccacaagtggtcaaccggggaggagtacattgctgtgggtgacttcaccgcccaacaggtaggcgatctgaccttcaagaaaggcgagattctgctggttattgaaaagaaaccagatggatggtggatcgcaaaggatgccaagggtaacgagggcttggttccccggacgtatctggagccttactctgaggaagaggaggggcaggagtcatcggaagagggatccgaagaagacgtggaggccgtggatgaaaccgccgacggagctgaggtgaaacagagaacagatcctcattggtcagctgtccagaaggcaattagcgagcagattaataccgtggacgtgctcacgacgatgggagccattccagctgggtttcgccccagcactctgagccagctccttgaagaagggaaccagtttagagcgaattattttctacaaccagagctaatgccaagtcaattagcatttagggatctgatgtgggatgctacagagggaacaattcgcagtcgaccatctagaatcagcctaattctcaccctgtggtcttgcaagatgattccgctgccaggaatgtccattcaggtgctatcacgtcatgttagactttgcctattcgatggtaataaagtgcttagtaacatccacacagtgagggcaacgtggcagcctaaaaaacccaaaacttggacgtttagccctcaggtaactaggattctcccttgtctgctggatggggattgttttatccggtctaactccgctagcccagacctcgggatactctttgagctgggtatctcctacatcaggaactcaaccggtgaacggggggagcttagctgtggatgggtctttctgaaactattcgacgccagtggagtgcctattccagccaaaacttacgagctttttctgaacgggggtaccccttacgagaaggggattgaggtggaccccagcatttcgcgcagggcccatggttccgtgttttaccaaattatgacaatgaggcgccaaccccaattactggtgaagctccgatccttaaacaggcgatccagaaacgtgctttcactcttgccagagactttgatagggaacatgtgcagtatacaccttctgatattctacagacaaatcctgggcgacgtgcttctgaaggacagaatgtcgctgcagtccactgatcttattagtcaccctatgctcgctacctttccaatgctgcttgagcagccagatgtgatggacgctttgaggagtagttgggccggcaaagaaagcacattaaagagatctgagaagagagacaaagaatttctgaaaagcacatttctgctggtataccatgattgcgttttacccctgttgcatagcacccgtctgccaccgttcagatgggctgaggaggaaaccgagactgcaaggtggaaggtaatcactgactttttgaagcagaatcaggaaaatcagggagcccttcaagccctcctttcgcctgatggcgtccatgagcccttcgatttgtctgaacagacctatgacttcttaggagagatgcgtaagaacgccgtgtag

SEQ ID NO: 196780 - DNA, 2115 bp, synthetic construct
  misc_feature 1..2115: note = Description of Artificial Sequence: Synthetic coding sequence
  source 1..2115: mol_type = other DNA
atgggcaccgccagcagcctggtgagccccgccggcggcgaggtgattgaggacacttatggtgcaggtggtggagaggcctgcgagatccccgtagaagtgaagcctaaggccaggcttttgagaaattcatttaggcgaggtgccggagccgcggccggggccgggcccggctccctaccccgcggggtcggggcaggcgggttgctcggcgcttcctttaagtcaactggctcctccgttccggagctggagtacgcagcggcagagtacgagaggctccgcaaagagtatgagattttcagggtctccaaaaatcaagaacttttatctatgggaaggagggaagccaaactagacaccgaaaacaagcgtctgagggcggagctgcaagcccttcaaaagacataccagaagattctgcgcgagaaggaatcagccctggaggccaaatatcaggctatggagagggctgcgaccttcgaacatgatagggacaaagtgaagcgacaattcaagatattccgagaaaccaaggagaacgaaatacaggatcttctccgggctaaacgcgaattggagtccaaactccaacgccttcaggcacaggggatacaggtttttgatccgggcgaatccgatagcgacgacaactgcaccgatgtgacagccgccggtacacagtgcgagtactggaccgggggcgcattgggttccgagccctccatcggttccatgatccaacttcaacaaagttttcgggggccagaattcgcgcactcttcgatcgatgtggaaggcccttttgccaacgtgaatcgcgacgattgggatattgcagtggctagccttcttcaggttactcctttatttagccattccctctggagcaataccgtgagatgttacctgatctacacggacgagacgcaacccgaaatggacctttttctcaaagattattcccccaaactgaagcggatgtgcgagacaatgggatacttttttcacgctgtgtacttccccatagatgttgagaaccaatacctgactgtgaggaagtgggagatcgagaaatctagccttgtgatcctgttcatacatctgacattaccttcccttctgctggaagactgcgaggaggcttttctcaagaatccggagggtaaacccagactgattttccacaggttggaggatgggaaagtgtcctctgactctgtgcagcagttgattgatcaggtatccaacctcaacaagacaagcaaggcaaagattatcgatcattccggcgacccggccgagggagtgtacaagacctatatctgcgtagaaaaaatcatcaagcaggacatcctcggattcgaaaatactgaccttgagactaaggacctcggttcagaggatagtatacctgaggaggatgactttggcgacgtgctgtgggatatccatgatgagcaggaacagatggagacttttcagcaggcatcaaacagtgcgcatgagttgggctttgaaaaatactatcagaggctgaatgatcttgttgctgcccctgcacctataccccctcttctggtgtccggcggacccggcagcggaaaaagcctgctgctgtccaagtggatccaattacagcagaagaacagcccgaacactctgatactgtctcattttgtggggcgtcctatgtctaccagctcagagagctcactgattatcaaaagattaaccctgaaactgatgcagcattcatggagcgttagcgccctaactctggatcccgcgaagttactcgaggagtttccacgatggctagagaaactcagcgccaggcaccagggtagtatcatcatagtcatcgattctatcgatcaggttcaacaggtggaaaaacatatgaaatggctgattgatccactccctgtgaacgtccgcgtgatcgtgtctgtgaacgtggagacgtgccctcctgcatggcgactgtggccgactttacatcttgatcccctctcaccgaaagatgccaagtctatcatcatcgccgagtgccattcggtggatatcaaactctccaaagagcagtgctgggaaagtcggcagttccgatag

SEQ ID NO: 196781 - DNA, 3993 bp, synthetic construct
  misc_feature 1..3993: note = Description of Artificial Sequence: Synthetic coding sequence
  source 1..3993: mol_type = other DNA
atgggcaccgccagcagcctggtgagccccgccggcggcgaggtgatcgaggatacctacggggctgggggcggcgaagcgtgcgaaatacccgtggaagtgaagcccaaggccaggctgctgagaaattcgttcaggcgcggggccggagcagcggcaggggccggacctggcagtcttccgcgtggcgtcggtgccgggggcctgcttggtgccagctttaagagtacggggtccagtgtccctgaactagagtacgcagctgccgaatacgagcggctcagaaaggaatacgaaatttttagagtgagcaaaaatcaagaacttttatccatgggacggagggaggccaagcttgataccgaaaacaaacggctgcgagccgagctgcaggcactgcaaaagacttatcagaaaatacttcgtgagaaagagtccgcactggaggctaaatatcaggcaatggagcgcgccgcgacattcgagcacgaccgggacaaggttaagagacagtttaagatatttcgagagaccaaggagaacgaaatacaggacctgctcagggccaaaagagaactagaatccaagctgcagaggttgcaggcccagggtattcaggtctttgaccccggagaaagcgactcagatgataattgtactgacgtgactgcggctggcacccaatgtgagtattggactggaggggccctcgggtcggagcccagcattggctcgatgattcagctccagcagtcttttagaggacccgagttcgcccactcttccatcgatgtagaggggcccttcgctaacgtaaaccgtgacgactgggatattgctgttgcatctttgctacaggtaaccccactgttctctcattctctgtggtctaataccgtgagatgctacctgatttacacagatgagacacaaccagagatggacctgttcctgaaagattacagtcctaagctcaagagaatgtgcgaaacgatgggctattttttccatgcggtttactttccaatcgacgtggagaatcagtatctcactgtgcgcaaatgggagatcgagaagtctagcttagtaatcctcttcattcacctgaccctgcctagccttctgctggaggattgcgaggaagcgtttctcaaaaatcccgagggtaaaccaagactgattttccaccgcttagaggacgggaaagtgtccagcgatagcgtccagcagcttattgatcaggtgagcaacctgaacaagacctcaaaagccaagatcatcgatcattcaggcgatcccgcggagggtgtgtataagacctacatttgtgtagagaagattatcaaacaggacattctggggtttgagaacacagaccttgagacaaaagacctagggtcggaggacagtattcctgaggaagatgatttcggagatgtgttgtgggatatacacgatgaacaagagcagatggaaacattccagcaagcctctaactctgcacacgaactgggattcgagaaatattaccaacgcctgaacgacctggttgcagcacctgctcccattccacctttgcttgtgagtggtggccccggtagtggaaagtcactgctgctgtccaagtggatccaattgcaacagaagaacagcccaaacactctgattctctcacattttgtgggccggcccatgtcaacttcctctgagtctagcctgattatcaaacgtctcaccctgaaacttatgcaacattcttggtctgtcagcgctctgacccttgaccccgcgaagcttctagaggagttcccacgctggctcgaaaagctgtcagcccgtcaccagggttcgatcattatcgtgatagattctatcgatcaggttcagcaggtcgagaaacacatgaaatggctgatcgatcctcttcccgtcaatgtgagagtgatcgtctctgtaaacgtggagacttgtccccccgcctggcggctgtggcctactctgcacctcgacccgctttctcctaaagatgcaaagtctatcattattgccgaatgtcattcagtggatatcaaactttccaaggagcaagaaaaaaaactagaaagacactgtcgaagcgctacgacttgcaacgccttgtatgtcaccctcttcggcaagatgattgctcgggccggtagagcaggcaacctggataagattctccaccagtgtttccagtgccaggataccctgtcattgtaccggcttgtacttcacagtatacgtgagagcatggccaacgacgtcgacaaagagctgatgaagcagatcctgtgcctcgtcaacgtcagtcataatggagtgtctgagagtgaattgatggagctctatccggaaatgtcctggacatttctcacttcacttatccactctctatataagatgtgtctgctgacctatggatgcgggctgctcaggttccagcaccttcaggcctgggaaaccgtccgcctggagtaccttgagggccccaccgtgacatcatcctatcggcagaagctaattaattacttcactctccagctgagccaggatcgcgtgacatggaggagcgccgacgagttaccttggcttttccaacaacagggaagcaaacagaagctacacgactgtctgttaaatctttttgtatcccagaacttgtataagcgcgggcactttgccgagctactgagctactggcagttcgtaggcaaggataaatccgctatggcaacagagtacttcgattcactcaagcagtacgagaaaaactgcgaaggggaggacaatatgtcttgcttggccgatctgtacgagacgcttgggcgctttctgaaagacctcggtcttctcagccaagctattgtcccactccagcgaagcctggagattcgggagacagccctcgaccccgatcacccacgtgtggctcagtccttacaccagctagccagtgtgtacgtgcagtggaaaaaattcggtaatgccgaacagctctacaagcaggcactggaaatttcggagaacgcctatggtgctgatcatccttacaccgcccgcgaactcgaagccctggcgacgctctaccaaaaacaaaataaatacgaacaggccgaacattttagaaagaagagctttaaaattcatcagaaagcaatcaaaaagaaagggaacctctatgggttcgcattgttgcggcgccgagctctgcagctggaagagctgaccctgggcaaggacacccccgacaacgccagaacactgaatgagctcggtgtcctgtactacctccagaataacctagagaccgccgatcagtttctgaagaggtcattagaaatgagagagcgggtcctgggacccgaccaccccgattgcgcacagagcctgaataacctggcggccctctgcaacgaaaagaagcaatacgacaaggctgaggaactgtatgaaagagctctggatattcgaaggcgagcactggccccagaccacccttccttggcatacacagttaagcatctggccatcctgtacaaaaagatgggtaagcttgataaggccgtgcccctttatgagctggctgtcgaaatcagacagaaaagcttcggacccaagcaccctagcgttgccacagcattggttaacttggccgtattgtactctcaaatgaagaagcacgtagaggctctgcctctgtatgagcgtgcccttaaaatctacgaggatagtctcggccgcatgcaccccagagttggggagacattgaagaacctggcggtcctgagttacgaaggtggagatttcgaaaaggctgcggagttatacaaaagagctatggagataaaggaggcagagaccagcctgctgggaggtaaggcgcctagccggcactcatcaagcggagatacattcagtttaaaaactgctcactcccccaacgtttttttgcagcagggccagcggtag

SEQ ID NO: 196782 - DNA, 720 bp, synthetic construct
  misc_feature 1..720: note = Description of Artificial Sequence: Synthetic coding sequence
  source 1..720: mol_type = other DNA
atgggcaccgccagcagcctggtgagccccgccggcggcgaggtgattgaagacacatatggtgccggcgggggagaggcttgcgagatccctgtggaggtgaagcctaaagctcgtttgctgagaaattcttttcgaaggggagcaggcgccgccgctggcgccgggcccgggagtttgccccgcggggtgggcgccggtggattgctaggcgcatcttttaagagcactgggtccagtgtcccggagctggagtacgccgccgccgagtatgaaaggttgagaaaggagtacgagatctttagggtgtcaaaaaaccaggagctcctttctatggggcgcagagaagccaaattagataccgaaaacaagagactgcgggctgaattgcaggccctacagaaaacttaccaaaagattctgcgtgagaaggagagtgcattggaagccaagtaccaagctatggagcgcgcggctacctttgagcatgaccgggacaaagtgaagaggcagtttaaaatctttcgtgagactaaggagaatgagatccaggatcttctgcgcgcaaagcgagagctggaatcaaagttacaacgcctgcaagcccagggtatacaagtttttgacccaggcgaatcggactctgacgacaattgtaccgatgttacggtgtccctggaatctgaccagcaccctggaatcttcattgctaacttctag

SEQ ID NO: 196783 - DNA, 453 bp, synthetic construct
  misc_feature 1..453: note = Description of Artificial Sequence: Synthetic coding sequence
  source 1..453: mol_type = other DNA
atgggcaccgccagcagcctggtgagccccgccggcggcgaggtgattgaagatacctatggcgctgggggaggtgaagcttgtgaaattccggtggaagtaaagcccaaagcccgtttgctgcgcaattctttccgtagaggggccggcgcagccgctggcgccggtcccgggtcactgcctcggggagttggcgctggcggactcttgggagcttctttcaagagcacgggaagctcagttccagagctggagtacgctgctgccgagtacgagagacttaggaaagaatacgaaatctttcgggtgtctaagaatcaagaattattatctatggggcggcgagaggcgaagctcgataccgaaaataaaaggctcagagctgagttgcaagggctggctgccgtggcccgatcgcgcctgacagcaacatggaacagttgggcacagtag

SEQ ID NO: 196784 - DNA, 1914 bp, synthetic construct
  misc_feature 1..1914: note = Description of Artificial Sequence: Synthetic coding sequence
  source 1..1914: mol_type = other DNA
atcatcgccaacgccggccgggccggcaacctggacaagatcctgcatcaatgcttccagtgccaggacacactctcgttgtacagattggttctgcactctatcagggaaagcatggcaaacgatgtcgataaggagctgatgaagcaaattctgtgtctagtgaacgtgtcacacaacggagtctcagagagtgaattgatggaattatacccagaaatgtcttggacctttctcacttcccttatacatagcctgtataaaatgtgtctgctaacatacggatgcggtcttctgcgcttccagcatctgcaggcatgggagactgtccgcctcgagtatctggaaggacccactgtgacctcgtcctataggcagaagttaatcaactactttaccctgcagctgtcccaggatagagtgacctggaggtcagctgacgagcttccttggctcttccagcagcagggaagtaagcagaagctgcatgattgcctcctcaacctgtttgtgagccaaaacctgtataaacgcggacatttcgcggagctgctctcttactggcaatttgtgggcaaagataagagcgccatggcaactgagtatttcgattctctgaaacaatatgaaaagaactgtgagggtgaggataatatgtcctgtcttgccgacctgtacgagaccctgggacggtttctgaaggacctgggactgctgtctcaggctatagtcccactgcaaagatccttggagattagagaaaccgcgttagacccagaccatccccgggtggcccaatccttacaccagctcgccagtgtgtatgtgcagtggaaaaagttcggtaatgccgaacaactgtataaacaagcgctggaaatttctgaaaacgcttacggggcggatcacccttataccgcaagagagctggaagctctggcaacattgtaccagaagcagaataaatatgaacaggcggagcatttccgaaagaagtctttcaagatccaccaaaaggcaatcaagaagaaaggtaatctgtatggattcgctttacttaggcgcagagccttgcaactggaagagcttacgctggggaaagacaccccggacaacgcaagaacacttaacgagctgggtgtgctttactacctccagaacaatctggaaactgccgaccagttccttaagagatctctggagatgagggagcgcgtgcttggtcctgatcatcctgactgcgctcagtccctgaataaccttgcagcgctctgtaacgagaaaaaacaatacgataaggctgaggaactgtatgagagagctttagacatccggcgccgggcacttgccccagatcacccttcattagcatatactgtaaaacacttggctatactctacaaaaaaatgggcaagctggacaaggctgtgccattatacgaactggcagtggaaatcagacaaaagtccttcgggcccaagcacccctccgtcgccacagccctggtaaaccttgctgtgctgtactcccaaatgaaaaagcacgtagaggctctccccttgtacgaacgggcgctcaagatctacgaggacagtctgggacggatgcaccccagagttggggaaacactgaaaaacctcgccgttctgagctatgagggaggcgatttcgagaaagcagccgagctctataagcgggccatggagattaaggaagccgagaccagcctgcttgggggaaaagcccccagccggcactcctcatctggagacacgtttagtttgaagacagcccacagccctaacgtattcctccaacaggggcagcggaaggttcagagcaacctgttgtcacctgagggactgtccaacatttgcgcgcaagagaaaaccacgagatttacctcctcctag

SEQ ID NO: 196785 - DNA, 1236 bp, synthetic construct
  misc_feature 1..1236: note = Description of Artificial Sequence: Synthetic coding sequence
  source 1..1236: mol_type = other DNA
atgagctgcctggccgacctgtacgagaccctgggccggttcctgaaagatctgggtttgctgagccaggctatcgttcctctgcagcggagcctggagatacgcgagactgcccttgatcccgatcatccgcgagtggcccagagtcttcatcagttggcctcagtgtatgtgcagtggaagaagttcggaaatgcagagcagctctacaagcaggctctcgagatttccgagaacgcttatggcgccgaccatccctacacagcacgcgaattggaggccctggccacgttatatcagaagcagaacaagtatgaacaggcggagcactttaggaagaaatcatttaaaatccaccaaaaagcgatcaaaaagaaagggaacctttacggttttgctctcttacggagacgggctctacagctcgaggagctgactctcgggaaggacaccccagataacgcccgaacactgaatgaactaggggttttgtactatctgcagaataatctcgagacggcggatcaattcctgaagagatccttggagatgcgcgagagagtgctggggcctgatcaccccgattgcgcccaatccctgaacaacttagcggccctgtgcaacgaaaagaaacagtacgacaaggccgaagaactgtacgagcgcgccctggacataagacgaagggcactggcaccggatcatcccagtctggcctatacagttaaacacctcgcaatcttgtataaaaaaatgggaaagctggacaaagcggtgccactgtacgaattagctgttgagataagacagaagagttttggccccaaacatcctagcgtggcgactgcacttgttaacctggctgtcttatattcccagatgaagaagcatgtggaggcgttgcccctgtacgagagggcactcaaaatctacgaagactcactggggaggatgcacccccgggtgggagagactctgaagaatctagcagtgttaagttacgaaggaggggattttgagaaggcagcagaactgtataagagggccatggagataaaggaagctgaaacatcactcctgggaggcaaagctccctctagacactcatcctccggcgatactttcagcctaaaaacagcccactctcccaatgtcttcctccaacaaggccaaagggctgggaaatctaaccctacattctacttgcagaaaggtttccagacttacgttctgtag

SEQ ID NO: 196786 - DNA, 4281 bp, synthetic construct
  misc_feature 1..4281: note = Description of Artificial Sequence: Synthetic coding sequence
  source 1..4281: mol_type = other DNA
atgaacgactggcaccggatcttcacccagaacgtgctggtgcccccccacccacaacgagctaggcagccctggaaagaatcgacagccttccaatgtgtgctgaaatggctggatgggcctgttatccgccaaggggttctggaggtgctttcggaagtcgagtgccatctcagggttagtttctttgacgtcacatacagacacttttttggtcggacttggaagaccacagtgaaacccacaaagcgccccccctcaagaatcgtgtttaacgagccactctattttcatacttctctgaaccaccctcacatcgtcgctgtggttgaagtcgtggccgaagggaagaagcgggacggctccctacagaccctctcctgcgggtttgggatactgcgaatattcagcaatcagccagacagcccaatctcggcttcacaggataaaagattgagattgtatcacggtaccccccgcgccctgctccaccctcttctgcaggaccctgcagaacagaacaggcacatgacacttatagaaaactgctctttgcagtatacattgaagccacaccccgccctggagccggcatttcacctgcttccggaaaacctgttagtgagtgggctacagcagatccctggactattgccagcacatggagagagtggtgatgccctccgcaaacctagactgcagaaaccaataaccgggcatttagatgacctgttctttacattatatccaagcttggaaaagttcgaagaggaactcttggagcttcacgttcaggatcacttccaggaaggctgtggacccctcgatggaggggcactggagatcttggaaaggcgcctgagggtgggggtgcacaacgggctcgggtttgtgcagaggcctcaggtcgtggtgctcgtgcccgaaatggatgtcgcactgacaaggagtgcctccttttcccgaaaggtcgtgagtagctcaaagacctcttccggctctcaggcactggtcctgaggtctcgtctcaggctgcccgagatggtgggacatccggcctttgctgtcatctttcagctcgagtatgttttttccagtccagccggtgttgatgggaatgccgcaagtgtgacatcactgtccaacttggcctgtatgcacatggtgcgttgggccgtctggaatcctttgcttgaagcagatagtgggcgggtcacacttccactgcagggggggatccagcccaacccatctcactgcctcgtctacaaggtcccttccgcctccatgtcttccgaggaggtcaagcaggtggagtcaggcaccctccgcttccagtttagtctcggatctgaggaacatctagacgcaccaactgagcccgtctctggacctaaggtggagagacggccctcaagaaaaccgccaacctctccttcttctccaccagctccagtgccccgcgtactcgctgccccgcagaactcccccgtgggaccagggctgtccatctcccaattagcagcatcaccaagaagcccaacgcagcattgcttagcaagaccgaccagtcaattgcctcatggatctcaggcttctcctgcacaggcacaggagttccccctcgaagctggaattagtcatctggaggcggatctgagccagacctcactcgtactagagacaagcattgcagagcagctgcaggagttaccatttaccccgcttcatgctcccatagtcgtgggaacacagactcgatcctcggccggccagccttcacgcgcctctatggtgttgttacaatcctctggcttcccagaaattctggacgcaaacaaacagcccgcagaggccgtttccgcgacggagccagtgacattcaatcctcagaaggaggaaagtgattgcctgcaaagcaacgaaatggtcctgcagtttctggcttttagtcgggtcgcacaggattgcagaggtacaagttggccaaagacggtatacttcaccttccagttctacaggttccctccggctacaacccccagattgcagctggtgcagctcgacgaagctggtcagccaagctctggcgccctgacacatattctcgtgcccgtgtctcgcgacggcacattcgacgcagggtcaccaggcttccaactgcgttatatggttggtccggggttccttaagccaggggagcgtaggtgctttgccagatacctggccgttcagactcttcaaatcgacgtgtgggatggtgacagcctgcttttgatcggtagtgccgcagtacagatgaaacacctcctgcgtcaaggaagaccggccgtgcaggcttcacatgagctggaggtggtggccacagaatacgagcaggacaacatggtggtcagcggagatatgctgggctttgggcgggtgaagcccattggcgtccacagtgtggttaagggccgtttacacctgaccctggctaacgtggggcatccgtgtgaacagaaggtacgcggctgttcaacattgccaccctctcgaagccgagtgattagtaacgacggggcttcgcgcttttctggagggtctctgctgacaaccggttcttctaggcggaaacatgtcgtgcaggctcagaaactagcagacgtcgattctgaactggctgctatgttgctcacacacgcaagacaggggaagggcccccaggacgtttcacgggagagcgatgccacacgaaggcggaaactggagcgcatgcgttccgttaggttacaagaagcaggcggagacctcggcaggcgtggtacctccgtgctcgcgcagcagtccgtgcgtacacagcatctcagggatctgcaggtgattgctgcctacagagaacgaacgaaggctgaaagcatcgcctccttgctgagcctggctatcacaaccgagcatactctgcacgctaccctgggtgtagccgagttttttgagtttgttctgaaaaaccctcacaatacgcaacatacagtgaccgtcgagattgacaatccggagctatccgtgattgtagatagtcaggaatggcgcgactttaaaggtgcggccggcctgcatacccctgtggaagaggacatgttccatcttcggggttccttggctccgcagctttacctgcgcccacatgaaacagcacacgtacctttcaagtttcagtcatttagtgccgggcaacttgctatggttcaagctagccccggcctgtccaacgagaagggtatggacgcagtttcaccgtggaaatcttcggccgtcccaacgaaacacgccaaagttctgttccgggcatctgggggaaaaccaattgctgttctatgtttaaccgttgaactgcagccccacgtcgtggatcaggtgttcagattctatcaccctgaactgtcatttctaaagaaagccatcagactgcctccatggcatacatttccaggggccccagtgggaatgcttggtgaagatcctcctgtccatgtgcggtgtagcgaccccaatgttatctgtgaaacgcaaaacgtggggcctggtgaaccccgagacatattcctgaaggtcgcctctgggcccagtcctgaaattaaggatttttttgttatcatctattccgacagatggcttgcaacaccaactcagacttggcaggtgtacctacattcactccagagagtagacgtgagctgcgtggctggccagttgactaggctgtccctcgttctaagggggacgcagaccgtgaggaaagtgagggccttcacaagccatccgcaggaactaaagacagatccgaagggcgtgtttgtgctgcctcctcggggcgtgcaggacctgcatgttggcgtgagacccctgcgggccggcagtcgctttgtacacctgaacttggtggatgtcgattgtcatcagctcgtggccagttggctcgtgtgcctgtgctgccggcagccactaatcagcaaagcatttgaaatcatgcttgccgctggcgaaggtaagggtgtgaataagagaattacttacactaatccctatccttcacggcggacgtttcacctgcattcagaccaccctgagctccttagatttcgagaggattcattccaggtcggtggcggagagacatacaccatcggcctgcagttcgcaccatcacagcgcgtaggcgaagaggaaattctcatctacatcaacgatcatgaggataaaaacgaagaagctttctgtgttaaggtgatttatcagtag

SEQ ID NO: 196787 - DNA, 546 bp, synthetic construct
  misc_feature 1..546: note = Description of Artificial Sequence: Synthetic coding sequence
  source 1..546: mol_type = other DNA
atggtgctgctgcagagcagcggcttccccgagatcctggacgccaataaacaacccgccgaggccgtgagtgccacagagccggtgacttttaaccctcagaaggaggagtctgactgtctgcaaagtaatgagatggtcctgcaatttttggccttctccagagtggcacaggattgtcgcggaacctcttggccaaagaccgtgtattttacattccagttctatcgtttcccgccagccaccacacctagactgcaactcgtccaactggacgaggctggccagccatcaagtggggcgttgacccacatcctggttcctgtgtcccgcgacggcactttcgatgcggggagccctggctttcaactgcggtacatggttggcccgggctttttaaagccaggagagcgccgatgttttgcgcgctacttggcagtgcagacgctccagatagatgtgtgggacggagattctcttctgctgatcggttccgcagccgtgcaaatgaaggaaacgtcacacatcttttctgtatcacagtag

SEQ ID NO: 196788 - DNA, 3606 bp, synthetic construct
  misc_feature 1..3606: note = Description of Artificial Sequence: Synthetic coding sequence
  source 1..3606: mol_type = other DNA
atggccctgggcaccaccctgcgggccagcctgctgctgctgggccttctgacggaaggtcttgctcaattagccattcctgccagtgtcccaagaggcttctgggctctgccggagaacctgactgtcgttgaaggcgcttcagtggaacttcggtgtggcgtttcgacacctggatctgccgtgcaatgggctaaagacgggctgctgctgggcccagaccccaggatcccaggctttccgcggtacagattggagggggatcctgcacggggcgagtttcatttgcacatagaagcctgtgacttgagcgatgatgctgagtacgagtgtcaagttggacgtagcgagatgggacccgagctggtatccccaagggtgatcctcagtattcttgttcccccgaaactgctgctgctgacacctgaggctggcaccatggtaacatgggtggctggacaggagtatgtggtgaactgtgtttcgggcgatgcaaaacccgcccctgacattactattcttctctcaggtcagacaatcagtgatatcagcgccaatgtcaacgaaggtagccagcaaaagttgttcacagtggaggcaacggctagagtgactcccaggtcaagcgacaaccggcagctgttggtatgcgaagccagcagccccgcgctcgaagctcctattaaagcatcctttacagtgaacgtgctgtttcctccagggcctcccgtaatcgagtggcctggactcgacgaggggcacgtaagggcaggccagtctctggaactcccgtgtgttgcacgaggtggaaaccctctcgccacactccagtggttgaagaacggacagcccgtgagcaccgcctgggggacagagcatacccaagcagtggcaagaagcgtcctggtgatgaccgtccgtcccgaggatcacggagcacagctctcctgcgaggctcacaatagcgttagtgcgggaacgcaggaacatggaatcacactgcaggtcaccttccccccatctgctattatcatactgggcagtgccagtcaaacggagaacaagaatgtgactttgtcatgcgtctcgaagtcttctcgcccacgcgtgcttctccgatggtggttgggatggagacagctgctgcctatggaggagaccgtaatggatgggttacacggtggccatatctccatgagcaatctcacctttctagcccggagagaggacaacgggctgaccctgacgtgtgaagcgttttccgaagctttcaccaaggagacctttaagaagagccttattctcaatgtcaaatacccagcccagaagctgtggatcgagggtccaccagaagggcagaaattgagagccggcaccagagtacgacttgtatgcctggccatcggtggcaatccggaaccgagcttgatgtggtacaaagattccaggactgtcactgaatcacgactgcctcaagaaagtcggagggtacacctgggctctgttgaaaagagtggaagtacattcagccgggagctcgttttggtcacaggcccttcagacaaccaggctaagttcacctgtaaggccgggcaactgagtgcaagcactcagctggccgttcagttcccccctacaaacgtcaccatcctcgctaacgcctctgccttgcgacctggagacgccctgaacttgacctgtgtgagtgtttcatccaacccccccgtgaacctgagttgggacaaggagggagagcggctggagggggtggccgcacctccccggcgcgctccttttaaaggctctgcagcagcgagatccgtactgctccaggtgtcctccagagatcatgggcagcgagtcacttgccgggcacacagtgccgaactccgggagaccgtctcttcattttaccgcctgaacgtgctgtaccgaccggagttcctcggggagcaagtccttgtggtgaccgcagtcgaacagggtgaagccctactgcctgtttctgtgtctgctaaccccgcccctgaagcttttaactggacttttcggggatatcgcctgagccctgccgggggcccaaggcatcggatcttgtccagcggagctcttcacctttggaacgttacacgcgccgatgatgggttgtaccagctccactgtcaaaatagtgagggcaccgcggaagcacgcttgcgcctggacgttcattatgcccccaccattcgtgctcttcaggatccaacagaggtcaatgtggggggcagcgtcgatatcgtgtgcacggtggatgctaatccaattttaccaggcatgtttaactgggagcggttaggtgaggatgaggaggaccagtctttagatgacatggagaagatctccagaggtccaacaggacgactccgtattcaccatgcaaaactggctcaggcaggggcgtaccaatgtatagtcgacaacggggtcgccccccctgcccgcagactgctgcgactggttgtacggtttgctccccaggttgaacacccaactccactgactaaggtggctgcagccggcgactctacctcaagcgcgactctgcattgtcgggctaggggcgttccaaatatcgttttcacctggactaaaaacggggtacccctggatttgcaggacccaaggtacacagaacacacctatcaccaaggtggcgtgcactcctctctacttacaatagctaatgtatccgctgcccaggattatgcgttgttcacctgtactgccactaatgctctgggctctgatcagacaaacatccaactagtctccatctcccgccccgacccaccttcagggctgaaagtggtgtcactgacgccacacagtgtgggactagagtggaagcccggctttgatgggggactgcctcagaggttctgtataagatatgaggctctggggacccccggcttccactacgtggacgtcgtccctccccaggccacaacctttaccttgacgggcttacaacctagcacacggtaccgggtatggctactggcctctaacgccttgggtgatagcggcttggctgacaagggcacccagttgcccataacgacccctggcctgcatcagccttcaggagagccagaagatcaacttcctaccgagccaccatcaggtatatcggaaaaaactgaggctgggtccgaagaggatagagttagaaacgagtatgaagaatcgcagtggactggggaacgcgacacccaaagcagcacagtctcaacaaccgaggcggagccttattaccgcagtctgagagatttttctcctcaactccctcccacacaggaggaagtcagttactcaaggggctttacgggcgaggatgaggatatggcctttcccggccacctttacgacgaggttgaacgcacatatccaccgtcgggggcctggggtcccctctatgatgaggtgcagatggggccctgggatctgcattggcctgaagatacctatcaggatccacgagggatttacgatcaagtcgctggggacttagacacacttgagccagattctctgcccttcgagctgagggggcacctggtgtag

SEQ ID NO: 196789 - DNA, 3726 bp, synthetic construct
  misc_feature 1..3726: note = Description of Artificial Sequence: Synthetic coding sequence
  source 1..3726: mol_type = other DNA
atggccctgggcaccaccctgcgggccagcctgctgctgctgggcctcttgaccgaggggttagcccaacttgcgatccccgcatcggttccaagaggtttttgggctttgccggagaacctgaccgtggttgaaggtgcctccgttgaacttcgctgcggtgtatctacgccaggaagcgccgtgcaatgggccaaggacggacttctccttggccccgaccctagaatccccgggttcccccgctaccggctggaaggagatcctgcccgcggagaatttcacttgcatatcgaggcttgcgacctttctgatgacgccgagtacgagtgccaggtcggccgcagcgagatgggcccagagctggtgagcccccgcgtcatactgagcattcttgtacctcctaagctcttactgttaactccagaagccgggaccatggtaacatgggtagccggccaagagtacgtggttaattgtgtgtcgggcgatgcaaagccagcgcccgacattacaattctgctctcaggtcagaccatttccgatataagcgctaacgtgaacgagggatcacaacaaaaactgttcacggtagaagctaccgctcgggtgacaccgcgctcttctgacaacaggcagcttctcgtgtgtgaggcctcctctcccgctctcgaagctccaatcaaagcctctttcacggttaacgtactgttccccccgggccccccggttattgagtggcccggactggatgagggacatgtgagggccggacaatctctggagctgccctgtgtggcccgaggaggcaatccccttgctaccctccagtggctgaagaacggacaacctgtttctactgcctggggcaccgagcacactcaggccgtggctagaagtgtgctggttatgactgtgagacccgaggaccatggagcccagctgtcctgtgaagcacacaattcagttagcgccggcacacaggaacatggaatcacactccaggtcactttcccaccttccgctatcatcattctggggagcgctagccagactgagaataagaacgtcactctctcttgcgttagcaaatcttctagacctcgcgtccttctccggtggtggttgggctggcgccagttactccccatggaagaaaccgtgatggacgggcttcacggaggacacattagcatgagcaacctcacttttctggcccggcgggaggacaatggcctgactttaacctgcgaagctttttccgaagcgtttacaaaggaaaccttcaagaaaagcctgatactgaatgttaagtatcccgcccagaagctgtggattgaggggccaccagaaggccaaaagctgagggcaggaacaagagtgcgcctggtatgtcttgccatcggaggaaaccccgagccaagcttaatgtggtataaggattcacgaaccgttacagagagcagactgccgcaggagagccggagagtgcaccttgggagcgtggaaaagtctgggtcaacctttagccgcgagctcgtcctggtgactggccctagcgacaatcaggctaaattcacttgcaaagcaggccaactttcagcatcaacgcagctcgctgtgcagttcccccccactaatgtaactatccttgccaacgcatcagcattgagacccggcgacgcattgaatctgacctgcgtgtcagtgagctctaatcctcccgtgaacctcagttgggacaaggagggagaaagactggaaggggtggctgctccacctcggcgcgcgcctttcaaaggctctgcagcagcacggagcgtgttgcttcaggtttcctcccgcgaccacggacagcgagtcacttgcagagctcactcggctgagctgcgagagaccgtctcttctttctaccgcctgaatgtgctgtacagacctgaattccttggggaacaagtcctggtggtgaccgccgttgagcaaggcgaggccctcttaccagtgtcagtgtcagctaaccctgcacctgaagcttttaactggaccttcaggggctaccggttatcaccagccggaggcccgcggcataggattttgtcctccggcgctttacacctctggaatgtgactagggctgatgatggtctgtatcaactgcactgtcagaacagcgaaggcactgccgaggccagactgcgcctggacgtgcactacgcgccaactatccgggccctgcaggatccaactgaggtgaatgtcggcggcagcgtagacatagtgtgcactgtagatgctaaccccattttaccgggcatgttcaactgggagcgtctcggcgaggatgaagaggaccagtctctggacgatatggagaagatttcacggggccccacaggcagactgcgcattcatcacgccaagctggctcaggctggggcataccagtgcattgttgacaatggggttgcgccaccagctcgcagactcctgcgactggtcgtcagattcgccccccaagtggagcaccccacccccctgactaaggtagcagccgcaggagacagcacttcctctgccaccctccactgtagggcccgcggcgtgcctaacatcgtgttcacctggacaaagaatggcgtccccttggaccttcaggaccctaggtatactgagcacacatatcatcagggtggggtgcactccagcctactgaccatagcaaatgtaagtgcagctcaggattatgccctattcacctgcaccgccacgaatgctttgggctcagatcagacaaatattcagctggtgtcgattagcagacccgaccccccttccggcttgaaggtcgtgtcattaactcctcacagcgtcggtctcgagtggaaacctggcttcgatggaggcctgccacagcgcttttgcataaggtacgaagctcttggaacaccaggtttccattatgttgatgttgtccctccacaggcgacaacttttaccctcaccggcctgcagccttcaacccggtacagagtgtggcttttggccagcaacgcattaggtgatagtgggcttgcagataagggcacccagctgcctattacaaccccagggctgcatcagcctagcggagagcccgaggatcaactgccaacagagccaccttccgggccttccgggctcccactgctgcctgttctgtttgccctgggtgggttgctactcttgtcaaacgcctcttgcgtgggcggggtcctatggcagcgacgcctgagacgcctggctgaagggatctcagagaagacggaggctggctccgaggaagatagagtgcgcaacgaatacgaggagagccagtggacaggggaacgcgatacgcaaagtagtaccgtcagcactaccgaggccgaaccttattatcgctcactgagagacttctccccccaattgccccccacgcaggaagaggtcagttattcccggggatttacaggggaggatgaagatatggccttccccggccatttgtacgacgaagtggagcggacctaccccccatcaggtgcttggggcccgctttacgacgaggtccaaatgggaccctgggatctgcattggcctgaagatacttaccaggacccccggggaatctatgaccaagttgctggggaccttgacaccctcgagccagactcactgcctttcgagttgcgggggcacctggtatag

SEQ ID NO: 196790 - DNA, 1152 bp, synthetic construct
  misc_feature 1..1152: note = Description of Artificial Sequence: Synthetic coding sequence
  source 1..1152: mol_type = other DNA
atggagcggcgggcccggagcagcagccgggagagccggggccggggcgggagaactccccataaggagaataaaagagctaaggctgaacggtcggggggtggccgagggcggcaagaagcaggacccgagcctagcgggagcgggcgggcaggtaccccgggggaaccgcgcgctccggcggctacagtcgttgatgtggatgaagtcagaggatctggcgaggagggcactgaagtcgttgccctactggagtcggaacggcctgaggagggaactaagtccagcggcctgggtgcctgcgaatggcttctggtgctgattagcttactgtttattattatgacatttcccttctccatctggttctgtgtaaaagtggtgcaagaatacgagcgggtgattattttcagacttggtcacctcctgcccggacgagccaagggacctggactcttcttcttcctcccctgtctggatacgtatcacaaagtagatctcagattgcaaaccctggaaatccccttccacgagattgtcaccaaggacatgtttatcatggagatagatgccatctgttactaccggatggaaaacgcctcgctgctgctgtcgtctctggctcacgtatcaaaagctgtccagtttttggtccagaccaccatgaaacgacttcttgcccaccggtcattaactgagattttactcgaacggaagtctattgcacaggacgccaaagtagctctcgattcagttacttgcatctggggaatcaaagtagagaggatcgagattaaagacgtgcgactgccagccggtctgcaacattcactggcagtggaagccgaagcccaacgacaagctaaagttaggatgatagctgcggaggcagagaaggcagcctcagagtccctgcgcatggccgctgagattttatcaggaacgcccgccgccgtgcagctcaggtatctgcacaccctccagagtctctccactgagaaacccagtactgtggtgctgccactgcccttcgacctgctgaattgcctttcctccccgagtaatcgcacacaggggtctttgcctttcccgtccccttctaagcccgtcgagccactgaatccaaagaaaaaggacagcccgatgctctag

SEQ ID NO: 196791 - DNA, 948 bp, synthetic construct
  misc_feature 1..948: note = Description of Artificial Sequence: Synthetic coding sequence
  source 1..948: mol_type = other DNA
atggagcggcgggcccggagcagcagccgggagagccggggccggggcgggagaactcctcacaaggagaataaacgagcaaaggcagaaaggtctggagggggacgcggccggcaggaggccggacccgagccttctggatctggcagagcagggactcccggtgaacctcgtgcgccagccgcaaccgttgtggacgtggatgaggtgcgcggatccggcgaggagggtaccgaggttgtcgcactcctggagagcgaacgccccgaggaaggaaccaaaagcagtgggttgggagcttgcgagtggcttctcgtgctgatcagcctgctcttcattatcatgacttttcctttttcaatctggttttgcgtgaaagtagtccaagagtatgaacgcgtcatcatcttccgcctgggacacctgttgcctggaagagccaagggccctgggttgttcttttttctcccctgtctcgacacgtaccataaagtggacctacggctccagacattagagattccatttcacgaggtagcacttgactccgtgacctgcatttgggggatcaaagttgagaggatcgaaatcaaggacgtgagactgcctgccggcttgcagcattcactcgccgtggaggcggaggcccagcggcaggctaaagtgcgcatgattgcagccgaggccgagaaggctgcaagtgagtccctgcgcatggccgccgaaatcctctcgggaacgcccgcagcagtccagctgcgctacctacataccctgcagtctctcagtaccgaaaagccaagcaccgtcgtactgcctctgccattcgacctcttgaactgcctgagctcaccatccaaccgtacacagggcagtctgcctttcccaagccctagtaaaccagtagagccattgaaccccaagaaaaaggatagtcctatgttgtag

SEQ ID NO: 196792 - DNA, 1284 bp, synthetic construct
  misc_feature 1..1284: note = Description of Artificial Sequence: Synthetic coding sequence
  source 1..1284: mol_type = other DNA
atgggcgccggcgccaccggccgggccatggacggcccccggctgcttctgctgctcctcctaggagtctcactgggaggcgcaaaagaagcatgccccaccgggctttatacccacagtggggagtgttgcaaagcgtgcaaccttggagagggcgttgcccagccatgcggcgccaaccagacagtctgcgagccatgtctagattctgttacattctccgatgtggtaagtgcaactgagccctgtaagccttgcacggaatgcgtaggccttcagagcatgtcagcgccctgtgtggaggccgacgatgcggtgtgcagatgcgcctacgggtattaccaggacgagactaccggcaggtgtgaagcttgccgcgtctgcgaagctggttctggcttggtattttcatgccaggataagcaaaatacggtttgcgaggagtgcccagacgggacctacagtgacgaagctaatcacgtggatccatgcctgccttgcactgtatgtgaggatacagaaagacagctgcgtgaatgtacacgatgggcggacgcagagtgcgaagaaattcctgggcgttggattacgaggtctacccctcctgagggcagcgacagcacggcaccaagtacccaggaaccagaggcccctcccgagcaagacctaatagcatccacagtagctggcgtcgtgacaaccgtgatgggctcatcacagcccgtggttacacgtggaactactgacaacttaatccccgtgtactgtagcattctggctgctgtggtggttgggctggttgcctacatagcatttaagcgctggaatagttgcaagcagaacaagcagggcgcaaattctcgtcctgtgaaccagaccccgcccccagagggcgaaaaacttcacagcgatagtggcatcagtgttgacagccagagccttcatgatcaacagcctcacactcaaaccgccagtgggcaggctctcaaaggggacggcgggctgtattcgtcactccctcccgccaagcgcgaggaagtcgaaaagctgctgaacggtagtgccggagatacgtggcgccacctggcgggcgagctcgggtatcagcccgagcacatcgactccttcacccacgaggcatgccccgtccgcgccctcttagccagttgggcgactcaggatagtgccactctagatgctctgctggcagccctgcgccgtatacagagggctgatttggtggagagcctgtgttcagagagcacagctacatcaccagtgtag

SEQ ID NO: 196793 - DNA, 1002 bp, synthetic construct
  misc_feature 1..1002: note = Description of Artificial Sequence: Synthetic coding sequence
  source 1..1002: mol_type = other DNA
atgagcgccccctgcgtggaggccgacgacgccgtgtgccggtgcgcctacgggtattaccaggacgagacgacaggaaggtgcgaagcctgtcgggtatgcgaagctggctccgggctggtatttagttgccaggacaaacaaaatacagtatgcgaggaatgtcccgatggtacatatagcgatgaggcaaatcacgtagatccgtgcctcccctgtacagtgtgcgaggataccgaacgccagttaagagaatgtacccgctgggcagacgcggagtgcgaagagattccagggcgctggatcactcgctctaccccccccgaagggtccgactcgaccgcacccagcacccaggaacctgaggcacctccggaacaggacttgatcgcgagtaccgtggccggcgtggttactaccgtaatggggtcctcacaaccagtggtaacccgtggcaccacagataatctaatcccagtgtactgttcgatcctggcggccgtagtggttgggctcgtcgcatacatcgctttcaaacggtggaattcttgtaaacaaaacaagcaaggagccaattcacgtcccgtcaatcagaccccccctccagagggagaaaaactgcactctgacagcggaattagcgtggattcccagagtttgcacgatcaacagcctcacacacagaccgcctctggccaggccctgaagggggatggcggattatattcatcccttcccccagctaaaagggaggaggtcgaaaaactgctgaatggtagcgcgggagatacctggagacacttggccggggaactcggataccagcccgagcacatcgattcattcactcacgaggcatgtcctgtccgggcccttctggcatcctgggccactcaagacagcgcgacactcgatgcactcctcgctgcactgcggaggatccagagagcagatctggttgaatctctttgctctgagagcactgcgactagcccagtgtag

SEQ ID NO: 196794 - DNA, 336 bp, synthetic construct
  misc_feature 1..336: note = Description of Artificial Sequence: Synthetic coding sequence
  source 1..336: mol_type = other DNA
atggccaacatccaccaggagaacgaggagatggagcagcccatgcagaacggagaggaggacaggccactgggtgggggggaaggtcatcagcctgccgggaacagaagggggcaggccaggcgcctggcccccaatttccgttgggcaatccccaaccgtcagattaacgatgggatgggcggcgacggcgacgatatggaaatcttcatggaagaaatgagagagataaggcgtaaactccgggagctccagttaagaaactgcctccgcatcctaatgggcgaactttcgaatcatcatgatcaccacgatgaattttgcctgatgccctag

SEQ ID NO: 196795 - DNA, 306 bp, synthetic construct
  misc_feature 1..306: note = Description of Artificial Sequence: Synthetic coding sequence
  source 1..306: mol_type = other DNA
atggagcagcccatgcagaacggcgaggaggaccggcccctgggcggcggtgaaggtcaccagccggcggggaatcggcgagggcaagcgagacgactcgcacctaacttccggtgggctatcccaaatcgccagatcaacgatggcatgggtggagacggtgatgatatggaaatctttatggaggagatgcgagaaattagacgtaagctgagggaactgcagctgcgaaactgcctgaggatcttgatgggtgagttatccaatcatcatgatcatcacgacgaattttgcctaatgccctag

SEQ ID NO: 196796 - DNA, 306 bp, synthetic construct
  misc_feature 1..306: note = Description of Artificial Sequence: Synthetic coding sequence
  source 1..306: mol_type = other DNA
atggagcagcccatgcagaacggcgaggaggaccggcccctgggcggaggcgagggacaccagcccgccgggaatcggaggggccaggcacgacggctagcccccaatttccgatgggctatccctaaccggcagatcaatgacggtatgggcggagatggggacgatatggagatctttatggaggaaatgcgagaaattagaagaaaactgcgggagctccaattaaggaactgtttgcgcatcctgatgggcgagctctccaatcaccacgaccaccatgatgaattctgtttaatgccttag

SEQ ID NO: 196797 - DNA, 336 bp, synthetic construct
  misc_feature 1..336: note = Description of Artificial Sequence: Synthetic coding sequence
  source 1..336: mol_type = other DNA
atggccaacatccaccaggagaacgaggagatggagcagcccatgcagaacggcgaggaagatagacccctgggtgggggcgagggacaccagcccgccggcaacaggaggggccaagcccggaggttagcccctaacttcaggtgggctatcccaaatcgccaaattaatgacggaatgggcggcgatggagatgatatggaaatattcatggaagagatgagagagattaggcgcaagttacgcgagcttcagcttcgcaactgccttaggatcttaatgggtgagctcagcaaccaccacgatcatcacgatgaattctgcctgatgccctag

SEQ ID NO: 196798 - DNA, 336 bp, synthetic construct
  misc_feature 1..336: note = Description of Artificial Sequence: Synthetic coding sequence
  source 1..336: mol_type = other DNA
atggccaacatccaccaggagaacgaggagatggagcagcccatgcaaaacggtgaggaagataggcccctgggagggggggaaggccaccagccggccggcaaccggagggggcaggcccggcggcttgcaccgaactttaggtgggcaatccccaaccggcagatcaacgatggaatgggcggagacggggacgatatggaaatttttatggaagagatgcgggagattagaagaaaactgagagaattgcagctgcgcaactgtttgaggatcctcatgggtgagctttctaaccaccacgaccaccatgacgagttctgcctcatgccatag

SEQ ID NO: 196799 - DNA, 402 bp, synthetic construct
  misc_feature 1..402: note = Description of Artificial Sequence: Synthetic coding sequence
  source 1..402: mol_type = other DNA
atgatgctgaacagcgacaccatggagctggacctgccccccacccacagcgagaccgaatcaggcttctctgattgcggagggggcgctggcccagatggcgccggccccggcgggcctggcgggggccaggcacgagggccggagcccggagagccaggacggaaggatctgcagcatctgtcccgggaagagcgaaggagacgacggagggctaccgcaaaatatcggacagcgcatgcaactcgcgaacggatccgagttgaggcattcaacctcgcatttgccgagttgagaaaactgctgccaacgttgcctccagataagaagctctctaagatagagattctcaggctggctatttgctacatttcataccttaatcacgttctggacgtatag

SEQ ID NO: 196800 - DNA, 408 bp, synthetic construct
  misc_feature 1..408: note = Description of Artificial Sequence: Synthetic coding sequence
  source 1..408: mol_type = other DNA
atgatgctgagccccgaccaggccgccgacagcgaccaccccagctctgctcactccgatcctgaatccttaggcggtaccgatacgaaagtgctgggctccgtgtcagacctggaaccagttgaagaggccgagggcgacggaaagggcgggtcccgcgctgctctatacccccaccctcagcagttgagtcgggaagaaaaaaggcgtcggcggagagctacagcaaaatatagaagcgcacacgctacacgggaacgcatccgtgtagaagcattcaatctcgcatttgctgaactgcggaagctgcttccgactttgccgcccgataaaaaactgtcaaaaatcgagattttgagacttgctatatgttatataagctacttaaatcatgtgctcgatgtctag

SEQ ID NO: 196801 - DNA, 408 bp, synthetic construct
  misc_feature 1..408: note = Description of Artificial Sequence: Synthetic coding sequence
  source 1..408: mol_type = other DNA
atgatgctgagccccgaccaggccgccgacagcgaccaccccagctctgcacattcggaccctgagtctctcgggggaaccgatactaaggtgctgggttcagtgtctgaccttgaaccggtagaggaggccgagggcgatgggaaaggtggctctcgggccgccctgtacccacacccacaacagctctccagggaggagaagaggcgccggcgtcgtgcgacagccaaatatcgttcggctcacgcaacacgggagcggataagggtcgaggcctttaatctggccttcgcagagctgagaaagctgctacccacattaccaccagataagaagctgagtaagatcgaaattctcaggttagcgatatgctatatatcctatctgaaccatgtcctcgatgtgtag

SEQ ID NO: 196802 - DNA, 324 bp, synthetic construct
  misc_feature 1..324: note = Description of Artificial Sequence: Synthetic coding sequence
  source 1..324: mol_type = other DNA
atgatgctgagccccgaccaggccgccgacagcgaccaccccagctccgcacacagcgatcctgagagtttaggggggacagacaccaaggtgcttggcagcgtgtctgacctagaaccagtagaggaggccgaaggagacggtaaggggggctccagggcagcgctctatcctcatccacaacagctgtctagagaggaaaagcgacggcggcggagagctaccgcaaagtacagatccgcccatgccacccgtgaacgcataagggtcgaagcttttaacctcgcattcgctgagcttcgaaagctcctgcccactctctag

SEQ ID NO: 196803 - DNA, 1125 bp, synthetic construct
  misc_feature 1..1125: note = Description of Artificial Sequence: Synthetic coding sequence
  source 1..1125: mol_type = other DNA
atgggcctgccccggggcagcttcttctggctgctgctgctgctgactgccgcatgtagtggcttgctcttcgccttgtatttctccgccgtgcaacgttatcccgggcccgccgcaggagcccgggataccacatctttcgaggcgttcttccaaagtaaagcaagtaactcgtggactggaaaaggtcaggcctgtagacacctactccatctggctatccagcgccacccccactttagggggctcttcaatttgagcatccccgtgttgttatggggtgacctatttactccagcgctctgggacagactctctcagcacaaagcaccatatggctggcgtggcctcagccatcaggtcatcgcttctaccttgagcttgcttaatggctctgagtctgccaagctttttgcccccccaagagatacacctccaaaatgcattcgatgcgctgtggtggggaacggcggtatactgaacggctcacgccagggtcctaatatcgatgctcatgactacgtcttcagacttaatggtgccgtcatcaaaggcttcgaacgcgatgtcgggacaaagacaagcttctacggcttcactgtcaacacaatgaagaattctctggtttcctactggaatttggggtttacctctgtgccacaggggcaagacttacagtatattttcataccctctgacatacgagactacgtcatgctcagatccgccatactgggtgttcccgtgcctgagggcctagacaaaggcgataggcctcacgcatacttcgggccggaggccagcgctagcaagttcaaacttctgcatcccgactttatttcttacttgactgaacggttcctcaagagcaaactgatcaatacacattttggcgatttgtacatgccatctacaggggctttgatgctgttgacagccctgcacacctgcgaccaagtctcagcctatggtttcatcacctctaattactggaagttctcggaccattactttgagaggaaaatgaaaccattgatcttctacgccaatcacgatctgtccctcgaggccgctttatggagggatctccataaggccgggatacttcagctttatcaacgctag

SEQ ID NO: 196804 - DNA, 2235 bp, synthetic construct
  misc_feature 1..2235: note = Description of Artificial Sequence: Synthetic coding sequence
  source 1..2235: mol_type = other DNA
atggccggccggagcatgcaggccgcccggtgccccaccgacgagctttctctgacaaattgcgcagtggtgaacgagaaggactttcagtcaggccagcacgtcatagtgagaacctccccaaatcatcgctacacctttacacttaaaacccacccatccgtggtgccaggtagcatagcattctctctgcctcagcggaaatgggccggactgtccattggccaagaaatcgaggtaagcctttacacgttcgataaagccaaacagtgtatagggaccatgacaattgagatcgatttcctgcagaagaagtcaatcgactctaacccatacgatacagacaagatggccgctgaattcattcagcagttcaacaaccaggccttctcggtgggccagcagctcgtcttcagctttaacgaaaagctctttgggttactagttaaggacatagaggccatggatcccagcatccttaagggggaacccgctacgggtaaacggcagaaaattgaagtcggactggtggtgggaaacagccaggtagcctttgaaaaggcagagaattcaagcttaaatctgatagggaaggctaagaccaaagaaaatcgacagtccatcataaacccggattggaacttcgaaaaaatgggtattggcggactggataaggagttcagcgacatttttcgcagagcgttcgcgagcagagtattccccccggaaatcgtggagcagatgggctgcaagcacgtgaaggggattctgctgtacggtcctccgggatgcggcaaaaccttactcgctcggcagatcggaaagatgttgaatgcgagggaacctaaagtcgtaaacggtccggaaatcctgaacaaatacgtgggggaaagcgaggccaatatcaggaagttattcgcggatgcggaggaggagcagagaaggttaggggccaactcaggtttacatattatcattttcgatgaaattgatgcgatttgcaaacagagagggtccatggcgggcagcaccggcgtgcatgatacagttgtgaatcagctgctgagcaaaatcgatggcgtggaacagttgaacaatattctcgtgatcggcatgactaatcgccccgaccttatcgacgaggccctcttaaggcctggacggctggaagttaagatggagatcggactgcccgatgaaaagggaaggctacagattctccacattcatacggccaggatgaggggccatcagctgctgtcggctgacgtggacatcaaggaactagcagtggaaactaagaatttttctggagctgagttggagggattggttagagcagcacagagcaccgctatgaatcggcatatcaaagcatctacaaaagttgaggtggacatggaaaaagctgagtctctccaggtaacacgaggagatttccttgcctcgctggagaatgacatcaaacctgcattcggcaccaatcaggaagactacgcgtcctacattatgaatggaatcattaagtggggcgaccccgtcactagggtcttggacgatggggaacttctagttcagcagaccaagaactctgaccgtacccctctcgtgagcgtgttactcgaggggccccctcattctggcaagacagctctggccgctaagatcgccgaagagtctaacttcccttttatcaaaatttgctctcccgataagatgatcggtttctccgaaactgctaaatgccaggccatgaaaaagatctttgatgacgcctacaagtcacaattatcatgcgtggtggtggacgacattgagcgcctgctggattatgtgccaataggacctcggttcagcaatctggtactgcaggccctccttgtgctactgaagaaggccccgccacaggggcgaaagctgctgattattggaacaacgagcagaaaggatgtgctgcaagaaatggaaatgcttaatgccttctcaacgaccatccatgtccctaacatcgccactggcgaacagttgttggaagcactggaactgctgggcaacttcaaagataaggaaagaactacgatagcacaacaggtcaaggggaaaaaagtgtggattgggattaagaaactgttgatgctcattgaaatgtcgctgcaaatggaccctgagtacagggtaaggaaattccttgcgttactgcgggaggaaggagcgtccccactagacttcgattag

SEQ ID NO: 196805 - DNA, 888 bp, synthetic construct
  misc_feature 1..888: note = Description of Artificial Sequence: Synthetic coding sequence
  source 1..888: mol_type = other DNA
atggacaacagcggcaaggaggccgaggccatggccctgctggccgaagccgagcgtaaagttaagaacagtcagtcattctttagcggtctgttcggcggttcaagtaagatagaagaggcctgtgagatctacgccagggctgcgaacatgttcaagatggccaaaaactggtcagctgctggtaacgcattctgtcaagccgcccagctgcacttacaacttcagtccaagcatgatgctgccacttgcttcgttgacgctggtaacgctttcaagaaagccgacccccaagaagcaattaactgcttgatgagagctatcgaaatctacactgacatgggccggtttaccatcgctgctaaacaccacattagcatcgctgaaatctacgaaacagaactcgtcgatatcgagaaagctattgcccattatgaacagtctgctgattactacaagggagaggagtctaattcgtctgccaacaaatgcctccttaaggtcgccgggtacgccgcattgttggagcagtaccagaaagcaatcgatatctacgagcaagttggcaccaatgcgatggactcaccccttttgaaatactctgccaaggactacttctttaaggctgctttgtgccatttttgcatcgacatgctgaatgctaaattagctgtgcagaagtacgaagaattatttccagccttctcagactcccgcgaatgcaaattgatgaagaagcttctggaggcacatgaggagcagaatgttgatagttacaccgaatctgtcaaggaatatgacagtatcagccggctggaccagtggctgacgaccatgctgttgagaattaaaaaaaccatacagggagacgaggaagatctgcgctag

SEQ ID NO: 196806 - DNA, 897 bp, synthetic construct
  misc_feature 1..897: note = Description of Artificial Sequence: Synthetic coding sequence
  source 1..897: mol_type = other DNA
atggacaacgccggcaaggagcgggaggccgtgcagctgatggccgaagctgagaagagagtcaaggctagccattccttcctccgtggtctcttcggcggaaatacacggattgaggaggcgtgcgagatgtatacacgggctgctaacatgtttaaaatggcgaaaaattggagcgccgccggaaacgccttctgccaagccgcgaagctccatatgcaactgcagagtaagcacgattccgccacaagttttgtcgatgcaggaaacgcatataagaaagccgacccacaggaggctattaactgcctaaacgcagccatcgatatatacaccgacatgggcaggttcaccatcgccgcgaagcatcatataaccattgccgagatctacgagacagaacttgtggatatcgaaaaggcgatcgctcactacgagcagtcagccgactactataagggagaggaaagtaactccagcgctaataaatgtctgttaaaggtcgccgcctacgctgcacagctcgagcaataccagaaagccatcgagatttacgaacaagtgggggccaacaccatggacaatccgctgctcaagtactccgccaaagattacttctttaaggccgcattatgccattttatagtggacgaattaaacgctaaattggccctcgaaaaatacgaagaaatgtttccagccttcacggacagcagggaatgtaagcttttgaaaaagctcttggaggctcatgaagaacaaaactctgaggcgtatacggaggcagtgaaggagttcgactctatttccagactggatcaatggctcaccaccatgctcctccgcattaagaagtccatccaaggtgacggagaaggagatggggacttaaagtag

SEQ ID NO: 196807 - DNA, 615 bp, synthetic construct
  misc_feature 1..615: note = Description of Artificial Sequence: Synthetic coding sequence
  source 1..615: mol_type = other DNA
atgaccctgctgcccgccctgtggatgctggagatgctgaccaagaggcagatccccaaaggtcggttcacaatcgctgcaaagcaccatatcaccatagctgagatctatgagacggagttggtggatatcgaaaaagctatcgctcactatgagcagagcgccgactattacaaaggcgaagaatccaacagtagcgcaaataaatgtctgctaaaagtcgcggcttacgccgcgcagttggagcagtaccagaaagctatagaaatctacgagcaggtgggcgctaatactatggacaatccccttctgaagtattcagctaaggactatttctttaaggctgccctgtgccacttcatcgtagacgaacttaacgcaaaattggcgcttgaaaagtacgaggaaatgtttcctgctttcaccgattctcgcgagtgcaaacttctcaaaaagctgcttgaggcccatgaggaacagaatagcgaagcctatacagaagccgtgaaagaattcgactccatctccaggctggatcaatggctcacaaccatgttgctgcgtatcaagaagtcgatacaaggggacggtgaaggggacggtgacttgaagtag

SEQ ID NO: 196808 - DNA, 768 bp, synthetic construct
  misc_feature 1..768: note = Description of Artificial Sequence: Synthetic coding sequence
  source 1..768: mol_type = other DNA
atgtacacccgggccgccaacatgttcaagatggccaagaactggtcagcggctggaaatgccttctgtcaggcagcgaagcttcacatgcagctccagtccaaacatgatagcgccacaagctttgtcgatgccggaaatgcttacaaaaaagcggacccacaagaagctattaactgcctgaacgcagctatcgatatctataccgatatggggcggtttacaatcgctgccaagcaccacataacaattgccgaaatatacgaaacagagcttgtagacattgaaaaagcaatagcccactatgaacaaagcgcggattactacaaaggggaagagagcaacagttcagcaaataaatgtttgctgaaggtagccgcctatgcagcacagctggagcagtatcagaaggccattgagatttacgaacaggttggtgctaatactatggacaaccccttattgaaatattctgccaaagattattttttcaaggctgcgctgtgccactttatcgtggacgagctcaatgcaaagctcgcactagaaaagtacgaagaaatgtttcctgcgtttaccgatagtcgggaatgcaaattgttgaaaaaacttctggaggcccatgaggaacagaattcagaggcatacacagaggctgtgaaagaatttgactctattagtcgcttggaccagtggctgacgacgatgctgctgaggattaagaaatccatccagggagatggggaaggagacggcgacctgaagtag

SEQ ID NO: 196809 - DNA, 780 bp, synthetic construct
  misc_feature 1..780: note = Description of Artificial Sequence: Synthetic coding sequence
  source 1..780: mol_type = other DNA
atggacaacgccggcaaggagcgggaggccgtgcagctgatggccgaggccgagaaaagggtgaaggcatcccattctttcctcaggggactcttcggtggtaacacccgcatcgaggaagcttgtgagatgtatacacgtgcggctaatatgttcaagatggctaagaattggtcagaggccattaactgcctgaacgcggctatcgacatctacacggacatggggcgcttcaccattgctgccaagcaccacatcaccattgccgagatttacgagacagaactggtggatatcgaaaaagctatcgcccactatgaacagagcgcagattactataaaggcgaggagtccaactccagcgcaaacaagtgtctcctgaaagttgccgcttatgcagcccaactggagcagtatcaaaaggctatcgagatatacgagcaagtcggcgctaatacgatggataatccgctgctcaagtactcggccaaagattacttttttaaggccgcattatgccacttcatagtggacgagctaaatgccaaactggctctcgagaagtacgaagaaatgtttcctgcctttactgattccagagagtgtaagcttttgaaaaagctccttgaagctcatgaggagcagaattctgaagcgtacacggaggcagtcaaggagtttgatagcatatcacgcctggaccagtggctgacgacgatgctgctccggattaagaagtctatacaaggtgatggagagggagacggcgacttgaagtag

SEQ ID NO: 196810 - DNA, 1887 bp, synthetic construct
  misc_feature 1..1887: note = Description of Artificial Sequence: Synthetic coding sequence
  source 1..1887: mol_type = other DNA
atgggcagctgcgcccggctgctgctgctgtggggctgcaccgtggttgctgcaggactcagcggagtggcaggcgttagttctaggtgtgaaaaagcttgtaacccgcgcatggggaaccttgcccttggaaggaaactatgggccgataccacttgcggccagaatgccaccgaactgtactgcttttattctgaaaacactgatctgacgtgccgtcagccaaagtgtgataaatgcaatgcagcctacccccacctggcccatctgcctagcgctatggctgatagctctttccgcttcccaagaacatggtggcagagtgccgaggacgtgcaccgggagaaaattcaactcgacctagaggccgaattctacttcacacacttgattgttatgttcaagagcccgcggcccgccgcgatggtcctggataggagccaggattttggtaagacatggaaaccttataagtacttcgccaccaattgcagcgccacctttggcttagaggatgatgtggtcaaaaagggcgctatctgcaccagtaagtacagctctccattcccatgcaccggcggggaagtgatctttaaggcgctcagccctccatatgatacggaaaatccctattccgcgaaggtgcaagagcagttgaaaataacaaatctccgagttcagctgctcaagaggcaatcgtgtccatgtcaacgcaacgatttaaatgaagaacctcagcattttacccattacgccatctacgacttcatcgtgaaaggatcttgcttctgcaatggccacgccgaccagtgcattcccgtccatgggtttcgcccagtgaaagccccaggcacttttcacatggtccacgggaagtgtatgtgcaagcataataccgcaggctcccactgtcagcactgtgctcctctgtacaacgatagaccatgggaagccgccgatggcaagactggcgcgccaaacgagtgtcggacctgcaaatgcaatggccacgcagatacatgtcactttgatgttaatgtctgggaggcttctggaaatcgatcgggaggggtctgcgatgactgccagcataatactgaagggcaatattgccagaggtgcaagccggggttttatcgggatctgcgcaggcccttttctgccccggatgcttgtaaaccctgttcatgtcaccctgtgggttcagcagtccttcctgctaattccgtaacattttgtgaccccagcaacggcgattgcccttgcaaacccggagtggcgggaaggcggtgtgaccgctgtatggtcgggtattgggggttcggtgattacgggtgcagaccctgcgattgtgccgggtcttgcgacccgattaccggggactgtattagtagtcatacagatatcgactggtatcacgaggtgcctgactttcgcccggtccacaacaaatccgaacccgcttgggagtgggaagacgctcagggtttcagcgcccttctccacagtggtaaatgcgagtgtaaggagcagaccctgggaaatgcaaaggccttttgcgggatgaagtactcttacgttcttaaaattaagatcctgtccgcacacgacaaagggacgcacgtcgaagttaacgtgaaaataaagaaggtgttgaagagtactaaacttaaaattttccgtggcaaacgcacactctatccggagtcctggaccgatcggggctgcacatgccccattttgaatcccggattggaatatctcgtggccgggcatgaggacatccgaaccggaaaactaattgtaaacatgaaaagctttgtacagcactggaagccctccctgggaaggaaggtcatggacattctgaaaagggagtgcaaatag

SEQ ID NO: 196811 - DNA, 1776 bp, synthetic construct
  misc_feature 1..1776: note = Description of Artificial Sequence: Synthetic coding sequence
  source 1..1776: mol_type = other DNA
atgggcaacctggccctgggccggaagctgtgggccgacaccacctgcggccagaacgcaaccgaactgtattgtttttactctgagaataccgacttgacctgtcgacagccgaaatgcgacaaatgcaatgctgcctatccccatctggctcatctgccatctgctatggccgatagctctttccggtttcctcggacctggtggcagtctgccgaggatgttcatagggagaagattcagctggatctcgaagctgagttttatttcacccatttaattgttatgttcaaatccccacgcccagcagctatggtgctggataggtcccaggacttcggcaagacctggaagccctacaagtacttcgcaactaactgttccgccacattcggcctcgaggatgacgtggttaaaaagggcgctatttgtacaagcaagtattctagtccattcccttgcaccggcggagaggtgatcttcaaggcgctgtcccctccatatgatactgaaaacccctattcagcaaaggtacaagaacagctcaagataaccaacttaagggttcagttgctgaagagacaatcatgtccttgtcagagaaacgacctgaatgaggagccccagcattttacgcattacgcgatttatgactttattgttaaagggagctgtttctgtaatggccacgccgaccagtgcattccagtgcatggctttcgtcccgtgaaagcacctggtactttccacatggtgcacggcaagtgcatgtgcaaacataacactgcaggctctcattgccagcactgcgctcccctctacaatgaccggccgtgggaagccgctgacggcaagacaggcgcccccaacgagtgccgaacatgtaagtgtaacggtcatgctgatacctgccatttcgacgttaacgtctgggaagcttccgggaaccgcagcggcggcgtatgcgacgactgtcagcacaacaccgaggggcagtattgccagaggtgtaagcctggcttttatagggacttgcgtagacctttcagcgcgcccgatgcatgtaaaccttgctcatgccacccagtgggctccgccgtgttgccagcaaattcagtcacattctgcgacccctccaacggtgattgcccctgtaagcctggggtggccggacggcgctgcgacagatgcatggtgggatactggggtttcggggattacggttgcagaccttgcgactgcgctggaagttgcgacccaatcaccggtgactgtatatcatcccacacagacatcgattggtatcacgaggttcctgattttcggcccgtgcacaataaatcagaacccgcatgggagtgggaagatgcacagggattttcagcactcctccactcagggaaatgcgagtgtaaggagcagacgttagggaacgctaaagctttttgcggtatgaaatattcttatgtccttaagatcaaaattctttctgcacacgacaagggcacccacgttgaggttaacgtgaaaataaagaaggtgttgaagagcacgaagcttaagatttttagaggaaaaagaacactgtacccagagtcttggacagatcgtggctgcacatgcccgatactgaatcccggcttggagtatctggtcgcagggcatgaagatatccggaccggcaaacttatcgtaaatatgaaatcgttcgtacagcattggaagcctagcctggggcggaaggtcatggatatactgaaacgagaatgcaaatag

SEQ ID NO: 196812 - DNA, 1818 bp, synthetic construct
  misc_feature 1..1818: note = Description of Artificial Sequence: Synthetic coding sequence
  source 1..1818: mol_type = other DNA
atgggcagctgcgcccggctgctgctgctgtggggctgcaccgtggtcgccgctggtctatcaggcgttgccggggttagttcacggtgcgaaaaagcctgcaaccctaggatggggaaccttgcactcggccggaagctatgggccgatacgacatgcggtcagaacgctacagaactgtattgcttttattctgagaacacagacctaacctgcagacagcctaagtgcgacaaatgcaatgccgcgtatccccacctggcccatttgccatcggctatggccgactcatccttccgcttcccccgcacctggtggcagagtgcggaagacgttcatagggaaaagatccaattagatctagaagctgaattctactttactcacttgattgtgatgtttaagagtcccagacctgccgccatggtgctagaccggtcacaggactttggcaagacgtggaagccatacaagtatttcgcgacaaactgcagtgccaccttcggcctcgaagacgacgtcgtcaaaaaaggagcaatctgtacctctaaatatagctctcccttcccgtgtaccggcggcgaggtcatctttaaggccctgagtccaccctacgatacagaaaatccctattccgcaaaagttcaggagcagctaaaaatcacaaacctccgcgtgcagctcctgaagcggcaatcttgcccctgtcagcgaaatgacctgaatgaggaaccgcaacatttcactcactacgctatttatgatttcatcgttaaaggatcctgcttctgtaatggccacgcagatcaatgcatccctgtacatggctttcgacctgtaaaagccccaggtacctttcacatggtgcatggtaaatgcatgtgtaagcataacacggctggttctcattgtcagcattgtgctcccctttacaatgataggccctgggaagctgctgacgggaagactggggcgcccaatgaatgcagaacttgcaaatgtaatggtcatgcggacacctgtcacttcgacgtcaatgtgtgggaagctagtggtaaccggtctggtggtgtgtgtgacgactgccaacacaacacagaggggcaatactgtcagcgttgtaaacctggattttaccgagaccttcggcgacctttctccgcccccgacgcttgcaaaccctgttcctgtcacccagttgggagtgctgtgttgcccgccaactccgtcactttctgcgacccctcaaacggtgattgcccttgcaaaccgggggtcgccggacgacggtgtgacaggtgcatggtcgggtattgggggttcggtgattatggatgccggccctgcgactgcgctggatcttgtgaccccattactggcgattgcattagctcccatactgacattgactggtaccacgaagttccagattttcggccggtgcacaataaatctgagcccgcctgggagtgggaagacgcgcaaggattctctgcactgctacactctgtccttaaaatcaagattctgagtgcgcacgacaagggaacgcacgttgaagtcaatgtgaaaatcaaaaaggtgctgaagtcaaccaaattgaagatcttccggggcaaaaggaccctttacccagagtcttggacagataggggctgtacatgcccaattctgaatccaggattagagtatttggttgctggccatgaagatatcagaactggcaaactgattgtcaacatgaaatccttcgtacaacattggaagccctcactcggccgtaaggtgatggatattttgaaacgagaatgcaagtag

SEQ ID NO: 196813 - DNA, 1095 bp, synthetic construct
  misc_feature 1..1095: note = Description of Artificial Sequence: Synthetic coding sequence
  source 1..1095: mol_type = other DNA
atgtacctgagccggttcctgagcatccacgccctgtgggtgaccgtctcaagtgtgatgcagccttatccccttgtttggggccactacgatctgtgcaaaacacagatatatactgaagagggcaaagtgtgggattacatggcttgtcaacccgaaagcacagacatgacgaaatatcttaaagtaaagctggatcctcccgacattacatgtggcgaccccccagaaacattctgcgctatgggaaatccctatatgtgcaataacgaatgcgatgcgtccacccctgagcttgctcaccctccagaactgatgttcgactttgagggaaggcatcccagtaccttctggcagagtgccacgtggaaggagtaccctaagcctctgcaggtaaacattacattgtcatggagcaaaaccattgaactcacagataacatagttatcacctttgaaagcgggcgaccagatcagatgatcttggagaagagcctcgattatggccgcacttggcagccataccagtactatgccaccgattgcctggacgcgtttcatatggaccccaaaagtgttaaggacctgtctcagcacactgttctggagatcatttgcaccgaggaatattctacagggtacaccacaaactccaaaattatacatttcgagataaaggatcggtttgcattcttcgcaggacccaggctgcgcaacatggcaagcctgtatggacagctcgatacaactaaaaaactcagagattttttcaccgtcactgatttgagaatcagattgctcaggcctgcagtcggcgagatatttgtggatgaactccatctcgcccgttatttctacgccatctccgatatcaaggtgcgaggaagatgcaaatgcaatcttcacgccaccgtctgcgtgtacgataattctaaactcacatgtgaatgcgaacataatactacaggccccgattgtggcaagtgtaagaaaaattaccagggcagaccctggtcacccgggagctatctgcccatcccaaagggcacagctaacacctgtatcccgtccatcagctccattggctccaagtag

SEQ ID NO: 196814 - DNA, 1518 bp, synthetic construct
  misc_feature 1..1518: note = Description of Artificial Sequence: Synthetic coding sequence
  source 1..1518: mol_type = other DNA
atgtacctgagccggttcctgagcatccacgccctgtgggtgaccgtctccagtgtaatgcagccctatcccctcgtttggggtcactatgatctctgcaagacacagatctacaccgaggagggtaaagtgtgggattatatggcttgtcagcctgaatcgaccgacatgactaaatacctaaaggttaaattggacccaccggatatcacctgcggggatccccccgaaaccttttgtgccatgggaaacccttacatgtgtaataatgagtgtgacgcttcaacccctgaactggctcatccgcctgaattaatgtttgactttgaaggcagacacccttctaccttctggcagtccgccacatggaaggagtatcccaagccactccaagtgaatataaccttaagctggtcaaagacaatcgaactaaccgataatatcgtaattactttcgagtctgggaggcccgatcagatgattctggaaaagagcttggactatggacgaacatggcaaccctaccaatactatgcaaccgactgtctggacgccttccacatggatccaaaaagcgtcaaagatctatctcagcatacagtcctggagataatctgtaccgaggagtactctactggatacaccactaattccaagatcattcatttcgagattaaggatcgtttcgctttttttgcaggcccgagactgcgaaacatggcgtccctgtatggtcaattagatacaacaaaaaagctgcgggattttttcacggtaacggatctcaggatcagacttctacgcccggctgtgggcgaaatttttgtggatgagctccaccttgcccgttacttctatgccataagcgacataaaggtgagagggaggtgcaaatgtaacctccatgccactgtgtgtgtttatgacaactcaaaactgacctgtgagtgcgaacacaatacaactggacctgactgtgggaaatgtaaaaaaaattaccaggggcgcccctggagccccggcagctatctgcctattcccaaaggaaccgccaatacctgcattccaagcatttcaagcatcggaaatcctccaaagttcaatagaatttggccaaacatctcctccttggaagtctcaaatcccaagcaggaatgctactgcaaccctctgggttctatacatgataggtgcaacggctccggcttttgcgagtgcaaaaccggaactacgggcccaaagtgtgatgagtgcttgcccggtaattcttggcattatggctgtcagcccaacgtttgcgacaacgaactcttacactgccagaacggggggacttgtcacaataatgtgaggtgtctgtgtccagcagcttatactgggatcctctgtgagaagctgaggtgtgaggaagccggcagctgtggctctgattctggtcagggagcccccccccatgggtccccagcccttctgcttctgacgaccctactcggcactgctagccctcttgttttctag

SEQ ID NO: 196815 - DNA, 861 bp, synthetic construct
  misc_feature 1..861: note = Description of Artificial Sequence: Synthetic coding sequence
  source 1..861: mol_type = other DNA
atggccagcctgtacggccagctggacaccaccaagaagctgcgggattttttcacagtgactgacctccgaattcgcctgttaagacccgctgtgggagaaattttcgtggacgaactgcacctggcaaggtatttttacgccataagtgacatcaaagtgcgcggccggtgcaaatgtaatcttcatgccacggtctgtgtgtacgataattcgaagctcacctgcgaatgcgagcataataccaccggccctgattgcggcaagtgtaaaaagaactaccaggggagaccctggtctcccgggtcttatctgccaatccctaaaggaaccgccaatacttgtatcccatccatatccagcattggcaatccaccaaaattcaatcggatctggcctaatataagctccctggaggtcagcaatcctaaacaggttgcccccaaacttgcgctttcaaccgtctcatcagtgcaggtggccaatcacaagcgagagtgttattgcaatcctctcggttcgatacatgacaggtgtaatggctctggcttttgtgaatgcaaaacaggcactactggacccaagtgcgatgaatgtctgcctgggaattcttggcactacgggtgccagccaaacgtgtgcgacaacgagctattgcactgccagaatgggggcacctgtcataacaacgtgcggtgcttgtgccctgctgcttatacaggcattctctgcgaaaaactccgttgtgaggaagccggcagctgtgggtccgattccgggcagggagcccccccgcacggcagtcccgctcttctgcttctgaccaccctgcttggaaccgcctcccctttagtgttttag

SEQ ID NO: 196816 - DNA, 1029 bp, synthetic construct
  misc_feature 1..1029: note = Description of Artificial Sequence: Synthetic coding sequence
  source 1..1029: mol_type = other DNA
atggccagcctgtacggccagctggacaccaccaagaagctgcgggacttctttactgtgactgatctccgcattcgcctactgcgcccagctgtaggagagatctttgttgatgagctgcacttggcccgttatttttacgccatctcagacatcaaggtgagaggcaggtgcaagtgcaaccttcatgcaacagtgtgcgtgtacgataacagtaaacttacatgtgagtgcgaacataacactaccggccccgattgcgggaaatgcaagaaaaactaccagggaaggccttggtcaccagggagttatctccccatacctaaaggaaccgctaatacatgcattccatccatctcctcgataggcaaccccccgaaatttaatagaatctggccaaatataagcagtctggaggtgtcaaaccctaaacaggtggccccaaagctggccctatctactgtttcatctgtacaggtcgcgaaccacaagcgcgattgtgaatgcttcggtcactctaatcgttgctcatatatcgacttactgaatacagtcatctgtgtgagctgtaaacataatacgcgtggccaacactgcgaactctgccggcttgggtactttcgcaacgcgtcagcacagcttgatgacgaaaatgtctgtattgagtgttactgtaaccccttagggtctatccacgacaggtgcaacggcagcggattctgtgaatgtaaaaccgggaccactggaccgaagtgcgacgagtgtttgccaggcaactcatggcactacggatgtcagcctaatgtatgcgacaatgagctcctgcattgccagaacgggggtacctgccataacaatgtacggtgcctttgtcccgctgcctacactgggattctgtgtgaaaaattaaggtgcgaagaggccgggagctgcgggagcgactctgggcagggggctccgcctcatgggagtccagccctcctcctccttactacactgctgggcacggccagtcccctcgtgttttag

SEQ ID NO: 196817 - DNA, 1485 bp, synthetic construct
  misc_feature 1..1485: note = Description of Artificial Sequence: Synthetic coding sequence
  source 1..1485: mol_type = other DNA
atgtacctgagccggttcctgagcatccacgccctgtgggtgaccgtcagtagtgtgatgcagccttatccactggtctgggggcactacgatttgtgcaagacccagatttatactgaagagggaaaggtgtgggactatatggcttgccagcccgaatctactgacatgactaagtacttgaaggttaagctggaccctcctgacattacctgtggggatcctcctgagactttctgcgccatggggaacccgtatatgtgcaacaacgagtgtgatgcctctacccccgagttagcccacccaccagagctgatgtttgactttgagggaaggcacccgtccacattttggcagtctgctacgtggaaagaatacccaaagccactccaagtgaacattacactgagttggagcaagacgatcgaacttaccgacaacatcgtgatcacctttgaaagcggcaggcccgatcagatgattctggagaaatccctcgactacgggcgtacctggcagccataccagtattacgctacggactgtcttgacgccttccatatggaccccaaatcggtgaaagacttgagccagcacacagtgctcgagattatttgcaccgaagaatattcaaccggttacaccaccaattctaagattatccattttgagattaaggaccgtttcgcgttcttcgctggcccacgtttgagaaatatggctagtttatatggccaactggataccacgaaaaagcttcgggattttttcaccgttactgacctgcggatccggctgcttaggccggccgtcggggaaatttttgtggacgaactccaccttgctaggtatttttacgcgatctccgacatcaaggtcaggggcaggtgtaagtgcaatctacacgcaaccgtgtgtgtgtacgacaacagtaagttgacttgtgagtgcgagcataatactacaggcccggactgtgggaaatgtaaaaaaaattatcagggcaggccctggtcgcccggatcatacttacccatccctaagggcaccgcaaatacatgcatcccctctatctcttcaatcggaaattgcgaatgttttgggcattccaacagatgcagttacatcgacctgcttaacaccgtgatatgcgtgtcatgtaaacacaatacgcgcgggcagcactgcgaattatgcaggcttggatatttccgcaatgcttccgcccagctcgacgacgagaacgtctgtattgctaatgtgtgcgacaacgaactcttgcattgtcagaatggcggtacctgccataataatgtacggtgcctgtgtcctgctgcctacaccggcatcctgtgcgagaagttgcgatgcgaggaggcaggaagttgtggatccgattcaggccagggtgctcccccccatgggtcaccagcgcttctcctcttaaccaccctgctcgggactgccagtcccctggtgttctag

SEQ ID NO: 196818 - DNA, 1443 bp, synthetic construct
  misc_feature 1..1443: note = Description of Artificial Sequence: Synthetic coding sequence
  source 1..1443: mol_type = other DNA
atgtacctgagccggttcctgagcatccacgccctgtgggtgaccgtgtcatctgtaatgcagccgtatcctctggtgtggggacattatgatctgtgcaagacccagatctacaccgaagaaggcaaagtctgggactatatggcctgccagcctgaatctaccgacatgacgaagtatctgaaggtcaaattggacccacctgacattacatgcggcgaccctcccgagacgttctgtgcgatggggaacccatatatgtgcaataacgagtgcgatgcctccacaccagaacttgcccaccctcccgagctgatgtttgactttgagggtagacatcccagtacattctggcagagcgccacatggaaggagtaccccaagcccttacaggttaacataactctctcctggagtaaaacgatcgagctcacggataatatagtcatcacttttgaatcagggcgccctgaccagatgatcctcgagaagtctctcgattacggaagaacttggcagccctaccagtactatgctaccgactgtctggacgccttccatatggaccccaaatccgtgaaggatctatcccagcataccgtcctcgaaattatttgcactgaggaatactcaaccggctacaccaccaacagcaaaatcattcatttcgagatcaaggataggtttgcgttctttgcaggtcctagactgaggaatatggcctccctttacggacaactagatactactaagaagcttagggatttttttacagtgacagacctgcggatcagactcctgcgccctgctgtgggagaaattttcgttgacgaacttcaccttgcaagatacttttatgcaataagtgacattaaggtgcgaggaagatgtaagtgcaatttgcacgcgaccgtatgtgtttacgataactctaagctcacttgtgaatgcgagcacaatactaccggccctgattgcggcaagtgtaagaaaaactaccaggggaggccgtggtcaccaggctcctatttaccgattcccaaagggacagcgaacacatgcataccatctatctcctcaattggaaacccaccaaagtttaaccgcatatggccaaacatctcatcactggaggtttctaatccaaagcaggttgccccaaaactcgccctgtcaacagtgagctccgttcaagtggccaatcacaagagggctaacgtttgtgataacgagcttctgcactgccagaacggcgggacttgtcacaacaacgtgcggtgcctatgtcctgctgcttacactggtatcctttgtgagaaactgaggtgcgaggaggcaggaagttgtgggtccgattctgggcagggagctccgccgcatgggtcccccgctttgctccttctgactaccctccttggaaccgcaagtcccctggtgttctag

SEQ ID NO: 196819 - DNA, 1383 bp, synthetic construct
  misc_feature 1..1383: note = Description of Artificial Sequence: Synthetic coding sequence
  source 1..1383: mol_type = other DNA
atgtacctgagccggttcctgagcatccacgccctgtgggtgaccgtgagctctgtgatgcagccttatcccctggtctgggggcattacgatctctgtaaaactcagatctatacagaagaggggaaggtatgggattacatggcctgccaacccgaatccaccgatatgactaagtacctcaaagtgaaactcgacccccccgatataacatgtggtgaccctccagagacattctgtgctatggggaacccttacatgtgcaataatgagtgcgatgcatccacacccgagctggctcaccctcctgagctgatgttcgattttgagggccgtcatccctccaccttttggcagagcgccacctggaaagagtacccgaagcccctccaggttaacatcactctgtcctggtctaagaccattgaacttaccgacaatattgtgattactttcgagtctggcaggccggaccagatgatcctggaaaaatcattggactacggaaggacatggcagccctaccagtattacgccacagattgtctggatgcctttcatatggatcctaaatctgtaaaggacttatcccaacatacagttctcgagataatctgcactgaggagtactcaacaggctacacaacgaactcaaaaatcatccactttgagatcaaagatcgctttgccttcttcgccggcccccggttgcggaatatggcaagtctctacgggcagctggatacaactaagaagcttcgggatttctttactgtcacggatctccggatccggctgttgagaccagccgttggagagatttttgtagacgagctacacctggcccgctatttctatgccatctccgatattaaagtgcgcgggcggtgcaagtgcaatttgcatgccacagtatgtgtctacgacaacagtaagcttacctgcgaatgcgagcacaacacgactggcccggattgcggtaaatgcaaaaagaactatcaaggaaggccttggagtcctggttcatacttacccattcctaaaggcacagccaacacctgtatccctagtatctcatccatcggtaacccccccaaattcaatcgcatctggccaaacataagctcactggaggtgtccaatcctaaacaggcaaacgtatgcgacaacgagctgcttcactgccagaacggcggcacctgtcacaacaacgtgcgctgtctgtgcccagcggcttacacaggcatcctatgtgaaaagctgagatgcgaagaggcagggtcatgcggttctgatagcggccaaggcgcccccccgcatgggtccccggctctcttgctgctgactaccctgttggggactgcaagccctctggttttttag

SEQ ID NO: 196820 - DNA, 1620 bp, synthetic construct
  misc_feature 1..1620: note = Description of Artificial Sequence: Synthetic coding sequence
  source 1..1620: mol_type = other DNA
atgtacctgagccggttcctgagcatccacgccctgtgggtgaccgtgtcttcggtcatgcagccctatcctttggtctggggccattatgatctgtgcaagacccagatctacaccgaggaggggaaggtttgggactacatggcatgtcagccagaaagcaccgacatgaccaagtatctcaaggtaaagctggacccgccagacattacctgtggcgatccgcccgagacattttgcgctatggggaacccgtatatgtgtaacaacgagtgtgatgcttccacacccgagcttgctcacccccctgaactcatgtttgacttcgagggacgacaccctagcaccttttggcaatccgccacttggaaggagtacccaaaacccttgcaagtaaatatcacactgagctggagcaagacaatcgagctgaccgataatatcgtgataacttttgaaagtggtcgccctgatcaaatgattctggagaaaagccttgactatggtaggacctggcagccctatcagtactatgccacagactgcctggatgcctttcacatggatccaaaaagtgttaaggacctgtcacagcacaccgtgctcgaaatcatatgcacggaagaatactccaccggttatactacaaatagtaagatcattcattttgagatcaaagaccgttttgcttttttcgccggccccagacttcggaacatggctagcctatatgggcagctagacactactaaaaaactgcgggatttcttcaccgtgaccgatctcaggatccgactcctgcgacccgctgttggagagatcttcgtggacgagctacatctggcccgctatttctatgctatttctgacattaaggtgcgtggccgctgtaagtgcaatctacatgctacagtatgcgtttacgacaactccaagttaacctgcgaatgcgagcataacacgactgggccagattgcgggaaatgcaagaaaaactatcaggggcggccatggtctcccgggtcttacttaccaatacctaaagggacagccaatacctgcatcccatctataagctccattggcaattgcgaatgcttcggccactcaaatcggtgtagctacattgatcttctcaacacggtaatctgcgtctcatgtaagcacaacacacgcggccaacactgcgaactgtgcaggctcggatattttcggaatgcctccgcccaactggatgatgagaatgtctgcattgagtgttattgcaatccactggggtcaatccatgaccgctgcaatggctcaggattctgtgaatgtaaaacaggaacaactgggccgaaatgcgacgaatgtttgccagggaattcttggcattacgggtgccagccaaatgtgtgcgacaacgagctgcttcattgccagaatggcggcacttgccacaacaacgtcagatgtttgtgccccgctgcctacacggggattctatgcgagaagctacgatgtgaagaggccggcagctgcggtagtgatagtggccaaggagcgccaccccatggctcccccgctctgctgctattgaccacactgttgggaaccgcttctccattagtgttctag

SEQ ID NO: 196821 - DNA, 1383 bp, synthetic construct
  misc_feature 1..1383: note = Description of Artificial Sequence: Synthetic coding sequence
  source 1..1383: mol_type = other DNA
atgtacctgagccggttcctgagcatccacgccctgtgggtgaccgtgagtagcgtgatgcagccgtaccctcttgtgtgggggcactacgacctgtgcaagactcaaatttatacagaggaggggaaggtatgggactatatggcctgtcagcctgagtccaccgatatgacaaagtacctcaaggtcaagttggatcctcccgacattacatgtggagatccccctgaaacgttttgcgcaatgggcaacccttatatgtgcaataacgagtgtgacgctagcaccccggagttagcacatcccccagagctaatgtttgactttgagggacgccaccccagcaccttctggcagtctgctacctggaaagagtatcctaaacctcttcaggtgaacattactctttcttggtctaagacaattgaactgacagataatatcgtgattacgtttgagtctggaagacctgaccagatgatccttgaaaagagcctcgattacggtagaacctggcaaccataccaatattacgctactgactgcctggacgccttccatatggaccccaaatccgtgaaagatctttcacagcacacagtgctggaaattatttgtacagaggagtactctactggatacaccaccaattctaaaattatccatttcgaaataaaggatcggttcgcatttttcgccggaccacggctccgaaacatggcatctttatacggacaactggacactacaaaaaagctccgagactttttcaccgtgacggatctccgaattcggctgctacggccggcagtgggagaaattttcgtggacgagctacaccttgctagatatttctatgcaatttcagacatcaaagtgcggggccgctgtaaatgcaatctgcacgcgacagtctgcgtttacgataattccaaacttacttgtgagtgtgagcacaacacgaccggacccgattgcgggaaatgcaaaaaaaactaccagggcagaccctggtcccctgggtcctatctaccgatacctaagggtaccgctaatacttgcgatccctatcttactagctgcggggacccacccaagtttaacaggatttggcctaacatctcctcgctggaagtgtcaaaccctaagcaggccaatgtctgcgacaacgaactgctgcactgccagaatggcggaacttgtcacaataacgttagatgcctgtgtcccgccgcctacaccggaatactgtgcgagaagcttcgttgcgaggaagccggttcttgcggttccgatagcggccagggggccccaccacacggttcacctgccttgctcctgttgactacattgctgggaaccgcctcaccactggtattttag

SEQ ID NO: 196822 - DNA, 1443 bp, synthetic construct
  misc_feature 1..1443: note = Description of Artificial Sequence: Synthetic coding sequence
  source 1..1443: mol_type = other DNA
atgtacctgagccggttcctgagcatccacgccctgtgggtgaccgtcagcagcgtgatgcagccgtatccgctggtgtgggggcactacgacctgtgtaaaacacagatctatacagaagaggggaaagtatgggattacatggcctgtcagcccgagagtaccgatatgaccaagtacctgaaggttaagctggaccctcctgacatcacctgcggggatcctccggagacattttgcgccatggggaacccatacatgtgcaacaacgagtgcgacgccagcactcctgaactggcgcatcccccggaactcatgtttgattttgaaggtaggcatccaagcaccttttggcagagtgcgacttggaaggagtacccaaaacctctgcaggtcaacattaccctttcatggtctaaaactatagagttaaccgataatattgtcattacttttgagtccggtcgacccgatcagatgatcctggagaaaagtctggattatggtcggacttggcagccctaccagtactacgcaaccgactgcctagacgctttccacatggatcctaagagcgttaaagacttgagccagcataccgtgcttgaaatcatctgtactgaggagtattcaacaggctacacaactaactccaagattatccacttcgagataaaagatcggttcgcattttttgccggaccgcgcctgcgcaacatggcaagtctatatggccaattagacaccacaaaaaagcttagggactttttcacagttacggatctccgcatcaggctgctaaggcccgcagtcggcgaaatattcgtggatgaactgcatttggcacgttacttctatgcgataagtgatatcaaggtacgggggagatgcaagtgtaacctccacgccacagtgtgcgtatatgacaattctaagttgacgtgtgaatgtgaacataacacaactggaccagattgcgggaagtgtaagaagaactaccaaggacgtccctggagcccagggtcatatctaccaatacctaaagggacggctaatacctgtattcccagtatctccagtattggaaacccacctaagtttaaccggatctggcccaacatcagcagtctcgaggtgagcaacccaaagcaggtcgcacctaaattggctttatccaccgtctctagtgtgcaggtagccaatcataaacgtgccaacgtgtgcgataatgaactcctgcattgtcagaacggagggacgtgccacaacaacgtgcgctgtttgtgccccgccgcttacacaggaattctttgcgagaaattgcggtgcgaagaagctggttcttgcgggtctgactcaggccagggagctccccctcacgggtcacccgctttgctgttgcttacaacccttctcggaacggcatccccgctggtgttctag

SEQ ID NO: 196823 - DNA, 1485 bp, synthetic construct
  misc_feature 1..1485: note = Description of Artificial Sequence: Synthetic coding sequence
  source 1..1485: mol_type = other DNA
atgtacctgagccggttcctgagcatccacgccctgtgggtgaccgtctcttcagtgatgcagccctaccctttggtttggggccactacgacctgtgcaagacacaaatttacacagaggaaggaaaggtctgggactacatggcgtgccaaccggaaagtacggatatgactaagtacctgaaggtgaagctggatccaccagacattacatgtggcgacccaccagaaaccttctgcgccatgggaaatccttatatgtgcaataacgaatgtgacgcctctacccccgagttagcacaccctcctgagttgatgttcgacttcgaagggcgtcacccaagtaccttctggcagagcgcaacatggaaggaataccctaagcccttgcaggtcaacatcacactgagctggtctaaaactattgaactaaccgataacatagtgatcaccttcgaaagcggcagacctgatcagatgattttagagaagtctctggattatggacgcacatggcagccctatcagtactatgctacagattgtctggatgcttttcacatggaccctaaatcagtgaaagatctcagtcagcacacagtgctcgaaatcatctgcactgaggagtactctaccggctatacaactaacagcaaaattatacacttcgagattaaggatcgtttcgcattcttcgccggtccacggctacgaaacatggcttctctttacggccagttagatactaccaagaagctgagagatttctttaccgtgactgaccttagaatacggctgctgcgaccggctgtcggcgagatcttcgtcgatgagctgcatctggcgcggtatttttacgctatctctgacatcaaagttcgcggcagatgtaagtgcaatctccatgctaccgtttgtgtgtacgacaacagcaaactcacgtgcgagtgtgagcataacaccaccggccctgattgtggaaagtgcaagaagaactaccagggccgcccatggtcccctggcagttatctgcccattccaaaggggactgccaacacttgtgatccatatttaacatcctgcggagattgtgagtgcttcggacactccaaccggtgttcctacatcgatctgcttaacaccgttatctgcgtgagttgcaaacataacactcgcggtcagcactgcgaactgtgtcggctgggctactttcgaaacgccagtgcacagctggacgacgagaatgtttgtatcgcaaatgtgtgtgacaacgaactgttgcattgccaaaatggagggacatgtcataataatgtgcggtgtctgtgccccgcggcttatacagggatcctctgcgagaagctccgatgtgaagaggccgggagctgcggaagcgatagcgggcagggggcaccaccccacggtagcccagccctgctgttgctgacaactcttctgggcaccgccagtcccctggtcttctag

SEQ ID NO: 196824 - DNA, 1620 bp, synthetic construct
  misc_feature 1..1620: note = Description of Artificial Sequence: Synthetic coding sequence
  source 1..1620: mol_type = other DNA
atgtacctgagccggttcctgagcatccacgccctgtgggtgaccgtcagttctgttatgcaaccttatcccctggtatggggccattatgacctgtgtaagacccaaatatacacagaagagggtaaggtgtgggactatatggcctgtcaacccgaatcaacggatatgaccaaatatcttaaggttaaactcgatccacctgatatcacctgtggcgacccccccgaaacattttgtgccatggggaacccatatatgtgtaacaatgaatgtgacgcaagcacacctgagcttgcccatcctcccgagctaatgtttgacttcgagggcaggcaccctagcacgttctggcagtctgcaacttggaaggagtacccgaaaccccttcaagtgaatatcacgttgtcctggtcaaaaactatcgaacttaccgataatatcgttatcactttcgagtctggccgcccggatcagatgatcctggagaaaagtctggactacgggagaacatggcagccttaccagtactacgcaaccgattgcctcgatgccttccatatggacccaaaaagcgtgaaggatctgagccaacacactgttctggagattatttgtacagaggagtactcaacaggatataccaccaatagcaaaatcattcacttcgagataaaagacagatttgcattctttgccgggcctcgccttagaaatatggcttcgctatatggacagcttgacacgaccaagaaacttagggatttttttactgtgaccgacttaaggatcaggctccttcgtcccgcagttggagaaatcttcgtggatgaactgcatctagcccgatacttttacgcaattagtgacatcaaagttcggggccgttgtaaatgcaacctgcacgccactgtctgtgtctacgacaatagtaagctcacttgcgaatgcgaacataatacaactggacctgattgcggaaagtgtaaaaagaactaccagggccggccttggtcccccgggagttatttacccatcccaaagggcaccgctaacacatgtatcccctcaatttcatccattggaaattgtgaatgttttgggcatagcaatcgttgtagttacattgatcttctgaataccgtcatctgtgttagctgtaaacacaataccaggggacaacactgcgagttatgcaggttagggtactttaggaatgcctctgcgcagctcgatgatgagaatgtttgtatagagtgctattgtaatcccctgggaagcattcatgaccgctgcaatggcagcggattttgtgagtgtaaaaccggcactacgggcccaaaatgtgatgaatgtctgccaggaaactcttggcattatgggtgtcaacctaatgtttgtgataacgaacttctgcactgccagaatggaggaacatgtcataacaacgtgcgatgcctctgccctgccgcgtatactggcattctctgcgaaaagctgagatgtgaagaggcaggcagttgcgggtcggacagcggccagggggcccctccccacggtagccccgctttgctgctcttaactaccctgttggggactgcgagtcccctcgttttctag

SEQ ID NO: 196825 - DNA, 1317 bp, synthetic construct
  misc_feature 1..1317: note = Description of Artificial Sequence: Synthetic coding sequence
  source 1..1317: mol_type = other DNA
atgtacctgagccggttcctgagcatccacgccctgtgggtgaccgtgagttcagttatgcaaccttatcccctggtatggggtcattatgacttgtgtaaaacccaaatatacacagaggagggaaaggtctgggactatatggcatgtcagcctgagtctactgatatgactaagtatcttaaggtcaagctggatccaccagatattacatgcggcgacccgcctgagaccttttgcgccatggggaacccatacatgtgcaacaatgagtgcgatgcatctactccggagctggctcatcctccagaactgatgttcgacttcgaaggtagacacccatcgaccttctggcagtcagccacctggaaagagtacccaaagcctctgcaagtgaacattacgctctcttggagcaagactatagagctgacggataacatcgtcatcactttcgagtccggcagacctgatcaaatgattttggagaaaagcctcgattatggacgaacctggcagccctaccagtattacgccacagactgtttggacgcattccacatggaccccaaaagcgtcaaagacctgagccagcacactgtgctggagattatttgtacagaagaatacagcactggctataccactaattcaaagataatacatttcgaaattaaggaccgattcgcctttttcgccggcccccgacttagaaacatggcctcactgtatggccagctggatacaacgaagaagctcagggatttttttactgtcacagaccttcgtatccggctgctccggccagccgtgggggagattttcgtcgacgaactccatcttgccaggtacttttatgccatttccgacattaaagtccgcggcagatgtaagtgcaaccttcacgccactgtatgcgtgtacgacaactctaagctcacgtgcgagtgcgagcacaatacaaccgggcctgattgtggcaaatgcaaaaaaaactaccaagggcgtccttggtcaccagggtcctacctccccatccctaagggtaccgccaacacctgcatccctagcatttcaagtattggcactaacgtctgcgacaatgaactgttgcactgccagaacggggggacgtgccataacaacgtgcgatgtctgtgcccagctgcttacaccggcatactctgcgaaaagctgaggtgcgaagaagcgggtagctgcggctccgactccgggcaaggagcaccccctcatggctcgcccgctctgctattactcactacactgctgggtacagcatcccccctggtattttag

SEQ ID NO: 196826 - DNA, 1095 bp, synthetic construct
  misc_feature 1..1095: note = Description of Artificial Sequence: Synthetic coding sequence
  source 1..1095: mol_type = other DNA
atgtacctgagccggttcctgagcatccacgccctgtgggtgaccgtgagcagtgtgatgcagccttaccctcttgtctgggggcactacgacctatgcaaaacccagatctatactgaagagggcaaggtgtgggattatatggcctgccagcctgagtccaccgatatgaccaagtacctgaaggtcaaactcgatcccccagacatcacctgtggtgaccctcctgaaaccttctgcgccatgggaaacccttatatgtgtaacaacgaatgcgacgccagtacacccgaactggcccacccccctgaactgatgtttgactttgagggacgtcaccccagcaccttctggcagtctgctacttggaaggagtatcccaagccactgcaagtcaatatcacacttagttggagcaagacgatcgagttgacggacaatatagttattacattcgagagcggtaggccagaccagatgatcctggagaagagccttgactatggacggacttggcaaccctaccagtattacgcaactgactgtctggacgccttccatatggaccccaaatctgtgaaggacttaagtcagcatacggttttagagattatctgcacagaggagtatagcacaggatacaccactaattccaagatcatccatttcgaaatcaaagataggtttgcattcttcgctggaccacgcctccggaatatggctagcctgtacggccagctggacactacaaagaaattgcgggatttctttaccgtcaccgacctccgcatacgattgttgagaccggctgtgggcgaaatttttgtggacgaacttcatctggcgcgatatttctatgcaatttctgatataaaagttcgcgggcgctgtaaatgcaatctccatgccacagtgtgcgtctatgacaactccaagcttacctgcgagtgtgaacataatactacgggccctgactgcggcaaatgcaagaagaactaccagggcaggccatggtccccaggttcctacttgcccataccaaaagggaccgctaacacctgcataccgagtatttccagcattggctccaaatag

SEQ ID NO: 196827 - DNA, 1317 bp, synthetic construct
  misc_feature 1..1317: note = Description of Artificial Sequence: Synthetic coding sequence
  source 1..1317: mol_type = other DNA
atgtacctgagccggttcctgagcatccacgccctgtgggtgaccgtgtcatctgtgatgcagccttacccccttgtttggggacattatgacctgtgtaaaacacagatttataccgaagagggaaaagtctgggactacatggcttgtcagcctgaaagcaccgacatgactaaatatcttaaagtgaagctggatccgccagatatcacttgcggtgatcctccagagaccttttgtgccatgggcaatccctacatgtgcaacaacgaatgcgatgcttccacccctgagttggcccatcctccggaactgatgtttgacttcgaggggcgccacccttctacattttggcagtcagctacatggaaggagtaccctaagccattacaggtgaatatcacactgtcctggagtaagacaatcgagctgactgacaatatagtcatcacattcgagtctggccgtccagatcagatgatcctcgagaagagcttggactacggcagaacatggcagccctaccagtactacgcgaccgactgtctcgatgccttccacatggaccctaagagcgtgaaggatctctcacagcacaccgtcctcgaaatcatttgtacggaggaatattccaccgggtacacaacaaatagcaagattatccatttcgagattaaggacagattcgccttttttgctggccccaggttaagaaacatggcctccctgtacggtcagcttgacaccaccaagaaattgagggatttctttactgtgactgacctccgcattagactgctgaggcctgccgtgggtgagatcttcgttgacgagctgcacctcgctcgatacttctacgctatttcggatatcaaagtgcgcggccgctgcaaatgtaacctccacgccaccgtctgcgtatatgacaattccaagctgacctgtgagtgcgaacataacacaacaggtcccgattgtggcaaatgtaagaaaaattatcaaggacggccctggtcaccgggttcctatctgcccattccaaagggaactgccaatacctatctgcctagtatgtatagcgtggcagctaacgtgtgcgataacgaactgttgcattgccagaacggtgggacctgtcacaataatgttagatgtctctgtcctgcggcctataccggaatcctgtgcgaaaaactccggtgtgaggaagcaggttcttgtgggtccgatagcggacagggggcaccccctcatggaagccctgcactgttattactaactacactgctcggtacagcttctccccttgtcttttag

SEQ ID NO: 196828 - DNA, 1620 bp, synthetic construct
  misc_feature 1..1620: note = Description of Artificial Sequence: Synthetic coding sequence
  source 1..1620: mol_type = other DNA
atgtacctgagccggttcctgagcatccacgccctgtgggtgaccgtgtcctcagtgatgcagccctacccgcttgtgtggggtcactacgacctttgtaagactcagatctataccgaggagggaaaagtgtgggattacatggcatgccagccggaaagcaccgatatgaccaaatacctcaaagtgaagcttgaccctccggacatcacctgcggagacccacctgaaacattctgtgccatgggaaacccatatatgtgcaacaatgaatgtgacgcttctacacccgagctggcccatccccccgagcttatgtttgactttgaaggaaggcacccctctaccttctggcagtctgctacatggaaagagtatcccaaacctctgcaggtgaacatcactctgtcctggtctaagacaatagaactgacagacaacatcgtaataacattcgagagcggccgaccggatcagatgatcctggagaagagtctggattatggcagaacttggcagccataccaatactacgctacggactgtttagatgccttccacatggaccccaaatccgtcaaggatctgtcccaacacaccgttctggagatcatttgcactgaagagtacagcacagggtacactaccaatagcaagataatccactttgaaattaaagatcggtttgccttttttgctgggccgagactccggaacatggccagtctctatgggcagttggataccactaaaaagctaagagacttctttaccgtgaccgacttgcggatacgcctgctgaggccagcggtaggtgaaatctttgttgatgagctgcatctggcccgctacttttatgccatttctgacatcaaggttagagggcgctgcaagtgcaatcttcacgccacagtctgcgtgtacgataactcaaagctgacatgcgagtgtgaacacaatacaacaggaccagattgtggaaagtgtaagaaaaactatcaaggccgcccatggtccccaggctcctacctccccatccctaaggggacagccaacacatgtgatccctatctgaccagctgcggggactgtgaatgcttcgggcattccaaccggtgttcctacattgacctactgaacacagtaatttgtgtttcgtgcaaacacaacacaaggggtcagcattgcgaattgtgccgcctgggatatttcagaaatgcaagtgcacagttggacgatgaaaacgtctgcattgagtgctactgcaaccctctgggcagtattcacgataggtgcaacggcagcggtttttgcgagtgcaagaccggcacaaccgggcctaaatgtgatgaatgtcttcccggtaactcttggcattacggctgccagccaaacgtgtgcgacaacgaactgttacactgccaaaacggtgggacctgccacaacaacgttagatgcctctgtcccgccgcgtatactggcatactttgcgagaagctgcggtgtgaagaagccgggagctgcggaagtgattcgggccaaggggctccgccacacgggagtcccgcgttactgcttctcacaactctgctgggaactgcaagtcctctggttttctag

SEQ ID NO: 196829 - DNA, 519 bp, synthetic construct
  misc_feature 1..519: note = Description of Artificial Sequence: Synthetic coding sequence
  source 1..519: mol_type = other DNA
atggtgggccccgccccccggcggcggctgcggcccctggccgcccttgcactcgtcctggcccttgccccagggctgcccaccgcccgggccggacagacccctcgacccgctgagaggggtcctcctgtgagactttttacagaggaggagctggccagatacggcggcgaagaagaagatcagccgatttacctggccgtcaaaggtgtagtgttcgacgtcaccagtggcaaagagttttatggccgtggagccccctataatgccctgaccggtaaggacagtacgaggggggtggctaagatgtcgttggatccagctgacctcacccatgacacaaccggcctgactgcgaaggagctggaggcgcttgatgaggtctttaccaaagtgtacaaggccaagtacccaatcgtggggtatacggcacggcgaatattaaacgaggacggaagtcccaatctggatttcaagcccgaggatcagccacattttgacatcaaggatgagttctag

SEQ ID NO: 196830 - DNA, 2088 bp, synthetic construct
  misc_feature 1..2088: note = Description of Artificial Sequence: Synthetic coding sequence
  source 1..2088: mol_type = other DNA
atgagcctgctgctgagcttctacctgctgggcctgctggtgagcagtggccaggatcgatttgcaatgctggccaataacaacctgcagattctcaacatcaacaagagtgatgagggaatctaccgatgtgagggccgcgtcgaggcccgtggagaaatcgattttcgggatatcatcgtaatcgtcaatgtgcctcccgcaattagtatgcctcagaaaagctttaatgcaactgcagagcgtggagaagagatgactttttcctgtagagcttccggaagccctgaacctgccatatcatggtttaggaatgggaagctgatcgaggagaatgagaagtacatcctgaaaggtagcaatacagagctgacagtgcgtaatatcataaattccgatggtggtccttatgtgtgtcgcgctacaaacaaggctggtgaggacgaaaagcaggctttcctccaggtgttcgtgcaacctcacattattcagctaaaaaacgagaccacgtacgaaaatgggcaggtcaccttagtctgtgatgcagagggggagcccattccagaaattacatggaaacgggctgtagacggttttacattcactgaaggcgacaagagcttggacgggaggattgaagtgaaaggccagcacgggagttctagtctccatattaaggacgttaaactgagtgattcaggaaggtatgattgtgaagctgcctctaggatcggaggccaccagaagagcatgtacctggacatcgaatatgcacccaagttcattagcaaccagacaatctactattcctgggaaggcaaccctattaacattagttgcgatgtcaaaagtaacccgcccgcctcaatccattggcgtagggataagctcgtgttgccagcgaagaataccacaaacctaaaaacatattcaaccggcaggaaaatgattctcgagatcgcccccacatccgataatgacttcgggcggtataactgcacagccaccaatcatattggcactaggtttcaggagtacatcctggcgctcgccgacgttccaagctccccgtacggggtgaaaatcatagagctgtcgcagacaacggccaaagttagttttaacaaacctgattctcacggtggggtacccatccaccactaccaggtggatgtcaaagaggtcgcctccgaaatctggaagatcgttcgaagccatggcgtgcagacgatggtcgtattgaataacctcgagccgaataccacttacgagattcgtgtagcggcggtcaacggtaaaggccagggggactacagcaaaattgaaatcttccagaccctgccagtccgcgaaccaagccctccttctattcatggccaacccagttctggcaaatctttcaagctgagcatcacaaagcaagacgatggcggcgctcccatactcgaatacatagtgaagtacagaagtaaagataaggaggatcaatggctggagaagaaggtgcagggtaacaaagatcatatcatacttgagcatctgcaatggactatgggatacgaggtgcagatcacagcagcaaatagattgggatactctgagccgaccgtgtacgaatttagtatgcctcctaaacctaacattatcaaggatactttatttaacggattgggcttgggcgcagtgatcggcctcggagtggctgccctgttactgattcttgtagtcactgacgtaagctgcttctttattcgccaatgcggactgttgatgtgtataacccgcagaatgtgtggaaagaagagcggttcctccggaaagtccaaagagctggaagaaggcaaggctgcatacttaaaggacggatctaaagagccaatcgtagagatgcgcaccgaagatgaacgcgtgacaaatcatgaggatggatcaccggtcaacgaacccaacgagacaacacctctcacagagcccgaaaaactgcctctgaaagaagaggatggcaaggaagcactcaaccctgagactatagaaataaaagtgtctaacgacatcattcagagcaaggaagatgactcaaaggcgtag

SEQ ID NO: 196831 - DNA, 2514 bp, synthetic construct
  misc_feature 1..2514: note = Description of Artificial Sequence: Synthetic coding sequence
  source 1..2514: mol_type = other DNA
atgagcctgctgctgagcttctacctgctgggcctgctggtgagcagcggccaggccctactgcaggtgacgatttccttgagtaaggtggagttgagtgtcggggagtctaagttctttacgtgtaccgctataggagagccagagagcattgactggtataatccacaaggagagaagattatcagtacccagcgcgtggtcgtccagaaggaaggggtgagaagccggctcacgatctacaatgccaacatcgaagatgcggggatatacaggtgtcaggccaccgacgctaagggtcaaactcaagaagccacagtggttctggagatctaccagaagctgaccttccgcgaggtagtgtcacctcaggagtttaagcaaggggaggacgccgaggtcgtgtgccgggtgagttcttccccagccccagcagtttcttggctttaccataacgaagaagttaccactatcagcgacaatcggttcgcgatgctagccaacaataatctacaaattttgaacatcaacaaatctgatgaaggaatctaccgctgcgagggcagagttgaagcccgaggcgagattgacttcagagatattatcgtgatcgtgaatgtgccgccggccatctctatgccccaaaaatctttcaacgctactgccgagaggggagaagagatgacgtttagttgcagagcttctggtagccctgagcccgcaataagctggtttcgcaatggcaaactgatcgaggagaacgaaaagtacatcctgaagggttctaatacagaacttactgtgcgcaatattattaattctgatggcggcccctatgtctgcagggccacgaataaggccggcgaggatgaaaaacaggcttttctgcaggtattcgtccagcctcatataatccagttgaagaacgagacaacctatgaaaacggacaggtgacactggtctgcgacgccgagggtgagcctataccagaaatcacttggaagcgggctgtggatggttttacattcactgaaggtgataaatccctggatggcaggatcgaagttaagggccaacatgggtcttcatcattgcatatcaaggatgtaaagctgtcagattccggaagatacgattgtgaagccgcctctcgtatcggtggacaccaaaaatcaatgtacctagacattgagtatgcacctaagtttatttctaatcagacaatctactacagctgggaaggcaatcccattaacatctcttgtgacgtcaagagcaatcccccggccagcatccactggagaagagacaagttagttctgccggccaaaaatactaccaacttgaagacctactcaaccggtcggaagatgatacttgagatcgcccctacatctgataacgactttggtcggtacaactgcaccgccaccaatcacatcggtactcggttccaagagtatattctcgctttagctgacgtcccgtcctcaccttacggtgtgaaaatcattgagttaagccaaacaacagccaaggtatcctttaataagccagattcccacggcggcgttcccatccatcactatcaggtggatgtgaaagaagtggcttccgagatatggaagatagtccggagccacggcgtacagaccatggtcgtgctgaacaaccttgagcccaacacaacttacgagatccgcgttgcagcggtcaatgggaaaggacagggcgattacagcaaaatcgagattttccagacactacccgtgagggagcctagccccccgtctatccatggacagccatcatctggaaagagctttaaactgagcatcactaaacaggatgacggaggggctcctatcctcgagtatatagtcaagtatcggtccaaggacaaagaagatcaatggcttgagaagaaggtgcagggaaacaaagatcacataatattagaacacctgcaatggaccatgggctacgaagttcagatcacagcagccaataggctaggctactcagaacctactgtctacgagttctccatgcctccaaagcctaacattatcaaagacacattgtttaatggcctcggactcggggctgtaattggcttaggcgtagccgccttactcctgattcttgtagtgacggacgtctcctgtttttttatacgacagtgtggcttgttaatgtgcattacccggagaatgtgtggaaagaaatctggcagttctggaaagagtaaagaactagaggagggtaaggccgcatatctgaaagatggctcaaaggagcctattgttgaaatgagaactgaggacgagcgcgttaccaatcacgaagatggcagcccggtgaatgaacccaatgaaacgacccctctgaccgagcccgaaaagctgcccttgaaagaagaagacggcaaggaagctctgaacccagaaacgattgagatcaaggtatccaacgatatcatacaaagcaaagaagacgattcaaaagcctag

SEQ ID NO: 196832 - DNA, 1275 bp, synthetic construct
  misc_feature 1..1275: note = Description of Artificial Sequence: Synthetic coding sequence
  source 1..1275: mol_type = other DNA
atggtgcggagcgacagcggcggccaggtgtacctggactaccacaatagacaaggcttattcgtggattggaagtataatgaagcactgtatcttgaagagggtcagccagagacctactatcgtactgctctgttacaggtgacaatatctctaagtaaggtcgagctgtctgttggagaaagcaagttctttacttgcaccgctataggtgagcccgagtcgatagattggtacaacccccagggggaaaagatcatatcaactcagcgggtggtggtgcagaaggagggggtgcgaagtagactgacaatttataacgccaacattgaggacgccggaatttatagatgtcaagccaccgacgcaaaaggacagacccaggaagctacagtggtgctggaaatctaccagaaacttacgttccgggaagtcgtgtccccacaggagtttaaacagggggaggatgccgaagtcgtatgtcgtgtttcatcatctcctgcgcctgctgtgtcatggctctatcataacgaagaggtgacgactatttcagataatcgtttcgctatgttggccaataataatctgcagatcctgaatatcaataagtcagatgagggaatctaccgttgcgaaggccgcgttgaggctagaggagaaattgacttccgggacattatcgtgatcgtcaacgttccgccagccataagcatgcctcagaagtccttcaacgctaccgccgagcggggcgaagaaatgactttcagttgcagagcctccggctctccagagcctgcgatttcttggtttcggaatggcaaactcatcgaggagaatgagaaatacattctgaagggaagcaacactgaattgactgtcaggaatatcatcaacagtgacggtggcccttatgtgtgccgcgctacaaacaaagccggcgaggacgagaagcaggccttcttgcaagtgtttgttcagccacacatcatacagctaaagaacgagactacatacgagaacgggcaggtcactctggtgtgtgatgctgagggggaacctatccctgagatcacttggaaaagagcggttgacggtttcacattcaccgagggtgataagagtctggatggccgaatagaagttaaaggccaacatggatcatccagtctgcatatcaaagatgttaagctttcagactccgggcgctatgactgcgaggcagcatctcgaatcggcggtcaccaaaagtctatgtatttggatatcgagtcctag

SEQ ID NO: 196833 - DNA, 1983 bp, synthetic construct
  misc_feature 1..1983: note = Description of Artificial Sequence: Synthetic coding sequence
  source 1..1983: mol_type = other DNA
atgcaggagaacctgcggttcgccagcagcggcgacgacatcaagatctgggatgcgtcttccatgacattggttgacaagttcaaccctcataccagcccccacggcatctcttccatttgctggagttctaacaacaactttcttgtcaccgcttcttcgtctggagataaaatcgtcgtgtcctcttgcaagtgtaagcccgtgccactgctggagctagcagaaggccagaagcagacgtgcgtgaacctgaattctacctcgatgtatctggtgtcaggcggccttaacaatactgtgaatatctgggacctgaaatctaaacgggtacatcgcagcctgaaagatcataaagatcaagtgacatgtgtgacatacaactggaatgattgttacatagcctccgggtctctctctggggagatcattttacactctgtgacaaccaacctgtcttctaccccgttcggccatggtagtaaccagagcgtgcgacatctgaagtactccttgtttaagaagtctctacttgggagcgtgagtgataatgggatcgtcacgctgtgggacgtaaactcccaaagcccctatcacaacttcgattccgtgcacaaagcacctgcgtccggcatttgtttttcacctgtcaacgaactgcttttcgtcacaattggactggacaaacggataattttgtatgatacatcctctaaaaaactagttaaaactctcgtagcggatacacccctgaccgccgtcgacttcatgcccgacggagccaccttggcaattggatcatcacggggtaagatttatcagtatgaccttagaatgttgaaatcgcccgttaaaacaattagcgctcacaaaacgagcgtacaatgtatcgcatttcagtactctactgtgctcaccaagtcatccctcaataaagggtgttctaacaagcctaccacagtgaataagcggagcgtcaatgtcaatgccgcttccggaggcgtccagaacagcggaattgttcgcgaagcccctgctacctcaattgcaactgtgctgcctcagccgatgacctctgccatgggcaagggtaccgtagccgtccaggagaaggcgggactcccaaggtccattaacactgacacactctctaaggaaacagatagcgggaaaaatcaggacttttccagcttcgatgatacaggaaagtcttccctgggagacatgttctcacccattagagacgacgcggtcgtaaacaagggatccgatgaaagcatcggaaagggcgatggattcgacttcttaccacagcttaacagcgtctttcccccccgaaaaaaccctgtgacaagctctacctcagtgctacacagttcccctctcaacgtgttcatgggctcacccggaaaagaagagaacgaaaaccgcgacctcactgccgaatccaagaaaatctatatgggaaagcaggagtctaaagacagtttcaagcagctggccaagttggtgacatctggagcagaaagtggaaacttgaatacctctcctagctctaaccagacaaggaactcagagaaatttgagaaacccgagaacgaaattgaggcccaattaatctgcgaacctcccattaatggatcttctactccaaatcccaagatcgcctcatccgtcacagctggagtagcaagcagcctttcggagaagatcgcagactctatcggaaacaacaggcagaatgcccccctgacttcaatacagataaggtttatacagaatatgatacaagaaactctggatgacttcagggaagcctgccaccgcgacatcgtgaatctccaggtggagatgatcaaacagtttcacatgcagctcaatgagatgcatagcctgcttgaacggtattctgtgaatgagggtctggtcgccgaaatcgagcggctccgagaggaaaacaagagactgagagcccacttctag

SEQ ID NO: 196834 - DNA, 1716 bp, synthetic construct
  misc_feature 1..1716: note = Description of Artificial Sequence: Synthetic coding sequence
  source 1..1716: mol_type = other DNA
atgtacctggtgagcggcggcctgaacaacaccgtgaacatctgggacctcaaaagcaagcgtgtccataggtctctgaaagaccataaggaccaagtgacttgtgtgacctacaattggaacgattgttatatcgcctcaggctctttgagtggcgaaatcatcttacactccgtgacaacgaacttgtctagtacgccctttggtcacgggtctaaccaatcagtccggcatctgaaatattctctgtttaaaaaatccctacttgggtctgtgagcgacaatggcattgtcacactgtgggatgtgaactcccagagcccttaccacaattttgatagtgtgcacaaggcccccgctagtggtatatgcttttcaccagtgaatgaacttctttttgtgacaatcggtctcgacaagcgaattatcctttatgacacctcaagtaagaaactggttaagaccctcgtggcagacactcctcttacggcggtagacttcatgcccgacggggcaacccttgccatcgggagttctcgcgggaagatatatcaatacgaccttagaatgttgaaatctccagtgaagacaatctctgcacataaaaccagtgttcagtgtatagcgttccagtatagcaccgtcctgacaaaaagctctctgaacaagggctgtagtaacaagcccaccaccgtcaacaagcggagtgtgaacgtgaatgcggctagcggcggcgttcagaatagcggaattgtgagagaggccccagcaacctctatcgccacagtactaccccagcccatgacttcagccatgggtaaagggacagtcgccgtgcaggagaaggctggcctgcctcgtagcataaataccgacacgctttcaaaggagacggactctggaaagaaccaggatttctccagctttgacgataccggaaaaagttctctcggcgacatgttctcccctatccgggacgatgccgtggtgaataaagggtcggatgaatcgattggaaagggtgatggctttgattttctcccccagttaaattcagtgttccctccacgcaaaaatcccgttacctcgtccacctccgtcctgcattcctcaccgctgaatgtctttatggggtctcctgggaaggaagaaaacgagaatagggatttgacagctgagtctaagaagatctatatggggaaacaagagtccaaagactctttcaaacaactggcaaaactggtcacatccggcgccgaatctggtaacctgaataccagtcctagcagcaatcaaaccaggaattccgagaaattcgagaagcccgagaatgaaatagaagcacagctgatttgcgagcctccaattaatggtagcagcacccccaaccccaagattgcatcaagcgtcacggccggcgtcgcatcatcattgagcgaaaagatcgctgactcgattgggaacaaccggcagaacgcccctcttacttccatccagattcggttcatacagaatatgatacaggaaaccctggacgattttcgggaagcttgtcatagggacatcgtcaatctgcaggtggagatgatcaagcagtttcatatgcaactgaatgagatgcactctctgctcgaacgatactctgtgaatgaagggctggtggcagaaatagaacggctgagagaggagaacaaaaggctaagggcccacttctag

SEQ ID NO: 196835 - DNA, 1983 bp, synthetic construct
  misc_feature 1..1983: note = Description of Artificial Sequence: Synthetic coding sequence
  source 1..1983: mol_type = other DNA
atgcaggagaacctgcggttcgccagcagcggcgacgacatcaagatatgggatgccagctccatgactctcgtagataagttcaacccacatacatctccacatggcattagctctatttgctggtccagcaacaacaacttcttggtcactgcaagtagctctggcgataagatcgtcgtgtcatcatgcaagtgcaaaccagttcccttgctggagttggctgaaggccagaaacagacttgcgtgaatcttaactcgacatctatgtatctggtgtccggcgggttgaacaacacagtgaatatctgggacctaaagtcaaagagggtacaccgatcgctgaaagaccataaagaccaagtcacgtgcgtgacctataactggaacgactgttatatagctagcgggtcactcagtggggaaataattcttcactcagtgaccacgaatctctcttccacgccgtttggccacggctctaaccagtccgtcagacacctgaagtactcactgtttaaaaagagcttgctgggctcagtatctgataacgggatagtgacattgtgggatgttaacagtcagtctccgtaccacaatttcgacagcgtgcataaggctcccgccagcgggatttgcttctccccggtgaacgaactgctgttcgtcacaattggcctcgataaacggataatcctgtatgataccagctccaagaagctggtaaagacactagtggccgacacacctctcaccgccgtcgattttatgcctgatggagcaactctcgcgatagggtctagtagggggaaaatataccagtacgatcttagaatgctgaaaagccctgtgaagacaatctctgctcacaaaacatcagttcagtgtatcgcattccagtacagtacagtgctgacgaaatcgtctctcaacaagggatgctccaacaaacctacaaccgttaataaacgttcagttaacgtgaacgcagccagtggaggggttcaaaattctggaatcgtccgggaagccccagctacttccattgcaaccgtgctacctcagccgatgacttccgctatgggaaagggaaccgtcgccgttcaggaaaaggcaggcctccccaggagcatcaataccgacacgctgtccaaagaaaccgacagcggcaaaaatcaagacttctcctcctttgacgataccggtaagtcctccctgggggatatgttttctcccattagagacgacgccgtcgtgaacaagggcagcgacgaaagcatcggtaagggggacggattcgacttccttccgcaattgaactcagtgtttcctcccaggaagaaccctgtgaccagttccacgtccgtgttgcattctagcccactgaatgtcttcatgggctctcctggaaaggaggagaacgaaaatcgggatctgacagcagaaagcaaaaaaatttatatgggcaaacaggaaagcaaggacagttttaaacagttggccaaattagtcactagcggcgctgaatccggtaacctaaacacatctccttcttctaatcagacgcgcaactcggagaaatttgagaaaccggagaacgaaatcgaagcccaactgatctgcgaaccccctattaacggcagcagcacccccaacccaaaaatcgcctcaagtgtcactgccggcgtggcctcctccctgtccgagaagattgcagatagcatcggaaacaatcgccagaacgcccctctaactagcatccagattagattcattcaaaatatgatccaagaaacactggatgattttagggaagcgtgccatcgcgacattgttaatctgcaggttgagatgatcaaacagttccacatgcagctcaacgagatgcacagtctcttagaacgatactcagtcaacgagggcctggttgccgaaatcgagagactgagagaggagaacaaaaggctaagggcccacttctag

SEQ ID NO: 196836 - DNA, 1716 bp, synthetic construct
  misc_feature 1..1716: note = Description of Artificial Sequence: Synthetic coding sequence
  source 1..1716: mol_type = other DNA
atgtacctggtgagcggcggcctgaacaacaccgtgaacatctgggatctgaaatctaagcgagtccacaggagtctgaaggatcataaggaccaagtcacctgcgttacctacaattggaacgactgctatatcgccagtggaagcttgtccggcgagatcatactgcacagcgtgacaacaaacctctcctccaccccttttggccacggcagcaatcagtctgtgcgccatctcaaatatagcctttttaaaaagagcttacttggctctgtcagcgacaatgggatagtgacgctgtgggatgttaattcacaatccccttatcacaattttgattccgttcataaggctcccgccagcggcatatgcttcagtccagtgaacgagctgcttttcgtcaccatcgggcttgacaagagaattatactgtatgacaccagttccaagaagctcgttaagactctcgtcgcggacacccccctgactgcagtagacttcatgccagatggggcaacgcttgctattgggtcgtctcgcggcaagatttatcagtacgatctgcgcatgttaaagtcccccgtgaagacaatctctgcccacaagacgtcagtgcaatgtatcgccttccagtactctacagtgctgaccaaaagctcgcttaacaaaggctgttcaaacaaacctacaactgtcaataagcgcagtgtcaacgtgaatgcagcctccggaggcgttcagaacagcggcatcgtcagagaagcccctgcaacctccatagctactgtgttaccacagccgatgacgagcgctatgggcaaggggaccgtggcggtccaggaaaaagcagggctccccagatctattaacactgacacgttatcaaaagagacagattccggcaaaaaccaggacttttcttcattcgacgacaccggaaagtctagcctgggtgacatgttctcaccaatcagagatgatgccgtagtcaataagggctccgatgagtctattggcaaaggcgacggctttgatttcctgccccagttgaactcggtctttcctccacgcaagaaccccgtcacttcctcaaccagtgttctacactccagtcccctgaacgtgttcatgggctcaccgggtaaggaggagaacgaaaaccgggacctcacagctgagtctaagaaaatttatatggggaaacaggagtcgaaggactcctttaagcagctggccaagttggttacctctggggcagaaagcgggaaccttaatacctcaccctcatcaaatcagactcggaactccgagaagtttgagaagccagagaatgagattgaggctcagcttatctgcgagcctcctattaacggaagcagcaccccgaatccgaagatcgcaagttcagtgaccgccggtgtggctagcagcctcagtgaaaagattgctgactccattggcaataaccggcagaacgctccgctgacctcgatccagattaggttcatccagaacatgatccaggagactctggacgactttcgagaagcctgccaccgcgatattgtgaatctccaggttgagatgatcaaacagttccatatgcagctaaacgaaatgcattccctgttggaaaggtacagcgttaacgaggggctcgtggcggaaatcgagcgtttaagggaagaaaataagcgacttagggctcacttttag

SEQ ID NO: 196837 - DNA, 483 bp, synthetic construct
  misc_feature 1..483: note = Description of Artificial Sequence: Synthetic coding sequence
  source 1..483: mol_type = other DNA
atgtacctggtgagcggcggcctgaacaacaccgtgaacatctgggacttgaagtccaagagggtgcaccgcagtcttaaggaccataaggaccaagtgacctgtgttacctacaactggaatgattgttacattgctagcggttccctgtctggcgagattattctccatagcgtgaccactaatctgtcctctaccccatttggacatggctcaaaccaaagcgttcggcacttgaagtactccctgttcaaaaagagcctgctgggatccgtgagtgataacggtatcgtcaccctgtgggatgtgaatagtcagagtccctatcacaattttgactcagtgcacaaggctccagctagcggaatttgcttttcgcccgtcaatgagctcctttttgtcaccattggtcttgacaagagaattatcttatatgacacgagctccaaaaaactcgtgaagacactggtggctgacacatag

SEQ ID NO: 196838 - DNA, 504 bp, synthetic construct
  misc_feature 1..504: note = Description of Artificial Sequence: Synthetic coding sequence
  source 1..504: mol_type = other DNA
atgcacttcaccggcgccgtgatgcaggagaacctgcggttcgcctcaagcggggatgacatcaagatttgggatgcgtctagtatgacgctggtggataaattcaatccacacacaagtccacatggcatctcctccatctgctggtcatccaacaataattttcttgtaacagcttcaagttctggcgataaaatcgtggtcagctcctgcaagtgcaaacctgttccgctcctggagctggcggaagggcaaaaacagacgtgtgtgaatctcaacagcacctctatgtaccttgtgagcggtgggctcaataatactgtcaacatatgggacctgaagtcaaaaagagtgcaccggtccctcaaggatcacaaagaccaggttacatgcgtgacttacaattggaacgactgctacatagccagcgggagcctcagcggagagattatcctccacagtgttaccaccaacttgtccagcaccccatttgggcacggttag

SEQ ID NO: 196839 - DNA, 306 bp, synthetic construct
  misc_feature 1..306: note = Description of Artificial Sequence: Synthetic coding sequence
  source 1..306: mol_type = other DNA
atgcaggagaacctgcggttcgccagcagcggcgacgacatcaagatttgggacgctagcagcatgactctggtcgacaagttcaatcctcatactagtcctcatggaattagcagcatctgctggtcgtctaataacaacttcctagtgacagcttcatctagtggggacaagatcgtcgtgagcagttgtaagtgcaagcctgttcccctgttggaactggcggaagggcagaagcagacttgcgtgaatcttaattccacctccatgtacctcgtcagtggcggcctcaacaataccgtgtag

SEQ ID NO: 196840 - DNA, 498 bp, synthetic construct
  misc_feature 1..498: note = Description of Artificial Sequence: Synthetic coding sequence
  source 1..498: mol_type = other DNA
atgcaggagaacctgcggttcgccagcagcggcgacgacatcaagatctgggatgcctccagcatgaccttagtggataagttcaacccacatacttctcctcacggaattagcagtatttgttggtcttccaacaataatttcctcgtgactgcctcatcatccggcgataagatcgtggtctcttcttgtaaatgcaaacccgttcctcttcttgaactcgccgagggacagaaacagacttgcgtgaacctgaattcaacgagcatgtacctggtttccggggggttgaataataccgtgaatatctgggatcttaagtccaagagagtgcaccggagccttaaagaccataaagaccaggtcacttgtgtcacgtacaactggaatgattgctacatagctagtggcagtctttcgggagaaattatccttcacagtgtgacaaccaatctctcatcaacgccctttggacatggcagtaaccagtctgtctag

SEQ ID NO: 196841 - DNA, 2004 bp, synthetic construct
  misc_feature 1..2004: note = Description of Artificial Sequence: Synthetic coding sequence
  source 1..2004: mol_type = other DNA
atgcacttcaccggcgccgtgatgcaggagaacctgcggttcgccagttccggcgacgatatcaagatttgggatgcatcttctatgacccttgttgataagtttaaccctcacactagccctcatggaatctccagcatttgctggagcagcaacaataatttcctcgtcaccgcctcatccagcggtgacaaaatcgtggtgtcatcctgcaagtgcaagccagtgccactgctggagctcgcggaagggcagaagcagacttgcgtaaacttgaattctacgtcgatgtacctggtgtcaggcggactgaataataccgtaaacatctgggatctgaagagtaaaagagttcatagatcccttaaagatcacaaagatcaagttacctgcgtgacttacaactggaatgactgctatatagcctctgggagcctcagcggggagattatcctgcactctgtcacaaccaatctgtctagcacaccattcggacacggttccaatcagtccgtgagacacctgaagtattctctctttaaaaagagcctattggggagtgtgagcgacaatggtatcgtcacactgtgggacgtgaatagccagagcccttaccacaactttgattcggtgcacaaagcacccgcgtccggaatttgcttctcccccgttaacgagctcctgtttgttactatcggcttggataaaaggatcatcctgtacgatacctccagtaaaaaactggtcaagacattggtcgctgacaccccactgaccgcagttgactttatgccagacggcgccacactcgccatagggtcctcccggggcaaaatctaccagtacgaccttcgcatgttaaaatcaccggtgaagaccatcagtgcgcacaagacatctgtacagtgtatcgcctttcagtacagcaccgtgttgacgaagtcatccctgaacaagggctgttccaataagcccactacggtgaacaagagatctgtcaacgttaacgccgcttcaggaggtgtgcaaaattctggaatcgtgcgtgaagcgcccgcgacgtccatcgccactgtgcttcctcagcccatgacatccgccatgggaaaggggactgtggcagtgcaggaaaaggccggacttcccagaagcatcaacacagatactctaagcaaggaaacagacagcgggaaaaatcaggacttttctagtttcgatgatacgggcaaaagttctctgggcgacatgttctcacccatcagagacgatgccgtcgtgaacaaggggtccgatgagtcaatcggtaagggcgacggcttcgatttcctcccccagcttaacagcgtctttccaccgaggaagaaccctgtgacttcttccacctcagttctgcacagctccccactcaatgtgttcatgggctcaccggggaaagaggaaaacgaaaatcgggatttgacagcagaaagcaagaaaatctacatggggaagcaggagagcaaggacagctttaagcagcttgccaaactcgtgacctctggagccgaatctggtaaccttaacacaagtcccagctctaatcagacccggaattcggaaaaattcgagaagccggaaaatgaaattgaagcacaactgatctgcgaaccccctatcaatgggagttccacccccaaccctaaaatcgcaagctccgtgacagcaggagtggcctcgtcactgtccgagaagatcgccgattctatagggaacaacaggcagaacgcacccctgacatccatccagataaggttcattcaaaacatgatccaggaaaccttggatgatttcagggaagcctgtcatcgcgacatcgtaaaccttcaggtcgaaatgattaaacagtttcatatgcaactgaatgaaatgcattccctgttggagcgctattctgttaacgagggattggtggcggaaatagaaaggctgcgagaggagaataagaggctcagagcgcacttctag

SEQ ID NO: 196842 - DNA, 3744 bp, synthetic construct
  misc_feature 1..3744: note = Description of Artificial Sequence: Synthetic coding sequence
  source 1..3744: mol_type = other DNA
atggcccagagcctgcggctgcacttcgccgcccggcggagcaacacttatcccctctctgaaacgagcggggacgatctggatagccacgtgcatatgtgctttaaacgtcccactaggataagcaccagcaacgtggtacaaatgaaactcacaccaaggcagactgccctcgcgccacttatcaaagagaacgtgcagagccaggaaagaagttctgtgccctcttctgagaacgtcaacaagaagagctcctgtttacagatcagcctacagcctaccagatacagtggatacttgcagtcctcgaacgtgctcgctgactccgacgatgccagcttcacatgcattctgaaggatggcatttattcttcggctgtggtagacaacgaactaaatgctgtgaatgacggccacctggtatccagccccgccatttgctctggcagcctttctaacttctctacaagtgataatgggagctattcctctaacggatctgactttggaagctgtgcaagtattactagcggcggatcgtacaccaactcagtcatcagcgactccagttcttatacgttccccccatccgatgataccttcttgggcggaaacctaccctccgactctacatcaaatcggtcagtgcccaatagaaacaccactccgtgcgagatcttttccagatctacttccactgacccattcgtccaggacgacctcgaacacgggttggaaattatgaagctgcccgtttcgcgcaacacaaagatccctctaaagaggtactcatcactcgttatcttccctagaagtccatccaccacacggcctactagtcccacaagtctatgcacgctcctctcaaaaggcagctaccagacctctcaccagtttattatttcaccttctgagatcgcacacaatgaggatgggacttccgcaaaaggattcttaagcacagctgttaacgggctgcgcttatctaaaaccatctgtactccgggagaagtgcgcgacattcgaccccttcacagaaaggggtctttgcagaaaaagatcgtactgagtaataacaccccacgccaaactgtctgtgagaagagcagcgaaggctatagctgcgtgtctgttcacttcactcaaaggaaggcagctactttggattgtgaaacaactaatggcgactgcaaacctgagatgagcgaaatcaaattgaactcggacagcgagtatatcaagctaatgcatcgaacgtctgcctgcctaccgagcagtcagaacgttgactgtcagattaacattaatggggagctggaaagacctcacagtcagatgaacaaaaaccacggaatcctgcgtagatctatctctctgggcggggcttaccccaacattagttgcctgtcttcattgaagcacaattgctcgaaagggggcccatctcagttactcattaagttcgcatctggcaatgagggtaaggtcgacaacctttcgagagactccaatcgagactgcacgaacgagctgtctaactcttgtaagcccgggtgggttgtgctggaccaaccggatgccgcctgccatctccagcagcaacaggagccttctcctttgcctccgggttgggaggagcgacaggacattctcggacggacttactacgtgaatcatgaatcacgcagaactcagtggaagagacctacccctcaggataacttaaccgatgccgaaaacgggaatatccagcttcaggcccagcgggccttcaccactcgacgccagattagcgaggagacagaaagcgtggacaatcgcgaatctagcgagaattgggaaatcatacgcgaagatgaggcaacgatgtacagtaatcaagccttccccagcccaccacccagttctaatctggacgtcccaacacatcttgccgaggaactgaatgctaggttaactatcttcggaaacagcgctgtgtcccagccagccagcagtagcaatcattcttcccgtagggggagtctccaagcttatacctttgaggagcagcctactctgcccgtcctgctccccacatccagcggactcccccccgggtgggaagaaaaacaagatgaaagaggcagaagctactacgtggaccacaattctaggacaaccacatggactaagccgaccgtccaggcgacagtggaaacttcccaattgacttcttctcaaagtagtgccggcccacagagccaggcctctacttctgacagcggccagcaagtgacacagccgagcgagatcgaacagggatttctacctaaaggatgggaagtccgccatgcccccaatggcaggccgttttttattgaccacaacacaaagactacaacatgggaggaccctcggttgaagatccccgcccatctgcgggggaagacttcgctggataccagcaacgatttgggtcctctgccgcctggatgggaggagcggacacatacagacgggaggattttctatattaaccataatattaaaagaacccagtgggaagacccacgcctggagaacgttgccatcaccggccccgccgtgccttatagccgggactacaagagaaagtatgaattcttcaggcggaaattgaagaaacaaaatgacataccaaacaaattcgagatgaaactgcgaagggctacagtgctcgaagattcgtacagaaggataatgggggtgaaaagagccgactttctcaaggctagactgtggatcgagttcgacggcgaaaagggcttagactatggaggggtcgccagggaatggttttttctcatcagcaaggaaatgttcaacccttattatggcctcttcgagtattcagctaccgacaactatacattgcaaatcaatccaaatagtggtctttgcaatgaagaccatctgtcttacttcaagttcatcgggcgggtagctgggatggcagtgtatcacggaaaactgttagacggattctttatcaggccattctataaaatgatgttacataaaccaattaccctgcacgatatggaaagcgtcgactccgagtattacaactctctcagatggatcctggaaaacgatccgaccgagctggatctgcgtttcatcatagatgaagaattgttcggccagacgcaccagcatgagctgaaaaatgggggatctgagatcgtggttactaataaaaataagaaagagtacatttatttagttattcagtggcggttcgtgaatagaatacagaagcagatggccgcattcaaggagggcttttttgaactgatcccacaagacttgatcaagatctttgatgagaacgaactggagctcctgatgtgcggacttggcgatgtggatgttaacgactggagagaacataccaaatataaaaatggatattcggcgaaccaccaggtaattcagtggttttggaaagccgtactgatgatggatagcgagaagagaatccgcctacttcaatttgtgacaggtacaagcagagtccccatgaacggtttcgctgaactatatggttcaaatgggccccagagcttcaccgtcgaacaatgggggacgcctgagaaacttccgcgagcccatacttgttttaacaggctggacctgccgccctacgaaagcttcgaggagctgtgggacaaactgcagatggctatcgagaatacccagggctttgatggagtggactag

SEQ ID NO: 196843 - DNA, 2703 bp, synthetic construct
  misc_feature 1..2703: note = Description of Artificial Sequence: Synthetic coding sequence
  source 1..2703: mol_type = other DNA
atggccacctgcgccgtggaggtgttcggcctgctggaggacgaggagaactctcgaattgtacgggtgagagtcatagctggcatcggcctggccaagaaggacattcttggtgcttcagatccgtatgtacgggtaactctgtacgacccaatgaacggcgttctgacttccgtgcagactaagactatcaaaaagagtctcaacccaaagtggaatgaggagatcctcttccgcgtgcacccccagcagcatcggctgctctttgaagttttcgacgagaatcgcctaacacgtgacgacttcctgggccaggtcgatgtgccattgtaccctttgccaactgagaatcctcgactcgagcgcccgtacacattcaaggacttcgtcttacacccacggagccacaagagccgggtgaaggggtacctgagactgaagatgacctacctccccaaaactagcggctcagaggacgataatgcagagcaagcagaggagctcgagcctggatgggtggtgttggatcaacccgacgccgcctgccatctgcagcaacaacaggaacccagccctctgccacccggctgggaagaaaggcaggatatcctggggcgaacatactatgttaatcatgagagtcgtagaacacaatggaaaaggcctaccccacaagacaacctaacggacgctgagaacgggaatatccagctgcaggcccaacgtgcttttactactcggagacagataagtgaagagacagagagcgtggataacagggaatctagtgagaattgggaaatcattcgcgaggatgaggccacgatgtactctaaccaggcttttccttcacctcctccatcttccaacctcgatgtaccgacccatttggcggaagagctcaatgctcggctcactatctttggtaacagtgctgtgtcccaaccagcgtcttcctccaaccacagtagtagaaggggaagcttgcaagcctacaccttcgaggagcaaccaaccttacccgtgctgttgcccaccagctcgggcctcccccctggctgggaggagaagcaggacgagcgcggccgcagctattacgtggaccacaacagtcgaactactacctggaccaaacccactgtccaggcgacagtcgaaactagccaactgacaagctcccagagcagtgccggccctcaatcccaggcatctacatccgatagtggacagcaggtgacgcaacccagcgagatcgagcaaggctttctgcctaagggctgggaggtccggcatgcacctaacggtcgccctttttttatcgatcacaacacaaagaccaccacctgggaggatccacgcctgaagatccccgcgcacctgcggggcaagacatcattagacactagtaatgatctagggccacttccccctgggtgggaagagcgtacacacaccgatggaaggatcttttacataaatcataacatcaagcggacgcagtgggaggatccacgactcgaaaatgtggccataactggcccagctgtgccttactcccgagactacaagaggaaatatgagttttttagacggaagctgaaaaagcaaaacgatataccaaacaagttcgagatgaagctgagaagggccacagtgctcgaggactcttatcggagaatcatgggagttaagagagccgacttcctgaaggcacgtctgtggatcgagttcgacggggaaaaagggctggactatgggggtgttgctagagagtggttttttctgatatccaaagagatgttcaacccttattacggactattcgaatacagtgccacagacaattacaccctccagataaaccccaactccggtttatgtaacgaggatcacctgtcttatttcaagttcataggcagagtagccggcatggctgtctaccatggcaagctgcttgatggtttctttatcagacctttttacaagatgatgctgcacaaaccgattactttacacgacatggaatctgttgattccgagtactataacagcttacgatggattctggagaatgatccaaccgaactcgacctcaggtttataattgacgaagagctcttcgggcagactcaccagcacgagcttaaaaacgggggctctgaaatcgtggtgacgaacaagaataaaaaagaatatatttatttggtgattcagtggaggttcgtgaacagaatccagaagcagatggcagcgtttaaagagggcttcttcgagctgattcctcaagatttgatcaagatctttgacgagaacgaattagaacttctcatgtgcggattaggcgatgtcgacgtgaacgactggagagagcacaccaaatataagaatggttacagcgcgaatcatcaggtgatccagtggttttggaaagccgttctcatgatggacagcgagaaacgcatcaggctgctacagttcgtcacagggacttcacgtgtgcctatgaatgggttcgcggagctgtatggaagcaacggcccccagagttttacggtggaacaatggggcacccctgagaagttacctcgcgcacatacctgctttaacaggctagacctccctccctatgagagctttgaagagttgtgggacaaactgcagatggctatcgaaaacacccagggtttcgacggggtcgattag

SEQ ID NO: 196844 - DNA, 3912 bp, synthetic construct
  misc_feature 1..3912: note = Description of Artificial Sequence: Synthetic coding sequence
  source 1..3912: mol_type = other DNA
atggcccagagcctgcggctgcacttcgccgcccggcggagcaacacctaccccctgtccgaaacgtcgggggatgatctggacagtcatgtgcacatgtgtttcaaacggcctacgcggatctctaccagcaatgtcgtccaaatgaaactgacaccaaggcaaactgctcttgccccccttataaaggagaacgtccaatcacaggaacggtcatctgttccaagctctgagaacgtcaacaaaaagtcttcttgcctgcaaatcagcctgcagcccacccgatatagtggttaccttcagtccagcaatgtcctggctgattccgacgatgctagcttcacctgtatcttgaaggacggaatttatagcagtgccgtggtcgataatgagcttaacgctgtgaacgatggccatctggtgtcttccccggccatctgttctggatccttatccaatttcagtacttctgataatggctcatattcaagcaatggatctgacttcggctcttgtgctagcattacatccggaggcagctatacaaattctgtaatttcagacagctcatcatacacctttcctccctcagacgatacatttctcggcggaaacctgccctcagacagcacttccaacagaagcgttcctaataggaataccaccccttgcgagatcttttcccgttccacaagtacagacccgttcgtccaggacgatctagagcatggcctggaaataatgaagctgcccgtgtctcgcaataccaagatccccctcaaacggtattcttccctcgtaattttcccgcgaagcccctctacaactcgacctacctcgcctacctcactgtgtacgttactgtccaagggctcttatcagacatctcaccagttcatcatcagcccttccgaaattgcgcacaacgaggatggaacttctgcaaaaggatttctctccacagccgtgaacggcttacgcctctctaagactatctgcacccccggggaggtacgggacatcagacccctccaccgtaagggctccctccagaagaagatagtgcttagcaataatacccctagacagacagtctgcgaaaaaagtagtgaggggtacagttgcgtatcagtgcacttcacccagagaaaggcagctaccctggactgtgagacaacaaatggtgactgcaaaccggaaatgtccgaaatcaaactgaattcggatagcgaatacataaaacttatgcacagaaccagtgcctgcctcccttcgagccagaatgtggactgtcagatcaacatcaacggtgagttagaacgcccccactctcaaatgaataagaaccacggcattttgagacgaagcatttccctggggggagcataccccaatatatcctgcctgtcctctctcaaacacaattgctctaagggagggccatcacagctgctgattaagttcgcctcagggaatgaaggtaaggtggacaacctgtcacgggacagcaacagggactgtacgaacgagctctctaacagttgcaagacccgggatgacttcctgggacaggttgacgtgccattgtacccactgcctaccgaaaatcctaggttagagcgaccatacacttttaaggacttcgtactccatccccgatcccacaagtcaagggtcaagggatacctgcgtctcaagatgacttaccttcctaagacgagcgggagcgaagatgacaacgctgaacaggccgaggaactggaacagcagcaggaaccttcccccctgcctcctggatgggaggagcgtcaggacatcttagggagaacctactatgtaaaccacgagtctcgtcggacacagtggaaaaggccgaccccccaagataacctcactgacgccgaaaatggtaatatacagctgcaggctcaaagggcattcacaaccagaagacagatctcagaagagactgagtccgtggacaaccgcgagtcaagcgagaactgggaaattatccgcgaggatgaggccacgatgtatagcaaccaagcattcccctccccaccaccttcctccaacttggatgtccccacacacctggcagaagagttaaatgcaagacttactatttttggaaactcagctgtctcccagcccgcctcaagttccaaccactcctcccgccgtgggagcctgcaggcgtacacctttgaggagcagcccaccttgcccgtgctcttaccgactagctccggcctccctccagggtgggaagagaagcaagatgaacgaggaaggtcttattacgtcgaccataactcccgcaccacaacctggacaaagcctacagtgcaggccacagtggaaaccagccaactgacgagttcccagtcttcagccggaccacagtctcaggcctctacttctgattccggtcagcaagttacacaacccagtgagatcgagcaggggtttttgccgaaaggttgggaagtccggcacgcccccaatgggaggcctttttttattgaccataatacaaagacaactacctgggaggatccccggctcaagatcccggctcacctacgggggaaaactagcctggatacatctaacgatctcgggccgctaccacctgggtgggaagaaaggactcacactgacggtcggatattttacatcaaccataacattaagaggacccagtgggaggatccaaggcttgagaatgtggctataactggccctgctgtgccgtactccagggactacaaacgcaagtacgaatttttcaggaggaagcttaaaaaacagaatgacatcccaaataagtttgaaatgaaactgcgccgagccactgtacttgaggatagctatcgccgcataatgggagtgaaaagggccgacttcctgaaagcccgcttgtggattgagttcgatggggagaaagggttggactatggaggcgttgccagggaatggttcttccttatttcgaaggaaatgtttaacccctactatggcctgtttgagtattcagcgactgacaattacacactccaaatcaatccaaatagcggtctgtgcaacgaagaccatctgagctatttcaagtttattggcagggtagccgggatggcagtttatcacggcaaactcttagatggtttctttatcagacccttctacaaaatgatgcttcacaaacccattaccctgcacgatatggaatctgtcgactcagagtactataacagtctgcgctggatcctggaaaacgatcccaccgagctcgatctgagatttatcatcgacgaggagctctttggtcagacacaccagcatgagttgaagaatgggggctcagaaatcgtggtcacaaacaagaacaaaaaagaatatatctacctagtcatacagtggcggtttgtgaaccgtattcagaagcaaatggctgcttttaaggagggattctttgagctgatcccccaggaccttatcaagattttcgatgaaaacgagctggagcttctgatgtgtggcctgggtgacgtagacgttaatgactggagggaacatacaaagtataagaatgggtacagtgcaaaccatcaggtgatccagtggttctggaaggctgtcctcatgatggactcagaaaaaaggatacggctgttacaatttgtgaccggaacctcaagagttccaatgaacgggttcgccgagctctacggatcaaacgggccccagtcattcacggtggaacaatggggtacacctgagaaactacccagagcccacacttgttttaacaggctggatctgcctccctacgagtctttcgaggaactgtgggataagctccagatggctatagagaatacccaggggtttgatggggtggactag

SEQ ID NO: 196845 - DNA, 3960 bp, synthetic construct
  misc_feature 1..3960: note = Description of Artificial Sequence: Synthetic coding sequence
  source 1..3960: mol_type = other DNA
atggcccagagcctgcggctgcacttcgccgcccggcggagcaacacctaccccctctccgagacttctggggacgaccttgatagtcatgtgcacatgtgttttaagcgccccactcgcattagcactagcaatgtggtgcagatgaaactcaccccaaggcaaaccgccctcgcccccctcatcaaagagaatgtgcagagtcaagagagaagctcagtcccttcctctgaaaatgtgaataaaaagtcttcttgccttcagatatccctgcagcctacacgctactctggatacctccaatcttccaatgtccttgctgacagcgacgatgcttcttttacctgtatcttgaaggacggcatttactcttcagccgttgttgataacgaactgaacgcggttaacgatggtcacctcgtctctagcccagctatctgctccgggagcctcagtaattttagcacatctgataatggtagctactccagcaacgggtctgactttggctcctgcgctagtatcaccagtggagggtcctatactaacagcgtgatctcggatagcagtagttacacattcccgcccagcgatgatacatttttagggggaaacctccccagcgactcaacctcaaaccgaagtgtacctaaccggaacaccaccccttgcgagatattctctcggtctacctccactgatcctttcgtgcaggatgatctggagcacggcctggaaattatgaaactaccagtctctaggaacacaaagattccgttaaagagatacagcagtctcgttatatttccgcgatctccctcgacaactcggccgacttctccaacatcattgtgtaccctgttaagtaagggctcatatcaaacatcacaccagtttatcatcagcccaagtgaaatcgctcataatgaggatggcacttccgcaaaggggttcttaagtacagccgtgaatggcctgcggcttagcaagacgatatgcacacctggcgaagtcagagacatccgccctctgcatcgcaagggatccctacagaagaagatcgtgctgtcaaataatacccccagacagaccgtgtgtgagaagtcctctgaaggctatagctgcgtgagcgtgcattttactcagcggaaggccgctactctcgactgtgaaactacaaacggcgactgtaaacctgagatgtccgagattaagttgaattccgattctgaatacatcaagcttatgcaccgcactagcgcttgtttgcccagcagccagaacgtggattgccagatcaacatcaacggcgagttagagaggccgcattcacaaatgaacaagaaccacggcatactgaggcgctcaatctctcttggaggcgcctatccaaatataagttgtctcagctccctgaagcacaactgctcaaaaggtggcccctcccagcttttaatcaaatttgccagtgggaatgagggtaaggtggataacctcagtagagattcgaatcgcgactgcaccaatgagctgtcgaacagttgcaagacaagggacgacttccttggacaggtagacgtccccctttacccgctccccaccgaaaatccccgcctggagcgtccttataccttcaaggacttcgtgctgcaccctaggtcccacaagtcgcgcgtcaagggctatcttcgcttgaaaatgacttatctgccgaagacaagtggaagtgaagatgacaacgccgaacaagccgaggagcttgagcccggctgggtggttctcgatcaaccggatgcggcatgtcacttacagcagcaacaagagccttccccactcccacctggatgggaagaacgccaggatattttagggaggacttactatgttaatcatgaatcacggcgcacacagtggaagcgacctaccccacaggacaatctgacagacgccgagaacggtaatatacagttgcaggcccaacgcgctttcaccacacgtaggcagatttcggaggagaccgagagcgtggataatcgggagagtagtgagaattgggagatcatacgcgaggatgaagcaactatgtattcaaaccaggcctttcccagccccccaccttcatctaacctcgatgtcccaacacatctcgccgaggaactcaacgcccgacttaccatttttggcaacagtgctgtgagccagcccgcatcatcaagcaatcacagctcacggagaggtagtttgcaagcatatactttcgaagaacagcctactcttcccgtgctgttacctacaagttccggactgccacccggatgggaggaaaagcaggacgagagggggcgctcatattacgtggatcacaactcacgtaccacgacatggaccaaaccaacagtgcaggccactgtagagacctctcagctgacgagcagccagagtagtgccggaccccagtcccaggcctcaacttctgatagtggccagcaggtaacccagcccagtgaaatcgaacaaggattcttgcctaagggctgggaagtccgccacgcaccaaacggccggccattctttattgatcacaatactaagaccactacttgggaggacccacggcttaaaattcctgcacatttgagaggtaagacgtccctagacacaagcaacgacctgggcccacttccgcctggatgggaggagagaactcacacagacggcagaattttttatattaatcataacatcaagcgcactcagtgggaggatccaaggcttgagaatgtggcaatcacaggtccggctgtgccctattctcgggattacaaaagaaagtatgagtttttcagaaggaaacttaaaaagcaaaacgatatcccaaataaattcgagatgaagctgaggcgcgcaacagtgctcgaggattcttaccgccggattatgggcgtgaagcgggccgactttcttaaggcccgtttgtggattgaatttgatggtgagaagggattggactatggcggagtggcgcgcgagtggttcttcctgatatccaaagagatgtttaatccgtattatgggctctttgaatactcagccacagacaactatactttgcagattaaccctaacagtggcctttgcaatgaagatcacctctcttactttaaatttattgggcgtgtcgccggaatggccgtgtatcatgggaagctgctggacggtttcttcatcaggccattttacaagatgatgctccacaagcctatcacactccatgatatggagtccgtggatagtgagtactataattcactccggtggatcttggaaaatgatccgacggagttggacctccgctttatcatcgatgaagaattatttggccaaacccaccagcacgaactcaagaatggcggctccgaaatcgttgtcaccaataaaaacaagaaggagtacatttacctagtaatacagtggagatttgtcaaccgaatccagaagcagatggcagccttcaaggagggcttcttcgaattgattcctcaggatttgattaagatattcgatgaaaatgagttagaacttctcatgtgcgggctaggcgatgtggacgttaacgactggcgggagcataccaaatacaaaaatggatactctgctaaccaccaggtaattcagtggttttggaaggctgtgctaatgatggactctgagaagaggatcaggttgctgcaattcgtcacaggaactagcagggtgcccatgaatggatttgcagaactgtacggctccaatggtcctcagtcatttaccgttgaacaatgggggactcctgaaaagttgcctcgcgctcacacgtgctttaatagactggatctgcccccctacgagtcattcgaggaactctgggacaagctgcagatggctattgagaacacccaaggcttcgatggagtcgattag

SEQ ID NO: 196846 - DNA, 2616 bp, synthetic construct
  misc_feature 1..2616: note = Description of Artificial Sequence: Synthetic coding sequence
  source 1..2616: mol_type = other DNA
atggccaccggcctgggcgagcccgtgtacggcctgagcgaggacgaaggtgagtctaggattctcagggtaaaggtggtctctggtatagatctcgccaagaaagatatcttcggcgccagcgacccctacgtgaaattgtctttatacgtggcagacgagaaccgcgagttagctctcgtccagaccaaaacaattaaaaaaaccctgaacccaaagtggaacgaagagttttatttccgagtcaacccgtccaatcacagactactttttgaagtgtttgatgagaataggctaacccgggatgattttttgggtcaggtggatgtgcctttgtcacacctgcccaccgaggatcccactatggaaaggccatatacattcaaagattttttgctccgaccacggagccataagagccgcgtgaaaggatttttacgattgaaaatggcgtacatgcccaagaacggcggccaggatgaggaaaacagcgaccagagggacgacatggaacacgggtgggaagttgtcgactcaaatgatagcgcgtcacaacatcaggaagagcttccaccacccccactgccccctggctgggaggagaaggtcgataatctggggcgaacctattatgtgaaccacaataatcgcaccacccagtggcaccgcccctccctgatggacgtgtcatccgagagtgacaataatattcgccagattaaccaggaggcagctcaccgacgattccgatcacgccgacacattagcgaggatctggagccggagccctcggagggcggcgacgtgcctgagccatgggaaacgatttcagaagaggtcaatatcgcgggtgatagcctgggccttgctctgccacctcctcccgcttcccccggatccaggacctccccccaggagttgtccgaagagctgagccgcaggctccagattacaccagatagtaacggcgagcaattcagctcactaatccagcgagaaccaagctccaggctcagatcatgcagcgtgactgacgccgtggccgagcagggccacctgccgcccggcgctaaggattccccagtccgtagggccgtgaaagataccctgtccaatccccagagtcctcagccatcaccttataatagtcctaaacctcagcataaagtgacacaatcatttttgccacccggatgggagatgaggatcgcaccaaacggccgaccttttttcatagatcacaacacaaagacaaccacatgggaggaccctaggctcaaatttcctgtgcacatgaggagtaaaacaagtttgaatccaaacgacttgggccccctgccacctggctgggaggaacgaattcacctcgatggaagaaccttctatattgaccacaactcaaaaatcacccagtgggaagacccacgactgcagaacccagccattaccgggcccgctgtgccttattcccgcgaattcaagcagaagtacgattacttccggaaaaaacttaaaaaaccagcagacatccctaatcgtttcgaaatgaagctccataggaacaatatctttgaagagtcgtaccgtcggatcatgagcgtgaagcgtcccgacgtgctgaaagcccggctgtggattgaattcgagtccgagaaagggttggattacggcggcgttgcacgcgagtggttttttctcctttcaaaggagatgtttaacccctactacggtctttttgagtatagtgcgacagataactataccctgcagataaacccaaactccggtctgtgcaacgaggaccatctgtcctatttcacgttcatcggacgcgtggctggcctcgcagtcttccatggaaagctgctggatggatttttcatccgccctttctacaagatgatgttaggaaagcaaatcactctgaatgacatggagtcagttgactccgagtactacaactcactgaagtggatccttgaaaacgaccctacagaactcgacctgatgttctgcattgatgaagaaaacttcggtcagacctatcaggtggacctcaagcccaatggctccgagataatggtcaccaatgaaaataagcgggagtacattgacctcgtgatccagtggaggttcgtgaatcgcgtccagaagcagatgaacgccttcttggagggattcaccgagctcttgccaatcgacctcattaagattttcgatgaaaacgagctcgaactgctcatgtgcggtcttggggatgtagatgtaaacgactggcgccagcactccatctataagaatggatactgccccaatcatcctgttattcaatggttttggaaggccgttctcttgatggatgcagaaaagcgcatcaggctcctccagtttgttacgggtacaagtagggtgcccatgaatggcttcgcggagctttacggttccaatggcccgcaattatttactattgagcaatggggcagccctgaaaagctgccccgggcccacacctgcttcaaccgcttggatctgcccccctatgagaccttcgaagacttgcgggagaagctgctgatggccgtggagaacgcccagggctttgagggggtggattag

SEQ ID NO: 196847 - DNA, 2508 bp, synthetic construct
  misc_feature 1..2508: note = Description of Artificial Sequence: Synthetic coding sequence
  source 1..2508: mol_type = other DNA
atggagcggccctacaccttcaaggacttcctgctgcggccccggtcccacaaatcccgagtcaagggctttctccgtctcaagatggcgtacatgccgaagaacggggggcaagatgaggaaaattctgaccaaagggacgacatggaacacggttgggaggtggttgacagtaatgattcggcatctcagcaccaggaagagctccctccgccccccctgccaccaggatgggaggaaaaggtcgataatctcggcagaacttattatgttaatcataacaaccgaacaacccagtggcacagaccgagtcttatggatgtgtcttctgagagcgacaataacatcagacagattaatcaggaggcggcccatagaaggttccgcagtcgccgacacatttccgaggatctggaaccagaaccctctgaaggcggcgacgtccctgagccgtgggaaactataagcgaagaagtgaacatcgccggcgactccctcggcctggcccttccccctccgccggcgtccccaggatctaggacctctccccaggaacttagcgaggagctctctcgcagactccagataacacccgatagcaacggcgaacaattttcctctctcatacaaagagagccctcctcacgcctgagaagctgttctgtgaccgacgctgtggccgaacagggccacctgccccccccttccgttgcctacgtacataccacacccgggctgcctagcggatgggaggagcgtaaggacgccaagggcaggacctattacgtgaatcataacaacagaaccactacctggactcggccgatcatgcagctagccgaggatggagcctccggtagcgccaccaatagcaataatcacctgattgagccccaaatacggaggccaaggtccttgtcatcgccaactgtcacacttagtgctcctcttgaaggcgcaaaagacagtccagttcgacgggccgtcaaggacacactgagtaatccacagagcccccagcctagtccttacaactcccctaagccacaacacaaagtgacacagtctttcttacctccggggtgggagatgcggatagcgcccaatggtaggcccttctttatcgaccacaacacgaaaaccacgacctgggaagacccgcgtctgaagtttcccgtacacatgagatcaaagaccagtctgaatccaaatgacctgggccccctccccccaggctgggaggagcggatacatttagacgggaggactttctacatcgaccacaacagcaagatcacacaatgggaggaccctcgactgcagaaccctgccatcaccgggccaaaagcagtgccgtacagtagagaattcaagcagaaatatgactactttagaaaaaaactgaagaagcccgctgatatacctaaccgctttgagatgaagctccaccggaacaacatttttgaggagtcctaccgccggattatgtccgtgaaaaggcctgacgtgctgaaggcaaggttatggattgaattcgagagtgagaaggggctggactacggcggcgtggctcgagagtggttctttctactctctaaagagatgtttaatccgtactatggcctgtttgagtattcagcgaccgacaactacacgctgcagataaacccgaactctggcctgtgcaacgaggatcacctttcttattttaccttcatcggacgcgtcgcagggttagccgtttttcacggcaagctgctggacggcttcttcatccggcccttttacaagatgatgcttggcaagcagatcactctcaatgacatggaaagcgtggactcggagtactacaactccctgaagtggatcctggagaacgatccaacagagctggacttgatgttttgtattgacgaggagaattttggtcagacataccaggtggatctgaaacccaacggctccgaaatcatggttacgaacgagaacaagagggagtatatcgatctagtgatccaatggcgctttgtcaacagggtccagaaacagatgaatgcatttctcgaaggcttcaccgagctgctcccaatcgacttgattaaaattttcgacgagaacgaactcgagctgctaatgtgcggcctcggggacgtagatgtaaatgactggcgtcagcactctatatacaagaatggctattgcccaaatcacccagtgatccagtggttctggaaagcagtgttattaatggacgccgagaagaggatacgactgctgcagttcgtcactggtaccagtagggttcctatgaacggttttgccgagctctatggatcaaatgggcctcagttgttcaccatcgagcaatggggttctccggagaagctgccaagggcccacacttgttttaaccgcttggacctcccaccttatgaaacttttgaggacctgcgcgaaaaattgttaatggccgtagaaaatgcgcagggatttgaaggcgtggattag

SEQ ID NO: 196848 - DNA, 2736 bp, synthetic construct
  misc_feature 1..2736: note = Description of Artificial Sequence: Synthetic coding sequence
  source 1..2736: mol_type = other DNA
atggccaccggcctgggcgagcccgtgtacggcctgagcgaggacgagggtgagtctagaattctgagagttaaggtcgtttcaggtattgatctggcaaaaaaggacatctttggggcctcagatccctatgtgaagctgtctctgtacgtggccgatgaaaaccgagaactggctctggtgcagaccaagactatcaagaagacactgaatcctaaatggaatgaggaattttattttcgcgtgaatccaagcaaccatcgtctgcttttcgaggtattcgacgaaaaccggttgacgagagatgatttcttgggccaggtggacgtgcctctttctcatctgccgaccgaagaccccaccatggagaggccttacacttttaaggacttcctcctgagacctcggtcccataaatcccgggtcaagggctttcttcggttgaaaatggcatacatgccaaagaacggtgggcaggacgaagaaaactccgatcagcgtgatgatatggagcatggttgggaggtggttgactctaatgactccgcatcccagcatcaggaagagctgccgcctccaccactgcccccggggtgggaggagaaagttgataatctgggacggacatattatgtcaatcataacaatcgcaccacacagtggcaccggccgagcctgatggatgtgtcctccgaaagcgacaacaatatacgacagatcaaccaggaagccgcccatcggcggttcaggagtagacggcacatctctgaagacctggagccagaaccctccgagggaggggatgtacccgaaccctgggagactatctctgaagaagtgaacatcgcgggagacagcttgggactcgctttgcccccccctcccgccagccccggcagcagaacatcaccccaggagctgtcagaagaactcagccgtcgactgcaaattactccagacagcaacggggagcagttctctagtctgatccagcgggaaccatccagtcgattgagaagctgttccgtcactgatgcagttgccgaacagggacatctgcctcctcttgccgaggacggggcttccggaagcgcaaccaacagcaacaatcacctcatcgaaccccagattaggagaccgagatcactctcttctccgacggttacactgtccgcacccctagagggagccaaggacagtcccgtccggagggccgttaaggacactctgtccaatccgcaatcgccccagccctctccgtacaatagccctaagccccagcataaagtaacgcagtcatttttgccccctggctgggagatgagaatagccccgaacgggcgccccttttttatcgaccataacaccaagacaacaacatgggaagaccctcgattaaagtttccagtgcacatgcgttcgaagacatctctgaatcccaatgacctaggacccctccctcctgggtgggaggaacgaatccacctggacggacgcacgttctatatcgaccacaactctaagattactcagtgggaagatccgagattgcagaatcctgccataacgggccctgctgtgccctattccagagaatttaagcagaaatatgattatttccgcaagaagctcaaaaaacctgcggacatcccaaaccggtttgagatgaaactgcatcgtaacaatatcttcgaggagtcttacaggcgcatcatgtcagtcaagcgacccgatgttttgaaggcacggctgtggattgagtttgagtctgaaaagggtctggattatggaggtgttgcccgggaatggttttttctactgtccaaagagatgttcaacccatactatggcctgttcgaatacagcgctacagataattacaccttgcagattaaccccaactcaggcctctgcaacgaagaccaccttagctatttcacttttataggcagagtggcaggcctggccgtgttccacggtaaactccttgacggctttttcattagacccttttataaaatgatgctcgggaagcaaattactttaaacgacatggaaagcgtggacagcgagtactataacagcctgaagtggattctcgaaaacgacccgaccgagctggacctaatgttctgcattgacgaagagaatttcggccagacgtaccaagttgacttaaagccgaacggctctgaaatcatggtaaccaatgaaaacaaaagagagtacatcgatctcgtgatccagtggaggttcgtgaacagggtccagaagcagatgaacgcattcttggaaggtttcaccgaactccttccgatcgatctcataaagatctttgacgaaaatgagttggagctcctgatgtgtggattaggggatgtggacgtcaacgactggcggcagcattcaatctataagaacggatactgtccaaatcaccctgtgatccagtggttttggaaggctgtgcttctgatggatgctgagaaacggattagactcctgcaattcgttaccgggacgtctagagtccccatgaatgggttcgccgagctgtacggctcaaatggcccccagttgttcaccatcgaacagtggggttcacccgaaaagttgcctcgcgcacacacttgctttaacagactagacctccccccgtatgagacatttgaagacttacgggagaaactgctcatggccgtcgagaacgctcagggtttcgagggagtggattag

SEQ ID NO: 196849 - DNA, 2904 bp, synthetic construct
  misc_feature 1..2904: note = Description of Artificial Sequence: Synthetic coding sequence
  source 1..2904: mol_type = other DNA
atgcggcggctggccttcgagcagggcgagagccggatcctgcgggtcaaagtggtgtctggtatcgacctggccaagaaggatattttcggcgcctctgacccttacgtcaaactgtctttgtacgtagccgatgaaaatagagaacttgccttagtgcagacgaagacgataaagaaaaccctgaatcctaaatggaatgaagaattttactttcgcgtgaatccaagcaaccaccgattactgttcgaagttttcgacgagaatcggctgaccagggatgactttctcggccaggtcgatgttccgttgagccacctccccactgaagatccaacaatggagcgcccgtacactttcaaagatttcctcctcagaccacggagtcacaagtctcgtgtgaaaggattcttaaggctgaagatggcctatatgccaaagaacggcggccaagacgaggaaaatagtgaccagagggacgatatggaacatggctgggaagtagtggatagcaacgactccgctagccagcatcaggaagagctcccacctccccccctaccaccaggctgggaagaaaaggtcgataatctcggaaggacttattatgttaaccacaataatcgaaccacccagtggcatcgaccaagtctgatggatgtttcatcagagtctgacaataatataagacagattaatcaggaggcagcccatcgacgtttccgcagccgtcggcatatctcagaggacctggagcctgaaccctctgagggtggtgatgtccctgagccatgggaaactatctctgaggaggtgaatatcgctggtgactcccttggactggccttgccgcctcctccagcatctccggggtctcgaacctccccacaagagctcagcgaagagctttcaaggcgactgcagatcactcctgactccaacggagaacaattcagtagcctaatacagagagagcccagctcccgcctgagaagttgctcagtgaccgatgctgtcgccgaacagggccacctaccgccacctagtgctccagccggacgcgctcgctcctctaccgtcaccggtggcgaagaacccaccccaagcgtcgcctacgtgcataccactcccgggcttcctagcgggtgggaggagcgcaaggacgcaaagggccggacttactacgtaaatcataataatcgcacaactacatggacacgcccaattatgcagctcgctgaggacggggccagtggtagcgccaccaactctaacaaccatctgattgagccacagattagaaggccccgatcactgagctcaccaaccgtgactctgtctgcgcccctggagggagcaaaagattcccccgtccggagggcagtcaaggacacattgtcaaaccctcaaagcccccagccatctccttataatagcccaaagccacagcacaaagtcactcagtcattcctgccccctggctgggagatgcggatcgcccctaacgggcggcctttcttcattgatcacaatacaaagaccactacttgggaagatccacggcttaagttcccagtgcatatgcggtccaagacgtctctcaaccccaatgatctggggcctctcccccccgggtgggaagagcgcatccacctggatggaagaacattttacatcgatcacaatagtaagattacccaatgggaagacccccgcctgcagaaccccgctattacagggcctgcggtgccctacagccgtgaattcaaacaaaaatatgattactttcggaaaaaattgaaaaagccagctgacatccccaatcggtttgagatgaaactgcatcggaacaatattttcgaggagtcttaccggcgcataatgtcggtaaagagaccggacgtcctcaaagccaggctgtggattgagttcgaatccgaaaaaggcctggattatggaggagttgcacgtgagtggttttttttgctctctaaggagatgttcaacccttattatgggttattcgagtacagcgctactgacaattatacactacagatcaaccctaacagcggattgtgcaatgaggatcacctgagttactttacctttatcggtagggtagccggactcgcagtgtttcacgggaaattattggacggattttttattcggcccttctacaaaatgatgctgggtaagcagatcacactgaatgacatggagtccgttgatagtgaatactataattctcttaaatggattctggaaaacgatccgaccgagcttgatttgatgttttgtattgatgaagagaactttggccaaacataccaagtggaccttaaacctaatggctccgagatcatggtgacgaacgagaacaaacgggaatacatagatttggtgatccagtggagattcgtgaaccgcgtgcaaaagcagatgaacgcgttcctggaagggttcaccgagctactgccgatcgacctgataaaaatattcgatgaaaatgaactcgagctactgatgtgtgggttgggcgatgtcgacgtgaacgattggaggcagcatagcatttataaaaatggctactgtccaaatcacccagtaattcagtggttttggaaggcagttctgctgatggacgcggaaaaacgaattaggcttctgcagttcgttaccggtacatcacgcgtgcccatgaatggatttgcagagctctacgggagcaacgggccccagctgtttaccatagaacagtggggctcaccagagaaattaccccgcgcgcacacatgttttaaccgcctggatctgccaccctatgagacgttcgaggatctgagagagaagctcttgatggctgtggagaacgcccagggctttgaaggggtggactag

SEQ ID NO: 196850 - DNA, 2868 bp, synthetic construct
  misc_feature 1..2868: note = Description of Artificial Sequence: Synthetic coding sequence
  source 1..2868: mol_type = other DNA
atggccaccggcctgggcgagcccgtgtacggcctgagcgaggacgagggagagagccgcatccttagagttaaggtggtaagtgggatcgatttagccaaaaaggacatctttggcgcctccgacccctatgtgaagctctcactgtacgtggccgatgaaaatagggagctcgccctcgtgcaaaccaagacaatcaagaagacgttgaatcctaaatggaacgaggaattctattttagagttaatccaagtaatcatcggctgctctttgaagtcttcgacgaaaatagattgactcgggacgattttctcgggcaggtggatgtgccactatcacacttgccaacagaagaccctactatggaacgaccgtatactttcaaggactttcttcttcgccccagaagccataaatcgagggtgaagggttttctgcgtttgaagatggcctatatgcctaaaaacggcggccaggacgaagaaaacagtgaccagcgggatgacatggagcacggatgggaggtcgtcgattcgaatgacagtgcctcacagcatcaggaagaactccctccccccccactgccacccggatgggaggaaaaggttgacaaccttggaagaacctattacgttaaccacaacaacaggacaacccagtggcatcggccctcactgatggacgtgtcatcagaatctgataacaatatcaggcagattaatcaagaggctgcccaccggaggttcaggtccaggaggcatatttcagaagacttggagccagaaccatccgaaggcggtgacgtccctgagccgtgggaaactatttccgaagaagtgaacattgctggggattctctgggcctcgccttgcctcctcctcctgcctcacctggctctagaacctccccccaggagcttagtgaagagttgagtcggcgcttacagataacccctgatagtaatggagagcagttctcaagtctgatccaaagagagccaagtagccgccttcgaagctgttctgtgacagatgcagtcgccgaacagggacacctccctccaccatccgttgcctacgtgcatactaccccaggtctcccgtctgggtgggaggagcgaaaggacgctaagggccgaacctactacgtgaatcataacaacagaacaactacgtggactcgacctatcatgcagctggcagaagatggagcatccggaagtgctacaaatagtaacaaccacctgattgagccacaaataagaaggcctagaagcctatcaagccctacagttactcttagcgcccccctggagggggctaaggacagcccggtgaggcgcgccgtgaaagacacactgagcaacccgcagtcaccgcagccgtcaccttataattcgcccaaaccccagcataaggtgactcagagtttcctacccccaggctgggaaatgcgcattgctcctaacggcagacccttttttattgatcataacaccaagactacaacatgggaggacccaaggctgaagtttcccgttcatatgcgcagcaagacatccctgaacccaaacgatctcggccccctcccccctggatgggaggaacggatccacctcgacggccgcacgttctacattgaccataacagcaaaattactcagtgggaagatccaagactacagaaccctgcaatcaccggacccgccgtgccgtacagcagggaatttaagcagaagtatgactattttagaaaaaagctcaagaagcctgcggatattcccaaccgtttcgaaatgaaactgcatcggaacaacattttcgaggaatcttaccgccggatcatgtctgtcaagcgtcctgacgtgttgaaggctaggctctggattgagttcgaatccgagaaagggcttgactatggaggagtagcccgcgagtggttcttccttctgagtaaagaaatgtttaacccatactatgggctgtttgagtattcagccaccgacaactacaccttgcaaattaatcccaattccggactctgtaatgaggatcatctttcctatttcaccttcataggcagggtagcaggattagccgtgtttcacgggaagttgctggacgggttttttattaggcccttctataaaatgatgctggggaagcaaatcactctaaacgacatggaaagcgtcgattcggaatattataattccctgaaatggatcctggagaatgatcccaccgagttagacctgatgttttgtatcgacgaagaaaactttgggcagacttatcaggttgaccttaagcctaacggctctgaaatcatggtcaccaatgagaataaacgcgagtatatagatctggttatccaatggcggttcgtgaaccgtgttcagaagcagatgaacgcattcctcgagggttttaccgagctgctgcccattgatctgatcaagatcttcgatgagaacgaacttgagctcctgatgtgcggcctgggtgacgtggatgtgaatgattggcgccagcactcaatttataagaacggatactgcccaaaccatcccgtgatccaatggttctggaaagccgtgttactgatggatgctgaaaagaggatccgattgctccagtttgtcaccgggacatccagagtccccatgaatggcttcgctgagctctatggctcgaacggacctcagctatttacaatcgaacagtggggatcccccgaaaagttaccaagagctcatacgtgcttcaacaggctcgacttacccccttacgagactttcgaggatctgcgtgagaagctgctaatggcggtcgagaacgcacaaggatttgagggcgtcgattag

SEQ ID NO: 196851 - DNA, 2928 bp, synthetic construct
  misc_feature 1..2928: note = Description of Artificial Sequence: Synthetic coding sequence
  source 1..2928: mol_type = other DNA
atggccaccggcctgggcgagcccgtgtacggcctgagcgaggacgagggcgagagcagaatcctgagagtcaaggtggtctccggcattgacttggcaaagaaagatatctttggggcgagcgatccatacgtgaagctcagcctttatgtggccgacgaaaaccgcgaactggccctagtacagactaaaactattaaaaagaccttgaaccccaaatggaacgaagaattctactttagggtgaacccctctaatcacagattacttttcgaggttttcgacgaaaacaggttgacaagggacgacttcctcggacaagtggatgtcccactgagtcaccttccgaccgaggatccaacgatggagcgcccatatacctttaaggattttcttctccggcctcggtcacacaagtctcgagtcaaggggttcctgagactgaagatggcatacatgcctaaaaatggcggccaggatgaagagaattcagaccaaagggacgatatggaacacgggtgggaggtggtggattccaacgactcagccagtcagcaccaggaggagttacctccacctcccctgcctcctgggtgggaggaaaaggtggataatttaggtaggacctattatgttaatcacaataaccgcacaacccagtggcaccgcccatcactcatggacgtatcaagcgaatctgataacaacattcggcagataaatcaggaggccgctcatcgccggtttaggagcaggagacacatatcggaggatctggaacctgaaccatctgagggaggcgatgttccagaaccttgggagacgatatccgaggaggtgaacatcgcaggcgattccctggggttagccctacctccgcctccagcaagtccagggagcagaacaagcccccaggaactatctgaggagttgtcccgcagacttcaaattactccggatagtaacggcgaacagttcagtagcctgatccaacgcgaaccctcatcaagactgcgcagctgctcggtaacggacgcagtggctgaacaggggcacttgcctccacccagcgcccctgcagggagagcccgaagtagcaccgtgacagggggggaagaacctacccctagcgtggcttatgttcacactacgcccggattacccagcggctgggaggagcgcaaggacgctaaggggaggacgtactatgtgaaccataacaacaggacaacaacttggactcggccaataatgcagctcgccgaggacggcgcttccggaagtgccacgaatagtaacaaccacctgattgaaccacagattagacggccaaggtctctgagttccccgactgtaactctcagcgccccactcgaaggcgctaaagattctccggtgagacgggccgtcaaggacaccctctctaacccccagtctcctcagccctcgccctataactcccctaagccccagcacaaagtgacacagtccttcttaccacccggatgggagatgcggatcgctccaaatggacgccctttttttattgaccataataccaagaccaccacatgggaagaccccaggcttaagtttcctgtgcatatgcgctcgaagactagtctgaacccaaatgacttgggtcctctcccgcccggttgggaggagcgaatccacctcgacggccggacattctatatcgaccataactctaaaattacccagtgggaggaccctaggctgcagaatcctgctataaccggcccagctgtgccatacagcagggaatttaaacagaagtatgattacttccgaaaaaaactcaaaaagcctgcggatatccctaatcgctttgaaatgaagttacaccgtaataatatattcgaggagtcctaccgacggattatgagcgttaagaggccggacgtactgaaggcccggctatggattgaatttgagtctgaaaaaggtctggactatggaggggtcgcgcgagagtggttttttctgctttctaaggagatgtttaacccctactacggtctcttcgagtattcagccacagacaattacactctgcaaatcaaccccaactcgggcctgtgcaatgaggatcatctctcctactttacattcatcggtagagttgctggcttggcagtgtttcatgggaaactgcttgatggattctttatcaggcctttctacaagatgatgcttgggaaacagataacactgaacgacatggagtcagtggactccgaatactacaattctttgaagtggattctcgaaaatgacccaacagagctggacctgatgttctgtatagacgaggaaaactttggacagacatatcaggtggacctgaagcccaacggcagtgagattatggttacaaatgaaaacaagcgtgagtacattgaccttgtgatccaatggcgcttcgtgaaccgcgtgcagaagcagatgaacgctttcctcgaaggattcactgaactcttacccatcgacctgataaaaatattcgacgagaatgagttggagctgttaatgtgcggcctgggagacgtggacgtcaatgattggcggcaacacagcatttataagaacggatattgtccaaaccatccagtgattcaatggttttggaaggctgtgctgctaatggatgcggagaaaaggatccgcctcctacagttcgtgaccggtacttcgcgggtacctatgaatggcttcgccgaactgtatggcagcaacggaccccagctgttcactatagaacagtggggttcccctgaaaaactgcctcgcgcccacacatgtttcaatcggctggatttacccccatacgagacctttgaggatttgagagagaaattgcttatggctgtcgagaatgcccaaggtttcgagggagtggattag

SEQ ID NO: 196852 - DNA, 2565 bp, synthetic construct
  misc_feature 1..2565: note = Description of Artificial Sequence: Synthetic coding sequence
  source 1..2565: mol_type = other DNA
atggagcggccctacaccttcaaggacttcctgctgcggccccggagccacaagtctcgtgtaaaggggtttcttaggttgaagatggcttatatgccaaaaaatggtggacaagacgaggaaaatagtgatcagcgtgatgatatggaacatggatgggaggttgtcgattccaacgacagtgcatcccagcaccaggaagaattaccacctcctcccctgccaccaggctgggaagagaaggttgataacctgggccgaacttactatgttaaccataataatagaaccacacagtggcaccgcccaagcctgatggatgtctcctcagagtctgacaacaacatccgacaaataaatcaggaggcagcacacaggaggtttcggagccggcgacacatctctgaggacctggaaccagagccttcagagggaggtgatgtgccggaaccttgggaaaccatcagtgaggaggttaatattgccggagactctttaggcctggcgctgccccctccacccgcttcccctggttcccgaacttccccccaggagctgagcgaggagttatctcggcggctgcaaatcacaccagacagtaatggagaacagtttagcagcttgatccagcgcgagccgtctagcagacttagatcctgctctgtgacggacgcagtggctgagcagggacacttgccacctcccagcgcccccgctgggagggcgcgatcttctaccgtgaccggcggggaagaaccaactcccagcgtggcctatgtccacacgactcctggtctgccatccggatgggaggaaagaaaagacgcaaaggggaggacttactacgtgaaccacaacaaccgaaccactacatggacgaggccgataatgcagctcgctgaagacggcgccagcgggagtgccacaaactctaataaccacctgatagagcctcagatcaggcggcctagaagcttatcctccccaaccgtgacccttagcgcaccgttggagggggcgaaggactcccctgtgcgaagagctgttaaagacactctctctaatcctcaatccccacagccctcaccttataactcacctaagcctcagcacaaggtgacccagagttttctcccacccggatgggagatgaggatcgcacccaatgggaggcctttctttattgaccacaacacaaagacgacgacctgggaagatccacgccttaagtttccagtgcacatgcggagcaagacttcgttgaaccccaacgatctggggcccctgccccctggatgggaagaacgaatccaccttgatggacggacattctacattgaccataactccaaaataacccagtgggaagatcccagattacaaaatccagccataacaggcccagccgtcccctattccagagagttcaaacaaaaatatgactattttagaaagaagcttaagaagccggccgacattcctaaccggttcgaaatgaagctccaccgaaacaacatctttgaagagtcctatagacgaatcatgagcgtgaagaggcccgatgttctgaaggcacgcctctggatcgagttcgagagcgagaagggtctggattacggcggagttgcccgagagtggttcttcctcctgtctaaggagatgttcaatccgtactacggtctgttcgaatattctgctaccgacaattacactctgcagattaaccccaattctggtttatgtaatgaagatcatctctcttattttacgttcatagggcgggttgcagggttggcagtgttccacgggaagcttctggacggcttctttatcaggccattttacaagatgatgctcggcaagcagattactctgaacgatatggaatccgtggactccgagtactacaactccttgaaatggatactcgagaatgatccaaccgagctcgatctgatgttttgtattgacgaggagaattttggccagacctatcaggttgatctaaagccaaacggaagtgagatcatggtgacaaacgagaataaacgcgagtatatcgatctggttatacagtggaggttcgtcaacagagtgcagaaacaaatgaacgcgttcctagaaggcttcaccgagctgctgccaattgacctgataaaaatttttgatgagaatgaactggagctcctcatgtgcggactgggcgacgtcgatgtaaacgactggcggcagcacagcatctacaagaacggatactgtcctaatcaccctgtcattcagtggttttggaaagccgtattgctgatggacgccgagaaacggataaggttgttgcagtttgtaacggggacctcgcgggtgccgatgaacggttttgcggagctttacggatctaacggtcctcagctgttcactatagaacaatggggtagtccagagaagctgcctcgggcgcacacgtgcttcaaccggctcgacttgcccccgtacgagacatttgaggacctccgggagaagttgttaatggcagtggagaatgcccagggattcgagggtgtggattag

SEQ ID NO: 196853 - DNA, 2505 bp, synthetic construct
  misc_feature 1..2505: note = Description of Artificial Sequence: Synthetic coding sequence
  source 1..2505: mol_type = other DNA
atggagcggccctacaccttcaaggacttcctgctgcggccccggtctcacaagtccagggtcaaggggttcctgcggttgaaaatggcgtacatgccgaagaatggtggccaggatgaagaaaactccgaccagagagacgatatggaacacggttgggaggtagtcgacagtaacgatagcgcaagtcagcatcaagaagaactgccaccaccacccctgcccccaggatgggaggaaaaggtagataacttgggccgcacatattacgttaaccacaacaacaggacaactcaatggcaccggccctcgctgatggacgtgtcctccgagtccgataacaatatcaggcagattaatcaggaggccgcccataggagattccggtcccggcgacatattagtgaagatcttgagccagaacctagcgaggggggcgacgttcccgagccctgggagacaatatcggaagaggttaacatcgcgggcgacagcctgggactcgccctgcctcctccccctgccagtcctgggtctaggacttctccacaggagttgtctgaggaactaagcagacggcttcaaataacacctgattcaaacggcgagcagttcagcagcttgatccagcgagagccctcatccaggctgcggtcatgcagtgtgacagacgcagttgcggagcaaggacacttgcccccaccttccgtggcatatgtacatacgacacctggactgcccagcggatgggaagaaagaaaagatgccaaggggagaacctactatgtcaaccacaataatcgtaccactacctggacgagaccgatcatgcagctggcggaagacggcgcctccggcagcgctactaactccaataaccacctgattgagccccagatccgtcgtccaaggtccctgagcagccctaccgtaaccctgagcgctccgttggaaggagccaaggatagccccgtgagacgggctgtgaaggacaccctctcgaatccacagagccctcagccaagcccctacaactctccaaaaccacagcataaggtgacccagtcattcttaccccctggatgggagatgcggatcgccccaaacgggcggcccttctttattgaccacaatacaaaaaccaccacatgggaagacccgcgcctaaagttcccggtccatatgcggtcgaagacttcactgaatcctaacgatctggggcccctcccaccgggttgggaggagaggatccacttagacggcagaaccttttatatcgatcacaactcaaaaatcacacaatgggaggacccccgcctgcagaacccggcaattacaggacccgctgtgccctactcaagagaatttaagcagaagtacgattatttcagaaagaagctcaaaaaacctgctgatatccctaaccggtttgagatgaagcttcatcgaaataatattttcgaagagtcttaccgccgcatcatgtccgtgaagaggcccgatgtgctgaaggctcggctctggatcgaattcgagtcagagaaaggtctcgattacggaggcgttgccagggagtggttttttctgctaagtaaggaaatgttcaacccttattacggcttatttgaatatagcgccactgacaattatactctccaaattaaccctaatagtggtctctgcaatgaggatcacctcagctactttacattcattggacgggttgctggattagctgtgtttcatggcaagctgctggacggtttttttatccgcccattctataaaatgatgcttggcaaacagataactctgaacgacatggaaagcgttgattccgagtattacaatagcttgaaatggatcctggagaatgacccaaccgagctcgatctgatgttctgcatagatgaagaaaactttggacagacatatcaagttgaccttaagcccaacgggtcagaaatcatggtgactaacgagaataaaagagaatatattgatctggtgattcagtggaggtttgttaatcgggttcaaaaacagatgaatgcttttttggagggttttactgagctgttaccaattgacctcatcaagatttttgacgagaatgagctggaattgctgatgtgtggcctcggggacgtcgatgtcaatgattggcgccagcactcaatctacaagaatggctactgccccaatcacccagtgatccagtggttctggaaggccgtgctgctaatggacgccgagaagaggatacgcctgttgcagttcgtgactgggacttcacgcgtgccgatgaacggtttcgccgaactatatggaagcaatggcccacagctttttactattgagcagtgggggagccctgagaagctgccacgggcccacacctgctttaaccggctggacttaccaccatacgagaccttcgaggatctgcgcgaaaaactactcatggcagtcgagaatgcccaggggtttgagggcgtggattag

SEQ ID NO: 196854 - DNA, 2505 bp, synthetic construct
  misc_feature 1..2505: note = Description of Artificial Sequence: Synthetic coding sequence
  source 1..2505: mol_type = other DNA
atggagcggccctacaccttcaaggacttcctgctgcggccccggagccacaagagccgtgtcaaaggcttcctccgcctaaaaatggcatacatgcccaagaacggtggccaggacgaagaaaattccgaccaacgcgacgacatggagcacgggtgggaggtggtcgatagtaatgattccgcctcacagcatcaggaggaactgccacccccgcctctccctcccggctgggaggagaaagtggataatctgggaagaacctattatgtgaaccacaataaccgcactacacaatggcatcggcctagcctgatggacgttagctccgaatctgacaataatattaggcagatcaatcaggaggccgcccatcgaaggttccgatctcgcaggcatatctctgaagacctcgaaccggaacctagcgagggcggagacgtccctgagccctgggagaccatttctgaggaagtgaatatagccggagattctctgggactggcactcccacctcctccggctagccccggctcaagaaccagcccgcaggaactatcagaagagctcagcagaagactacagatcaccccagattccaatggggagcagttcagctctctcatacagcgggagccctccagccgactgcgcagttgttccgtgacagatgccgtggccgaacagggacatctgccacctcctagcgtagcctacgtacacaccacgccggggttaccttcaggttgggaagagaggaaagacgccaaaggacgtacttattacgtgaatcacaataaccgtactaccacgtggacccgtccaatcatgcaattggccgaggacggagcgtcaggctctgctaccaactcaaataatcatttaatcgagccgcagataaggcggcctcggtctctgtcttcgccaacagtgaccctgtctgccccactggagggggcaaaagactctcctgtccgtcgtgccgtcaaggatactctctcgaatcctcagtcgccccagccctctccatacaattccccaaagcctcaacataaggtgactcagtcctttcttccccctggttgggagatgagaatagcaccaaacggccgcccgttctttatagaccataataccaagacaacaacgtgggaggacccccggcttaaatttccggtgcacatgagatctaagacgagcctgaacccaaacgacctcggcccattacctcccggatgggaagagagaattcatctcgatggacgtaccttctatatcgaccacaacagcaaaattacacagtgggaggatccccgactccagaaccctgcgatcaccggacctgccgtcccgtatagtcgggaattcaagcaaaaatatgactatttcagaaagaagctgaagaagcctgccgatatccccaatcggtttgaaatgaaactgcaccgtaacaacatttttgaagagagttatagacgcatcatgagtgtaaaacgccctgatgtattaaaggccagactctggattgaattcgagtctgagaaaggccttgactacggtggggtggctcgggagtggttttttctcctgtcaaaggaaatgttcaatccatattacggtctgttcgaatactctgccactgataactatactctgcagattaatcctaactccggcctgtgcaatgaagatcacttgagttactttacgttcattggaagggtcgccggactcgcagtctttcacgggaagttgctcgacggatttttcataagaccattctacaaaatgatgctggggaaacagattactcttaatgacatggagagcgttgacagcgagtattacaatagcctcaagtggattctggagaacgatccaaccgagctcgacctcatgttctgtatcgatgaagaaaacttcggtcagacgtaccaggtggatcttaagcccaatggaagcgaaataatggtgacaaacgagaataaacgagagtatattgacttggtgatacagtggcggttcgtgaatcgtgttcagaaacagatgaatgcattcttggaaggattcaccgaactgttaccaattgacttgatcaagatatttgatgagaacgaactggaactgcttatgtgcgggcttggcgatgtagacgtcaacgactggcgccagcactcgatatataaaaatggctactgccctaaccaccccgtcattcagtggttttggaaggcggtcctactgatggacgcagaaaagcgtatccggcttttacaattcgtgacagggacttcccgcgtgcccatgaacgggtttgcagagctctatggatccaacggaccgcagctgttcaccattgaacaatggggctcgcctgagaagctccctcgagcccacacttgtttcaatcggctggacctacctccatacgagacattcgaagatttgcgggagaagctgctgatggcggtggagaacgcccagggcttcgaaggagtggattag

SEQ ID NO: 196855 - DNA, 2565 bp, synthetic construct
  misc_feature 1..2565: note = Description of Artificial Sequence: Synthetic coding sequence
  source 1..2565: mol_type = other DNA
atggagcggccctacaccttcaaggacttcctgctgcggccccggtcccacaaaagcagagttaaagggtttcttcgtctaaagatggcttatatgcctaagaatggcggtcaggacgaagagaattctgaccagagggacgacatggagcacggatgggaggtcgtggattcgaatgatagcgcaagccagcatcaagaggagttgcccccgcccccactcccgccagggtgggaggagaaggtggataacttaggacgaacctattacgtaaatcacaacaacaggactacacagtggcatcggccgtctctgatggacgtgtcaagtgaatcggacaacaacatccggcaaatcaatcaagaagccgcccacaggcggtttagaagccggagacatatttccgaggatctggaaccagaaccttccgaaggtggggatgtgcccgagccatgggaaaccatctcagaagaagtaaatatagctggtgattccttggggctcgctctccctccaccccccgcatctcctggtagcaggacgagccctcaggagttaagcgaagaattatcccgacgcttgcagattactcccgattcgaacggcgaacagttctcttcgctcattcaaagggagccatcatcacggcttcggtcatgttctgtaaccgatgctgtggccgaacaagggcatctgcctccaccatcagccccagcagggcgcgctaggagcagcactgttacaggcggcgaagagccaactccgtcagtggcctacgtgcatacgaccccaggtctgccttcggggtgggaggaaagaaaggacgcaaaggggagaacctactacgtcaaccacaataatcggaccaccacgtggacgcgccctatcatgcagttggcagaggacggagcctcaggatcagcaacaaattctaacaaccacttgatcgaaccacagataagacgccctcgatctctgtcttccccgacagtgaccctatcagcgcctctggagggcgcgaaggactctcctgtcaggagggccgttaaggacaccctgtcaaatcctcaaagtcctcaaccctcaccttacaattccccaaaaccacagcataaagtcacccagagtttcctacccccggggtgggaaatgaggatagcgccgaacggccggccattcttcattgaccataacacaaaaactacgacgtgggaggaccctcggctcaaatttcccgtgcatatgagaagtaagacctctttgaacccgaatgatcttggacctctccccccaggatgggaggagcggattcacctggatggtcgaaccttttacatcgaccacaactctaaaatcacccagtgggaggatcccaggcttcaaaatcccgctataacaggccctgccgtcccatattctcgtgaatttaagcagaagtacgactatttcagaaagaaactgaagaaaccagccgatattcccaaccgctttgaaatgaagttgcaccgcaataatatcttcgaagagagctatagacggatcatgtcggtgaagagaccagatgttcttaaagccaggctgtggatcgaatttgagtcagaaaagggtctggattacggaggcgtggcacgtgagtggttcttcttactctcaaaggaaatgttcaacccatattacggcctattcgaatatagcgcaacagataactacacactccaaatcaatcctaatagcgggttatgtaatgaggaccacctatcttactttaccttcatcggtagggtggcagggctagccgtattccatgggaagctgctggacggtttctttattcgacccttttacaagatgatgctcgggaagcagattacacttaacgacatggaaagcgtggattccgagtactacaacagtctgaagtggatcctcgaaaacgatcctaccgagctggacttgatgttctgcatcgatgaggagaattttggtcagacttaccaagtggatctaaagccaaacggttccgaaattatggtgacaaacgaaaacaagcgcgaatatattgaccttgttattcagtggcgattcgttaatcgggtccaaaagcaaatgaatgctttcctagaagggttcacagagctgcttcccattgacctcattaagatattcgacgaaaacgaactggaactcttgatgtgcggtctcggcgatgtggacgtgaatgattggcggcagcactctatttataaaaacgggtattgcccgaaccaccccgtgatacaatggttttggaaggctgtgttgttaatggatgccgagaagcgaataagactgctgcaattcgtcacaggaacatcacgcgtgcccatgaatgggtttgcagaactctacggctctaacggcccccagctgtttactatcgagcaatggggaagccctgagaaacttccccgcgcccatacatgctttaaccggttggacttaccgccctatgagacttttgaggatcttagagagaagctgctcatggcggtggagaatgcacaagggttcgaaggtgtcgattag

SEQ ID NO: 196856 - DNA, 525 bp, synthetic construct
  misc_feature 1..525: note = Description of Artificial Sequence: Synthetic coding sequence
  source 1..525: mol_type = other DNA
atgaagtacaagaacctgatggcccgggccctgtacgacaacgtgcctgagtgcgcggaagagctcgccttccggaagggcgatattctgaccgtcatagaacagaataccggtggccttgaggggtggtggctgtgctcacttcacggacggcaaggcatcgtgcctgggaatagagtcaaactgctcatcgggcctatgcaggaaaccgcttccagccacgaacagccagcgtccggcctcatgcaacaaactttcggacaacagaaactctaccaggtccctaaccctcaggccgcaccccgcgacaccatttaccaggtgccaccttcttaccaaaatcagggtatctaccaggttcctaccgggcacggcacacaagagcaagaggtttaccaggttccaccctctgtgcagaggtccatcggaggcacgagcggtccgcatgtgggcaagaaagtatttcagagggacggtcaggtaagttatttccttgtgagggcatcaaaacaaacgtctctatag

SEQ ID NO: 196857 - DNA, 2505 bp, synthetic construct
  misc_feature 1..2505: note = Description of Artificial Sequence: Synthetic coding sequence
  source 1..2505: mol_type = other DNA
atgaagtacaagaacctgatggcccgggccctgtacgacaacgtgccagaatgtgcagaagagctagcatttcgaaagggggatattctgaccgtgattgagcaaaataccgggggactggaagggtggtggctttgttcccttcacgggcgccaaggcatcgtaccaggaaatagggtcaaactgttgatcggacctatgcaagagaccgcctcaagccacgaacagcctgcctccggtcttatgcagcagacatttggccagcagaagctgtaccaagtccctaacccccaggccgcccctcgcgacactatctatcaggtgccaccctcttaccagaaccagggtatctatcaggtgccaactggtcatggaactcaggagcaggaagtctaccaggtccccccctccgtgcagcggtcaataggtggcacctctggtccgcatgttggtaaaaaggttatcactccagtgagaactgggcatggctatgtctacgagtacccttcccgttaccagaaagatgtatatgacatcccaccttctcatacaacacagggtgtgtacgacatcccgcccagcagcgctaaaggacccgtcttcagcgtgccagttggagaaatcaagcctcaaggggtctatgacatcccccctaccaaaggggtgtatgcaatccctccaagtgcatgccgagacgaggctggcctccgtgagaaggattatgattttccgcctcctatgcgacaggccggacgccctgatctgagacccgaaggagtgtatgacatcccacctacttgcactaagccagcggggaaggatctgcacgtgaagtacaactgcgacattccaggagccgccgagccagtggctcgccgccatcagagcttatcaccaaaccatccccctcctcaactcggccaaagtgtagggtcacagaacgatgcttacgatgttcccaggggtgtccagtttttagagcctccagctgagacctccgaaaaggccaaccctcaggagagagacggcgtttacgatgtgcctctccataaccctccggatgctaagggaagtagagatttggtggatggaataaaccggctgtcctttagctcaactggatccacaagatccaacatgtctacatctagtacatcttcaaaagagtccagcttatcagcgagccccgcccaggacaaacgtctgtttctcgatcccgatacggccatcgagcgcctccaacggctgcagcaggccctagagatgggagtcagcagccttatggcattagttaccacagattggagatgctacggatatatggagcgccacattaatgagatccgaaccgcagtggacaaggtggaactgttcctcaaggagtacctgcactttgtgaagggcgcagttgctaacgccgcctgcctgcccgaattgatcctgcataataagatgaagcgggaacttcaacgggttgaggactcacatcagatcctgagccagacatcacacgacctcaatgagtgttcttggtccctaaatattctcgcgataaacaaaccgcagaacaagtgcgacgacctcgataggttcgtgatggtagccaagacagtccctgacgacgccaaacagctcactaccacaattaataccaacgccgaggctctcttcagaccaggacctgggtcactgcacctgaagaacgggccggagtccattatgaacagcactgaatatccccatggcggctcccaggggcagctgttgcatccaggcgaccataaagcacaagcgcacaacaaagcccttcctcccggtttgagcaaagaacaggcacctgattgcagtagcagtgatgggagcgagcgatcttggatggacgattacgactacgttcacctccaggggaaagaagagtttgagaggcagcaaaaggaactcctggagaaagagaatattatgaaacagaacaagatgcagcttgaacaccaccaactgtcccagttccagctcttggagcaagagatcaccaaaccagttgaaaatgacatctcaaaatggaaaccttctcaatcactgcccaccaccaactccggagtgtcagcgcaggacagacagctcctctgtttttactacgatcaatgcgagacccattttattagcctgctgaatgcaatcgacgcactgttctcttgcgtgagcagcgctcagccccccaggattttcgtcgcacattccaagtttgtcatactcagtgcccataaactagtattcataggggacaccctaacacgacaggtgacagcacaagacatcagaaacaaggtaatgaattccagtaatcagctctgcgaacagctgaagaccatagtcatggcaacaaagatggccgcgctgcattacccttccaccaccgccctccaagagatggtacaccaagtaacagatctctcaagaaacgctcagctgtttaagcgctctttgctggagatggccacattctag

SEQ ID NO: 196858 - DNA, 99 bp, synthetic construct
  misc_feature 1..99: note = Description of Artificial Sequence: Synthetic coding sequence
  source 1..99: mol_type = other DNA
atgtggacccggaacctgatggcccgggccctgtacgacaacgtgcccgagtgtgctgaagaacttgcatttagaaaaggtgatatcctcaccgtgtag

SEQ ID NO: 196859 - DNA, 2505 bp, synthetic construct
  misc_feature 1..2505: note = Description of Artificial Sequence: Synthetic coding sequence
  source 1..2505: mol_type = other DNA
atgtggacccggaacctgatggcccgggccctgtacgacaacgtgcccgagtgcgctgaggagcttgcatttcgcaagggcgacattctaaccgtcattgagcaaaacacagggggtctggaggggtggtggttgtgctcacttcacggacgccagggcattgtaccaggcaatagagtcaagctcctaatcggacccatgcaggaaacagcctcctcgcacgaacagcctgcctcgggtctgatgcagcagacctttggccagcagaagctctatcaggtgccgaacccacaggccgcccctagggatactatttaccaagtccctccatcttaccaaaatcaaggaatatatcaggttcccactggtcacggaacccaggagcaggaggtataccaagttccccctagtgtgcaacggagcatcggcggaaccagcggtccacacgtgggaaagaaggtgatcacacctgtgaggacaggacatgggtacgtttatgagtacccgagtcgctatcagaaggatgtgtatgacattccccccagtcacactacacagggagtttatgatatccctccatccagcgctaaaggtccagtgttcagtgtgcccgtcggggaaattaaacctcaaggcgtctatgacattcctcccacaaaaggcgtctacgctatacccccaagcgcgtgtcgtgatgaagctggtctgagagaaaaagattatgatttccccccgcctatgcgccaggccggtaggcccgatctgcgcccagaaggcgtatacgatataccaccgacttgtacgaagcccgccggtaaagatctgcacgtgaaatataattgtgacatccccggggccgcagaacctgtggccagacggcaccagagcctctcacccaaccaccccccacctcaactgggccaaagcgtcgggagccagaacgacgcctacgatgtacccagaggagtacaattcctggaacccccagcagagacctccgaaaaagcaaatccccaggaaagagatggggtctatgacgtgcccctacataatcccccggacgcgaaaggcagtagagacctggttgacggtatcaacagactgtctttcagtagcaccggaagcacaaggtctaatatgtccaccagcagtacctcatctaaggagagttctttaagcgcttcacccgcccaggataaaagactgtttctagacccagacactgccattgaacgacttcagaggctgcagcaggccctggaaatgggtgtctccagcctgatggcactggtgacaaccgattggcgatgttacgggtacatggaaaggcacattaatgaaatacggacggcggttgataaggtcgaactgtttcttaaagagtatcttcatttcgtcaagggggcagtggcaaatgcagcctgtctgccagagctcatcttacataataaaatgaagcgcgagttacagcgcgtagaggactctcatcaaattctgtctcagacgagccacgatctcaacgaatgcagttggagcctaaacattctcgcaattaataagcctcagaacaagtgcgatgacctggacagattcgtgatggtggctaaaaccgttcctgacgatgccaagcagcttaccacaacaattaacacaaatgcagaagcgttattccgacccggaccggggagtctgcacctcaaaaacgggcccgaatctattatgaacagtactgaatatccccatggagggagccagggccagctgttgcaccccggtgaccataaggctcaggcacacaataaggccctgccaccgggcttaagcaaggagcaagccccagattgctccagcagtgatggatctgagcggtcatggatggacgattatgattacgtacacctacaaggcaaagaagagttcgaacgccagcaaaaagagttactggaaaaagaaaacattatgaagcagaacaagatgcaactggagcatcaccagctcagccagttccagcttttagaacaggaaatcaccaagcccgtggagaacgatataagcaaatggaaaccttcgcagtccctgccgaccaccaatagcggcgtttccgcccaggaccgtcagctactgtgcttctactacgaccagtgtgagacacatttcattagtctgctgaatgctatagacgcactcttttcctgtgtgtcgagtgcccagccccccaggatctttgtcgcccactccaagttcgtcatcctgtctgcgcacaaactcgtgtttattggcgataccctcaccaggcaggtcacagcccaggacataagaaacaaggtcatgaacagcagtaaccagctgtgcgagcagctgaagactatagtgatggcaaccaaaatggcggcactgcattacccatcgacaaccgccctgcaggagatggtccaccaagtgaccgatctttcaaggaatgcgcaacttttcaagcggagtctcttggaaatggccacattctag

SEQ ID NO: 196860 - DNA, 1212 bp, synthetic construct
  misc_feature 1..1212: note = Description of Artificial Sequence: Synthetic coding sequence
  source 1..1212: mol_type = other DNA
atgctgcggcccgaggccggcctggtgggcctgcacggccccgcccaagagaactctgccctgcccgggcgaagagacagcgcatccgaactccgcgccctatctggattggaggtagatcccggcgagggttggggtagggtagtgctgatcagcccaagaactgttcgatttcgcgtcttatctccaggtgtccgtgaagagggccatgtacagaacaatggacagaatcaggcccgccccgccaggggtgtgaccggcgctggcggatggggctccgcggccgtttgtcgtggccgggccctcaggggcagggagccggccctgcccagtgccagcttcccagacgtcgccgcttgtcccggatcgctggattgcgctctgaaacgtagagcaaggtgtccacctggcgcccatgcatgtggcccttgcctccaaccttttcaggaagatcagcaggggctgtgcgtcccccgcatgaggaggccacccggcggtggacgccctcagccaagactggaagacgagatagacttcctcgcacaggaactggcccgcaaggaatccggccactctacaccccctttgccgaaagacagacaacggctcccggaaccagcaacgttggggtttagcgcccgaggccagggtctggagctaggcttaccaagcacaccaggaacaccaacacctactccccacaccagcctcggcagtcctgtgtcctccgaccctgtacacatgtccccgctcgagcccagaggagggcaaggcgatggtttggccttggtgctgatcctcgccttttgtgttgctggagcagcagccctgtcagttgctagcctgtgctggtgtcggcttcagcgggaaattcggcttacccagaaagccgattatgccacagctaaagcaccaggatcacctgccgctcctagaatttccccaggtgatcagaggctggcacagagtgcagaaatgtatcactatcagcaccagcgtcagcaaatgctgtgcctggagcgtcacaaggagccaccgaaggaactcgatactgcctcttccgatgaggagaacgaagatggcgattttactgtgtacgaatgtcccggcctagcccccactggagaaatggaggtacggaatcctttattcgaccatgcagccctatctgccccactgcccgccccttcttcccctcctgccctcccatag

SEQ ID NO: 196861 - DNA, 978 bp, synthetic construct
  misc_feature 1..978: note = Description of Artificial Sequence: Synthetic coding sequence
  source 1..978: mol_type = other DNA
atggccacccccctgcccccccccagcccccggcacctgcggctgctgcggctcctgctgtctggtcttgtactgggggccgctctccggggagcggctgcaggacaccctgatgtcgccgcgtgccccggcagcttggactgcgcgttaaaaagacgcgcacggtgtccaccgggggcccacgcctgtggcccatgtctgcaacctttccaggaggatcagcagggcctgtgcgtcccacgcatgaggcgccctccgggaggcggaagaccacagcctcgactcgaagatgagatcgattttcttgctcaggagttagccagaaaggagagcgggcactccactccaccactgcccaaggataggcaaagactgcccgaacctgccacactgggctttagcgcgagaggtcagggcttggaactgggcctgccctctacaccaggaacgcccactcctaccccccatacctccctcgggtcgcccgtgtcatccgatccagtgcatatgtccccactggagcctcggggggggcagggcgacgggttggccctggttcttatcttagctttctgcgtagccggcgccgcagccttgtccgtcgcttcgctctgctggtgcagacttcagcgggagattagattaactcagaaggcagactacgcgactgcaaaggccccgggatccccagccgcaccccggatcagcccaggagaccaacggttggcccagtctgcagaaatgtatcactaccagcaccaacgccagcagatgctgtgtctggagcggcacaaggaaccacctaaagagcttgatacagctagctctgatgaagagaatgaggatggcgacttcacagtttacgaatgccccggcctggcaccgacaggggaaatggaggtgcgtaaccccctcttcgaccacgcagccctgagtgcccctttgcctgcccccagttccccccccgcattaccctag

SEQ ID NO: 196862 - DNA, 297 bp, synthetic construct
  misc_feature 1..297: note = Description of Artificial Sequence: Synthetic coding sequence
  source 1..297: mol_type = other DNA
atgagcgtgcgggagctgaaccggcagctgcggggctgcggccgggacgaagctctgcggctgaagcagagacgacgcactctcaaaaatcgcggctatgcccaagcttgcagatccaagcggctccaacaacgaagaggcctggaggccgaaagggcccggctggcagcacaactggatgcgctcagagctgaagttgcccggttagcaagagaacgggacttgtacaaggcccgctgcgacaggctcactagtagtggcccaggttctggcgacccttctcacctctttctgtag

SEQ ID NO: 196863 - DNA, 714 bp, synthetic construct
  misc_feature 1..714: note = Description of Artificial Sequence: Synthetic coding sequence
  source 1..714: mol_type = other DNA
atggccctgccccccagccccctggccatggagtacgtgaacgactttgacttgatgaaattcgaagtgaaacgagagccctctgagggcaggcccgggccgcccaccgccagcctgggatcaaccccttattctagtgtacctccaagcccaactttttccgaacccggtatggtgggcgcaaccgaggggactagacccggactggaggaactttattggttggcaacactccagcaacaattgggagccggggaagcgctggggttgtcccccgaggaggccatggaactcctgcagggccagggcccagttcctgtcgacggaccccatggttactaccctggtagccccgaagagacaggcgctcagcacgtgcagctagccgaaagattcagcgatgctgccctggtgtcaatgtcagtcagggagctcaatcggcagttgaggggctgtggcagggacgaagccctccgtctgaagcaaaggcgcagaaccctcaaaaaccgcgggtacgcccaggcttgcagatccaaacgcctccaacaaaggagggggctggaggccgagcgggctcggttggccgcacaactggatgctctgcgagcggaggttgcaagactggctcgagaacgggacctttacaaagcaaggtgcgataggttgacctcctcaggaccagggagtggcgacccctcccatctgtttctttag

SEQ ID NO: 196864 - DNA, 714 bp, synthetic construct
  misc_feature 1..714: note = Description of Artificial Sequence: Synthetic coding sequence
  source 1..714: mol_type = other DNA
atggccctgccccccagccccctggccatggagtacgtgaacgactttgacttgatgaaatttgaggtgaagagagagccctctgagggcagacctggtccgcctactgctagcctaggatctactccttactcaagcgtgcccccaagccccaccttctcagagcccggtatggtcggcgcaaccgaaggaacccggcctggcctggaggagctttattggcttgccacgctccagcagcagctgggtgcaggcgaggcactgggactgtcgcctgaagaagccatggagctgctgcaaggacagggacccgtccccgtggatggcccccacgggtactaccccgggtcacctgaagagactggggctcaacacgtgcagctggcagaaaggttctccgacgccgcactagttagcatgtcagtgcgcgagctgaaccggcagctgaggggatgtgggcgggacgaggccctaagactgaagcagagaaggcgaaccttgaagaaccgagggtatgcccaggcatgcaggtcaaagagactccagcagaggcggggactggaggctgagcgagcccgactcgcagcacaactcgatgccctgcgggccgaggtcgcccgtctggccagagagcgggacctgtataaagcgcgatgcgaccggctgacctccagcggccccggttccggggatccatcccacctctttctgtag

SEQ ID NO: 196865 - DNA, 198 bp, synthetic construct
  misc_feature 1..198: note = Description of Artificial Sequence: Synthetic coding sequence
  source 1..198: mol_type = other DNA
atggccctgccccccagccccctggccatggagtacgtgaacgacttcgaccttatgaaatttgaggtgaaacgcgagccaagtgaaggacgaccagggccgcccacagcaagtctcggatcaactccctactctagcgtcccaccaagtccaaccttctctgagcctggcatggtgggtgccaccgaagggacctag

SEQ ID NO: 196866 - DNA, 297 bp, synthetic construct
  misc_feature 1..297: note = Description of Artificial Sequence: Synthetic coding sequence
  source 1..297: mol_type = other DNA
atgagcgtgcgggagctgaaccggcagctgcggggctgcggccgggatgaggcactgagactgaagcagcggagaaggacattgaagaaccggggctacgcgcaggcttgccgtagtaaacgtctgcaacagaggcgaggcctggaagccgagcgggcgagactcgcggcccagttggacgctctgagggctgaagtggctagattggccagggaaagggatctttacaaggcacgctgtgaccggttgacctcctccggcccaggtagcggagacccttcacacctttttctctag

SEQ ID NO: 196867 - DNA, 714 bp, synthetic construct
  misc_feature 1..714: note = Description of Artificial Sequence: Synthetic coding sequence
  source 1..714: mol_type = other DNA
atggccctgccccccagccccctggccatggagtacgtgaacgactttgacttgatgaaattcgaagtaaagcgggagccgtcagaaggcaggcctggcccaccaacagcgagcctgggtagcaccccctactcttcggtccccccaagtcccacattttccgagcccgggatggtaggcgccacggaaggcactcggcctggcctcgaggaactgtattggctggccactctgcaacagcagcttggcgctggcgaagcacttgggttatctcccgaggaagcgatggagcttttacagggccagggacccgtccctgtggacggacctcacggctattatccaggttctcccgaagaaacaggcgctcagcacgttcagctggccgagagattttcggatgccgccctagtaagcatgagcgtacgggagcttaataggcagctgcggggatgtgggcgcgacgaagctttgcggttaaaacaacggcggcgtactcttaaaaacagaggttacgcacaggcctgtcgatccaaacggctccagcagcgtaggggtctggaggctgaaagggcacgtcttgcagctcagcttgatgcgctcagagccgaggtcgcacgacttgcgcgtgaaagagatctgtataaggcacgctgcgatcgccttacaagttctggccccggatccggtgatccctcccacctgtttctctag

SEQ ID NO: 196868 - DNA, 1674 bp, synthetic construct
  misc_feature 1..1674: note = Description of Artificial Sequence: Synthetic coding sequence
  source 1..1674: mol_type = other DNA
atgggcggccagatcacccggagcaccctgcacgacagcatcggcggccctttccctgtgacatctcaccgatgccatcataaacagaaacactgtcccgcagttcttcccagtgggggactaccagcaactccactactttttcatccacacaccaagggcagccagatcctgatggacttatctcataaggcagtaaagcggcaggccagcttttgcaacgcaattacgttcagcaaccgccctgtgttgatatacgagcaggtgcgcttaaaaattaccaaaaaacagtgttgttggtcaggagccctccgactgggtttcacctccaaagaccctagccgaattcaccctgattctctgccgaagtatgcctgtcctgatttggtctcgcagtccgggttttgggcaaaggctcttcctgaagaatttgccaacgagggcaatataatcgcattctgggtggacaaaaagggtcgcgtattccatagaatcaacgacagcgctgtgatgctcttcttctcaggagtccgcaccgccgaccctctgtgggctctggtggatgtgtacggcttaactagaggcgtacagttgctggactctgaactggtcctgccagactgtctacgccccagaagcttcacagctctacgtagaccatcgctccgccgggaggctgacgatgcaagactgagcgtctccctatgcgacctcaatgtgcccggcgctgatggtgatgaggccgctccagccgcaggctgtccgattccccagaactctttaaattcacagcattccagggcccttcccgcacagttggacggcgacttgcgcttccacgcgctgagggcaggagcccatgtcagaatcctcgacgagcaaaccgttgcgcgcgtggagcacggaagagacgaaagggctctcgtgttcactagtagacccgtgagggtggcagagaccatcttcgtgaaggtgacgcggtcgggtggtgctcggccaggagcactgtctttcggtgtcaccacttgcgatcctggcacattaaggccagctgaccttcccttttcgcccgaagccttagtggaccggaaggagttttgggccgtatgtcgcgtgccagggccgcttcactccggagatatcctgggccttgtagtgaatgccgacggcgagctccacctgtcacataatggcgcagcggccggaatgcagctttgtgtggatgcctcacagcccctgtggatgctctttgggctccacggcactatcactcagattcgcattctgggcagtaccatcctcgctgagcggggtattccatctttaccctgcagtccggcctcgacacccacctctccctccgccctgggaagcaggctaagtgatccacttctttccacatgttcctctgggcctctcggatcaagtgcgggagggacggctcctaattcacctgtgtccctcccagagtctcccgtaactccgggactcggccagtggtctgacgagtgtaccatttgctacgagcacgcggtggataccgtgatctacacctgcgggcatatgtgtctgtgctatgcatgcggcctcaggctgaaaaaggcactgcacgcctgctgtccaatttgccggagacctattaaagacattatcaaaacttacagatcctcctag

SEQ ID NO: 196869 - DNA, 1725 bp, synthetic construct
  misc_feature 1..1725: note = Description of Artificial Sequence: Synthetic coding sequence
  source 1..1725: mol_type = other DNA
atgggcaacaacttcagcagcatccccagcctgccccggggcaacccatccagggcaccaaggggccacccacagaatctaaaggattctatcggcggaccttttccagttacctcccaccgctgtcatcacaaacagaagcactgccccgcagtgttgccgtccgggggcttacccgcgacccccttactgtttcacccccatacaaagggctcacaaatactgatggatttgagtcataaggctgtcaagaggcaggcctccttctgcaacgcaataaccttctcgaaccgtcccgttctcatatacgagcaggtgcgcttgaaaattactaagaaacagtgctgttggtctggcgcactcaggctgggctttacaagtaaggacccatccagaatccaccctgattcattgccaaagtacgcatgtcctgatctcgtgtcacaatctggcttttgggctaaggccctgcctgaggagttcgcaaacgaaggcaatattatcgctttttgggtcgacaaaaagggtagagtcttccataggattaacgactctgccgtgatgctgttcttctccggtgtaagaactgccgatcccctttgggctctggtagatgtgtatggcctgactcggggcgtccagctgctcgatagcgagctggtcctccctgattgtttgcggcctcggtctttcactgccctccgtaggccatcactccgccgagaggcggacgatgcccgtttatctgtgtccttatgcgatctcaacgtgccaggcgctgatggggatgaagctgcacccgctgccggctgtcctatccctcagaattctctgaactcacaacattctcgagcattacccgctcagctggacggagatctaagattccatgcgctccgggctggggcccacgtgaggatcctggacgagcaaaccgtcgcgcgagttgagcatggaagggacgagcgggcgctggtcttcacaagtaggcccgttcgagtggctgagactattttcgtaaaggtcacaagaagcgggggagcccgacccggggcactaagttttggcgtaacaacgtgtgatcccggcaccctgcgtcccgctgacctccccttcagtccggaagctctggtcgatcgtaaagaattttgggccgtgtgcagagtgccggggcctctgcattctggcgatatcctcggactagtggtcaatgccgacggagagttacatttgagtcataatggggctgcggctggcatgcaactatgcgtggacgcctcccaaccgctttggatgctgttcggtcttcacggaaccataacccagatccgaatcctgggatcgacaattctggcggaaagagggattccttctctaccctgctcacccgcttccaccccaacaagtcctagcgctttgggcagcaggctgagtgaccctctcctgagcacatgcagctccgggcccctgggaagtagcgccgggggcacagctccaaattcgcctgtgagtcttcctgagtcccccgttactccaggactgggacaatggagcgacgagtgcactatctgctatgagcacgctgtggacactgtgatctatacatgtggccacatgtgcctgtgctatgcctgtggactgcgcttgaagaaagctctgcatgcatgttgtcctatctgtcgacgccccataaaagatattatcaagacgtatagaagtagttag

SEQ ID NO: 196870 - DNA, 600 bp, synthetic construct
  misc_feature 1..600: note = Description of Artificial Sequence: Synthetic coding sequence
  source 1..600: mol_type = other DNA
atgggcggccagatcacccggagcaccctgcacgacagcatcggcgggccattccctgtcactagccatcgctgtcaccataagcaaaagcactgtccggctgtgctgcccagcggaggactgcctgctacccctttgttgtttcatcctcacaccaagggttctcagatactaatggatctctctcacaaggctgtgaaacggcaggcatccttttgtaatgctataacattctccaatagacccgtgctgatctatgagcaagtccgcctaaaaatcaccaagaagcaatgctgctggtctggcgccctaaggctaggttttacttccaaggacccatctcgcatccatcccgactctctgcctaagtacgcctgcccagatctggtcagtcaatctggattctgggctaaagccctgcctgaggaatttgctaatgagggtaatattatcgcattttgggtggataaaaagggccgtgtttttcaccgcataaacgattccgctgtcatgttgtttttctccggtgttcgtaccgctgacccactgtgggctctagtcgacgtgtacggtctgacccgcggggtgcaacttctgtag

SEQ ID NO: 196871 - DNA, 327 bp, synthetic construct
  misc_feature 1..327: note = Description of Artificial Sequence: Synthetic coding sequence
  source 1..327: mol_type = other DNA
atggacctgagccacaaggccgtgaagcggcaggccagcttctgcaacgcaattaccttcagcaatcgacctgtgttgatctacgaacaggtgaggctaaagataactaagaagcaatgttgttggtcaggagcattgcgcctgggctttacatctaaagacccctcccggatccaccctgattccctacccaaatatgcatgtcctgacctggtgagccagtccggcttctgggcaaaggcattgcctgaggagttcgctaatgagggcaacattatcgcattctgggtagataaaaaaggaagagtctttcatagaataaactag

SEQ ID NO: 196872 - DNA, 2553 bp, synthetic construct
  misc_feature 1..2553: note = Description of Artificial Sequence: Synthetic coding sequence
  source 1..2553: mol_type = other DNA
atgcggcaggtgtgctgcagcgccctgccccccccccccctggagaagggtcgttgtagcagctactctgattcctcctcttcaagctccgagcgctcatcctccagttcctcatcatcaagcgagtctggatcctcctctcgatccagctctaacaactcttcaatctcgaggcccgctgcaccacctgagccaaggcctcagcagcagccacagccgcggagcccagcagcgcgcagagctgctgcccgctcccgggccgccgccgccgggggtatgaggagggaccctgccccaggcttctcaatgctgctttttggagtgtcgctagcatgctacagcccttcccttaagagtgtacaggatcaggcctacaaagctcccgtagtcgtcgaaggaaaggtgcagggcctggtcccggccgggggttcgtcttcaaacagcacccgtgagcctcctgcctccggcagagtggctctcgtcaaggtgctggataaatggccgctccggagtggtggtttacagcgggaacaggttataagcgtcggatcttgcgtccctcttgaaagaaaccaaaggtacatttttttcctcgagccaaccgagcagcctttggtgtttaaaacagccttcgctcctttggatacaaacggaaagaatctgaaaaaagaggtcggcaagattctctgcactgattgcgcaacccgcccaaaactcaaaaaaatgaagtctcagaccgggcaggtcggcgagaaacagtcactgaagtgcgaggctgccgcaggtaatcctcaaccctcgtatagatggttcaaagatggcaaagagctgaacagaagtcgggacattagaattaagtatggcaacggccgtaagaactcgagacttcaatttaacaaggttaaagtggaggacgccggagagtatgtgtgtgaggctgagaacatcctgggaaaggacacggtgcgcggcagactgtacgttaacagtgtcagcactacccttagcagctggagcggccatgccagaaaatgtaacgagacggcaaagagttattgcgtgaatggaggggtatgctactatattgaagggattaaccaattgtcttgcaagtgtccaaacggcttcttcggccagcggtgtttggaaaagttaccacttcgtctgtatatgcccgatccaaagcagaaggcagaggaattgtaccagaagcgtgtactcacaatcactggcatctgcgtagccctgcttgtagtcggcattgtttgcgtggtggcatactgcaagacaaagaagcagcgtaagcagatgcacaaccatcttcggcagaacatgtgtccggcacaccaaaacaggtcattggccaacggtcctagtcatccccggctggatcctgaagagattcagatggctgactatatctctaaaaatgtgcccgcgaccgaccacgtcatccggcgtgagacagaaaccacattttccggctcccattcttgctctcctagccaccactgcagtactgctactcccacctcaagccatcgccatgagagccatacatggtccctcgagaggtcagagtcgctgacatccgattctcaaagcggaatcatgctgtcgtcagtaggcactagcaagtgcaattccccagcttgcgtggaggcgcgcgcccgccgagctgcggcctacaaccttgaggaacggcggcgggcaactgcccccccttatcacgacagtgtggactctttgagggactctcctcatagcgagcgatatgtaagcgcgctcactactcccgccaggctgagcccagtggatttccattacagcctggctacccaggttccaacatttgagataacaagtccaaatagcgcccacgctgtgtcattacctcctgccgcaccgatctcgtaccgtctggcggagcaacaacccctccttagacacccggcaccccctggcccaggcccaggccccggcccgggccccgggcccggggctgatatgcagagatcctatgactcctattactaccctgccgctggaccagggccccgacggggaacatgcgccctaggaggctcgttgggaagcttacctgcatcccctttcaggatacctgaggacgacgaatacgagacaacacaggagtgtgccccacctcctcctccacgccctcgagctcgcggggcctcccggagaacgtccgctggccccaggcgatggcgacggtccagattgaatggcctagcagctcagagagcccgtgccgccagagatagcttgagcctgagttcaggctccggcggcggaagcgcttctgcctcagacgatgacgccgacgatgcagacggcgccctggccgctgagtccaccccatttctgggcctccgtggcgcacacgacgcacttcgctcagattcacctcccttatgtcccgctgcggacagccggacctactacagcctagatagtcatagtactcgcgcctcaagtagacacagccggggacctccgcctagggctaaacaggattctgcccccctgtag

SEQ ID NO: 196873 - DNA, 1281 bp, synthetic construct
  misc_feature 1..1281: note = Description of Artificial Sequence: Synthetic coding sequence
  source 1..1281: mol_type = other DNA
atgcggcaggtgtgctgcagcgccctgccccccccccccctggagaagggccggtgcagcagttactcagatagctcttccagctcctccgaaaggtcgtccagcagctcaagttcatcaagcgagagtgggagcagttcccgttcttcaagcaataatagctcaattagtcgaccagctgctcctcccgagccacgcccccaacagcagcctcaaccacgctctcccgccgcgaggagggcggccgctagaagccgtgctgccgccgccggcggcatgagaagggacccagctccgggtttctctatgctcctcttcggggtgtcccttgcttgctattccccttctctgaaatccgttcaggaccaagcatacaaagctcctgtggttgtcgaaggaaaggtccaaggcctggtgcccgccggcgggtcatcaagtaactccactcgagaacccccagcgtcaggtcgggtcgccctcgtcaaagtcctcgacaaatggcctctgcggtcaggcgggctgcagcgtgagcaggtcatttcggtgggctcatgtgtgccactcgaacgcaaccaacggtacattttttttcttgaacctacggagcaacctctagtcttcaaaactgctttcgccccccttgatacaaacgggaaaaatctcaagaaggaggtgggcaagatcctgtgtacagattgcgcaacccgccccaagctcaaaaaaatgaagagccagacaggccaagtcggggagaagcagagccttaagtgcgaggcggcagcaggcaaccctcagcctagctataggtggttcaaggacggcaaggagctgaacagaagccgtgacataagaatcaaatatggcaatgggaggaagaactctaggctacagttcaacaaagtgaaagttgaagacgcgggtgagtacgtttgcgaagctgagaatatcctcggcaaggataccgttcgcggtcgactctatgtgaattcagtcagcacaacactgtcatcctggtctgggcatgcacgcaagtgcaatgaaaccgcgaaaagctactgtgtcaatggaggagtgtgctattatatcgagggtataaatcagctgtcatgtaagtgcccaaatgggttcttcgggcaaagatgcctggagaaactcccattgcgcctgtatatgcctgatccaaagcagtcggtgttgtgggacacgcctggtactggcgtctcaagttcccagtggagcacatctccgaagccccgatcatgtacaagacgaggctcgtag

SEQ ID NO: 196874 - DNA, 2577 bp, synthetic construct
  misc_feature 1..2577: note = Description of Artificial Sequence: Synthetic coding sequence
  source 1..2577: mol_type = other DNA
atgcggcaggtgtgctgcagcgccctgccccccccccccctggagaagggaaggtgctcttcttattccgattctagttccagttcatctgaaagaagctcaagttccagcagctcttcatctgaaagcggatcctcttccagaagctcctccaacaactcctccattagtcgccctgcggcccctccggaacctcgaccccagcagcagccccaaccccggtcccctgctgcgaggcgggccgcagctagatcccgggctgctgctgccggtgggatgagacgcgacccggcccctggcttctccatgttgctcttcggggtttctctggcctgttacagcccatctctgaaatccgttcaggatcaggcctacaaagctccagtcgtggttgaaggaaaagtccaggggttggtaccggcaggcggctcatctagcaattccaccagagagcctcccgcctccggcagggtcgccctggtaaaggtgctagataagtggcccctgaggtccggcgggctgcagcgagaacaagtgatctccgtggggagctgcgtgcctctggaacgcaatcaacggtatattttttttcttgagcccactgagcaacctctggtttttaagaccgcattcgcccctctagatactaacggcaaaaacctcaagaaggaagtgggcaaaatcctctgtacggattgcgccacccgccccaaacttaagaaaatgaaatctcaaactggacaagtgggagaaaaacagtcgctgaaatgtgaggctgctgccggcaatccacagccctcctaccgctggttcaaggatggcaaagaattgaaccggtcgcgggacataagaataaagtatgggaatggaaggaaaaacagcaggctgcagtttaacaaggtaaaagtcgaagacgctggtgagtacgtatgtgaggccgaaaacattctgggcaaagatacagtgcgcggcagactttatgtgaactccgtatctaccaccctgtcttcctggagcgggcatgctcgaaagtgcaatgaaacagctaagtcatattgcgtgaacggaggcgtgtgctactatattgaaggcatcaaccagctgagctgcaaatgccccaatggcttctttggtcagagatgcctcgagaagctcccattgcgcctttatatgcctgatcccaagcagtcttttctgtcattcgagctgtccaaggcagaggagctctatcagaagagagtgctgactattacggggatttgcgtggccctgctggttgtgggcatcgtgtgtgttgtcgcttactgcaagacaaaaaagcaaaggaagcagatgcacaaccacctcagacagaatatgtgccccgcccatcagaatcgtagcttggcgaacgggccctcccatccgaggctcgaccctgaggagatacagatggcggattacatatctaagaacgttccagccactgaccacgtgattcggagggaaaccgagacgaccttttcagggtcccatagttgtagtccctctcaccattgctccactgctacaccaactagctcccaccggcacgaatctcatacatggagcctcgagcggtccgaatctctgaccagtgactcacagtccggtattatgctctcaagcgtgggcacatctaagtgcaacagccccgcctgtgtcgaggcgagggctcgacgagccgccgcttataatctcgaggaacgccggcgggcaactgccccaccgtatcacgattctgtggacagcttacgggatagccctcattctgaaagatatgtgtctgctctgactacgcctgcccggttgtcccccgtggacttccattattccctggccacccaagttccaacgtttgagataacaagcccaaattctgctcatgcagtctccttacccccagccgcaccgatcagctaccggctggccgagcaacagcctttgcttagacaccctgctccccccggtcccggaccaggtccggggcctgggccaggtccaggagcagatatgcagcgctcttacgactcatattactaccccgcagcgggccctgggcccaggagagggacatgtgctctcggaggcagtctgggtagcctgccagccagcccgttccggatcccagaagatgatgagtatgaaaccacccaggagtgtgcacccccccctccgccacgacctcgagcccgtggggcctcccggcgaacttccgccggaccacggcgatggcgcaggagtcgactaaatgggctggccgctcagcgggcaagggccgcccgcgattctttaagtctcagctccggatcaggcggaggcagcgcatctgctagcgacgacgatgctgacgatgccgacggcgccctagccgcagaatccacacccttcttgggcttgcgaggtgctcacgatgccttgcggtcagactcccctcctttatgtccagctgcagattcaaggacttattactcactcgacagtcactctactcgggcatcgagtaggcacagtaggggtcctcccccccgagccaaacaggactccgctcccctgtag

SEQ ID NO: 196875 - DNA, 2355 bp, synthetic construct
  misc_feature 1..2355: note = Description of Artificial Sequence: Synthetic coding sequence
  source 1..2355: mol_type = other DNA
atgcggcaggtgtgctgcagcgccctgccccccccccccctggagaaggggcgctgctcatcctatagcgactccagcagctcctcctcagagcgcagttcttcctcttcttccagctcctccgaatctggatcatcatccaggtcctccagcaacaactcttcaattagccgacccgctgcccccccagaacctcggcctcagcaacagccacaacccaggtccccagccgcccgccgggcagccgcacgcagcagggccgccgcagccggcggtatgcgcagggaccccgcccctgggttctccatgttactgttcggcgtatctctagcctgctactcccccagtttgaagagtgtgcaggaccaggcctataaggccccggtggtcgtcgaaggcaaggtgcagggcctggtgcctgcgggaggctcctcttctaacagtacacgagaacccccagcgtcagggcgagttgctcttgttaaggtcctggataagtggcccctgcgctccggagggcttcaacgcgagcaagtgatatccgttggttcatgtgtcccgctggagcgcaatcagcgatacatattctttctggagcccaccgagcagccactggtgtttaaaacagcctttgccccactcgatactaacggcaaaaacctgaaaaaggaggtgggcaaaatcctgtgtacagattgcgcaactaggccaaaactgaaaaaaatgaagagccagaccggccaagtgggcgagaagcaatcgctgaagtgcgaggctgcagccggtaaccctcagccatcttataggtggtttaaagatgggaaagagctaaaccgaagccgggatatccggatcaaatacgggaatggacgtaagaactcaaggctccaatttaataaagttaaggttgaggacgctggcgaatacgtctgtgaagcagaaaatattctggggaaggacaccgtgaggggccgtctttacgtgaactcggaagcagaggagctgtaccaaaaacgggtcctcacaatcactggaatttgcgtcgctttgttagtcgtgggcatcgtgtgtgtggttgcttattgtaagaccaagaaacaacgtaaacagatgcacaatcatctgagacagaatatgtgcccagctcaccaaaatagatctctagccaacggaccttcccatcctcgcctggatccagaagagatccaaatggccgattatatttctaaaaacgtgccagccacggatcacgtgatccgacgcgaaactgagaccactttctctggctcacacagctgttcaccaagccatcattgttctaccgcgacgccaacgtccagccaccgccacgagagccatacgtggtccctggagaggtccgagtcccttacctccgattcacagagcggtattatgctttcgtctgtggggaccagcaagtgtaactctcctgcctgcgtggaggctcgggcccgtagagccgccgcctacaacctcgaggaaagacggagggccaccgcacctccttatcatgacagcgtggactctctgcgagattctcctcatagcgagcgctacgtcagcgcgctgactaccccagcccgtctatcaccagtagacttccactattcgctggcaactcaggttcccacctttgagataacaagtcccaacagcgctcatgccgttagtctcccacccgcagcccctatcagttataggctggccgagcagcagccgctgctccggcacccggcgcctccaggtccaggacctgggcctgggccaggccctggtcccggagctgacatgcagagaagctacgactcctattattatccggccgcgggacctggcccacgtcgtggcacgtgcgcattgggaggctccctgggatcactgcctgccagcccattccggatacctgaggacgacgagtatgagacaacacaggagtgcgccccacctccgcccccaagacccagagcaagaggtgcatctcgcaggacctccgccggaccgcgccgctggcggcggtccaggctcaacggcttggctgcacagcgagccagggcagcgcgagattctctctctctgagctccggcagtggaggcgggtcagccagcgctagcgacgacgacgctgacgatgctgatggcgccctggccgctgagagcactcccttcctcggcctacgcggagctcacgatgctctccgctccgacagccctcccctgtgtcccgctgcagattctaggacctattactctctggattcacatagcacgcgagcctcaagccgacacagccgtggcccaccgccaagggcaaaacaagattccgcacctttgtag

SEQ ID NO: 196876 - DNA, 993 bp, synthetic construct
  misc_feature 1..993: note = Description of Artificial Sequence: Synthetic coding sequence
  source 1..993: mol_type = other DNA
atgcggcgggaccccgcccccggcttcagcatgctgctgttcggcgtgtcgctggcgtgttactcacccagcttaaagagtgttcaggatcaggcctacaaagctcccgtggtggtcgagggtaaggttcagggattggtgccggccgggggaagcagcagtaatagtacaagggagccgcctgcttctggtagggtggccttagtgaaggttctggataagtggcccttacgttcagggggcttacagcgggagcaggtaatcagcgtggggtcatgcgtgccgctggagaggaaccagagatatattttctttcttgaaccgacagaacaaccattggtattcaagactgctttcgccccccttgacacaaatggtaaaaatttaaagaaagaggtggggaaaatactttgtactgactgcgcaacaaggcccaagctgaaaaagatgaagagccagaccggtcaggtgggagagaaacagagcttaaagtgcgaggcggccgccggcaacccgcagcctagttatcgctggtttaaggatgggaaggaacttaatcgctcacgggacatccggatcaaatacggtaacggtcgcaagaacagcaggctccagttcaataaagtgaaagtggaagatgccggggaatatgtttgcgaggcagaaaacatccttggcaaggacaccgttagagggagactctatgtaaatagcgtgtccacaacattatcctcctggtcaggccacgctcgaaagtgtaacgaaactgccaaatcatactgcgtgaatggtggcgtgtgctattatattgagggaattaaccagttatcctgcaagtgtccaaacgggttttttggtcagcggtgtcttgagaaactgcctctgaggctgtacatgcctgaccccaagcaatccgtgctgtgggacacccctggcactggggttagttcatctcagtggagtactagcccttcgactcttgatctcaactag

SEQ ID NO: 196877 - DNA, 2559 bp, synthetic construct
  misc_feature 1..2559: note = Description of Artificial Sequence: Synthetic coding sequence
  source 1..2559: mol_type = other DNA
atgcggcaggtgtgctgcagcgccctgccccccccccccctggagaaaggaaggtgcagctcctactcagattccagttccagcagctccgagcggagttctagttcgtcttcatcatcttcagaatccggatcctccagcagatccagtagcaataactcaagcatttccaggccggcggctcctcctgaaccaaggccgcagcagcagccacagccacgcagtccggcagctcgtcgcgctgcagcaaggtctagagccgcagccgccggcggaatgaggcgagatcctgctcctgggttcagtatgctgctatttggtgtctccctagcctgctactcaccaagcttgaagtctgtgcaagatcaggcgtacaaggccccagtcgtggtcgagggaaaggttcagggccttgtgcccgctggggggtcctcctccaactccacccgcgaaccaccggcatcgggaagagtggctctggtcaaagtcctggacaaatggcccctgaggagcggtgggctccagagagaacaggttataagcgttggaagttgtgtgccactcgagcggaaccaacgctatatcttcttcctggaacctaccgagcagcctctcgtctttaaaaccgcattcgcccctctggatacgaacggtaagaacctgaagaaggaagttggcaaaatcctgtgtacagactgcgctactcggccgaaactcaaaaaaatgaaaagccagactggtcaggtaggagagaagcaaagcttaaagtgtgaggctgccgccggcaacccacagccatcatatcgctggttcaaggatggcaaagagttgaaccggagtcgtgacatcagaattaagtatgggaacgggagaaagaattctaggcttcagtttaataaagttaaggtggaggatgccggagaatacgtgtgcgaggcagaaaatatcctgggcaaagacaccgtcagaggccggctgtacgttaacagtgtctctactacactcagcagctggagcggacatgcaaggaagtgtaacgaaacagccaagagctactgcgtaaacggcggcgtttgttattatatcgaggggatcaatcaactatcgtgcaaatgccccgtcgggtacaccggcgaccggtgccaacagtttgccatggttaatttcagcacacgattggggggagacgttgaggaggcagaggagctgtatcaaaagagagtactgaccatcaccggcatttgtgtggcgctcctggtggttggcatcgtctgtgtggttgcctattgtaagacgaagaagcagagaaagcagatgcacaaccacctccggcagaacatgtgtccagcccaccaaaacaggagccttgccaacggacccagtcacccccgtttagatccggaagagatccagatggccgactacatttcgaaaaacgtacccgccaccgaccacgtcatccgaagggagacagagaccacgttttccggtagtcattcttgtagcccatcccaccactgctctaccgcgacccctacctccagccataggcacgaaagccacacctggagtttggaaaggtccgaatccttaaccagcgattctcaatcaggcattatgcttagttcagtgggcacttccaagtgtaattctccggcatgtgtcgaggctcgggctaggagagccgcagcctataacctcgaagagcggcggagggcaacggcacccccatatcatgattccgttgactcacttagagacagtcctcatagcgaacgttacgtctccgccctgacaactcccgcgcggttaagcccagtcgattttcactacagccttgcaacccaagtaccaacattcgaaattactagccctaactccgctcatgctgtaagcctccccccagctgcccctatctcctacaggttagcggagcaacagcctctgctcagacatccagctcctcccggtccaggccccggccccgggcccgggcccggtcctggagcggacatgcagcgcagctacgactcctattactacccggccgccgggccgggtcctcgccggggcacctgtgctctggggggctcactcgggagccttccagcaagcccgttcaggattcccgaggacgacgaatatgagaccacacaagagtgcgcccctcccccacccccgagacctcgcgctcggggagcctccagacgtacttccgctggaccacggaggtggagaagatcacgccttaatggactggctgcccagcgcgctagagcagcccgcgactcactgagcctgtccagtgggtccggaggtggatctgccagtgctagcgatgacgatgctgacgatgctgacggcgcgcttgctgccgagtctactcccttcctgggtctgaggggggctcatgatgccctcaggtcagattctcctcccctatgccctgctgccgactccaggacatactatagccttgattcccactctacaagggcttctagccggcattccagagggccccccccccgagctaagcaggacagtgcaccgctctag

SEQ ID NO: 196878 - DNA, 2535 bp, synthetic construct
  misc_feature 1..2535: note = Description of Artificial Sequence: Synthetic coding sequence
  source 1..2535: mol_type = other DNA
atgcggcaggtgtgctgcagcgccctgccccccccccccctggagaagggccgctgctccagctacagtgatagttcgagtagctccagtgagcgctcgtcgtcctcaagcagttcttcaagcgagtctggcagtagcagccggtcttctagcaacaatagcagcattagtcggccagctgccccccccgagccccggccccagcagcagccccagccccggagccctgctgcccgccgggccgccgcacgttccagagccgccgcggctggcggcatgaggagggatcctgcccctggctttagcatgctactctttggcgtttctctagcctgttattctccgtccctgaaatccgtacaggatcaagcctataaagcgcccgtagtagtcgagggcaaggtgcagggcctagtccctgcaggtggctcaagctctaacagtacgagggaaccgcccgcatctggccgcgtggccctggttaaagttctggacaagtggcctctgcggagcggtggcctccagcgtgaacaagtcatctccgtaggctcctgtgtgccactggaacgcaaccaacgctacatctttttcctggagcctaccgaacaaccattggtcttcaaaacagcattcgctcccctcgacacaaatggcaaaaacctcaagaaagaggtgggaaaaatcttatgtaccgactgcgccacacgaccaaaactgaaaaagatgaagtctcaaaccggacaggttggcgagaaacagtccctcaaatgcgaggccgccgctgggaatcctcagccctcctaccgctggtttaaagatgggaaggagctgaaccgctcccgggacatccggattaaatatgggaacggtcggaaaaacagtcgcctacagttcaacaaagtcaaagtggaggatgccggggaatacgtgtgtgaagccgagaacatcctgggcaaagacacagtgagggggaggctgtacgtgaactccgtgtctacaacattatcatcctggagtggccacgctcgaaaatgcaacgaaaccgcaaaaagctattgcgtcaatggtggggtgtgttactatatcgaaggaattaaccagctgtcatgcaaatgccccgtaggctatacaggagacaggtgtcagcagttcgctatggttaacttctctaaggccgaggaattgtaccaaaagcgagtactgacaatcactggtatttgcgtcgcgctgctagttgtgggcattgtgtgtgtagtggcgtattgcaaaactaagaaacaacgtaaacagatgcacaatcacttgaggcaaaacatgtgtcccgcgcatcagaacagatccttggctaacggaccttcacaccctagactggaccccgaggagatacaaatggctgactacatttcaaaaaatgtgcccgcaactgaccacgtcatccgcagagaaactgagaccacgtttagcggttcccactcatgctctccgtctcaccattgctctacagctactccgacaagctcccaccgtcatgagagccatacttggtctttggaaaggtccgagagcctaacctccgactctcaatccggaattatgttgagctccgtgggaactagtaagtgcaattcaccagcctgcgtggaagccagggcgaggcgagcagccgcctataacttagaggaaagacgccgggcaaccgctcctccttaccacgacagcgtggatagcctccgtgacagtccccactccgaacggtacgtttccgcactcaccactcctgccaggctctcgcccgtagactttcactactctctggccacacaggtccctacattcgagatcacttcacccaacagtgcgcatgccgtgtcgctacccccggcagctcccatttcatacaggcttgctgaacagcagcccttgctcaggcatccggcccctcccggccccggacccggaccagggcccggacctggccctggcgccgatatgcagcggtcctatgattcttattattatccagcagccggccctggtccccgaagggggacctgtgccctgggcggttccctggggagcctccccgcgtcaccatttagaattcctgaagacgatgagtatgagacaacccaggaatgtgccccaccaccaccccctcgtccgcgagcaaggggtgcatccagacgtacatcagccggacctagaagatggcgtcggagtagactgaacggactcgcagcacagcgagcacgtgccgctcgggatagcctgtctctgagtagcggttcagggggagggtccgcctctgcaagtgatgacgacgccgacgatgctgatggagcgcttgcggccgagagcacaccatttttgggactgcgaggcgcacacgacgccttgcggtcagactctcccccactgtgtcccgccgcagatagtcggacctactattctctcgactcccacagcactcgagcatcctcccgacacagccggggtcctcctccacgggctaagcaggacagtgcccctttgtag

SEQ ID NO: 196879 - DNA, 2577 bp, synthetic construct
  misc_feature 1..2577: note = Description of Artificial Sequence: Synthetic coding sequence
  source 1..2577: mol_type = other DNA
atgcggcaggtgtgctgcagcgccctgccccccccccccctggagaaggggcgatgtagttcatactctgacagttcttctagctcatcagagcgctcttcgtcatcctcatccagctctagcgaatctggtagctcaagtcgctccagcagtaacaactcctccatttcgcggccagccgccccgccagagcccaggccccaacaacagcctcagccccggagtccagcagctcgacgagcagctgccaggagccgggccgcggctgccggcgggatgcggcgggacccggcccccggcttcagcatgctgttgttcggagtgtcacttgcctgttatagtccctccctgaaaagcgtccaagatcaggcctacaaggccccggtggtggtggaggggaaggtgcagggactcgttccggctggcggctcgagtagcaactctacgagagagcctcccgcctccggccgggtagcattggtgaaagtgctggataagtggcccctgcggagcggaggtctgcagagggaacaggtgatatcagtgggtagttgcgtcccgttggagaggaaccagagatacatattttttcttgagcccacagagcagcctctggtgttcaaaacagccttcgcacctttagacacaaacgggaaaaacctgaaaaaggaagtgggcaaaatactgtgcaccgattgtgccacaagaccaaagctgaaaaagatgaaatctcagacgggacaggtaggagaaaagcagtcccttaagtgtgaggcagcagctggaaatcctcagccatcttacagatggttcaaagacggaaaagagctgaacaggtccagggatatccgaattaagtatggcaacgggaggaagaatagccggctgcagtttaataaggtcaaagtcgaagatgctggcgaatacgtgtgcgaagcagaaaacattctgggtaaggataccgttcgagggcggctatacgtgaattccgtcagcacaaccctgtctagctggtcgggacatgcgcggaagtgcaacgagactgctaagagctattgtgtgaatggtggagtctgctattacatcgaaggaataaatcagctttcgtgcaagtgtcccaacggatttttcgggcagcgatgcctagagaaactgcccctgcgcctgtacatgccagatcccaagcaaaagcatctcggttttgaattaaaagaggcagaggagctctatcagaaaagggttcttacgattactggaatttgtgtggccttactggtagtgggtattgtgtgtgttgtagcctattgtaagactaagaagcagagaaaacaaatgcataatcacctacgccagaacatgtgtcctgcccaccagaataggtccttagcaaatggtcctagccatccccgcctggatccagaggaaattcagatggcagactatatcagtaaaaacgtacctgcgaccgaccatgtgatccgcagagaaacggaaacaacattttctggatctcacagttgttcaccgagccaccactgttccaccgcaacccctacctcttcccacagacatgaatctcatacctggtctctcgaaagaagcgagtccctcacctctgattcccagtctggaattatgctctcgtccgtggggaccagcaagtgtaattcgcccgcatgcgtcgaggctcgggcccgaagggcagctgcctataatctggaggagcggagaagggccacagctccaccctaccatgatagcgttgatagtctgagagactctcctcatagtgaacggtatgtctcagccctgaccaccccagcccgcttaagtccagtcgatttccactactccctggccacacaggttcccacctttgagatcaccagccccaatagtgctcatgcagttagtctgcctcccgccgcgccgatctcctaccgattggctgaacagcagcctctcctgagacacccggcacctcccggcccaggtcctgggcctggacctggacctggtcctggcgctgacatgcaaaggtcctacgacagctactattatcccgcagcaggtcctggcccaaggaggggaacttgcgccctcggagggtcactgggctccctgccagcttccccttttcgcatccccgaggacgacgaatatgagacaacccaggaatgcgcacctccaccacctcccaggccaagagcacggggggcgtctcggagaacatctgccggacccagacgctggagacgttcccgcctgaatggcctggcggcgcagagagcaagagccgcccgggatagcctgagcctttcatccggttcaggaggcgggtctgctagcgcgtccgacgacgatgcggacgatgccgacggagccctggctgccgaatcaactcctttcctcggcctacgaggcgcccatgatgctcttaggtctgacagtccgcctctatgcccggccgcagatagcagaacgtactattcgttggacagtcactccacaagggcttcttcacggcattcacgaggtccaccgccgagagcaaagcaggactccgctcccctgtag

SEQ ID NO: 196880 - DNA, 2091 bp, synthetic construct
  misc_feature 1..2091: note = Description of Artificial Sequence: Synthetic coding sequence
  source 1..2091: mol_type = other DNA
atgagcgagggcgccgccgccgccagcccccccggcgccgccagcgcggctgccgcttccgccgaggaaggcaccgctgcagccgcagcagccgccgccgcaggcggaggacctgatggcggaggcgagggcgccgctgaacccccgcgcgagctaagatgttcggactgtattgtatggaatagacagcagacttggctgtgcgtggtaccactgtttatcggtttcattgggctcgggctgtcactcatgctattaaagtggatcgtagttggcagtgtgaaagagtacgtacctactgacttggtggactctaagggcatgggacaggaccctttctttctctcaaagcccagtagcttccccaaagccatggaaacgaccaccaccaccacttccacaacaagtccagccaccccctccgcagggggggcagcctcatcccggacccccaatcggatcagtacacggcttaccactattaccagggcccctactcggtttcccggacaccgggtccctattagagctagccctcggagtacaacagctcgtaatacagccgctccagccacagtgccctccactacggcaccattttttagctcttcaaccctggggtccagaccccccgtccctggaacccccagtacccaggctatgccttcatggcctactgcagcatacgccactagcagctatcttcacgactcaaccccgagctggactcttagccccttccaggatgctgctagtagcagctcttcatccagcagctctgcaactacgactacacctgagacctcgacgagccccaagttccacacaacaacatactcaaccgagcggagcgagcacttcaagccttgtagagacaaagacttagcctattgtttaaatgacggagaatgcttcgtcattgagaccttgactggaagccataaacattgccgttgcaaagagggctaccagggcgtcaggtgtgatcagtttctgccaaagactgactctattctgtctgatccaacagaccatctcgggatagaattcatggagtccgaggaggtctaccagagacaggtgctgagcatcagctgtattatctttgggatagtgatagtgggcatgttctgcgctgcattctattttaaatctaaaaaacaggcgaagcagatccaggaacaattgaaagtcccgcagaatgggaaatcttattctctgaaggcctcttctaccatggccaagagtgaaaatctggtgaagtctcacgttcagctgcagaattacagcaaggttgagaggcacccggtcaccgcccttgagaagatgatggaatcatctttcgtgggccctcagtcttttcccgaagttccatccccagaccgcggctcacaaagcgttaagcaccacaggtccctgtcatcatgctgcagccccggccaaagaagtggaatgctccaccggaacgcatttagacggaccccccccagccctcgctcaagactggggggtatcgtgggtcccgcttatcagcagctggaggagagtcggatccctgaccaagatacaattccgtgtcagggctactcctcaagcggtctgaagacccagaggaatactagcatcaacatgcagctcccatcccgcgagacgaacccttacttcaactctctggagcagaaggatctggtgggctacagtagtacccgagcctcctcagtcccaattataccctcagtaggcctggaggagacatgcctgcagatgccaggcatttctgaagtgaaatctattaagtggtgcaagaattcctacagtgcagacgtggtgaacgtgtccattcctgtatctgattgccttatagccgaacaacaagaagtcaagattctgctggaaaccgtgcaggagcagattcggattctgacagatgcacgaaggtctgaagactacgagcttgccagcgtcgagacagaggactccgcgtccgagaacactgcttttctgcccttgtccccaaccgcaaagagcgaaagggaggcgcagttcgtgctcagaaatgaaatacagagagacagcgccctaacgaagtag

SEQ ID NO: 196881 - DNA, 1500 bp, synthetic construct
  misc_feature 1..1500: note = Description of Artificial Sequence: Synthetic coding sequence
  source 1..1500: mol_type = other DNA
atggagtgcggcatcccccccaccctggtgtgcgtgggccggggcggaggactccacacgatcaatatcattatttggtactacttcccaagcgcctggcggacttgtttcaatatttccagctccgtcgggctcctgctcactaatagttacaagttctacacgaccacatactctaccgagcgttccgagcactttaagccttgcagagataaggacctcgcatactgtttgaacgacggcgaatgttttgtgatcgagaccctcacgggcagccataaacactgcagatgcaaggaaggatatcagggggtccgttgcgatcagttcctgccaaagacggattccattctgagcgaccccacagaccacctgggcatagaatttatggaaagtgaggaagtgtaccagaggcaggtgctgagtattagttgtattatattcgggattgttatcgtcggaatgttttgcgcagccttctattttaagtcaaaaaagcaggcaaagcagattcaggagcaattgaaagtcccccagaacggcaagagttattccctgaaggcttcctccacaatggctaaaagcgaaaacttggtgaaaagccacgttcagctccagaactactctaaggttgaacgacatcccgtgacagccttggagaaaatgatggaaagttcctttgttggaccccagagtttcccagaagttcctagccctgaccgcggaagccagtctgttaagcaccatcgctcactctcaagctgctgtagccccggacagagaagtgggatgctacacaggaacgctttccgacgcacaccgccttcaccaaggagcagactgggagggatcgtgggcccagcctatcagcaactggaggaaagcaggatccccgaccaggacactatcccatgtcaaggcatcgaggtgcggaagaccatcagccatctgcccatacagctctggtgtgtcgagaggcctctggacctgaaatactcctctagtggattgaagacccagcgtaacaccagtatcaatatgcagttgccctctagggaaaccaatccctattttaactcgctcgagcagaaggatctggtagggtatagctctactcgggcctccagcgttcccattatcccgtccgtcggtctcgaggagacctgcctccagatgcctgggatcagcgaggtgaagagcattaagtggtgcaagaactcatacagcgcagacgtggttaatgtttcgattcctgtgtccgattgcttgatcgccgagcagcaagaagtaaaaatacttctggaaactgtgcaggagcagatccgaattctgacagacgctaggaggagcgaagactacgagctagcatctgtagagacagaggattcagcatctgaaaacacggcctttttacccttgagtccaacagcaaagagtgagcgggaagctcagtttgtgctgcggaacgagatacaaagagactccgcgttgaccaaatag

SEQ ID NO: 196882 - DNA, 2163 bp, synthetic construct
  misc_feature 1..2163: note = Description of Artificial Sequence: Synthetic coding sequence
  source 1..2163: mol_type = other DNA
atgagcgagggcgccgccgccgccagcccccccggcgccgccagcgctgccgcagccagcgccgaagaggggacagctgctgccgccgcagccgccgccgctgggggaggtcccgatggcggcggagagggcgctgcagagccaccacgggaactccggtgctccgactgcatcgtgtggaatcggcaacaaacttggctgtgtgttgtccccctctttatcgggttcattggactcggcctgagcctgatgctcctaaagtggattgttgttggttccgtgaaggaatatgtcccaacagacttagttgattcgaaagggatgggccaggatcccttctttctcagcaagccaagctcattcccaaaagccatggagacaacgaccaccacaaccagtaccacatcgcccgctactccttccgcaggcggagccgccagcagcaggacccccaataggatttctactcgcctgaccacaatcactcgagcgcccactcgatttcctgggcacagggtgcccattcgcgctagtccacggtctactaccgctcggaatacagctgcgccagccaccgttccttccacgaccgccccatttttttcttcctccacgcttggtagtagacctcccgtgccaggcaccccatctactcaagctatgccgtcctggcctacagcagcatatgctacgtcctcttacttgcacgactccactccaagctggacattatccccattccaagacgccgccagtagctcaagtagctcatcctctagcgcaacaactacaaccccagagacctcaacatcacccaagtttcacacaactacctactccacagaacgatccgagcactttaaaccttgtagagataaggacctcgcatattgtctgaacgatggggagtgctttgtgatcgaaacactgacaggtagccacaaacactgccgatgtaaagagggctaccagggggttaggtgcgatcagttcttacctaaaactgacagtatcttgagcgatcccactgaccatttaggcatcgagtttatggagtcggaagaggtttatcaacggcaggtcctgagcatttcctgcattatctttggaatcgttattgtcggcatgttttgcgcggccttctactttaaaagtaagaagcaggcaaagcagatccaagaacagctcaaagtcccccagaatggcaaatcatatagcctgaaggcaagcagtaccatggcgaaatcagagaacctggtgaaatctcacgtccagctgcagaactacagcaaagtcgaaagacaccctgttaccgccctggagaagatgatggagtccagcttcgtgggacctcagagctttcctgaggtacccagtcctgaccgggggtcacaaagcgtgaaacaccaccgcagcctgtcttcatgttgctcccccggacaacgttccggaatgctgcataggaatgcattcaggaggacccccccctccccgagaagcaggctcggagggatagttggccccgcttaccagcagctggaggagagtcggattccagatcaagatactatcccatgccagggtatcgaagtgcgaaagactatcagtcacctccccattcagctgtggtgtgtcgagcggcccctggacctgaagtactcttcttctggactgaagacccagcgaaataccagcatcaatatgcaactgccatctcgggagacgaacccctatttcaattctttagagcagaaggacctggtggggtactcttctacccgggcttcatcagtacccatcatccccagcgtggggctggaggagacatgtttacaaatgccggggatctccgaagttaagtccattaaatggtgtaaaaattcatacagcgctgatgtcgtgaatgtgagcattccagtgagcgactgtcttattgcagaacaacaggaggtaaagatcctgctggagaccgtccaggagcagattagaatcctgaccgatgcccggcgttcggaagactacgagcttgccagcgtggagaccgaggatagtgccagcgaaaataccgcgtttttgcccttgtcaccaacggccaaaagcgagagagaggcccaattcgttttgcggaacgagattcagcgggactctgcgctgactaaatag

SEQ ID NO: 196883 - DNA, 2088 bp, synthetic construct
  misc_feature 1..2088: note = Description of Artificial Sequence: Synthetic coding sequence
  source 1..2088: mol_type = other DNA
atgagcgagggcgccgccgccgccagcccccccggcgccgccagcgccgctgcggcttccgccgaagagggcacagccgctgcagcagctgccgccgcagctgggggcggacctgatggaggcggcgagggggctgccgagcctccccgcgagctgagatgctctgactgtatagtatggaataggcaacagacatggctgtgcgtcgtccctcttttcattggttttattggactgggcttatctttgatgttgctgaagtggatcgtggtgggctccgtgaaagaatacgttcccactgacctcgtggatagcaaagggatgggtcaagaccctttctttctgtccaagccatccagctttcccaaggctatggagaccacgaccacaactacaagcacgacctcccctgctacacctagcgccggcggcgctgcttcaagtaggacgcccaatcgaatttctactagactgacaaccataactagagcccccacaaggtttccagggcaccgcgtcccaatccgggctagcccccgatcaaccacggctcgaaatacagccgccccggcgaccgtgccttccaccaccgcccctttctttagctcttctaccctaggctcacgacctcctgtgccaggaaccccaagcacccaggcaatgcccagctggccgacagcagcctacgctacatcaagttacctccacgacagcacgccgtcttggacactgtcccctttccaggacgccgcttctagttcatctagcagctctagcagcgctacgactactactccagaaacgagcacctcccccaaatttcatacgaccacttattctacggagcgctccgaacattttaaaccctgtagggacaaggatctggcttattgcctgaatgatggggagtgtttcgtgatagagacactgacagggtctcacaagcactgtcgatgcaaggaaggataccagggagtgagatgtgatcagtttctgcccaaaaccgacagtattctctccgacccgactcatatcgggatcatttttacggagagtgaggaggtataccagaggcaggtccttagtatcagttgtataatttttggcattgtgatcgtggggatgttctgtgcagcattttacttcaagagcaagaaacaggctaaacagattcaggaacagctaaaggttccccagaatgggaagtcttactcacttaaagcctcttctacaatggctaagtcggagaatctggtgaaatcccacgtccagctgcagaactattctaaagtagagcgacaccccgtgaccgcactggagaagatgatggagagctctttcgtaggcccacaatcgttccctgaagtcccctcacctgatcggggctctcagagcgtcaaacatcacaggtcgttgagcagttgctgctctcctggtcaaagaagcggcatgttgcatcgtaacgcatttagaagaactccacctagtcctcggagccgcctgggcggaatcgtaggccctgcctaccagcagctcgaagaatccaggatccccgatcaggatacaatcccatgccaggggtattcatcatctggactgaagacccaacggaacactagcattaatatgcagcttcccagtcgggagaccaatccctattttaactctctggaacaaaaagatctcgtgggctacagtagcacaagagccagctcggtgcctatcatcccgtcagtcggcctggaggagacctgtctgcagatgccaggcatcagtgaagtcaaaagcatcaagtggtgtaaaaattcctactctgcagatgtggtcaacgtttctatccctgtgtctgattgtcttatcgctgaacagcaagaggtgaaaattctcctggagacagttcaggagcagattcggatcttgaccgatgcaaggagatccgaagattatgagctggcctctgtggagacagaggactcagccagcgagaataccgccttcttgcctctttcccccacagccaaaagcgaacgggaagctcagttcgtgctgagaaacgaaatccaaagagactcagctttgaccaagtag

SEQ ID NO: 196884 - DNA, 1041 bp, synthetic construct
  misc_feature 1..1041: note = Description of Artificial Sequence: Synthetic coding sequence
  source 1..1041: mol_type = other DNA
atggagagcgaggaggtgtaccagcggcaggtgctgagcatcagctgtatcatctttggaatcgtcattgtgggcatgttttgtgccgctttctattttaagagtaaaaaacaggccaagcagatacaggaacaactgaaggttccacagaacgggaagtcctattccctgaaagcttcaagcacaatggcaaagtcagagaaccttgttaaatcccatgtccagctgcagaactacagtaaagttgagcgtcatccggtaacggctctcgagaaaatgatggagtcctcttttgtgggtccgcagtcgttcccagaagttcctagtcccgaccggggtagccagagtgtgaaacaccacaggagcctaagcagctgctgtagcccaggtcagagaagtggaatgcttcataggaatgccttccggagaacaccccctagtcccaggtccagattgggcgggatcgtggggccagcttaccaacagctggaagaatcccgcatcccagaccaggacactattccttgtcaagggtatagctcctctggtttgaaaactcagagaaacacttccatcaacatgcaactgccttctcgcgagacgaatccttacttcaacagcctggaacagaaagacctggtgggatactcctctactcgggcgagctctgtaccaataatcccaagcgtgggtctcgaggagacgtgtctgcagatgcccggcatctcggaggtcaaatcaataaaatggtgtaaaaattcttacagcgccgacgtcgtgaatgtgtcaattcccgtcagcgactgccttatcgcagagcaacaggaggtgaagattctactcgagacggttcaagagcaaatccgcattctgaccgacgcgcggcgttccgaggattacgaactagcttctgttgagaccgaggactccgccagcgagaacacggcattcctgcctctgagtcccaccgccaagtccgaaagagaggctcaatttgtcttgagaaacgagatccaacgagacagtgcacttaccaagtag

SEQ ID NO: 196885 - DNA, 1041 bp, synthetic construct
  misc_feature 1..1041: note = Description of Artificial Sequence: Synthetic coding sequence
  source 1..1041: mol_type = other DNA
atggagagcgaggaggtgtaccagcggcaggtgctgagcatcagctgtatcatattcggtattgtgatcgtcggtatgttttgtgcagctttttacttcaagtctaagaagcaggcaaagcagattcaggagcaacttaaagttccccaaaacggtaaatcgtactcacttaaggcgagctccaccatggccaaatctgagaacctcgtcaagtcccatgtgcagctgcagaactactctaaggttgagcgtcacccagtgacggccctcgaaaaaatgatggaaagctcgttcgtcggaccacaatccttccccgaagtgccgtcccctgaccggggctcccagtctgtaaaacaccacagatccctttcatcttgctgcagccctggtcaaagatccggcatgttgcatcgtaatgctttccggaggacccccccttcaccccgcagcaggctggggggcatcgtgggccctgcgtatcaacagctcgaggagtcacggatacctgatcaggatacaatcccgtgccaaggttactcttcctcaggcttgaagacgcagaggaataccagcattaatatgcagctgcccagcagagagaccaatccatatttcaactctctggagcagaaggatcttgtcggctactcctctactagagctagttcagtccctataataccgagcgtaggtttggaagaaacttgtttacagatgcccggtatctccgaagtcaagagcataaagtggtgtaagaacagctattcagccgatgtcgtcaacgtaagcatcccagtctcagattgtctcatagccgaacagcaagaagtcaagatcttgctggaaactgtacaggagcagattcggatcttaaccgatgcacgccggagcgaggactacgagctggctagtgtggaaaccgaggacagcgccagtgaaaatactgcctttctccctctttcccccacggccaagtcggaacgggaggcccagtttgtcttgcggaatgagatccagagggactctgccctcacaaagtag

SEQ ID NO: 196886 - DNA, 171 bp, synthetic construct
  misc_feature 1..171: note = Description of Artificial Sequence: Synthetic coding sequence
  source 1..171: mol_type = other DNA
atgcccaccgaccacgaggagccctgcggccccagccacaagagcttttgtctgaatgggggactgtgttacgtgataccaacgataccctcgcctttttgctcactgcacgagaatgaaaacgacaataatgaggacctttacgatgatctattgcccctcaatgaatag

SEQ ID NO: 196887 - DNA, 348 bp, synthetic construct
  misc_feature 1..348: note = Description of Artificial Sequence: Synthetic coding sequence
  source 1..348: mol_type = other DNA
atgcccaccgaccacgaggagccctgcggccccagccacaagagcttctgcttgaacgggggactgtgttacgtaatccccactattccttcgcccttttgccgatgcgtcgaaaactacacaggagctcgatgcgaggaggtgttcttgcctgggagtagcatccagaccaaatccaacctcttcgaggcttttgttgcccttgctgtgttagtcactttgattattggcgccttctactttctgtgccggaagggacacttccagagagctagcagtgtgcagtacgacataaatcttgtcgagacaagcagcacctcagcacaccactctcacgaacaacactag

SEQ ID NO: 196888 - DNA, 273 bp, synthetic construct
  misc_feature 1..273: note = Description of Artificial Sequence: Synthetic coding sequence
  source 1..273: mol_type = other DNA
atgcccaccgaccacgaggagccctgcggccccagccacaagagcttctgtctgaacggggggttgtgttacgtgatacccaccattcccagccccttttgtagatgcgtggagaattacacaggcgcgagatgcgaggaggtgtttctgcccgggtcatcaatccagaccaagagtaatcttttcgaggccttcgtcgctctggctgtgttggtaacattgataatcggcgccttctatttcctgtgccgctgcggcaacacctgcatgtag

SEQ ID NO: 196889 - DNA, 615 bp, synthetic construct
  misc_feature 1..615: note = Description of Artificial Sequence: Synthetic coding sequence
  source 1..615: mol_type = other DNA
atgatgcccagctgcaaccggagctgcagctgcagccggggcccctctgtggaggacggaaaatggtacggcgtgcgcagttatctgcacctgttttacgaggattgcgcgggcactgcactcagcgatgacccggagggacctccagttctgtgtcctcgccggccgtggccaagcctctgttggaagatttctctgagttccggtactcttctgcttctcttaggcgtcgccgcgctcactactggttacgcagttcccccaaaactggagggaatcggagagggggagtttctggttcttgaccagcgtgccgccgactataaccaagccctggggacctgtcgtctagctggcactgccctttgtgttgccgcaggtgtcctccttgccatttgcttgttttgggcgatgatcggctggctctcacaggataccaaggcagagcctctcgacccagaggctgatagccatgtggaggtgtttggcgatgagcctgaacagcagctttcaccaatcttcaggaatgcatccggacaatcttggttttcaccacctgcttcacctttcggccaaagttctgtccagactattcaacccaaaagagactcatag

SEQ ID NO: 196890 - DNA, 615 bp, synthetic construct
  misc_feature 1..615: note = Description of Artificial Sequence: Synthetic coding sequence
  source 1..615: mol_type = other DNA
atgatgcccagctgcaaccggagctgcagctgcagccggggccccagtgtagaggacgggaagtggtacggagtgaggtcctatttacacctgttctatgaggactgtgcaggcaccgcgttatccgacgacccagagggcccaccagttctctgccccagaagaccctggcccagcctgtgctggaaaatcagcttgtcaagcggcacccttcttctgctgctaggggtggccgctctgactacaggttacgctgtgcctccaaagctggaagggattggagagggggagttcctcgtgctggaccagagggccgccgattacaaccaggccctcggaacttgtaggctggccggcacagcactgtgtgtggctgccggagttcttcttgctatatgcctgttctgggcgatgattgggtggctcagtcaggataccaaggctgagcctctggatcctgaggctgactctcatgtggaagtgtttggcgatgagcccgagcagcagttaagccctattttccgcaatgcctctggccagtcttggtttagtccaccggcctccccttttggtcagtcttccgttcagaccattcaaccaaagagagacagctag

SEQ ID NO: 196891 - DNA, 1329 bp, synthetic construct
  misc_feature 1..1329: note = Description of Artificial Sequence: Synthetic coding sequence
  source 1..1329: mol_type = other DNA
atgtaccagcggatgctgcggtgcggcgccgagctgggcagccccggcggaggagggggtgggggaggaggaggtggggcaggcgggcgcctagccctcttgtggatcgtgcctcttaccttgagcggactgctcggggtggcctggggagcaagcagcttaggggcacaccacattcaccacttccacggatcctcaaaacatcactccgtaccgattgccatttataggagcccagccagtctccgcggcggccacgctggaaccacttacatttttagcaagggcggaggccaaatcacctataaatggccacccaacgaccgcccctccacacgagcagacaggctcgcaataggtttttctactgtacaaaaagaggccgtcctagtgcgggtggactcctcttccgggctcggcgactacctagagctgcacatccatcagggaaaaattggtgtcaaattcaacgtgggaacagatgatatcgccatcgaggaatccaacgctatcatcaatgacgggaaataccacgtggtccgttttacccgttccggtgggaacgctaccttgcaggttgactcatggccggttatcgaacggtacccagccggaagacagctaacaatcttcaatagccaggcaaccattatcattggcgggaaagaacagggccagccatttcaaggtcagttaagtggcctttactacaatggactgaaagtcttaaatatggcagctgagaacgacgccaacatagccatcgtagggaatgtgagactggtgggagaggtgccttcctctatgaccaccgagagcaccgctactgctatgcagagtgagatgtcgacctcaattatggagaccactacaaccctcgccaccagcaccgcacgccgcggtaagcctcctaccaaagagccaatttcccagacaaccgacgacattcttgtggcaagtgccgagtgcccaagtgatgacgaggatatcgacccctgtgagccgagctccggtgggctggcgaatcccactcgagccggcgggagagagccttaccctggttctgcagaggtcattagagagtcgagctcgactaccggaatggtcgtgggaattgtggcagcagctgctctgtgtatcctgatactattatacgctatgtataaatatcgaaacagagacgagggtagttatcacgtcgacgagagcagaaactacatctccaacagtgctcagagcaacggcgcggtggtgaaagaaaagcagccttccagtgccaagtcatctaataagaataagaagaataaggacaaagagtattacgtgtag

SEQ ID NO: 196892 - DNA, 4524 bp, synthetic construct
  misc_feature 1..4524: note = Description of Artificial Sequence: Synthetic coding sequence
  source 1..4524: mol_type = other DNA
atgggcaccgccctgctgcagcggggcggctgcttcctgctgtgcctcagcctgctgctcctcggctgctgggctgagctgggatctgggttggaattccctggagctgagggccagtggactcgctttccgaaatggaacgcatgctgtgaaagcgagatgtcatttcaactgaaaacccgcagcgcccggggactcgtgctatactttgatgatgaaggattttgcgattttctggagctgattctaaccaggggaggtagacttcagctgtccttcagcatcttctgtgcagagccagccactctcctggccgatacccctgttaatgatggggcctggcactccgttcgaatccggcggcagttcaggaatactactctcttcatcgatcaggtagaagccaaatgggtcgaggtaaaaagcaaacgcagggacatgaccgtgttcagtggactgtttgtgggtggcctgccacctgagctgagggccgcagccctcaaactgacgctggccagtgtgcgcgagagagagcctttcaaaggatggatccgggacgtcagagtgaatagcagccaggtccttccagttgactctggggaggtgaaactggatgacgagccacctaactccggcggaggcagcccgtgcgaggcaggagaggagggcgaagggggcgtgtgtctgaatggaggcgtgtgcagcgtggtcgacgaccaggccgtgtgtgactgcagccggacggggttccgcgggaaggattgctcacaggaggataacaatgttgagggactggcccacttgatgatgggggaccaaggcaaatcaaagggaaaagaggagtatattgcaacattcaaaggatcagagtacttttgctacgatctaagccaaaatccaattcagtcctctagtgatgagattactctgtcattcaagacactgcaaagaaatggactgatgttgcacactggaaagtctgccgactacgtgaatttagctctaaagaatggagcggtctctctggtgatcaatcttggctccggcgcttttgaggcattggtagaacccgtcaatggcaagtttaacgacaacgcctggcatgatgtgaaggtgacccggaacctgcggcagcacagtggcatcggtcacgcaatggtcacaatttccgtggacggaatactgactacgacgggatatactcaggaagactatactatgctagggagcgatgactttttctacgttggtggatccccctcgaccgcagacctgccaggcagtcccgtctctaacaacttcatgggttgcctgaaagaagttgtgtacaaaaataacgacgtcaggctggaactttcacgcctggccaaacagggagacccaaaaatgaagatccatggcgtcgtggcctttaaatgcgaaaacgtagccaccctggatcccattactttcgagacacccgagtctttcatctctcttcccaaatggaacgccaaaaagactggcagcatttctttcgattttaggactactgaacccaatggcctcatcctgttcagtcacggaaaaccccgccatcaaaaggatgcaaaacaccctcagatgattaaagtggactttttcgcaatagagatgctcgatgggcacctgtaccttctgctggacatggggagtggcaccatcaagattaaggcactgctgaaaaaggttaacgatggggaatggtaccacgttgacttccagcgtgacgggagatccgggactatttctgtgaataccttacgaactccatatactgccccgggggagagcgagatcctagatttagacgacgagttgtacttagggggccttccggaaaataaggctgggctagtgttccctactgaagtgtggaccgcgcttctcaattatggctatgtggggtgcatccgggatctctttattgacggacagtcaaaggatattcggcagatggctgaagtgcagagtaccgccggcgtcaaaccttcttgctctaaggaaactgccaaaccctgtctatccaacccatgcaaaaacaacggcatgtgccgggacgggtggaatcgatatgtctgtgactgctctgggacgggctacctgggtagaagttgcgaacgagaggccacagttctatcgtacgatggatctatgttcatgaagatccagcttcccgttgtgatgcatactgaagctgaggatgtgagtctgaggttccgcagccagcgagcctatggcatcctgatggctaccacatcccgcgatagcgcagacacattgcggctggaactggacgccgggagggtgaaattaacagtcaatttagattgtatccggatcaattgcaatagctcgaaggggcccgagacgctatttgccggatataacttgaacgacaatgagtggcataccgtgagagtggtgcgcaggggaaagtcacttaagctgaccgttgatgaccagcaagctatgaccggacagatggcaggggaccacaccagattggaatttcataacatcgagacaggcataatcaccgagcggcgatatttgagtagcgtgccaagtaatttcattggtcatctccaaagtctcacatttaatggaatggcctacattgatctgtgtaaaaatggcgacatcgactactgcgagctgaacgcccgcttcggcttccgcaatatcattgctgatcctgtgaccttcaaaacgaagtcgagttacgtagcgctggcaactcttcaagcctatacaagcatgcacttattttttcagttcaaaacaacatcattagatggcctgatactgtacaactccggggacggtaacgattttatagtggttgagctcgttaaaggctacctccattacgtattcgatcttggaaatggcgccaacttgattaaaggcagttctaacaaaccactaaatgacaaccagtggcataacgtcatgatttctagggatacctccaacctgcacaccgtaaagatagataccaagataactacccagattacggctggcgccaggaacctcgacctgaaaagcgacctgtatattggcggagtggctaaggaaacctataagtcgctgcccaagctggttcatgcaaaggaagggtttcagggctgtctggccagtgtggaccttaacgggaggctcccagacttgatctctgatgctctgttttgcaatggccagatagagcgcggctgcgagggccccagcaccacgtgtcaagaagactcctgtagcaaccagggggtgtgtctccaacagtgggatggttttagctgtgactgcagcatgacatcttttagcggaccgctttgtaacgatccaggcaccacgtacattttcagtaaaggcggcggtcaaattacatacaagtggcctcctaacgatcgcccatcaaccagagctgaccggttggctatcggttttagcacagtccagaaggaggcggtgctggtgcgcgtggattcaagtagcggccttggtgactatctggagttgcatatccaccaaggcaagattggcgtgaaattcaacgtaggcaccgacgacatcgccatcgaagagagcaacgccattataaatgacgggaaataccacgttgtccgttttacccggagcgggggtaacgcgactctgcaggtggacagttggcctgtgattgaaagatatcccgccggaaataacgacaacgaacggctggccattgcacggcaaagaatcccttacaggcttgggagggtggttgacgaatggctgctagacaagggtcggcagctcaccatctttaacagccaggccactataatcattgggggaaaggaacagggtcagcctttccagggccaattgtccggactttactacaatgggctgaaagtgctgaatatggctgcagaaaatgatgctaacatagccatcgtgggcaatgtcagactcgtgggagaggtaccatcctctatgacgaccgaaagtacggccacagcgatgcagagcgagatgtcaacctccatcatggaaacaacaacaacactcgccacttccacggctagaagagggaaaccccctaccaaggaacctatctctcagaccacagatgatatattggttgctagcgccgaatgtccaagcgacgatgaggacatagacccctgcgaaccctcttcaggaggcctggccaatcccaccagagccgggggcagagagccctaccccggctcggctgaggtaatccgagaaagctccagcaccacgggcatggtcgtgggtatcgtcgccgctgcagcgctgtgcattctcatcctgctgtacgcaatgtataaatatcggaaccgggacgaaggatcctatcatgttgatgagagccggaactatattagcaacagcgctcagtccaacggagccgtagtcaaagaaaagcaaccttcaagcgccaagagtagcaacaagaataagaaaaataaggataaagaatactacgtgtag

SEQ ID NO: 196893 - DNA, 1488 bp, synthetic construct
  misc_feature 1..1488: note = Description of Artificial Sequence: Synthetic coding sequence
  source 1..1488: mol_type = other DNA
atgatcagccgggacaccagcaacctgcacaccgtgaagatcgacaccaaaatcaccacacagattaccgccggtgcaaggaacctcgatttgaagtccgacttgtatatcggcggagtggctaaggagacctataagtccctccctaaactggttcatgcaaaagagggattccagggttgtctggcgtccgtagatctgaatggacgacttcccgacctgatctctgacgccctcttttgcaacggacagattgaacgcggttgcgaagttgctcttatgaaagctgacctgcagggcccgtctaccacttgtcaggaggattcatgttccaaccagggagtgtgcctgcagcagtgggacgggtttagctgtgattgctctatgacatctttttctggccccctctgcaacgacccagggaccacttacattttctccaaaggcgggggccaaatcacctacaagtggccaccgaatgacaggccctctactagggccgatcgtcttgccatagggttttctacagtgcaaaaggaggcagtgctggtgcgtgttgactctagcagcggcctgggggactacctggaacttcatattcaccagggcaagatcggcgtgaagtttaacgtcggcaccgacgacatcgccattgaggagtctaacgccataatcaacgatggcaaatatcacgtcgtgaggttcacacgatccggggggaacgctaccctgcaagtggactcatggcccgtgatcgagcgatacccggctggtcgtcaactgactatcttcaattcacaggccacaattatcattgggggaaaggagcagggccagccctttcaggggcagctgagtggtctgtattataatgggctgaaggtcctgaacatggccgccgagaatgatgcgaatattgcgatcgtcggaaacgtgagactggtgggcgaggtgccctccagcatgacaaccgagagtaccgccaccgctatgcagagtgaaatgagcacatccattatggagacaaccaccacgcttgctacttctacggctaggcgcggtaagccccccactaaggaacctatctcacagacgacggatgacatactggtcgcatctgccgagtgtccttcggacgacgaggatattgatccatgtgaaccctcttctggcggtttagcgaatcctactagagccgggggaagagaaccctacccaggctccgccgaagttatccgggagtcctccagcaccaccggcatggttgtggggatcgttgccgctgcagctctctgtatcctgatcctcctttacgctatgtacaaatataggaaccgagatgagggatcttaccatgtggatgagagcaggaactacataagtaattcagcacagtctaatggcgcagttgttaaggagaagcagccttcgtctgccaaatccagcaataagaataaaaaaaataaggacaaggagtattacgtctag

SEQ ID NO: 196894 - DNA, 4500 bp, synthetic construct
  misc_feature 1..4500: note = Description of Artificial Sequence: Synthetic coding sequence
  source 1..4500: mol_type = other DNA
atgggcaccgccctgctgcagcggggcggctgcttcctgctgtgcctgtctttgttattacttggatgttgggcggaactgggcagcgggttagagtttcctggagcagaagggcaatggaccagatttccaaaatggaatgcttgctgtgagtcagaaatgtcctttcaactgaaaactcggtctgccaggggtttggtcctttacttcgacgacgaggggttttgcgatttcctcgagctgatcttgacaaggggtgggaggcttcaactgtcttttagcattttctgtgctgagcctgcgacactgttggctgacacccctgtcaacgacggggcgtggcacagcgttcggatccgccgacagtttcggaacaccactctgtttattgaccaagtagaggcaaaatgggtcgaagttaagtccaaaagaagagacatgactgtattttccggcttgtttgtaggtggactaccgccggagttgcgagcggccgcactgaaactcacacttgctagcgtgagagagcgggagcccttcaaagggtggatccgagatgttcgtgtgaactccagccaagtgcttcctgtggattccggcgaggtgaaattagacgacgagccacccaattccgggggagggagcccctgcgaggccggagaggaaggggaagggggcgtgtgcctgaatggcggggtgtgcagtgtagttgatgaccaggccgtgtgcgattgttcacggacaggttttaggggaaaggattgtagccaggccgacactaacctggagggcctggcccatttgatgatgggggatcaggccaaaagcaagcggaaggaggagtatatcgcaacttttaagggcagcgagtacttttgctacgatctgtcccagaacccgatccagtcctcaagcgacgaaatcaccttgagcttcaagacgttgcagcgcaacggcctgatgctgcacaccggcaagtctgcggactatgtaaacttggccctgaagaacggcgccgtgtcacttgtgataaacctaggaagcggggcgttcgaagctctggtcgagcccgtcaacggtaagttcaacgacaatgcctggcacgatgtcaaggtcacacgcaacctgaggcaggtgactatctcagtggatggaatcttgacaactacgggatacacacaggaggactatacaatgttgggtagcgacgattttttctacgttggtgggtcaccatcgaccgctgacctgcctggctctcctgtgtcgaataactttatggggtgtctgaaggaggtagtttacaagaacaacgacgtcagactggaactgagcagactcgcgaaacaaggcgatcctaagatgaaaatccatggggtggttgcctttaagtgcgaaaacgttgccacactcgaccctatcaccttcgaaaccccagagagttttatcagcctcccgaaatggaacgctaagaagacagggtccataagctttgacttcaggacaacggagccaaacggcctaatcctattttcacatggcaagccccggcatcaaaaagatgcaaaacaccctcaaatgattaaagtcgatttttttgctatagagatgctggatggacatctgtatctgctccttgatatgggaagcgggaccataaaaatcaaggctctactgaaaaaagtcaacgacggagagtggtatcatgttgatttccagcgagacggtagaagcggaacgattagtgtgaacaccctgcggacaccatataccgctccgggggagagtgagatcctcgatctggacgatgaactgtacctgggtggactgcctgaaaataaagccggtttggttttccctacagaagtgtggactgcactgttgaactatggctatgtgggttgcattagagacttatttatagatgggcagtccaaagacatccgccagatggccgaagtccagagcaccgctggcgtcaaaccttcttgctctaaggagaccgctaagccgtgccttagcaatccttgcaaaaacaacggcatgtgtcgggatggctggaatcgatatgtgtgcgactgtagcggtacaggttatctcggacgatcatgcgaaagagaagctaccgttttatcatacgatggttctatgttcatgaagatacagctgcctgtcgtcatgcacaccgaggctgaagatgtgtctctgcgatttcgctcccaacgtgcttacggtatcctaatggccaccaccagcagggactccgccgacacattacggctggagctggacgccggcagggtcaagctgaccgtaaacctggactgtattaggatcaactgtaattccagtaaggggcctgagacattattcgctgggtacaacctcaacgacaatgaatggcacactgtgcgggtcgtgagaagaggaaagtccctgaaactcactgtggacgaccaacaggccatgactgggcagatggcaggggatcacactcgcctagaatttcataacatagaaacaggtataattaccgagagacggtacttatcctccgtgccgtctaactttattggccacctgcagtcactgacgttcaatggcatggcatatatcgacctctgcaaaaacggcgatatcgactactgcgagctcaacgcgcgctttgggtttcggaacataattgcggatccggtaacgtttaaaaccaagtcgtcctatgttgcactggctaccctgcaagcgtatacatctatgcatctgttttttcagtttaagaccacatcactggatgggctgatcctttataattcaggcgatgggaacgacttcattgtagttgaattggtgaagggatacctccactacgtcttcgatctcggcaatggcgcaaatctcatcaaggggtcaagcaataaaccattgaacgataaccagtggcacaatgtgatgatctcaagagacactagcaacctccacacagttaagatcgataccaagattacaactcaaattaccgccggcgctaggaatctggacttgaagagcgacctctacatcggtggcgtcgctaaagaaacctacaaatcacttcctaaactggtgcatgcaaaagaaggattccagggctgcctggcatcagttgacctcaatggccggctgcccgaccttatttctgatgcccttttttgcaacggccagattgagcgcggctgcgagggtccctcgactacctgccaagaagattcttgctccaatcagggagtgtgcctgcaacaatgggacggatttagttgtgactgttcaatgacatccttctctggtcccctgtgcaacgatcccggcacaacctatatcttcagcaaagggggcggacagatcacgtacaaatggcctcctaacgatcggcccagcacgagagccgatagactggcaataggcttcagcactgtacagaaagaagccgtgctggtccgcgtggattccagctccggtctcggggactacctcgagctgcatatccaccagggtaagatcggagttaagttcaacgtgggtacagatgatatcgcgatcgaagaatcaaacgctattattaatgatgggaagtaccacgtagttcgcttcactcgaagcggaggtaatgcaacacttcaggtcgatagctggcccgttatcgagcggtatccagctgggaacaacgacaacgaaaggttggcaattgctaggcagcggatcccttatagattgggtcgcgtggtcgacgagtggctgctggataaaggcaggcagttgacaattttcaactcacaggcaactatcatcattggaggcaaagagcagggtcagccattccagggccaattgagtgggctgtactacaatggactaaaggtactgaatatggctgccgagaacgacgctaacatcgccattgtgggcaatgtccgcctcgtcggtgaggtgccgtcctctatgacaactgagtcaactgccacggcgatgcagagcgagatgtcaacttctatcatggagaccactaccacgcttgctactagcaccgcccgaagaggcaagccccccacaaaggagccaataagccagacaactgacgatatcctcgtcgccagtgccgagtgtccttctgacgatgaagacatagacccctgcgagccgagcagtggggggctggcaaatcctacaagggcaggaggcagggagccctatccgggctccgccgaggtgatccgggagagcagttcaaccaccggaatggtggttggcatcgtcgctgctgcggctttgtgcattttgattctgctgtatgcaatgtataagtaccggaatcgggatgaggggagctatcatgttgatgagtccagaaactacattagtaattccgctcagagcaacggtgcagtcgtgaaggagaagcaaccatcctcagctaagtcttctaacaagaacaaaaagaataaagacaaggaatactacgtgtag

SEQ ID NO: 196895 - DNA, 4644 bp, synthetic construct
  misc_feature 1..4644: note = Description of Artificial Sequence: Synthetic coding sequence
  source 1..4644: mol_type = other DNA
atgggcaccgccctgctgcagcggggcggctgcttcctgctgtgcctctccctgctgctcctgggatgttgggcagaattaggtagcggactcgaatttccgggtgctgaaggccagtggaccaggttcccaaaatggaacgcttgctgcgagtccgaaatgagtttccagctgaagactcggtcagcacgaggcttagtgctgtattttgatgacgaaggcttttgcgactttcttgagctgatcctgacacggggcggccgattgcagctgtctttctcaattttttgtgccgagccagccacgctgctcgccgatacccctgttaacgatggagcttggcattctgtccgaatcaggagacagtttagaaacacaaccctttttatcgatcaggttgaagctaaatgggtggaggtgaagagcaagcggcgcgacatgacggtattcagcggcctgtttgttggcggactcccaccagaactccgagctgctgctctgaaattaactctcgcatcggtacgtgagcgcgagccattcaagggatggattagggatgtccgtgtaaacagcagccaggttctgcctgtcgactccggggaagtaaaactggatgacgagccacctaactccggaggcggaagcccttgtgaggcaggcgaagagggagagggcggagtatgcttaaatggcggcgtttgttccgttgtggacgaccaagccgtgtgcgactgttcacgcacaggcttccgtggaaaggattgctcccaggagattaaattcgggctgcaatgcgtcctgcctgtgctgctccacgacaacgatcaaggaaagtactgttgcatcaacacagcaaagccactcactgagaaggacaacaacgttgaggggctcgcacatcttatgatgggcgatcagggtaaaagtaagggcaaagaggagtacattgccaccttcaaaggcagcgaatatttttgctatgatctatcccagaatcctatacagtccagttcggacgagattactttgtcgttcaagaccttacagcgcaacggcctgatgctccataccggcaaaagcgctgattacgtcaacctcgctctcaagaacggcgccgttagcctcgtgattaatctaggctcaggcgcattcgaagcactagtcgaacccgttaacggtaaatttaatgataacgcctggcatgacgttaaggtgactaggaatctgcgccagcattcagggattggacatgccatggttaataagttgcactgctctgtgacaatctcagtggacggcattctcactacaacaggttatacgcaggaggattatactatgctggggtcagacgactttttctacgtgggcggctccccaagcacagccgacttgcccggatcccccgtgtcgaacaattttatgggatgtctgaaagaagttgtctacaagaacaatgatgttcgcctggagctcagccggcttgccaaacaaggtgatcccaaaatgaagatccatggtgtggtcgctttcaaatgtgaaaatgtcgcaactcttgaccctatcacctttgagactcctgagagcttcattagtctgcctaaatggaacgccaaaaaaaccggctcaatcagttttgacttcagaactaccgagcctaacggacttatacttttctctcacggaaaaccccgccaccagaaggatgccaagcacccccagatgatcaaagttgacttcttcgctatcgagatgctcgatggtcatctgtatctgttactggacatgggatccggtaccatcaaaatcaaagctctgctcaaaaaagtcaatgatggagagtggtaccacgtggactttcagcgcgatggcagatccggtaccatctctgttaacacattgcgcaccccttacacagcccctggggagagcgagatcttagacttagacgatgagctgtatctcggagggcttcctgagaacaaagctggcctggtgttcccgacagaagtgtggaccgctctcctgaattatggatacgtcggttgcatcagggatctcttcattgatgggcaatcaaaagatattcggcagatggccgaggtgcagtcaacggccggcgtgaagcctagttgcagcaaggagacggccaagccttgcctatcgaacccgtgtaaaaacaatggtatgtgtagggatgggtggaacagatatgtatgcgattgcagtggcactgggtatctgggaaggtcatgcgagagagaggccacagtcctttcttacgatggctccatgttcatgaagattcagctgcccgtggtcatgcacacagaggctgaagatgtgagccttcgctttagaagccagcgcgcctatggaatcttaatggccacaactagccgggacagtgcggatacgcttcggctagagctggatgcgggccgcgttaagctaacagtcaacctggactgcatccggattaattgcaacagtagcaaaggccccgagacattgtttgcaggttacaatctgaatgataatgagtggcacaccgtccgggtggtccgacggggcaaaagtttaaaacttacagtggacgaccagcaagccatgacgggacagatggcaggcgaccacactcggctggaatttcacaacattgaaaccggcataattaccgagcggagatatctctccagcgtgccctccaatttcatcgggcacctgcagtcattgacatttaatgggatggcgtacatcgatctctgcaagaacggggacatagactactgcgaacttaacgcaagattcggatttcggaatattattgccgaccctgttactttcaagacaaaatcgagttatgtagcactggcgacactccaagcttatacttcaatgcacctgtttttccaatttaaaacgaccagtctggatggccttatcctctacaacagtggagacggcaacgattttattgtggtcgagttagtcaagggctatttgcactacgtatttgacctcggcaatggggccaatctgattaagggaagctctaataaaccactgaatgacaatcagtggcataacgtcatgatttcaagggacacttctaacttacacaccgtcaaaatcgacaccaagatcactacccagataacggccggggctaggaacttggacctcaaaagtgacttatatatcggcggagttgcaaaagagacgtacaagtccttgcctaaactggtgcatgctaaagaggggttccaagggtgtctggcctccgtcgacctgaacggtcggttgcctgatttgatcagcgatgccctgttttgcaacggacagatcgaaaggggatgcgagggcccttccaccacttgccaggaggactcttgttccaaccagggggtgtgtctacagcaatgggacggttttagctgcgactgttcaatgaccagcttcagcggcccattgtgtaatgatcctggtacaacttatatcttctcaaagggaggaggccagataacttacaagtggccaccgaacgaccggcctagtaccagggcagacaggctagccatcggtttcagcaccgtccaaaaagaggctgtcctagtccgtgtagatagctcttcggggctcggcgattaccttgaactccatatacaccaaggcaaaattggggttaaatttaacgttggcacggatgacatcgccatagaggagtccaacgctattattaatgacggcaagtaccacgtggtgcgctttactcgctcagggggaaatgcaaccctgcaggtcgacagctggccagtaattgagcggtaccctgcaggaaacaacgacaatgagcgcctcgcgatcgccagacaaagaattccctatcgtctggggagggtcgtggacgagtggctgcttgataaggggcgacagttaaccatatttaatagccaagctacaatcattataggcgggaaagagcaaggccagcccttccagggacaactcagcgggctttattacaacggacttaaggtacttaacatggctgctgaaaatgacgctaatattgctatagtgggtaatgtgaggctggtaggagaggtgccttcatcgatgactacggaatctacggccacagccatgcagtccgagatgagtactagtataatggaaacaaccaccaccctagcaacatccacagccagaaggggcaaaccacctactaaggagccaattagtcagacaaccgacgatatcctggtcgccagcgccgagtgtccatccgatgacgaggacattgatccatgtgagccaagctctggaggactcgcaaatcctaccagggcgggcggccgagagccttacccaggaagtgccgaagtgattcgcgaaagctctagcactaccggtatggtggtgggcatcgtggccgcagccgctttatgtattttgatcctgctgtacgccatgtataaatacagaaaccgcgacgagggatcgtaccatgtcgacgagtcgcgaaattacatttctaatagcgcacagtctaacggggccgtcgtgaaagagaagcagccgtccagcgccaagtcgagcaacaagaacaagaaaaacaaggacaaagaatattatgtttag

SEQ ID NO: 196896 - DNA, 4434 bp, synthetic construct
  misc_feature 1..4434: note = Description of Artificial Sequence: Synthetic coding sequence
  source 1..4434: mol_type = other DNA
atgggcaccgccctgctgcagcggggcggctgcttcctgctgtgcttgagccttctgctcctcggctgctgggcggaactgggtagcggtctggagtttcccggagccgagggacagtggaccaggttccctaagtggaacgcctgctgtgagagcgaaatgagcttccaattgaagactcgctctgcgaggggccttgtgctgtacttcgacgacgaaggcttctgtgacttcctggagctgatcttgacgcgcggcggcaggctccagttgtccttcagtatcttttgtgccgagcccgccacgctgctggccgatacccccgttaacgacggtgcttggcacagcgtgcggatcagacgccagtttcgtaacactactctgttcatagaccaagtggaggcgaagtgggtggaagtgaagagcaagagacgcgatatgactgttttcagcggactgtttgtcgggggactgccccctgagctgagagcagcggctctgaaactcaccctggcttccgtgcgggaacgagagccattcaagggctggatacgagacgtgcgcgtgaactcttctcaggttctccctgtggattccggtgaagttaagctggacgacgagcctcctaattccggaggtggctccccctgcgaggccggagaggagggcgaaggaggggtttgcctcaacggtggcgtctgttctgtagtggacgaccaggctgtctgtgattgttcaaggactggctttcgtggaaaggactgctctcaggaagacaataatgtcgaagggctcgcccacctgatgatgggggatcaaggcaaatctaagggtaaggaagagtacattgcaaccttcaagggtagtgaatacttttgctatgacttgagccagaacccaatccaatcatcaagcgatgagattacgttatccttcaagacactccaaaggaacggactaatgctgcacactggcaaatccgccgattacgtgaatctggcgttaaagaatggagcagtgagcttggtcatcaatctgggctcaggggccttcgaggcactcgtagagccagtgaacgggaaattcaacgacaatgcctggcacgatgttaaggtcacgagaaacttaaggcaacacagtgggatcggtcacgctatggtgaccatttcagtggatggaatactgacaaccaccgggtatacacaggaggactacaccatgctgggatccgacgatttcttctacgtgggcggatcaccatcaacagccgatctgccgggatcacccgtatccaacaatttcatggggtgtctgaaggaggtggtttacaagaataacgacgtccgcctcgaactcagtcggctcgctaagcagggggacccgaaaatgaagattcacggggtggtagcattcaaatgtgaaaacgtggcaaccctggaccctattacctttgagacacccgagagcttcatttcgctacccaagtggaacgcaaagaagaccgggtcaatcagcttcgactttaggactacagaacccaacggactcatcctatttagccacggcaaaccaagacatcagaaggacgcgaaacacccacagatgatcaaggtggacttcttcgcaattgagatgctggatggccacttgtacttactgctcgacatgggttccggtaccatcaagatcaaggcgctgcttaagaaagtcaacgatggggaatggtaccatgttgattttcaacgggatgggagatccggcaccatctccgtaaacaccctccgtactccatataccgctcctggggaatctgagatcctggacctcgatgacgaactgtatctggggggtcttccggaaaataaagcgggactggtgtttcccactgaagtttggaccgctctcctgaactacggttatgtgggatgcatcagggatctctttatcgacggacagtccaaggacatacgacagatggccgaagtgcagagcaccgctggcgtcaaacccagctgtagtaaggagacagcaaaaccctgtctgtcaaatccatgcaaaaataacggaatgtgccgagatggatggaatcgctatgtatgcgattgcagcgggacaggctatctggggcggagctgtgaacgtgaggccactgtgctcagctacgacgggtcaatgttcatgaagattcaattaccagtcgtgatgcacacagaagcagaggatgtgagtttacgatttaggtctcagcgggcctacggcatactcatggccacaacctcgcgggattctgcagacacgctgaggctggaattggatgcaggtagagtcaagctcacggttaacttggactgcattagaattaattgtaactcaagcaaaggccccgaaacactcttcgctggttataacttgaatgacaacgagtggcataccgtgagggttgtgcgccgtggtaaaagtctgaagctgacagtggacgaccagcaggcgatgacaggccagatggccggtgatcatacgcgtttggagttccataacatcgagacagggatcattaccgagcgcaggtacctatcgagtgtgccatctaacttcattgggcacttgcagtcgttgacatttaatggaatggcatacattgatctgtgcaaaaatggagacatagattactgtgagttgaacgcgcgattcggttttcgtaacataatagccgatccagttacatttaagaccaagtctagctacgtggccctagccaccctacaggcctatacatcgatgcacttgttcttccagtttaagaccacgagcctggatggtctcatcctgtacaacagtggagatggaaacgactttattgtagtcgaactagtgaaaggatatctacactacgtgttcgatctgggtaatggcgcaaatcttattaaagggagctcgaacaagcctctgaacgacaatcagtggcacaatgtgatgatctcaagagatacgtcgaacctgcacactgtcaaaattgatacaaaaataactacacagatcaccgccggagcccgcaaccttgacttaaaatcagacctatacattggtggagtcgctaaagagacttacaaatcactaccgaagttggtccatgccaaagaggggtttcaaggatgtcttgctagtgtggacctgaatggccgccttccagacctgatttctgatgcgcttttctgtaacggacagatagagcgggggtgtgaggggcctagcactacatgtcaggaagattcctgctccaatcagggggtctgcttacaacagtgggatgggtttagctgcgactgctctatgacctctttctcaggaccactttgcaacgacccagggacaacctacatcttctcaaaaggcgggggccaaatcacctataaatggccaccaaatgacagaccctccacaagagcagataggctggccatcggattctccacagtccagaaggaggcagtattggtacgcgttgactcatcttcgggtctcggagattacctggagctccacatccaccagggcaagatcggtgtcaagtttaacgttggcacagacgacatcgccatcgaagagtccaatgctatcattaacgacgggaaatatcatgtcgtgagatttactcgcagtggcggcaacgcgacactgcaagttgatagctggccagtgattgagaggtacccagccgggcgccagctgacgattttcaacagccaggcaaccatcataattggcgggaaggagcagggccaaccattccagggccaactaagcgggctttactacaacgggctcaaagtgctcaacatggccgccgaaaacgatgccaacatcgccatagtgggtaatgtgagattagttggagaggtcccttcctcaatgactacagagtccaccgctacggccatgcagtccgagatgagcacatccattatggagactactactacgctggcgacttccaccgcccgcagaggaaaaccacccactaaggaacccatttcacaaaccaccgatgacattctggtggcgagcgctgagtgtcctagtgatgacgaagatatcgacccttgcgaaccttctagcgggggcttggccaaccccaccagggccgggggcagggaaccatatcctggctccgcagaagtcatcagagagtcctcatccaccactggaatggtggtcgggatcgtggcagccgcagccttatgtatcctgatcttgctgtatgccatgtacaagtacagaaatagagacgagggtagttatcatgtcgatgagagtcgcaattacatcagcaatagcgcacagagcaacggtgccgtggtgaaggaaaagcaaccaagcagcgcgaaaagttcgaacaaaaataagaagaacaaggacaaggagtattacgtatag

SEQ ID NO: 196897 - DNA, 4434 bp, synthetic construct
  misc_feature 1..4434: note = Description of Artificial Sequence: Synthetic coding sequence
  source 1..4434: mol_type = other DNA
atgggcaccgccctgctgcagcggggcggctgcttcctgctgtgcctgtccctcctccttctgggctgttgggctgagctgggttccggcctggaatttcccggtgcagagggccagtggactcgctttcccaagtggaacgcttgctgcgaatctgaaatgtcgttccagttgaagacacggagcgcccgcggcttagtcctatactttgacgacgaggggttttgcgattttttagagcttattctgactaggggaggcagactgcaactatcattctcaatcttttgtgccgagccagccacactgctggcagacacacccgtcaatgatggtgcgtggcacagcgtgcgaatccgtcgtcaatttaggaataccacgctcttcatagaccaagtagaagctaaatgggtggaagtgaagtcaaagaggcgtgatatgacggtgttctctggattgttcgttggtggtctgccccctgagttgcgggccgccgcacttaagttaactctggcttcggtacgcgagagagagcccttcaaagggtggatacgcgatgtccgggtaaactcaagccaagtcctcccagtggacagtggggaggtcaaattggacgatgagccccccaattccggcggcggatcaccttgtgaggccggggaggaaggggaaggaggagtatgtcttaatggcggcgtgtgttccgtagttgacgatcaggcggtgtgcgactgcagtcggacgggatttcgtggaaaagattgtagtcaggctgacactaacctagaagggctggcgcatttaatgatgggggatcaggcaaagtcaaagcgaaaagaagagtacattgctacgtttaaagggtctgagtacttctgttacgacctctcccagaatcccattcaaagctctagcgatgagatcaccttgtcgttcaagaccttacaaagaaatggactcatgcttcacactgggaaatccgccgattacgtgaacctagcactaaagaatggcgccgtatccttggtgataaacctcggctctggtgcgttcgaggcactggttgaacctgttaatggaaaattcaacgacaatgcgtggcacgacgtgaaagtgaccaggaatttaagacaacattctggaataggacacgcaatggtgacgatttccgtggatggaatcctgactacgacagggtacacccaagaagattatacaatgctcggcagtgatgattttttctatgtgggcggctcccctagcaccgctgatcttcctggtagccctgtgagtaataacttcatgggatgtttgaaagaggtggtctataaaaataacgacgtaagactcgaactttctcggttagccaagcagggcgaccccaagatgaaaatccacggagtggtagctttcaaatgtgagaacgtggctacccttgacccgatcacttttgagactcctgagagttttatatctctgcccaagtggaacgccaagaaaacgggctcaatttcctttgattttcggaccaccgagcctaatggcttaatcctgttctcccatggaaaaccaagacaccagaaggacgccaaacacccccagatgatcaaggtcgacttctttgctatcgagatgctggatgggcatctttacctcttgttggatatgggctcaggaactattaaaatcaaagcactgttaaaaaaggtcaatgacggcgagtggtaccatgtagactttcaacgcgacgggcgttcggggacaattagcgtgaacacactcaggacaccctatactgcccccggtgagagtgaaatcctggacttggatgatgagctctacctaggaggcctgcccgagaacaaagcagggctcgtcttccccacagaggtgtggactgcgctgctgaactacgggtatgtgggctgcatccgcgatctgtttattgatggccagtccaaggatatacggcagatggccgaggttcagtctactgccggcgtgaagccaagctgcagcaaggagacagccaagccatgcctctcaaatccgtgcaagaataatggcatgtgtcgggatgggtggaaccgctatgtctgtgattgctccgggaccgggtatcttggccggagctgcgaacgcgaggccaccgtgctgagctatgatgggagcatgtttatgaaaatccaactgcccgtagtgatgcatactgaggccgaggacgtgagcctccggtttagatctcagagggcttacggtatcttgatggccaccacaagccgtgattccgccgatacacttcgtctggagttggatgccgggcgtgtaaaattaaccgtgaatctggactgcatcaggatcaattgtaactcttcaaaaggccctgaaactcttttcgcggggtacaatctcaatgacaacgagtggcatacggtcagggtggtccgccgcggaaagtctctgaaactgacggtcgacgaccagcaagccatgacaggccaaatggccggcgatcacactcgcctggaatttcacaatattgaaaccggcattatcaccgagcgcaggtacctgagctcggttcccagcaacttcataggccacctccagtctctcacgttcaacgggatggcatacatcgacctctgcaaaaacggtgatattgactactgcgagcttaacgcaagattcggcttcaggaatatcattgcagatcctgtcacgtttaaaaccaagagctcgtatgtcgccctggccactctccaggcttacacttctatgcacctgtttttccagttcaaaaccacttccctggacgggctcatcttgtacaatagcggggacgggaatgatttcattgttgtggagctggtcaagggataccttcactacgtattcgatctgggaaacggcgcgaatctaattaaaggctcgtctaataaacccctgaacgacaatcagtggcataatgtcatgatctcacgcgatacttcgaacctgcatacagtgaagatagatactaagatcaccactcagatcacagccggcgcaagaaacctagacctcaaatccgacctttacataggcggcgtggcaaaggaaacatataaaagtcttcctaaattagtgcacgctaaggagggattccaaggctgtctcgccagcgttgatctcaacggccgcctacctgatttgattagcgacgcgctgttttgtaacggtcagatagagcggggatgtgaagggccatccactacctgtcaggaagatagttgctcaaatcagggagtgtgcctgcaacaatgggacggtttctcctgcgactgtagcatgacaagtttctctggacccctctgcaatgaccccggaacgacatacatattcagcaagggaggcggtcaaatcacctacaaatggcctcccaacgacagaccatcaacccgggccgaccggctggcgatcggattttctaccgtgcagaaagaagcagtacttgtgagagtagatagctcttcaggactgggcgattacctggagttgcatatccaccaagggaagattggagtaaagtttaatgtgggtaccgatgatatagcaatcgaggagagcaacgccatcataaacgatggtaagtatcacgtggtccgctttacgaggtcaggcgggaacgcgactctgcaagtcgactcttggcccgtgatcgagaggtatccagcagggagacagctgaccatcttcaactcccaagccacaattatcattggaggaaaggaacagggtcagcctttccaaggacagctcagtggactctattacaatggcctaaaagtgctcaatatggcagcagaaaacgacgccaatattgccatcgtggggaacgttaggctggttggagaagtgccatctagcatgacaacggagtcaacggccacagccatgcagagcgaaatgagtacttctattatggagacaactaccactctggcaacctcaactgcacgccgaggaaaaccccccacaaaggaaccaataagtcagacaaccgacgatattctggtggcctctgccgaatgtccatcagacgacgaggacattgacccttgcgagccaagttcgggcggccttgccaacccgacccgggccggcggacgcgaaccttacccaggctctgcggaagtcatccgggagagctcatccacaacgggcatggtggtcgggattgtggctgccgctgccctatgtattctgattcttctgtacgccatgtataaatatcgaaacagagatgagggctcttaccatgtcgacgagagccgaaattacatatctaattctgctcagtctaatggggccgtcgtcaaggagaaacaaccaagctccgccaaatcaagtaataagaacaaaaagaacaaggacaaggagtactacgtgtag

SEQ ID NO: 196898 - DNA, 4647 bp, synthetic construct
  misc_feature 1..4647: note = Description of Artificial Sequence: Synthetic coding sequence
  source 1..4647: mol_type = other DNA
atgggcaccgccctgctgcagcggggcggctgcttcctgctgtgcctcagcttactcctgttggggtgttgggctgaactcggtagcggactggaatttccaggtgcggaaggacagtggacccggtttccaaaatggaacgcctgttgtgagagtgagatgtccttccagctgaagacccgcagcgcccgcggcctagttctttattttgatgacgagggcttctgtgactttctcgagctaatactgaccaggggaggtcgactacagctatcctttagcattttctgtgctgaacccgcaacactccttgcagacacaccggtgaacgacggcgcctggcattcagtccgcattcgccggcagttccggaacactactctgtttattgatcaggtggaggccaaatgggtggaagtaaagtccaagagaagagatatgacagtgttttccggcctctttgtaggaggactcccgccggaactgagagctgcagccctcaagctgacactcgcctctgtgagggagcgcgaacctttcaaaggttggatacgggatgtgagggtcaattcaagccaggtgctgcccgtcgattccggggaggtcaaactggacgatgaaccacctaactccggcggaggttccccatgcgaggccggcgaggagggggaagggggcgtgtgtttaaatgggggtgtctgctcagttgtggatgatcaggcagtgtgcgattgtagcaggaccggcttcagaggaaaagactgcagtcaggaaatcaagttcggcctccagtgcgttctgcctgtgctgttacacgacaatgaccagggaaagtactgttgtatcaacactgctaagccgctgacagaaaaaaaggataatgattttgaaggcctcgcgcacttgatgatgggcgatcaagccaaaagcaaaaggaaagaggaatacatcgctacctttaaggggagtgaatacttctgctacgacctgagccagaatccgattcaatcatcttctgacgaaattaccctttccttcaaaactctacagcgtaatggtctgatgctgcacaccgggaaaagtgcagattatgtgaatctcgctcttaaaaacggtgccgtgagtttggtgatcaacctgggctctggcgcctttgaggcactcgtggaacccgtgaacggtaagtttaacgacaacgcatggcacgacgtaaaggtgacccgtaacctcagacagcacagcgggatcgggcatgcgatggtcaacaaattacattgctccgtcactatatccgtcgatggcatactgaccacaacaggctacacccaagaggactacaccatgctgggatccgacgacttcttctacgtcggcggctcaccatctaccgcagacctacctggaagtcctgttagcaacaacttcatgggatgtcttaaggaggtagtgtacaaaaacaatgatgttcgcctggagctcagtcggctggccaagcagggcgacccaaagatgaagatacacggagtggtagcattcaagtgtgaaaatgtcgccacactggacccaatcacttttgaaacccctgaaagtttcatttctctgcctaagtggaatgccaagaaaactgggtcgatttctttcgacttccgcactacagagcccaacgggttaatcctgttctcgcacgggaaacccaggcaccagaaagatgccaaacatccgcagatgatcaaagtagacttcttcgctattgagatgcttgacggacacctctatctccttctcgatatgggtagtggaactatcaagataaaagccctactgaaaaaagttaacgatggagaatggtaccacgtggattttcagagagatggaaggagtggtaccattagtgtgaacacccttagaactccatatacagctcccggtgaatcggagattctcgacctggacgatgagctctatttgggtggcctgcctgaaaataaggcgggactggtgttcccgaccgaagtgtggactgcactgctgaactacggatatgtcggctgcatacgtgatctctttatcgacgggcagtcaaaggacatcagacagatggcagaggtgcaatccaccgcaggggtaaagccatcttgcagtaaagaaaccgcaaagccatgtctaagcaacccttgcaagaacaatgggatgtgtagagatgggtggaatcgatacgtttgcgattgttccggaacggggtatttaggccgctcctgcgagagggaagctaccgtgttgagctacgacggaagcatgtttatgaagattcaactccccgtcgtcatgcacacggaggctgaagacgttagcctccgattccgaagccagagagcctacggtattctgatggcaactacttcaagggactccgctgacacactgagactggaactggatgcaggcagggtcaagctcaccgtaaatctggattgtattcgcatcaattgcaacagctcaaaaggacccgagacgctgttcgctggttataacctgaatgacaatgaatggcacaccgtccgcgtcgtgaggaggggaaagtctctaaagctgaccgtggatgatcaacaagccatgacaggccagatggctggtgaccatacacgactcgagtttcacaacattgagacagggattatcacggagcgccgctatttatcctctgtgccatctaactttattggccatctgcagagcctgacctttaatggaatggcttacattgacctctgcaaaaatggggacatagactattgtgagctgaatgcacgcttcggtttcaggaacatcatcgcagatcctgtgacctttaagaccaagtcttcctacgtggccctggccaccctgcaggcctatactagcatgcacctgttctttcaattcaaaaccaccagtctcgacggactgattctctacaacagtggagacggtaatgactttatagtggtggagcttgtcaagggctacctccactatgtgttcgatcttgggaatggggccaatctgatcaagggctcatctaataaacctctcaatgataatcaatggcataatgttatgatctccagagacacttctaatttgcataccgtgaaaatcgacacgaagattactacacaaattacagctggagcaagaaatctggacttaaaatcagacctgtatattgggggggttgccaaggaaacctataagagtctgccaaagcttgtgcacgccaaggagggatttcagggctgccttgcctccgtcgacctcaacgggagattgccagacttgatatccgatgctttgttctgcaacgggcagattgagcgggggtgcgagggcccatccaccacatgtcaagaggatagctgtagcaaccaaggagtctgcttacagcagtgggacggattttcttgcgattgtagcatgacgagcttcagcggccctctttgtaatgatcctggtaccacctacatattctcaaaagggggtggtcagattacatataaatggcccccgaacgatagaccaagtacacgcgccgacagactcgcaattggattctcaacagtgcagaaagaggcagtcctggtccgcgtggactccagtagcggcctgggtgactacctggagttgcacatccaccagggaaaaatcggcgtcaagtttaatgtgggtactgacgacatcgcgattgaggagtctaatgctatcatcaatgacggtaaatatcacgtggtccggttcacccgctcaggtgggaacgctaccttgcaggtcgacagctggcccgtcatagagcgatatcccgctggaaataatgacaatgaacgactcgccatcgctcgtcaacgaatcccataccgcctcggccgcgtggtggacgaatggctcctggacaaaggtaggcagttaaccatttttaattcccaggcaaccattatcattgggggcaaggaacaaggccagccatttcagggccagctttccggcctctactataatggactcaaggtgttgaacatggctgctgagaatgatgctaacattgctatcgtaggcaatgtgagactcgtgggcgaggtccctagttccatgacgaccgagagcaccgccaccgccatgcagtcagagatgtcgacatccatcatggaaaccaccacgactctggcgacatcgactgctagaagaggtaagcctcccactaaggagcctatttcacagacgaccgacgatatcctggtggctagcgccgaatgtccgtcagacgacgaagacatagacccctgtgaaccttcctctggcgggctagccaacccaacacgcgcgggaggccgggagccctatcctggctcagcagaggtaattcgagaatcttctagcaccaccggtatggtggtcgggattgtggcagctgctgccttgtgtatcctgattctgctgtatgctatgtataaatatcgaaatagggacgaaggcagctatcacgtagatgagagcaggaactatatatccaactccgcacagtctaacggggcagtggtaaaagagaagcagcctagttctgccaagtccagcaacaagaataagaagaataaagacaaggagtactacgtttag

SEQ ID NO: 196899 - DNA, 1191 bp, synthetic construct
  misc_feature 1..1191: note = Description of Artificial Sequence: Synthetic coding sequence
  source 1..1191: mol_type = other DNA
gccctggagatctgggagcagccccccgccccccggctgctgttccctggtctcccatttagaaccagtccgtcccctgccgccttctataggagtccagcaagcctgcggggaggccacgcaggcactacatatattttctcaaagggcgggggacaaattacttacaagtggcctcccaatgacagacctagtacaagggcggaccgcctggccattggctttagcacggtccagaaggaggccgtgctggtgagggtcgattcttcttccggcttgggagattacttggagcttcacattcatcaagggaaaattggcgtgaaatttaatgtggggaccgatgacattgctatcgaagagagtaacgcaatcatcaacgacggcaagtatcatgtggtcagatttacgcgaagtggcggaaatgccactctgcaggtagacagctggcccgtaatcgagcgataccccgctgggcgccaactaaccatcttcaattctcaggccacaattattattggcggaaaggaacagggtcaaccattccaggggcagctgtctggtctgtactataatggacttaaggttctgaatatggctgctgagaatgacgctaatattgcaattgtcgggaatgtaagactggtgggggaagttccatcgtcgatgaccaccgaaagcactgctacagcaatgcaatctgagatgtcaaccagtatcatggagaccactacaactttggcgactagcaccgccagacggggaaaaccccctacaaaagagccgatctcgcagacaactgatgatatcttagtggccagtgcggaatgcccttccgacgacgaagacatcgacccttgcgagccctcctcgggcggtctcgctaacccgaccagggccggaggaagggagccctaccctggctccgccgaagtcatccgagaaagtagctcgacaacaggcatggttgtgggaatcgttgccgctgcggcgctttgcatcttgattctgctatacgcgatgtataaataccgcaaccgggatgaaggctcctaccatgtggatgagtcccggaattatatcagcaactccgctcagtccaacggcgccgtggtaaaagaaaagcagccctcctctgctaagtcctcaaataagaataagaaaaataaagataaggaatattacgtgtag

SEQ ID NO: 196900 - DNA, 5139 bp, synthetic construct
  misc_feature 1..5139: note = Description of Artificial Sequence: Synthetic coding sequence
  source 1..5139: mol_type = other DNA
atggccagcggcagccggtggcggcccacccccccccccctgctgcttcttcttctgcttgctctggccgctagagcagatggcctggagttcgggggcggtcccgggcagtgggcccgatatgctcggtgggccggcgccgccagcagtggagaattgagtttctctttaagaactaacgcaacaagggctctcctattatatctggacgatggcggcgattgtgatttcctggagcttctactagtggacgggagactcagactcaggttcaccttatcttgtgctgagccagcaactctgcagctcgacactcccgtggctgatgataggtggcatatggtactgctgactagggatgcaagacgcacggcactcgccgtagatggcgaagcccgagccgccgaggttagaagtaaacggcgcgaaatgcaggtggccagcgacctctttgtgggggggatcccccctgacgtgaggctatctgcgctgaccctgagtaccgtgaagtacgagcctcctttcaggggcctgcttgcgaatctgaaacttggagagcgaccaccggcactgctaggctcacaaggactgagaggcgcaacggccgaccctttgtgcgcccctgcacggaatccctgtgctaacggtggcctgtgtacggtcctcgctcctggtgaagtcggctgtgactgtagtcataccggattcggcggtaagttctgctccgaagaggagcatcccatggagggcccagctcatctgacactgaactctgaggttgggtccctgctcttcagtgaaggtggtgctggacggggaggagcgggcgacgtgcaccagccgacaaaagggaaagaagagttcgttgcaacatttaaggggaacgaatttttctgttacgatctgagtcacaatccgattcaaagcagcactgatgaaattaccctcgcatttcgtaccctccagcgcaatggcctaatgttgcacaccggaaagtctgcggattatgtaaatctcagcctgaaaagcggggcggtgtggctggtcatcaacctaggctccggcgcattcgaagccctggttgagccagtaaacggcaaatttaatgacaacgcatggcatgacgtgcgtgtgactagaaatcttaggcagcacgcaggaatcggtcacgctatggtaaacaagctgcattacctagtgaccatctctgttgacggcatcctgacaaccactgggtatacgcaagaagactataccatgctagggagcgacgattttttctatattgggggtagccctaacaccgcggaccttcccggcagccctgtgagtaataattttatgggttgcttgaaggatgtcgtctacaagaataatgatttcaaactggagctctcacggttagccaaagagggcgatccaaaaatgaagctgcaaggtgatctgagttttagatgtgaggacgtggccgcactggacccggtcacctttgagtcaccagaggccttcgttgcactaccccgctggtctgcaaagcgcaccgggtctatttcgctggactttcggacaactgaacccaatgggctgctgctgttctcgcaggggcgcagggccggggggggggccgggtcccattcctccgcgcagcgcgccgactattttgctatggaactgcttgacggccatttgtaccttctactggatatgggcagcggcggcattaagctgcgcgcttccagtagaaaggtgaatgatggagaatggtgtcacgttgatttccaacgtgatggacggaaagggtccatcagcgtgaatagtagatccacaccattcctggctaccggggactctgagatcctagacctggagtccgaactataccttgggggacttccagagggcggccgagtggacctaccgcttccaccagaggtgtggaccgcagcactgcgcgctgggtacgtcggatgtgtgcgcgatctgttcattgatgggcggtcacgcgatcttagagggcttgcggaggcacagggtgcggtcggagtggcaccattctgttcaagggaaacccttaaacagtgtgcgtcagctccgtgccgcaatggaggagtttgccgggaaggctggaaccgctttatttgtgactgcatcggaacaggtttcttgggaagggtgtgcgagcgggaggctactgttctctcctatgatgggagcatgtacatgaagattatgctgcctaatgccatgcacacagaggccgaagacgttagtctcaggtttatgtcccagcgggcctacgggctgatgatggctactacatctcgtgagagcgccgacacacttagattggaattggacggagggcaaatgaagttgaccgtcaacctggactgcctccgcgtgggatgcgccccttctaaggggcccgagaccctcttcgctggacacaagctgaacgacaacgagtggcataccgttcgagtagtccggaggggcaagtcactccagctgagtgttgataacgtcactgtggaagggcagatggccggcgcacatatgcgtctggaatttcacaatattgagaccggaatcatgaccgagagacgttttatttctgtagtgccaagtaacttcatcggacacctgagtgggctagtgttcaatggccagccatatatggaccaatgtaaagacggtgatattacatactgcgagctgaatgctcgctttggactgcgagctatagtggccgacccagtaacctttaaatctaggagcagctaccttgcccttgctacactgcaggcgtacgccagtatgcacctgttctttcagtttaaaacgactgcccccgacgggctgctactcttcaactctggaaatggcaatgactttatcgtgatcgagctcgtgaaaggctacattcactacgtctttgacctcggcaatgggccaagcctgatgaaaggaaacagcgacaagcccgtcaatgacaaccagtggcacaacgtagtggtgtcaagagaccctggcaacgtgcacacacttaagatcgacagtcgcactgtgacgcagcactccaacggagcgcgcaatctggacttaaaaggcgaattatacatcggtgggctgtccaagaatatgttttctaaccttcctaagctagtggcaagtcgagatggcttccaaggctgtctcgcctctgttgatctgaatggccgtctacccgatctgatcgctgacgcacttcaccgaattggtcaggtagaacgcggatgtgatggccccagcacaacttgcactgaagaaagttgcgcaaaccagggtgtgtgtctccagcagtgggatggattcacgtgcgattgcactatgacttcgtacgggggacccgtgtgtaatgacccaggcactacttacatcttcggcaagggtggagctttaatcacttatacatggcctcctaacgaccggcctagcacaagaatggataggttagccgtcggttttagtacccatcagcgcagcgctgtgctggtgcgggtagactccgcttccggattgggagactacctgcagctgcacatcgaccagggcaccgtgggggtgatcttcaacgtcggcaccgacgatataacgattgatgaacctaacgcgattgtgtccgatggcaagtatcacgtggttcgattcaccaggtccggaggtaatgctacgctgcaggtggattcttggcccgtcaacgaacggtaccccgctggtaattttgacaatgagcggctggcaatcgcccgacaaagaatcccatacaggctcgggagggtggtagatgagtggctgctggacaagggccggcagctgaccatattcaactcacaggccgcaatcaaaatcggaggaagagatcagggccgcccctttcaggggcaggtgtcaggactctattacaacggcctgaaggttctggcactcgcggccgagtctgacccaaatgttagaacggaaggccatctgagacttgtgggtgaaggtccgtccgtgctgctgagtgctgagaccaccgccactactctcctggccgacatggctaccacgatcatggaaaccacaaccactatggccacaaccactacacgccgggggcgttcaccaaccctacgtgactctacaactcagaataccgacgatctcctcgtcgcctcagcagaatgcccctccgacgacgaagatctcgaggaatgcgagccgagcacaggcggcgagctgatactgcccataattacagaggacagcttagatccaccaccagtggctactcgatctcccttcgtgccccctcctcctactttctatcctttcctgactggagtgggggccacccaggacaccctccctccacccgccgctcggaggcctccctctgggggcccctgtcaggctgagcgcgatgattccgattgtgaggagccgatcgaggcctcaggatttgcgagtggggaggttttcgactcatcacttccccccacagatgacgaagatttctataccaccttccctctcgttacagacaggactactctgctttctcccagaaagcctgcacctagacctaacttgagaacagatggcgctaccggtgcccctggtgtcctttttgccccgagtgcccccgctccgaatttgcccgcaggaaaaatgaatcatagagatccacttcaaccccttctggagaacccccctctcggtcccggcgcgcctacgagcttcgaaccccggagaccccctcccctacgccctggggtcacgagcgccccagggttcccacaccttcccactgccaaccccacgggtcccggcgaaagaggaccaccgggagcagttgaggtgattagagaatcttcttcaaccaccggcatggtcgtgggcatcgtagctgccgctgccctgtgcatcctcatcctactttatgccatgtacaaatatcgcaatagagacgaaggatcatatcaggttgatcaatctcgtaactatatttccaatagcgcacagagtaacggagctgtagtgaaagaaaaggcccccgctgctcctaaaacaccttccaaagccaagaaaaataaagataaagaatactatgtgtag

SEQ ID NO: 196901 - DNA, 4929 bp, synthetic construct
  misc_feature 1..4929: note = Description of Artificial Sequence: Synthetic coding sequence
  source 1..4929: mol_type = other DNA
atggccagcggcagccggtggcggcccacccccccccccctgctgcttcttttgctgttagccctcgcagctagagccgacggacttgagttcggcggaggtcctggccagtgggccagatacgcacggtgggcaggagctgccagcagtggggagctgagcttctctctgcggactaacgcaactcgtgcactgctgttgtatctggacgacggtggcgactgcgattttctggagctacttctggttgacggacgactgaggctgcgtttcacccttagttgtgccgaaccagctaccctgcagcttgacactccagtggcagacgatcggtggcacatggtgctgctcacgcgggacgcgcgacgcacagccctggctgtggatggggaggcacgagcggccgaggttcgttcaaagagacgggagatgcaggtggcttcggatctcttcgtgggaggcattcctccagatgtccgcctgagtgctctgactctgtctactgtaaagtacgaacccccatttcgaggactgctggcaaacctgaagttgggggagcgacctcccgctctgcttggaagccaagggttaagaggtgctacagccgatccactttgcgcacccgcgcggaatccatgtgctaacggaggcctgtgtacagtgctcgctccaggtgaggtgggttgcgactgctcccataccggattcggcggcaagttttgctctgaagccccctcccccttccagggccctgcccatctgaccctcaatagtgaagggaaggaggagttcgtggccaccttcaaaggcaatgagtttttttgctacgacttgtcccataatccaatccagagcagtacagatgagatcacactggccttccgcaccctgcagcgtaatgggctcatgctccacaccgggaagtccgcggattatgtaaatcttagcctgaagtcaggggctgtgtggttagtgattaacttgggttctggcgcctttgaagcgttggttgagcccgtcaatggaaagttcaacgacaacgcctggcacgatgttagagttaccaggaacctgagacagcatgcaggcatcggccacgcgatggtgacgatcagcgttgacggaatcctcactacaacgggttatacccaagaagactatacaatgctgggttctgatgacttcttctatatcggaggctccccgaataccgctgacttgcccgggtcccctgtttctaacaattttatgggctgtcttaaagacgtggtttacaaaaacaacgatttcaagctcgaattgagtagactggcaaaggagggcgatcctaagatgaagctgcagggggacctgtctttccgttgtgaagacgtggcagctttagaccctgtcacatttgaaagccccgaagcttttgtggctctcccaaggtggagcgcaaagcggacgggcagtatttctcttgatttccggactacagagcccaatgggctgctcctgttcagtcagggcaggcgagctgggggcggagcagggagccactcctccgctcagcgggccgattacttcgccatggaactgttggacggccacctctacctcctgctcgacatgggatccggaggtatcaagctgagggcaagctctcggaaggtgaatgatggggagtggtgccacgtggactttcagagagacggacgaaagggctccatctcagtcaacagtcgttctacgcctttcctggctacgggggactccgagattttggatcttgaaagtgaactctacctgggagggctgcctgaaggtggccgggtggacctgcccttgcctcccgaagtttggacagcggccttgcgcgcaggttacgtcggctgtgtccgggacctctttatcgacggacggtccagggatttgagagggttggctgaggcccagggagccgtgggagtggccccattttgctcaagggaaaccctaaagcagtgcgctagcgcaccttgccgaaacggtggagtgtgcagagagggttggaatcggttcatctgtgactgcattggtaccggctttctcgggagggtgtgcgagcgggaagccactgtgctgtcatacgacgggagtatgtatatgaagataatgttgcctaacgctatgcatacagaggccgaagatgtcagtctcagattcatgagtcagagggcatacggcctcatgatggccacgacctccagggaaagtgccgataccctgaggctggaactggatggaggacaaatgaaattaacagtcaatctagggaagggcccggaaaccctgttcgctggtcacaagctgaacgacaatgaatggcatactgttagggtggttcgtcgcggcaagtcactgcagctaagcgttgacaatgtcaccgtcgaaggccagatggccggggcgcacatgagactcgaatttcacaatatcgagaccggcattatgaccgaacgcaggtttatatccgtggtgccgtccaatttcattggccaccttagtggtctggtgtttaacggacagccctacatggaccagtgcaaggacggtgacatcacttattgcgagcttaatgccaggttcggtctacgtgctattgtggccgaccccgttacattcaagtcccgtagcagctatctcgccctggcaacactgcaggcatacgcttctatgcatctgtttttccaattcaaaacgaccgcacccgatggactcttgctcttcaattctgggaatgggaacgatttcatagtcatcgaacttgtgaagggctacatccactacgtgttcgatctcggaaatggcccctccttaatgaagggtaatagtgacaagcccgttaatgataatcagtggcacaacgtcgtcgtatctagggatcctggcaacgtacacacactgaagatcgattcccggaccgttacgcaacacagcaacggcgcgcggaacttagatcttaagggggaactttatatcggaggactgagcaagaacatgttctccaacttgccgaaactcgtggcatcacgagatggatttcagggctgccttgcctcggtggacctcaacgggcgcctgcctgacctcattgctgatgcgcttcacagaatcggccaggtcgagcgaggatgcgacggaccatccaccacatgcactgaggagagttgtgcaaatcagggtgtgtgcctacagcagtgggacggatttacctgcgattgtaccatgaccagttacggaggaccagtgtgtaacgaccctggcaccacctacatctttggtaaagggggtgctctcatcacctatacctggccccccaacgacaggcccagcacccgaatggaccggctcgccgtgggtttctcgacccaccaacgttcagctgttttagttcgcgtcgactcagcgagtggactgggcgactatctgcaactccacatagaccagggaacagtgggcgtgatatttaacgtagggactgatgatattaccatcgacgaacctaatgctattgtgtccgacgggaagtaccacgtggtcagattcacccggagcggcggcaacgctacactacaggtggatagttggcccgtgaatgagcgctatcctgccggaagacagttgactattttcaacagccaagctgccataaagattggggggagagatcaaggaaggcccttccaagggcaagtatcgggtctgtactataatggcctcaaagtgttggccctagccgccgagagcgatcccaacgtacgaacagaaggccacctgagactcgtcggcgaggggccatcggtccttctgagcgcagagaccacagcaacaacactgctcgcggacatggcaactaccataatggaaactaccacaacaatggcaaccaccacaacgcgccggggacgtagtcccacactgcgcgactccaccacacaaaatactgatgacctgctggtcgcttctgccgagtgccccagcgacgacgaagaccttgaggagtgcgaaccaagtacaggaggggaactgatactacccataatcacagaagattctttggaccccccccctgtagcaacacgctcaccgttcgtgcctcccccccccacgttttacccgttcttgactggcgtcggcgccacgcaagatacactgcctccacccgccgccaggcggccgcctagcggaggaccgtgccaggcagagagagatgactctgattgcgaagagccgatagaagcatctggcttcgcttcaggcgaagtgttcgacagctcgctgcctcccaccgacgatgaagatttctacaccacattcccgctcgtgacggacaggacaaccctcctcagcccccggaagcctgcccctagacctaacctccgaacagacggtgcaactggcgctcctggagtgttatttgctccatctgctcccgcacccaacctgcctgccggcaaaatgaatcacagagaccctctacagcctttgctggaaaacccacccctgggacccggcgcccccacctctttcgaaccccggagaccaccacctctgagaccaggggtcacttctgcccctggcttcccacacctgcctaccgccaaccccacaggacctggagagagaggcccccctggggcagtggaagtaataagggagtccagcagcacaactggaatggtggtggggattgtggcagcagctgcactctgcatcctgattctgctgtacgctatgtataagtacaggaatagagacgaaggatcatatcaggtggaccagtccaggaactatatctccaactcagctcagagcaatggggcagtggtgaaggaaaaggctcctgcagcccccaagacacccagcaaagccaaaaagaataaggacaaggagtactatgtatag

SEQ ID NO: 196902 - DNA, 5139 bp, synthetic construct
  misc_feature 1..5139: note = Description of Artificial Sequence: Synthetic coding sequence
  source 1..5139: mol_type = other DNA
atggccagcggcagccggtggcggcccacccccccccccctgctgctgcttctcctcctggccctcgctgccagggctgatggtttggaattcggaggtggcccggggcagtgggcccgttacgctaggtgggccggagccgcgagttccggcgagctgtcctttagcctgcggacaaatgcgactagggccttattattataccttgacgacgggggggactgcgattttctcgaactgctgctagtcgacggccgcctgaggcttcgttttaccctgtcgtgcgccgaaccagccacgttacagctggacacgccagtggcagatgatcggtggcatatggttctattaacacgggacgcccggagaactgcacttgccgttgatggagaggcacgggccgcagaagtgaggtccaaacggcgggagatgcaggtcgcttctgatctgttcgttggcggaataccacccgatgtccgactttcagcccttacgctcagcaccgtgaagtatgagcctcccttccgaggcctcctcgcaaacttaaaactgggagagcgcccgccggcattgctgggttctcaaggccttcggggggcaaccgctgatccgctatgcgcacctgcaaggaacccttgtgccaatggtggtctctgcactgtgctggccccgggggaagtgggctgcgattgctctcacaccggtttcggcggcaaattctgttctgaggaagagcaccctatggagggaccagcacatctaacactgaatagcgaagtgggttcgctgctgttcagtgaagggggcgctggccggggcggggcaggcgatgtccatcagcctactaaaggcaaagaggagtttgtcgccacattcaaaggcaacgaatttttctgctacgacctgtcccacaaccccatccagtcatctactgacgaaataaccttggccttccgcaccttacagcgcaacggactcatgcttcacacaggcaagagcgctgactacgtaaatctgtctctaaagagcggggccgtgtggcttgttataaacttaggtagcggtgctttcgaggccctcgttgaaccagtgaacggcaaattcaatgataatgcctggcacgatgttagagttacacggaacctgcggcagcacgctggcatcggccacgcaatggtcaataaactccactatctggtcaccatttctgtagatggtattctgaccactactggatacacacaggaagactacacaatgctcggttctgacgatttcttttacattggggggagtcccaacaccgcagatctgccaggatcacccgtcagtaacaacttcatggggtgtctgaaagatgttgtctacaagaacaatgactttaagttagaactttcccgcctcgccaaagagggagatccgaagatgaagctccaaggagacctgtccttccgttgcgaggatgtggctgcacttgacccagtgacatttgaatcccccgaggcttttgtggcactgccccgatggtcagcaaaacgtacagggtctatatccctggattttaggaccaccgagcctaacggtctgctccttttctcccagggcagaagagccggcgggggggctggctcccatagcagcgcccaaagggctgactatttcgccatggagctcttagatggacatctttacctgttactcgacatgggatcggggggcattaaactgagagcctccagccgcaaagtcaatgacggggagtggtgtcacgtcgatttccagcgtgatggccgcaaggggagcatctccgtcaactccagatcaacccctttcctggcaactggagatagcgagatccttgacctagagtcagaattgtacctcggcgggttgccagagggcggcagggttgatctgcctctgccccctgaagtttggacagcagcactgcgcgctggttacgtgggatgtgtgcgcgacctcttcatcgacggtaggtccagggacctgcgaggcctcgccgaagcccaaggggcggtcggcgtggcaccattttgctcccgcgagaccttgaagcagtgtgcaagtgcaccttgtagaaacggcggcgtgtgtcgcgagggctggaacagattcatttgtgattgcattggcacgggcttcctgggcagagtatgtgagagggaggccacagtgttgtcctacgacggcagtatgtatatgaagattatgctgccaaatgccatgcataccgaggccgaggatgtgtccttgagattcatgtctcagagggcctacgggctgatgatggcaaccacctcacgggaaagtgccgatactcttcgactggagctggacgggggccagatgaaactgaccgtcaacctcgattgcctgcgtgtaggttgtgcaccttccaagggacccgagacgctcttcgcaggccacaaactgaatgacaatgagtggcatactgttcgggttgtgcggcggggaaaatctctgcagctctccgtcgataatgtgaccgtcgaggggcagatggcgggagcacacatgcggttggagtttcacaatattgaaacaggcattatgactgaacgtcgcttcataagtgtagtgccttccaactttattggccacctgagcgggctcgtgtttaacggccagccctacatggaccagtgtaaggacggcgatataacatactgtgagctgaatgctaggttcggactcagggccatagtggccgatccagttacctttaagagccgcagcagctatttagctttagccacattgcaggcctatgcttctatgcatttgttcttccagttcaaaaccaccgcccctgacggactgttattgttcaactccggaaacggtaatgatttcatcgtaatagaacttgtaaagggatatatccattatgtgttcgatcttggcaatggtccctcactgatgaaaggtaactcggataaaccagtgaatgataatcagtggcacaatgtggtggtctcccgggacccaggtaacgtccataccctgaagatcgatagtcggacagtgacacaacatagcaatggcgcccggaaccttgatttgaaaggggagctctacattgggggcctatccaaaaacatgttcagcaatttacctaagttggttgcctcacgcgacggctttcaggggtgcttagcctctgttgatttaaatgggagacttccagatctaatcgctgacgccttacacagaattggccaggtagaacgcggttgtgatggtccgtctaccacgtgtacggaggagtcttgcgccaaccaaggcgtgtgcttgcagcagtgggacggctttacctgtgactgtactatgacgagctatggcggtcccgtctgtaacgatcccggtactacctacatttttgggaagggcggcgccctgattacctacacttggccaccaaatgaccgaccgagtactaggatggacagactagctgtagggttctccactcaccagagatctgccgtgctggtgagagtcgactcggccagcggacttggtgattacctgcagctgcatattgatcaggggaccgtcggggtgatctttaacgtggggacggacgatatcacaatcgacgaacctaatgcaatagttagtgatggcaagtaccatgtggtgcgtttcacaagatccggcgggaacgccactcttcaggtagacagttggccggtgaatgagaggtacccagctggaaactttgacaatgagcggcttgccattgcccgtcaacgaatcccctatcgcctaggacgagtggtcgacgagtggctgctggacaaaggacgccagctgactattttcaactcccaggctgccattaaaatcggggggagagatcaggggagaccttttcagggacaagtgagtggattgtattacaacggattaaaggtgctcgctttggcagccgagagcgatcctaatgtccgaacagagggccacctgcgacttgtcggcgaggggcccagtgtactgctttccgccgaaacgacagccactacactcctcgccgatatggcaaccacgataatggagacaacgacaaccatggcaaccacaaccaccagacgtggaagatcaccaaccctgcgggattcaaccacccaaaacacagacgatctcctggtagcaagtgctgaatgtccaagcgacgacgaggacctggaggagtgcgaaccctccaccggaggtgaactgatattgcccatcattactgaggatagcctagacccacctccggtggcgacaaggagcccattcgtccctcctccacccaccttttaccccttcctcacaggcgttggcgcgacacaggatactcttccgccacctgcagctaggcgacccccgagtggtggcccttgccaggccgagcgcgacgatagtgactgtgaagaacctattgaggcctctggattcgcctccggtgaagttttcgattccagcctcccacccacggacgatgaagacttctacactacctttcctctagtcacagacagaacgacactcctgtcaccacgcaaacccgctccccggcctaatcttcgtacagatggcgcaacaggtgcccccggtgtgctcttcgcgccctcagcccctgctcccaacctgcctgccggaaagatgaatcatcgtgaccctttgcaaccgctcctcgagaacccgcccctgggccctggagcaccaacgtcatttgagcctagacgtccccctcctttgaggcccggcgtgacctccgcaccgggcttcccccatttgcccacagctaatcctaccggccctggggagaggggccccccaggcgcagtggaagttatacgtgaaagctcaagcaccacaggtatggtagttggaattgtcgcagccgccgccttgtgtattcttatactgttatatgctatgtacaaataccggaacagagacgagggatcctatcaggtggaccagtcacggaattatatcagtaactctgcacagagtaatggagctgtggtgaaggaaaaggctcctgccgcaccaaaaactccctctaaggcaaagaaaaataaggacaaggagtattatgtgtag

SEQ ID NO: 196903 - DNA, 4929 bp, synthetic construct
  misc_feature 1..4929: note = Description of Artificial Sequence: Synthetic coding sequence
  source 1..4929: mol_type = other DNA
atggccagcggcagccggtggcggcccacccccccccccctgctgctactactgttactggcacttgctgccagagccgacggcctggagttcggcggcggtccaggccagtgggcccgctacgcccgttgggctggcgccgcgtcctctggtgaactgagcttctcgctgcggacaaacgccacaagagccctgctgctttatctggatgacggaggcgactgtgattttctcgaactactgttggtcgatggtaggctccggctgcgcttcactttgtcctgcgcagaacctgctaccctgcagctggatacacccgttgccgacgacagatggcacatggtgctgttgacaagggacgcgagacgcaccgcacttgccgttgacggcgaagcccgcgcggctgaagtcaggtcaaaaaggagagagatgcaggtcgctagtgacctgttcgtaggcggcattcctcccgatgtaaggctcagcgcgctgaccctgtctactgtcaaatatgagcccccattccgaggcctgctggccaaccttaagctcggcgagaggccaccggccctgcttggatctcaaggcctgcggggggcgactgcagatccgctgtgcgcccctgcccgtaacccttgtgccaacgggggcctctgtaccgtgttggctccaggtgaggtgggatgtgattgctcccatacgggatttggcggcaagttttgtagtgaagaagagcacccaatggagggaccggcgcacctgaccttgaattccgagggcaaggaggagtttgtcgccacatttaagggaaacgagtttttctgttacgatctgtcccacaacccaatacagtcctctaccgacgaaattacacttgccttccggactctccagcgtaatggacttatgcttcacactggcaagtcggctgattatgtcaatctatcacttaagtctggggccgtgtggctagtcatcaacctgggttctggcgctttcgaagcactggttgagcctgttaatgggaagtttaacgacaacgcctggcatgatgttagagtcaccagaaacctgcgccagcatgctgggatcggacatgccatggttacaatctccgtggatgggattttaaccactacaggatacactcaggaggattacaccatgctgggttccgatgacttcttctacataggggggtcaccaaacaccgccgatttgccaggcagtccggtttccaacaactttatgggttgtttaaaggacgtggtgtacaaaaataacgatttcaagcttgagctctcacggctagccaaggaaggcgatcccaaaatgaaattacagggtgatctaagttttcgttgtgaggacgtcgcagccctggacccagtcaccttcgagtcacctgaagcttttgttgcccttccgcggtggtccgcgaagcgcacgggctccatatcgctggattttaggaccacagagcccaacggcctcctgctattttcccaaggaaggcgggcagggggcggcgccgggagccattcttccgcccagcgagcagattactttgcgatggaattactcgacggacatttgtaccttctcttggacatgggtagcggaggtataaagctgcgcgcgagttccagaaaggtgaacgatggcgagtggtgccacgtggatttccagagggacggacgaaagggatcaatttcggttaattcaaggagtaccccattcctggcaacaggcgactccgagattcttgatttggagagcgagctctatctgggtgggttaccagagggagggcgggtcgaccttccacttcctccagaagtgtggactgcagctctccgggcaggatatgtgggctgtgtaagagatctttttattgacggccgatcaagggacttacgaggactcgcagaggcccagggcgcagtaggagtagccccattttgctcgcgcgagactcttaaacaatgcgcctctgcaccatgtagaaatggtggggtttgcagagagggttggaataggttcatctgcgattgcatcggaaccggctttctaggccgtgtgtgtgagcgggaggccaccgtactgtcttacgatgggtctatgtacatgaagatcatgctacctaacgcaatgcatacagaagccgaggacgtgagcttgcgctttatgagtcagcgtgcttacgggcttatgatggcgacaacaagtagagagtcggccgatacactgagactcgagctagatggtggacaaatgaagctcacagtgaacctgggaaagggacccgagacactctttgccgggcataagctcaatgataacgagtggcataccgtacgggtggttagacgcggtaagtctctccagctcagcgtcgataatgtgactgttgaaggtcagatggccggagcccatatgcgcttggagtttcacaacatcgaaacaggcattatgacagaaagacgatttatttcagtagtaccgtcaaatttcatcggccacctgagcggcctggtgtttaacggccagccctacatggaccagtgcaaagacggggacattacctattgtgagctgaatgcccgctttggcctgcgtgccatagtggctgacccggtgacattcaagtccaggagctcctatctcgctctggcaactttacaggcttacgcgtccatgcacctgttctttcagttcaagaccaccgcaccggacggcttgcttcttttcaactctgggaacgggaatgattttatcgtgatcgaattagtcaaaggctatatacactatgttttcgacctcggtaacggacccagcctgatgaaaggaaattctgataagcccgtaaacgacaatcagtggcacaacgtggtagtgtcgcgggaccccgggaatgttcatactttgaaaattgactcacgaacggtgacacagcacagcaatggggcaaggaatctagatctgaagggagagctctatatcggaggactgtccaaaaacatgttcagcaatctgcccaagctggtcgcatcccgggatgggtttcagggctgcctggcatccgtcgacctgaacggacgcctccctgacttgatcgcggacgcactccatcggatcggacaggtggaaaggggatgtgacggaccctccaccacttgtacggaggagagctgtgcaaaccaaggggtctgtctccagcagtgggatggcttcacctgcgactgcacaatgactagttacggaggccctgtctgcaacgacccagggaccacatatatttttggcaagggaggtgctttgatcacctacacttggcctcccaatgaccgcccatctaccaggatggaccgtctagccgtcggcttctcaactcatcaaagatcagcagtcctggtcagggttgatagtgccagcgggctgggcgactatcttcagctacacatagaccaggggacggtgggtgtgatctttaatgtagggaccgacgatataacaattgacgagcctaacgccattgtaagtgacggcaaataccacgtggttcgcttcacaagatctggcgggaatgctaccctccaagtggacagctggcctgtgaacgagcggtaccccgccggcaggcaacttacgattttcaactctcaagccgcaatcaagataggcggtcgcgatcaagggagaccctttcaaggacaggtgagcggtctatactataatggtctgaaagtcctggctctggcagctgaatcagatcccaatgttagaaccgagggacacctgcgactagtcggggaaggaccctccgtgctgctctctgccgagactaccgccaccactttgttggcagacatggcaaccacaatcatggaaacgactacgacaatggccaccaccaccactcggagggggcgatcccccactctgagggactccacaacacaaaatactgatgacctgctcgtggcctccgctgaatgtccctctgatgatgaggacttagaagagtgcgaacctagcacaggcggggaactgatcttgccaataataaccgaggattctctggacccaccgcctgtggcgaccagatcaccttttgtccctccccctcctacattctatccctttctcaccggagtgggggccacccaggacaccctgcccccacccgcagcgaggaggcctccttcgggaggaccctgccaagccgagagggacgattccgactgcgaagaaccaatcgaggctagcggattcgcatccggggaagtattcgacagctcactgcctcccacagatgacgaggacttctacacaactttccctcttgtcacagatcgtaccactctcttatccccccgaaagccagctcctagacctaacctgcggactgatggggccaccggtgcccccggagtgctcttcgcaccgagcgctcctgcccctaacttgccagcaggtaagatgaatcatagggatccactgcagccactccttgagaaccctcccctgggccccggcgcccctacctctttcgagccaagaagacctccacccctgcgtccgggcgtcactagcgccccaggattcccccatctacccacagcgaatcccacagggcctggagagcgtggaccccctggcgccgtggaggttattagggaaagtagtagtacaacgggtatggtcgtcggtatagtcgcagctgcggcgctgtgcatactgatcctcctctatgctatgtacaagtaccgtaaccgcgacgaaggcagctaccaggtggatcagtccagaaactatatatctaacagtgctcagtccaatggcgctgtggttaaggagaaagcccctgccgctcctaagactcccagtaaggctaagaaaaataaagacaaggagtactacgtttag

SEQ ID NO: 196904 - DNA, 5118 bp, synthetic construct
  misc_feature 1..5118: note = Description of Artificial Sequence: Synthetic coding sequence
  source 1..5118: mol_type = other DNA
atggccagcggcagccggtggcggcccacccccccccccctgctgctgttgctcttgttggctcttgcagctagggccgacggcctggagtttggaggtggccccggacagtgggctcgctacgcaagatgggcgggagcagcatcctcaggggaactgagcttctcattgaggaccaacgcgacaagggccctgttactatacctcgacgacggcggcgactgtgattttcttgaactcctcctggttgatggaagattgaggctgagattcaccctcagctgtgccgaacccgctacgctgcaacttgatacacccgtggcagacgatcgttggcatatggttctattgaccagggatgcgaggaggaccgctctggcagtggacggcgaggctagggccgctgaggtgcggtccaagcggagggagatgcaggtggcaagcgacctgtttgtgggtgggattccacccgatgtccgactgagcgcattaacattgagtaccgtcaagtacgagcccccattcagaggactcctcgctaacctgaagctcggggagcgccctcccgctcttctcggatcgcagggtctgagaggagccaccgcggatcctctgtgtgctcccgctcgaaacccatgcgccaacggaggcctatgtacagttttagctcccggagaagtcggctgtgactgtagtcacacaggttttgggggtaaattttgttctgaggaggaacacccaatggaggggcccgctcacctgaccctgaatagtgaggtcggatccctactattcagtgagggtggtgccggacgtggcggagccggtgatgttcaccagccaaccaagggtaaggaggaatttgtagccacctttaagggtaatgagttcttctgttacgatctttcccataatcctattcagtcttccactgacgagattacattggcttttagaacacttcagaggaacggtctgatgctgcacaccggcaaatccgccgactatgtaaacctctccctgaaatcaggggccgtctggctagtgataaatttaggcagcggggcttttgaggccctagtcgaacccgttaacggtaagttcaacgataatgcctggcatgacgtccgggtcacaagaaacttacgccaacacgcaggcattggacatgccatggttacaatatcagtggacggaatcctgacgactactgggtacacgcaggaagattacacgatgcttggaagcgacgattttttttacataggcggttcaccaaacacagcggatcttccagggagcccagtgagcaacaatttcatgggttgcttgaaggatgtcgtttataaaaacaatgatttcaagctggagctctctagactggctaaggagggggacccaaagatgaagcttcagggagacttgtcctttcgctgtgaagacgttgcagcgttagacccagtcacctttgagagccccgaggcctttgtcgctctgcctcggtggagcgctaagagaacgggcagcatttcattggatttcaggaccaccgagcccaatggactgcttttgttttctcaggggcgcagggccggaggtggtgccggatctcacagttcagcacaaagagccgactattttgccatggagctgctggacggacatttatacttgctcttggacatgggctccggaggcattaaactgagggcgtccagcaggaaagttaatgacggcgaatggtgtcatgttgattttcagagggacggacgaaagggctctatttcggtgaatagccgttcaaccccatttctggctactggagactctgagattttagatttggagtcagaactctatctgggaggattgccggagggaggccgcgtggacttgcctcttccccccgaagtctggaccgcggctctgcgggccggttacgttgggtgcgtgcgcgacctgttcatagatgggaggagcagagacctacgggggctggctgaagcgcaaggggccgtgggggtggcaccattttgcagtagagagactcttaagcagtgtgcatcagcaccatgccgaaacggtggcgtttgccgcgagggatggaataggtttatctgtgattgcatcggcaccggctttctggggcgtgtgtgcgagagagaggcgaccgtgttgtcttatgatggatctatgtatatgaagatcatgttacccaacgctatgcatactgaagccgaggacgtgagtcttaggttcatgagccaaagggcttacggcctgatgatggcaactacaagccgcgagtccgctgacactttacgtcttgagctggatggcggacagatgaaacttaccgttaatctagattgcctccgagtgggttgcgcgcctagcaagggacccgaaacactgtttgcaggacataagctcaatgataacgagtggcacactgtgcgtgtggtccggcgtgggaaatctctgcaactgagcgtagataatgtaaccgtggaaggtcagatggcaggcgcacacatgcgacttgagtttcataatatcgagacagggattatgactgaacggcggttcatctccgtggtcccatctaacttcattggccacctttcaggcctggtctttaatgggcagccgtatatggaccagtgcaaggatggggacattacctactgtgagctaaacgccaggtttggactgcgggccatcgtcgccgaccccgtgacctttaagagtcggtctagttacttggctctggcgacccttcaagcatacgcaagtatgcacctgtttttccagtttaaaaccactgcaccggacggcctgcttctttttaatagtgggaatgggaatgactttatcgtcatcgagttggttaagggttatatccattacgtgtttgatctcggcaacgggccctccctcatgaagggcaattccgacaaacccgtgaatgataaccagtggcataacgtggtggtctcccgcgacccgggcaacgtgcacacactgaaaattgatagccgaactgtgactcaacacagtaatggagctcggaatcttgacctcaagggagaactctatatcggaggtttgagcaaaaatatgttctctaatctgcccaaattggtagctagcagggacggcttccagggatgtctcgcctctgtggaccttaatggccggcttcccgacctgatcgcagatgctctccataggattgggcaggtcgagagaggctgcgatggcccatccacgacctgcactgaggagagctgtgcaaatcagggagtatgtctccagcagtgggacggttttacgtgcgactgtacgatgaccagctacgggggtcccgtgtgtaacgaccctgggacaacttatatcttcggcaaggggggagctctcattacgtacacttggccacccaacgacagacctagcacccgtatggacaggctggcagtaggatttagcacccaccagcggtctgccgtgctggtgcgggtggattcagcgagtggcctgggagattatctacaacttcacattgaccagggtacggtgggcgtgatcttcaacgtagggaccgacgacataaccatcgatgaacccaatgctatcgttagtgacggaaagtaccacgtagtgcgctttaccagatcagggggtaatgcaactctccaggtcgatagctggccagtaaatgaacggtatccagccggcaatttcgataatgagagacttgccatcgcacgccaacggatcccttatcgactgggaagagtggtggacgaatggctgctggacaagggaaggcagttgaccatttttaattcccaggctgcaatcaagatcggaggccgtgaccaggggcggccatttcagggccaagtaagcggactctattataatgggctcaaggtcctagcgcttgcagctgagtccgacccgaacgtcaggacagagggccacctgcgcctagtcggagaggggccgagcgtgttgttgtctgctgaaacaactgctacaactctgttggcagatatggcaaccacaattatggagacaacaaccacgatggcaacaacaacgaccaggcggggaagatctccaaccctccgcgattctacaactcagaacacagacgatctgctggttgcctctgctgaatgcccttcagacgacgaggacctagaggagtgcgaaccaagtacagggggtgagctaatactaccgatcattacagaagactcgctggatccgcctccagttgctacgaggagccctttcgttcctccacctccaaccttctaccctttcctcaccggcgttggggccacccaggacacccttccaccccccgccgcgaggcgaccccccagtggcgggccatgccaggccgaacgtgatgatagcgattgtgaggaaccaatcgaagctagtgggttcgcctccggcgaggtgttcgactccagtttacctcccactgatgatgaagacttttacaccacatttccgctggttactgacaggacaacactactttcccctaggaaaccagcccctaggcccaatcttcgaactgatggcgccacaggtgccccaggcgttttgtttgccccaagtgccccggcacctaatctgcccgccggcaaaatgaatcacagggacccattgcagcctctcctggaaaaccccccccttggacctggcgctcctacctccttcgagccccggaggcctccccctctgcggccaggggtgacttccgccccaggtttccctcacctcccaaccgctaaccccacaggacccggcgagaggggtccaccaggagctgtggaagtgattcgcgagtcgagttcaactaccgggatggtggtcggcattgtggccgccgccgctctgtgcatcttgatcttactgtatgccatgtataagtaccggaacagagatgaaggatcttatcaggtggatcagtcccgcaattacatctcgaattccgcacagtcaaacggtgccgtggtgaaggaaaaggccccagccgccccgaaaacaccctccaaggcgaaaaagaacaaggataaggaatattatgtatag

SEQ ID NO: 196905 - DNA, 2001 bp, synthetic construct
  misc_feature 1..2001: note = Description of Artificial Sequence: Synthetic coding sequence
  source 1..2001: mol_type = other DNA
atgccccccggcggcagcggccccggcggctgcccccggcggccccctgcactcgcaggaccgttgccgcctcctccacctccgcctcctccccccctgttgccactgctcccccttctgctattgttgcttctgggggccgctgagggcgccagagtgagttcctcactgtccactacacaccacgtgcaccattttcattccaagcatggcactgtacccattgctattaacagaatgcccttcctcactcgcggaggccacgccgggacgacttatattttcggaaagggaggcgctctgataacatatacatggcctccaaacgacaggccatctaccagaatggacaggttggccgttgggttttcaacccaccagcgatctgctgtcctcgttcgtgtggattccgctagtgggctcggcgattatttacagcttcacatcgatcaggggactgtaggtgtcatattcaacgttgggacagatgacataacgattgacgagcctaacgccattgtaagcgacggaaagtaccatgtggtccgatttacaagatctgggggaaatgccacactacaggttgattcttggccagttaatgaaagataccccgccggaaacttcgacaatgagcggctggctattgcccgacagcgcattccctaccgactgggaagagtggtggacgagtggctcctggataaagggcgacagctgaccattttcaactcacaggcggccatcaaaatcggagggagagatcagggccgtccctttcagggacaagtttcaggcctctactataatggcttaaaagtgttggccctcgccgccgaatctgaccctaatgtccggacagaggggcatctgcgcctcgtaggcgaaggcccttctgtgttattgagcgcagagacaactgcgaccactctattggccgacatggccaccaccatcatggaaaccactacgaccatggctaccacaacgactaggcgtgggcggtctcctaccttacgcgattccaccacccaaaacacggatgacctgctggtagccagcgcagaatgtcccagcgatgatgaagacttagaggagtgtgaaccatcaaccggcggggagctgattctcccaatcattaccgaagactctttggatcctccccccgtggccacacggagtccgttcgtacctccaccgccaactttttacccattcctgaccggagtgggggctactcaggacacgctgccgccacctgctgctaggcggcctccctccggcggcccatgtcaggctgaaagagacgactcagactgcgaggagcccatcgaagcttccggattcgcaagcggggaggtcttcgactcgagcttaccaccaaccgacgacgaggatttctatacgactttccccctcgtgaccgaccggactaccctcctttctccacggaagccagcgcctaggcctaatttgaggacagacggagccacaggcgctccaggggtgctgtttgctccctcagctcctgcgccaaatctgcccgcaggcaaaatgaaccatcgggatcctctccagcctctactcgaaaatcctccactgggccctggcgcacccacaagcttcgagccccggcgaccgcctccattgagacctggcgtgactagcgcacctggattcccacatttgccaactgccaacccaacaggccccggggagcgaggaccccccggcgctgtggaagtaatccgtgagtcctcttcaactaccggaatggtcgtaggtattgtagcagccgcagcactctgtattctgatcttgctgtacgcaatgtacaaatatcggaatagggatgaaggctcctatcaggtggaccagtcacgcaattacatttccaattcagctcagtcaaatggagcggttgtcaaggagaaagcccctgccgcgccaaagaccccctccaaagcaaaaaagaataaagacaaagaatattacgtatag

SEQ ID NO: 196906 - DNA, 1299 bp, synthetic construct
  misc_feature 1..1299: note = Description of Artificial Sequence: Synthetic coding sequence
  source 1..1299: mol_type = other DNA
atgcacctgcggatccacgcccggcggagccccccccggcggcccgcctggacattggggatctggtttctgttttggggatgtatcgtgtccagcgtttggagttcatcaaacgtggccagctcaagcagcaccagtagttccccaggtagtcactctcagcacgaacaccacttccacgggtctaaacatcacagtgtgccaatctctatctacaggagccctgtctcgctgagaggcggtcatgccggcgccacgtatattttcggcaaatcaggaggattgatcctctacacatggccagcgaacgacagacccagtacacgaagcgatagactggctgtggggtttagcaccaccgttaaagatgggatcctcgtgcgcatagattcagcccctggactgggagacttcttgcagctgcatatcgagcaggggaagatcggagtggtcttcaacataggcaccgtggatatatcgattaaagaggaacgtacacctgtgaacgacggtaagtatcacgtggttaggtttacgaggaacggaggcaacgccaccttgcaggtagacaactggcctgtgaacgaacattatccaacgggtcggcaactgaccatcttcaatacacaggcccagatcgccattggcggcaaagacaaaggtcgcctatttcaaggacagctgtccggcttgtactacgatggtctgaaagtcctgaatatggcggcggaaaacaacccgaatataaaaataaatgggtcggtgcgtctggtcggtgaagtcccaagtatactgggcacaactcaaacaacgtccatgccccctgagatgagcactacggtaatggagaccactactacaatggctactacgacaacgagaaaaaaccgatctactgcatctatacagccaacctcagacgatctcgtgtcctccgccgaatgcagttcggacgacgaggattttgtagagtgtgagccttccactggacgcagtgccaaccccacggaaccagggatccggcgggtacccggcgcctcagaagtcatccgcgaaagtagcagtacaacgggcatggtggtggggattgttgccgccgccgctctgtgtattctgattctcttgtacgctatgtataagtacaggaatagggatgaaggctcataccaagttgacgaaacacgtaactacatttccaattccgcccagagcaacggtacgctgatgaaggagaagcagcagtccagcaagagtggccacaagaagcagaaaaataaggaccgcgaatattacgtgtag

SEQ ID NO: 196907 - DNA, 4932 bp, synthetic construct
  misc_feature 1..4932: note = Description of Artificial Sequence: Synthetic coding sequence
  source 1..4932: mol_type = other DNA
atgagcagcaccctgcacagcgtgttcttcaccctgaaggtgagcatactgctcggctccctactgggcttgtgcctaggcctggaatttatgggactccctaatcaatgggcgaggtatctccggtgggatgcatccaccagaagtgatctttcctttcagtttaagaccaatgtcagcactggccttttactctacctcgacgatggtggcgtctgcgatttcttgtgcctgagtcttgtagatgggcgagtgcagctgagatttagcatggactgtgctgaaaccgccgtgctgtctaataagcaggtaaatgactcgtcttggcatttcctcatggtctcaagagacagactgaggactgtgcttatgctggacggagaaggccagagcggtgagctgcaacctcaacggccatacatggatgtggtcagtgatctgttccttggaggtgtcccgaccgacattcgacccagcgcgctgacccttgacggcgtacaggccatgcccggtttcaagggactgatactagatctgaaatacgggaattccgagcccagacttctgggttccagaggggtgcagatggacgccgaaggcccatgcggagagcggccttgtgagaacgggggcatatgctttctgctcgacgggcatccgacttgtgactgcagcacgactgggtatggcggcaaactgtgtagcgaaggtagcagcggggacccttgcctgtcccatctgatgatgagtgagcaggcaagagaggaaaacgtggccacgtttcgaggttctgagtatctgtgttatgatctgtcccaaaaccccatccagagttcctcagatgagattacactgtcctttaagacctggcagaggaacggactcatactgcacactggtaaatccgctgactacgtgaatctagcccttaaagacggtgctgtgtctcttgtgattaatctcggtagcggagcattcgaggcgattgtggagcccgtgaatggcaaatttaacgacaatgcttggcatgatgtcaaggtgacccggaatctgaggcaggtcactatctccgtcgatgggatcctaaccactaccggatacacccaggaagactacactatgttaggttcggacgacttcttttacgtgggtggatcaccatcgacagccgatctgcccggttctcctgtaagcaacaactttatgggttgcctgaaggaggtggtttacaaaaataatgatatccgtcttgaattgagtcgcctcgcgcggatcgctgatacaaaaatgaaaatttatggggaggtggtgtttaaatgcgaaaatgtcgcaactctcgatcccatcaactttgaaacccccgaagcctacatctcgctgccgaaatggaacaccaagagaatgggaagtatctccttcgactttcgaactaccgagcctaacggcctgatcctgttcacacacgggaaacctcaggagcgaaaagatgctaggagccaaaaaaacactaaggtcgacttcttcgccgtggaactgctggatggcaatctctacctgttgttagacatgggcagcggtactattaaagtaaaggccactcagaagaaggccaacgacggggagtggtatcacgtagacatccaaagagacggtaggtctggtacaatctctgttaattcccgtcggacccctttcacagctagtggagagtccgaaatcctcgatctggagggggatatgtaccttggaggcttgcctgagaatcgggccggactcatcctgcctactgagttatggaccgccatgctgaactacggatatgtggggtgtataagggatttgtttattgacggacgttccaagaacattagacagttagcagagatgcagaatgccgccggagtcaagtcttcttgttctcggatgtcagccaagcaatgcgatagctacccttgcaagaacaatgccgtgtgtaaggacggctggaacagatttatctgtgactgcacaggtaccggctattggggaaggacctgcgagagggaagcttctatcctctcttatgacggttccatgtatatgaagataatcatgcccatggtgatgcatactgaagccgaggatgtgagttttagattcatgagccagcgagcttatggcctcctagtggccactacctcccgagactcagctgatactctccgactggaattggacggaggccgcgtaaagctaatggtcaacctggactgtatcaggatcaattgtaactcctctaaaggacccgaaaccttgtacgccggacagaaacttaatgataacgagtggcatacagtccgcgtcgtgagaagagggaagagcttgaaactgactgtcgatgacgatgtcgcagaaggaactatggtgggcgatcacacgaggctcgagtttcataatatcgagacagggatcatgacagagaagcgctatatctccgtcgtgccctctagctttataggccaccttcagagtctcatgtttaacggactgttgtatatagacctctgcaaaaatggcgatattgattattgtgaactgaaggcccgatttggcctgcggaacatcatcgcagatccggtcacgttcaagactaagtccagctatctctccctcgccactctgcaagcctatacatcaatgcaccttttttttcagtttaaaacgactagccccgacggattcatattgttcaatagcggcgacggaaacgattttatagccgtggaacttgtcaagggatatatccactatgtcttcgacttaggcaatgggcctaacgtgattaaggggaactccgaccggccgctcaatgataaccagtggcataatgtggtcatcacgcgggacaattccaatacgcattcacttaaagtagatacaaaggtggtcacccaggtaatcaatggagccaagaatctggatctgaagggtgatctgtacatggccggcctggcgcagggcatgtactcaaacctcccaaaactggtggccagccgagatggattccagggctgcctagcttcagtcgatttaaacgggagactgcccgatctcattaacgacgctctgcacagaagcgggcagattgagcgcggctgtgagggcccttctaccacatgtcaggaggactcctgtgcgaatcagggggtctgtatgcaacagtgggaaggcttcacctgcgactgcagtatgacctcttattcagggaaccaatgtaacgatccaggagctacttatattttcggcaaatccggtggcctgatactgtacacctggcccgccaacgacagaccatccacacgatctgataggctcgccgtcggcttctcaacaactgtgaaagatgggatcctagtcaggattgactcagctccgggacttggtgatttcctgcagctgcacattgagcagggcaaaatcggtgtggtgtttaatattggaaccgtggacatatctattaaagaggagaggacaccagtaaacgacggtaaataccatgtggtcaggttcacacggaatggcggtaacgccacacttcaagtcgacaactggcctgtcaatgagcactatcctactgggagacagctgacaattttcaacacacaagctcagattgctatcggtggcaaggataaggggcggctctttcaggggcagctcagcggactgtactacgacggcctgaaggtgctgaatatggccgctgaaaacaaccccaacattaagattaatggttccgtcagactggtgggagaagtgccaagcattttggggacaacccagacaaccagcatgccccctgagatgtccacgaccgtcatggagaccaccaccactatggccactaccacaaccagaaaaaataggagcactgctagcatccagcccacgagtgatgacttagttagttcagctgagtgctcttccgatgacgaggacttcgttgaatgtgaaccttctactgcaagaggagagctagtgatcccactgttagtggaggacccattggcaacacccccaattgccacccgggcgccatccatcacgctgcccccaacttttcggcctctgctcactatcattgaaactaccaaagattctttaagtatgacatcagaggcgggactgccctgcctgtccgatcagggctccgacggatgtgacgatgatggcctcgtgatatccggatacggctccggcgagacattcgattcaaatttacctccgaccgatgatgaagatttctacaccacgttttccctggtgactgataagtccctctccacttctatttttgagggaggatataaagcccacgccccgaagtgggagagcaaagattttagacctaataaagtgtctgagacctctaggacaactacgacctctctctcacctgaactcataaggtttaccgcatccagcagctcaggtatggtacccaagctgccggctggaaagatgaataacagggatctcaagccccagcccgacatcgtgttgcttcctcttccaactgcctacgagcttgacagcaccaagctgaaatcccccctcattacttctcctatgttccgaaacgtccccactgcaaacccaactgaacctgggatccgccgggtgccgggcgcttcagaggtgattcgtgagagctcctccacaacaggaatggtggtcggaatcgtggcagccgcggccctctgcatactgatccttctgtacgcgatgtataagtataggaacagggacgaagggtcctaccaagtggacgagaccaggaactatatctcaaactccgcccaatctaacggcaccctaatgaaagaaaaacagcagtccagcaagtcagggcataaaaaacagaagaacaaggatagagagtactatgtgtag

SEQ ID NO: 196908 - DNA, 4179 bp, synthetic construct
  misc_feature 1..4179: note = Description of Artificial Sequence: Synthetic coding sequence
  source 1..4179: mol_type = other DNA
atgagcagcaccctgcacagcgtgttcttcaccctgaaggtgagcatcctactcgggtcccttcttggcctctgcctcgggctggaattcatgggcctccccaaccagtgggcccgctatctccgatgggacgcctcgacccgctccgatctctcattccagttcaaaaccaacgtgagtactggcttgctgttgtaccttgatgacgggggggtgtgtgattttctgtgtctgagcctggtggacgggcgcgttcaactccgattttccatggattgtgccgagaccgcagtgctgagtaacaagcaggtgaatgatagcagctggcatttcttgatggtgagtcgagaccgcctgaggacggtattaatgcttgacggcgaaggccagtccggcgaactgcagccccagcggccttatatggacgtagtttcagacctgttcctcggcggcgtccctaccgatatccggccttctgccctgactctggacggggtgcaggcaatgccaggattcaaaggcctaattctggacctgaagtacggaaacagcgagccccggttactgggtagccggggcgtgcaaatggacgccgaaggcccctgcggtgagaggccttgtgagaatgggggcatctgtttccttcttgatggacatcccacgtgtgattgcagcacaactggatatggtggtaaattgtgcagtgaaggtcttagtcatttaatgatgtccgagcagggccgctggaaggcgagagaagagaacgtggccacttttcgcggtagtgaatacctttgttacgatcttagccaaaatcccatccagtcctcttcagatgagatcaccctctcgtttaaaacttggcagagaaatggccttattctccataccggaaagagcgctgattacgtaaacttagcactgaaagacggcgccgtctccttggttataaacctcggctccggggcttttgaagctatcgtggagccggttaacggaaagtttaatgacaacgcgtggcacgacgtcaaggtgaccaggaacctgcggcaggtaacaatctccgtggacggaattctgacaaccaccgggtatacccaggaagattataccatgctagggtctgacgattttttctacgtcggaggcagcccctctacggccgatttgccaggctctcctgtttccaataattttatgggttgcctgaaggaggttgtgtataagaataacgatatccgcctggagctgagccgactggctagaatcgccgacacgaaaatgaagatctacggagaggtggtcttcaaatgtgagaacgttgccacgcttgacccgattaacttcgaaactcctgaggcgtatatatcactccctaagtggaataccaaacgcatgggcagcatctccttcgacttccgtacaactgagcctaatgggctcatcctctttacccatggcaagccgcaggagcgaaaggacgcacgtagccagaagaacacgaaagttgacttctttgctgttgagttgttggatggaaatctttatctgttactagacatgggctctggtacgatcaaagtgaaggctacccaaaaaaaggctaatgatggagaatggtaccacgtggacatccagcgggatggcagatctggcactattagtgtaaactctagaaggactccttttactgccagtggggaatcggagattctggacctggagggtgacatgtatctagggggactacccgagaatcgggcaggcttgatactgcccaccgaactgtggacagctatgctgaattatgggtacgtcggatgcatccgagatctattcatcgacgggcgcagcaagaacataaggcagcttgctgagatgcagaacgcagccggtgtaaaaagcagctgcagtaggatgtccgctaaacagtgtgactcttacccctgtaagaacaacgctgtctgcaaagatggctggaaccgatttatctgtgattgcacgggtactggctattgggggagaacctgtgagcgcgaggcctccatactatcttacgacgggtccatgtatatgaaaatcatcatgccaatggtgatgcatacagaagccgaggacgtatcattcaggttcatgagccagcgcgcatacggtcttttggtcgcaactacctctcgcgacagtgccgacactctgagactggaactggacggaggcagagtcaaactgatggtaaacctgggcaagggccctgagaccctgtatgctggtcagaagttaaacgataatgaatggcataccgttagggttgttaggagaggcaaatccctgaaacttaccgtggacgacgatgtggctgagggcactatggtcggagatcacaccaggttggaatttcacaacattgagaccgggattatgactgaaaagagatatatttcggtggtaccaagcagctttatcggccatctgcagtctctgatgttcaatggactgctatacattgacttgtgtaaaaatggagacatagattactgtgagctgaaggctcgctttggcctgaggaatatcattgcagatcccgtgactttcaaaacaaagtcgtcctacctttccctcgcaacattgcaggcctacaccagcatgcaccttttttttcaattcaagacaacctcacctgatgggtttatcctgtttaattctggggatgggaatgactttattgccgtcgagctcgtgaaggggtacattcattacgtgtttgatttaggcaatggacctaatgttattaagggaaacagcgatcgacctttaaacgacaaccaatggcacaatgtggtaatcacgcgtgataacagtaacacacatagcttgaaagtggatacgaaagtagtgacccaagtgatcaatggagccaaaaacctggacttgaagggggatctgtatatggcaggattggcccagggaatgtactcaaatttacccaaacttgtggcatcccgcgatgggtttcaggggtgcctggcaagcgtggacttgaatggaagactgcccgatctcataaacgacgcccttcatcggtccggtcaaatagaacgaggttgcgagggcccctcaacaacttgtcaggaagactcctgtgctaatcagggtgtttgcatgcagcagtgggaggggtttacttgcgattgctctatgactagctattcaggcaaccagtgcaatgatcccggcgccacatacatttttgggaaatctggaggtctcatcttgtatacgtggcccgcgaacgatcgaccctccactcgatctgaccgcttggccgttggcttttccaccacagtcaaagacggaattcttgtaaggattgacagcgccccaggcctgggcgatttccttcagttgcacatagagcagggaaaaatcggcgtggtattcaatattgggactgtggacatctctatcaaagaagagaggactcccgtcaatgatggcaagtatcatgtagtaaggtttactcgcaacgggggcaatgccaccctgcaggtggacaattggccagttaatgagcattaccccactgggaataccgacaacgagagatttcagatggtcaaacagaagatcccattcaagtataaccggcccgtcgaagagtggcttcaggagaaaggccgacagttgacaatcttcaatactcaagcacaaatagctatcggtggaaaggacaaaggacgattattccaagggcaactgtccggactctactatgatggcctcaaagtccttaacatggccgcggaaaacaacccgaacatcaaaatcaatggctctgtgcgcctagtgggggaggttccttctatattgggaacaacacagaccaccagtatgcctccagagatgagcactacagtgatggagacgacgacaaccatggccaccactacgacccgaaaaaaccggtctaccgcaagcatccagcccacctcagacgacctagtttcttccgcggagtgttcctctgatgacgaggactttgtcgaatgtgagccatctacgggtcgatccgcccgttccagcaatgccgccagatccttgcgagccgctctaacctggacatggcggctcacgtacactttcactccaattatcttcatctcctgtgtggtgcactcttag

SEQ ID NO: 196909 - DNA, 3186 bp, synthetic construct
  misc_feature 1..3186: note = Description of Artificial Sequence: Synthetic coding sequence
  source 1..3186: mol_type = other DNA
atgctgggcagcgacgacttcttctacgtgggcggcagccccagcacggctgacctcccaggctctccagtgagtaacaacttcatgggctgcctgaaggaggtagtttacaaaaacaacgacatccgcctggaactctccaggctggcacgaatcgcagacaccaaaatgaaaatctacggggaggttgtgtttaagtgcgaaaacgtcgcgaccctggacccaatcaattttgagacgccagaagcatatatttcgcttcctaagtggaacaccaagcgcatgggcagcatttcatttgatttccggactaccgaacccaatggattaatactattcactcacgggaaaccccaggaaaggaaagacgcccgttcacagaaaaatacgaaggttgattttttcgctgtcgagctgctggatgggaatctatacctgttgctcgatatgggcagcggaactatcaaggtcaaggccactcagaagaaagcgaacgatggcgaatggtaccatgtggatatacagagggacgggcggtcagggacaatctccgtaaactccaggcgcactcccttcacagcctccggtgaatcggagatacttgacttagagggagatatgtacttaggaggtttacctgaaaaccgcgccggacttattcttcctactgagttgtggacagctatgctgaactacgggtatgtgggctgtattagagaccttttcatcgacggcaggagcaagaacattagacagctggccgagatgcagaacgctgccggggtgaagagcagttgttcacgtatgagcgccaaacagtgcgattcttatccatgcaagaacaatgccgtgtgtaaagatgggtggaaccgatttatatgcgattgcaccggtaccggatactggggaagaacttgtgagcgcgaggcaagcatcctgtcttacgatggctccatgtatatgaagatcatcatgcccatggtgatgcatacggaggccgaagatgtgtcgttccgtttcatgagtcaaagagcatatggcttgctcgtcgccacaacctctcgggattccgcagacaccctgcgcctggaactggacggcgggcgggtgaaactgatggtgaacctagactgtatccgaatcaactgtaacagttccaaaggtccggaaactttgtatgcaggccagaagcttaacgataacgaatggcacaccgtgagagttgtgcggcgtggcaagtcccttaaacttacggttgacgatgatgttgcggaaggaaccatggtgggtgaccacaccagacttgagttccataatatagagactggtattatgacagagaagagatatatatcagtggttcctagttccttcatcggtcacttacagtctctcatgtttaatggtctcctgtatattgacctctgtaagaacggcgacattgactactgtgaacttaaagcaaggtttggactgcgaaacatcatcgctgaccctgtgacgttcaagacaaagagcagctatctgagtttggccacattacaggcgtatacctctatgcacctcttcttccagttcaagactacttctcccgatggttttattctttttaattcaggggacgggaatgactttatcgcggtcgagttggttaagggatacatccactatgtgtttgacctcggtaatgggcctaatgtgattaaaggaaatagcgacaggcccctgaatgacaaccaatggcataatgtcgtgattaccagagacaactctaatacccactcgctgaaggttgacacaaaagtggtcacccaggtcataaatggagccaagaatcttgacctgaaaggcgacctatacatggcgggactggcacaaggcatgtactccaatctgccaaaactagttgctagtagggacggcttccaggggtgcctagcctctgtcgatcttaatggacggctgcccgacttaataaacgatgccctccatcgctctgggcagatcgagcgggggtgcgagggcccttccaccacttgccaggaagatagctgtgcaaatcagggcgtgtgtatgcagcagtgggagggcttcacatgtgactgcagcatgacttcatatagtgggaatcaatgtaatgatcccggggctacctacattttcgggaagagtggaggcctgatactctacacttggcccgccaatgatcgaccaagtaccaggtccgacaggctggctgtaggattctccacaacggtgaaagatggtattcttgtcaggatagatagtgcacccggtctgggcgatttcctccagctccacatcgagcagggtaaaattggagtcgtctttaatattggaacggttgacatctctattaaggaagagcggactcctgtgaacgatggaaaatatcacgtggtgagattcacacgcaatggaggcaatgccactcttcaggttgacaactggccagtcaatgagcactaccctaccgggcggcaactgacaatatttaatacacaggcccaaatagctatcggcggaaaagataagggcagactgttccagggccaactgagcgggctatattacgacggcctgaaggtactcaacatggcggctgagaacaatcccaatatcaagatcaacggctccgtacggctggtcggagaagtacccagcattctgggtaccacccagactacgagcatgccacctgagatgtctaccactgtgatggagactactaccacaatggctacaactactaccaggaagaaccggagcacagcctcaatccagcccactagcgacgacctcgtgagtagcgctgagtgttcttccgacgatgaggacttcgtcgagtgtgagccctcgactgcaaaccccaccgagccaggcataaggagggtgcccggggcaagcgaagtgattcgagagtcgtcttcaaccacaggcatggtcgtcggcatcgtcgcagccgctgccctgtgtatcctcatcctgctctatgccatgtacaaatataggaatcgggacgagggctcctatcaggtcgacgaaacccgtaattatatctccaattccgcacaaagcaatggcacactgatgaaagagaaacagcagtcctccaagtcgggccacaagaagcagaaaaataaggacagagaatactacgtctag

SEQ ID NO: 196910 - DNA, 1380 bp, synthetic construct
  misc_feature 1..1380: note = Description of Artificial Sequence: Synthetic coding sequence
  source 1..1380: mol_type = other DNA
atgcacctgcggatccacgcccggcggagccccccccggcggcccgcttggactctaggcatatggttcctgttctggggctgcatcgtgagctctgtctggtcaagctccaacgtggctagcagtagctctacgagctcatcacctggtagccacagccagcacgaacaccactttcacgggagcaagcatcactcggtccccatttccatttaccgatcccctgtctccctgcgaggggggcacgcgggggcgacttatatattcggtaagtccggagggttaatcctctatacttggccagctaatgaccgaccttctaccaggtcggatagactggcagtcggttttagcaccacagtcaaggatggaattcttgtgcggattgattctgcccccgggcttggcgactttctgcagctccacatcgagcagggcaagattggggttgtatttaacattgggacagtggacatcagtattaaggaggaaagaactcctgttaatgacggcaagtaccacgtcgtacgatttactcggaacggaggaaacgctaccttgcaagtcgacaattggccagttaatgaacactacccgacagggaacaccgacaacgaacggttccagatggttaagcagaagataccttttaagtacaaccggcccgttgaagagtggctgcaggaaaaagggcggcagcttacaatcttcaatacgcaggctcagatagcaataggtggtaaggacaaaggccgtctatttcagggccaacttagtggcctatactatgacggtctgaaggtattgaacatggcagccgagaataatcccaacatcaaaatcaacgggagcgtcaggctagtcggcgaggttcctagtatcctgggcacaacacagaccacatccatgcccccggaaatgtcaacaaccgtgatggagaccaccacgaccatggcaactactaccactcggaagaaccgcagcacagccagcatccagccgacctccgatgacctggtgagtagcgccgagtgctcctcggatgatgaggacttcgtcgaatgtgagccatccacagcaaacccgacagagcccgggattcggcgcgtgcctggtgctagcgaggtcattcgggaatccagcagcacaaccgggatggtggtgggcatcgttgctgcggctgctctgtgcatcctgattctgctatacgcaatgtacaagtaccggaacagggatgagggctcatatcaagttgacgaaacacgaaattatatcagcaattcagctcagtccaacggtaccctgatgaaggaaaaacagcaatccagcaagtctggacataagaagcaaaagaacaaagatcgcgaatactacgtttag

SEQ ID NO: 196911 - DNA, 3186 bp, synthetic construct
  misc_feature 1..3186: note = Description of Artificial Sequence: Synthetic coding sequence
  source 1..3186: mol_type = other DNA
atgctgggcagcgacgacttcttctacgtgggcggcagccccagcaccgctgatctcccggggtcaccagtgtcaaataattttatgggctgtctcaaggaggtcgtgtacaagaataacgacattcgcttagagttatcaagattggcgaggatcgctgataccaaaatgaagatatatggagaagttgtgtttaaatgtgagaatgtggctacccttgatcccattaatttcgaaacaccagaggcgtatattagtttgccaaaatggaacaccaagcgtatgggtagtattagcttcgatttccgcacgactgaacccaacggtctgatcctctttacacacggaaaaccccaggaacgtaaagatgctaggtctcaaaagaatacaaaggtggacttttttgccgtggagctcctggacggaaacctctatctgctgcttgatatgggctctggtaccattaaggtgaaggctacgcagaagaaggccaacgatggtgagtggtaccatgtggacatacagagggatgggcggtctggcactatcagtgttaacagccgacggacccccttcacagcctccggtgaatccgagatcctcgacctggagggggacatgtacctggggggcctgcccgagaacagagcgggtctgatccttcccaccgaactttggacggccatgctgaattacggatatgtgggctgtattagggatctattcatagacggaagatctaagaatatccgccagctggctgaaatgcagaacgctgcgggggtgaagagttcctgtagtcggatgagcgccaaacagtgtgattcttatccttgtaaaaataatgctgtttgtaaggacggctggaatcgattcatatgtgattgtaccggtacaggatactggggaaggacctgtgagcgcgaggcaagcatcctatcatacgatggttccatgtatatgaagatcataatgcccatggtaatgcacactgaagccgaggacgtgagctttagattcatgtcacagagagcatacgggctgctggtcgcgacaacttctagagacagcgcagacacattgcggcttgaacttgatggcggaagagtgaaacttatggtgaatctggactgtatccggataaactgcaatagttccaagggtccggagaccctatacgccggccagaagctcaatgacaatgagtggcacacagtcagggtggtcaggcgcggaaagtctcttaaacttaccgtggatgatgacgtggccgagggcacaatggtcggcgaccatacccggctcgaattccacaatatagagaccgggatcatgaccgaaaaaagatacatatccgtggtcccctcgtcatttatcggccatctccagagcctgatgttcaatgggctgttatacattgacctttgtaagaacggcgatatagactactgtgaacttaaagctagattcggcctgagaaacatcattgctgatcccgttactttcaaaaccaagtcctcatacctttccctggctacccttcaggcttatacttcaatgcacctcttttttcagttcaaaaccacctctcccgacgggtttattctcttcaattccggcgacggaaacgatttcattgccgtagagctggtgaaaggatacattcattacgtctttgatcttgggaacggcccgaacgtgatcaaggggaacagtgatcgtccactgaatgacaaccagtggcacaacgttgtgatcacccgcgacaacagcaacactcattcactgaaggtcgacacgaaggtcgtgacccaggtgataaatggcgcaaagaatctggatctgaaaggcgacctgtatatggctggcctcgcccagggaatgtattcaaatttacctaaactggtcgctagtcgggatggtttccagggatgcctggccagcgtcgatctcaatggacgtcttcctgacctcataaacgacgccttgcaccgatccgggcagatcgaacggggatgtgagggccctagcactacctgccaggaagacagctgtgcgaatcagggagtgtgtatgcagcagtgggagggatttacctgcgattgctccatgacatcatacagcgggaatcagtgtaacgaccctggtgcaacctatatattcggaaagagcggcgggctaattctttacacgtggccggcaaacgaccggcctagcacgcggagtgacagattggccgtcgggtttagtacgaccgttaaagacggaatcttggtgcgcatcgatagcgctcccggtctaggggactttctccagcttcatattgagcaaggaaagatcggagtggtattcaatatcgggaccgtggatatttccataaaagaagagaggacccccgtgaatgatggcaagtatcacgtggtgcggttcactcgaaacggaggcaacgccacactgcaggtggacaattggcccgttaatgaacattatcccacagggcgccagcttactattttcaatacacaggcccagattgctatcggcggcaaggataagggaagactgtttcagggccagctatcaggcctgtactacgatgggctgaaagtgctgaatatggcggctgagaataaccccaacattaaaatcaacggttcagtcaggctagttggcgaggtcccgtcaatcctgggtacaacacagaccacctcgatgccgcccgaaatgtctactaccgtgatggaaaccacgacaaccatggccaccaccaccacacggaagaataggtccactgctagtatccagccaacctccgatgatcttgtgtctagcgcagaatgttcctcggacgacgaagacttcgtggagtgtgaaccaagcacagcaaaccccaccgaacccgggattaggagagtcccaggcgcttctgaagttatcagagagtcatcctccacgactggtatggtggtcggaatcgtggccgcagccgcactctgtatcttgattctgctttatgccatgtataaataccgtaacagggatgagggatcttatcaggtggatgagacacgtaattatataagcaactcagctcagagtaatggcacgttgatgaaggaaaaacagcagtcgtcaaagtccggacataagaaacagaagaacaaagatcgggagtactatgtgtag

SEQ ID NO: 196912 - DNA, 1914 bp, synthetic construct
  misc_feature 1..1914: note = Description of Artificial Sequence: Synthetic coding sequence
  source 1..1914: mol_type = other DNA
atgcacctgcggatccacgcccggcggagccccccccggcggcccgcgtggacgctcggcatctggttccttttctggggctgcatagtaagttctgtttggagtagcagtaatgtggcgtcatcaagcagcacatcatctagtcctgggtctcactcccagcatgagcatcactttcacggctccaagcatcacagcgtacctatctcaatttacaggtcacccgtctcactacggggagggcatgctggcgcaacatatatcttcgggaaaagcggaggtttgatcttgtacacttggccagcaaatgatcgccctagtacccgcagcgataggctagccgtgggattctccacgactgtgaaggatggtatcttggtaagaatagacagtgcccccgggctgggcgattttttgcagctccacatcgaacagggcaaaataggcgtggtatttaacatcggcacagtcgatatcagcatcaaagaagaacggacacccgtgaatgatggaaagtaccacgttgtgcggtttactcgtaacggggggaacgccacattacaggttgacaattggcccgttaacgaacactacccaacgggtaggcagcttaccatcttcaacacacaggcccaaatagctatcggcggaaaagacaaaggaaggctcttccaaggacagctgtccggtctctactacgacggactcaaagtattgaacatggcagccgagaacaatccaaatatcaagatcaacggctctgtgcggctggtgggagaggtcccctccattctaggtaccacccagactacatccatgccacctgaaatgtcgacaacggtgatggagacaactaccacaatggctacaacgacaacacgcaaaaaccggtccaccgcatctatccagcctactagcgatgatctggtgagctctgctgaatgcagttctgacgacgaagactttgtcgagtgcgaaccttccactggaggcgaattggttattcccttgctggtcgaagatccgctggcaaccccaccaatcgcaactagagccccttcaatcactctgcccccaactttcaggcccctcctcactataatagagaccacaaaagacagcctcagcatgacatccgaggctgggctgccatgcctaagtgaccaaggtagcgatggctgtgatgacgacgggcttgttatctctgggtatgggagcggggagacctttgactcaaatttaccacctacagatgacgaggacttctacacgacattcagcttggtgacggataaatcactgtcaactagcatttttgaggggggctataaagcccatgcaccaaagtgggagagcaaggactttcgtcccaacaaagtgtccgagacaagcagaactacaaccacaagcctatcacccgagctgatccgcttcacagcctcctctagctcagggatggtcccaaaactacctgcaggtaaaatgaataatcgtgatctcaagcctcaacccgacatagttctgttgcccctgccaacagcctacgagctggattccacaaaactcaaaagcccgctgattaccagtcctatgttccggaacgtccctactgcgaaccctaccgagcctgggatccggagagtcccaggtgcctcggaggtgataagagagagcagctccaccactggaatggtggttggcattgtggccgctgcagctctgtgtatacttatactcctgtacgccatgtacaagtaccgcaaccgtgatgaaggctcttaccaggtagacgagacccgcaactatattagtaactcagctcagagcaatggtaccctgatgaaagagaaacagcagagctcaaaaagcggacataaaaaacagaaaaataaagaccgagaatattatgtgtag

SEQ ID NO: 196913 - DNA, 429 bp, synthetic construct
  misc_feature 1..429: note = Description of Artificial Sequence: Synthetic coding sequence
  source 1..429: mol_type = other DNA
atgggcctgaagctgaacggccggtacatcagcctgatcctggccgtacagatagcttacctcgtgcaggcggtgcgagctgcaggcaagtgtgatgctgtgtttaaggggttttccgactgcctcctgaaactgggagacagtatggccaactatcctcaagggctggatgacaaaactaacattaagacagtatgcacgtactgggaagattttcactcctgcaccgtcacagcccttaccgattgccaggagggcgcaaaagacatgtgggataagctgcggaaggaaagcaaaaatttgaacatccaaggcagcctgttcgagctctgcggcagcggcaacggagcggcgggatcactccttccagctttcccagtcctcctggtaagtctttccgccgcgctcgcaacgtggctgtccttctag

SEQ ID NO: 196914 - DNA, 8841 bp, synthetic construct
  misc_feature 1..8841: note = Description of Artificial Sequence: Synthetic coding sequence
  source 1..8841: mol_type = other DNA
atggccagcgagaagcccggccccggccccggcctggagccccagcccgtaggcctaatcgcagtgggagcggccgggggcggaggggggggttccgggggcggcggcacaggaggctccggtatgggagagctccgcggggccagtggatctggatcagtgatgttgccagccgggatgattaacccctcggtgccaatacgtaatatccgaatgaaatttgccgttttaattgggcttattcaggttggggaggtgtcaaatcgggatatcgtggaaactgttttaaatttgctggtgggaggtgagtttgatctggagatgaacttcatcattcaggacgctgaaagcattacttgcatgaccgaactgttagaacactgcgacgtcacatgccaggcagagatctggtcaatgtttaccgccatcctccggaaaagcgtacgcaatctgcagactagcacagaggttgggttgatcgagcaggtcctgctgaagatgtctgcagtggacgatatgattgccgacctgctggttgatatgcttggagttcttgcatcctactccatcacagtgaaggagctcaagctcctattttccatgctgcgcggagaatcgggaatatggcctcgtcatgcagtcaagctgctatctgtcctcaaccagatgccccagagacacggcccagacactttcttcaactttcccggttgtagtgccgcggctattgccctccctcccattgctaaatggccctaccagaacggttttaccctgaatacatggtttcggatggacccgttaaacaacattaacgttgacaaggacaaaccctatctgtattgttttaggaccagtaaaggtgtggggtacagcgcccactttgtagggaactgtctgatcgttacctcacttaaatccaagggcaaaggctttcaacactgcgtgaagtacgattttcagcccagaaaatggtacatgatttccatcgtgcatatttataaccggtggcggaattcagagattaggtgctacgtcaacggtcagcttgtgagttatggtgatatggcctggcatgtgaacacaaatgatagttacgacaaatgttttctggggagcagtgagacggccgatgccaatcgagtgttttgcggtcagctgggcgcagtttacgttttttcggaggcgctgaatcccgctcagatttttgccatccatcagctggggcctggatataagtccacgttcaaattcaagtcagaatccgacattcatcttgcggagcaccataagcaggtgttatatgacggaaaattggcttcctctattgcattcacatacaacgccaaggctacggacgctcagctgtgtctggagagcagccctaaagaaaacgcctcaatctttgtgcactccccccatgccttgatgctgcaggacgttaaggccatcgtaacccattccatccacagtgctatccattccattggcgggatacaggtactttttcctctgttcgctcagctggacaatcgccaactgaatgacagccaagtagaaactaccgtctgtgccaccctactggcctttttagtcgagttgctgaaatcttccgtggctatgcaagaacagatgttaggcggcaaaggttttctggtgattgggtacctactagagaagtcctctagagtccacataacgagagctgtgttggagcaattcctttcattcgccaaatatctggacgggctgagccacggggcacccttactaaaacagctatgcgaccacatcttatttaatccagcaatctggattcacacacctgccaaggtgcaattatcgctatacacctacttgagcgcggaatttatcgggacggccactatctacaccactatacgtcgggtcggtaccgtactgcaactgatgcacactttgaaatattattactgggtaatcaacccagcggatagcagtggcattactcctaaaggattggacggccctaggccatctcagaaggaaatcatctctctgcgcgcttttatgttgctgtttctcaaacagcttatactgaaggacaggggcgtgaaagaagacgaattgcagtccatcctgaactacctgttaacaatgcacgaagacgaaaacatacacgatgttctccagctcctggttgctttgatgtctgaacatcctgcatctatgattccggcattcgaccagcgaaacggcataagagttatctataaactgctcgcgagtaaatctgagtccatttgggtccaagcactgaaggtacttgggtactttttaaagcatttgggccataagcgcaaagtggaaattatgcatacacactcccttttcacactcttgggtgagcgcctgatgctgcatacaaacactgtgactgtgacaacctacaatactctctacgagatattaacagaacaggtatgcacccaggtggtgcacaaacctcatcccgaacccgacagcaccgtcaagattcaaaacccaatgatcctgaaagtggtcgccaccctgctaaaaaattcaacgcccagcgcggagctcatggaggtcagaagattattcttgtccgacatgatcaaattattcagcaactcacgcgaaaaccgaagatgcctgcttcagtgcagtgtgtggcaggactggatgttttcactggggtacattaaccctaagaactctgaagaacaaaaaatcacagaaatggtgtataatatctttcggattctcctctaccacgctatcaagtacgaatggggagggtggagagtttgggtcgacacattgtcaatcgcacactcaaaggtcacgtacgaggcgcataaagagtatctggccaagatgtatgaggagtaccagcggcaagaggaggagaacattaaaaagggcaagaaagggaacgtttccacaataagcggcctgtctagtcagacaactggagcgaaggggggaatggagataagggaaatagaagatctcagtcagtcacagtctcccgagtctgagacagattatcccgtgtccacagataccagggacttactgatgtctaccaaggttagcgacgatattctgggcaatagtgacaggccaggaagcggcgtccatgtagaagtgcacgaccttctggttgacatcaaagcagagaaggtagaagcaacagaggtgaagctcgacgacatggacctgtctcctgagacactagttggcggtgagaatggcgcactcgtcgaggtggagagcttgctggataacgtctatagcgccgccgttgaaaagctccagaacaatgtacacggctccgttgggatcattaaaaagaacgaagagaaggacaacgggcccctcatcactctggcagatgaaaaggaagatttacccaattcgtccaccagctttctgttcgataaaattcccaaacaggaggagaagctcctccctgagctaagctccaatcacatcattcccaatatccaagatacccaggttcatctgggcgtgtccgatgatctgggactgctggcccatatgactggctcggttgacctgacctgcacctcaagcattatcgaagaaaaggaattcaaaattcacaccacgagtgacggaatgagcagcatctcagagagagacctggcatcctccacgaagggactagaatacgcagagatgaccgccacaaccctagagaccgaatcctcaagctccaagattgtcccaaacatcgatgctgggagcatcatttcggacactgaacgctccgacgacggtaaggagtccggaaaagaaatccgaaaaatccagaccaccacaactacgcaggcagtccaaggaaggtccattacccagcaggacagagacctccgggttgatcttggatttagagggatgccgatgaccgaagagcagcgacgacagttctcgcccggcccacggacgacgatgtttagaatccccgaattcaaatggtcccccatgcaccaacgtctgctcacggatctgcttttcgcactggagacagacgtgcacgtttggcgtagtcacagcaccaagtccgtgatggatttcgttaactctaacgagaacatcatattcgtgcataacactatccacctcatctcccagatggttgacaatataatcatcgcctgcggcggcatcctcccccttctttcagctgcaaccagtcctaccgtctcgaagaccgagttggaaaacattgaggtgacccagggtatgtctgctgagaccgccgttacctttctgtcccgactcatggccatggtggatgtgctggtgtttgctagttcgttgaatttctcggagatcgaggccgagaaaaacatgtcttccggtggcttaatgcggcaatgtctgcgacttgtgtgctgtgtggctgtaaggaattgtctggagtgccggcagaggcaacgcgaccgaggcaataaaagctcacacggcagcagcaaaccacaggaagtgcctcagtccgtgaccgcaaccgctgccagcaaaacaccactggagaatgtgcccggaaatctgagtccaattaaggaccctgaccggctacttcaggacgtagatattaaccgtctgagggcggtggtgttccgagatgtcgacgactcgaaacaggcccagtttctggcccttgcagtggtctattttatcagtgttctgatggtatccaagtaccgggatattttagaaccgcaaagggagaccactaggactggttctcagcctgggaggaacatcaggcaggaaattaatagccccacgagtactgttgtggtcattccctctattcctcatccgtcgcttaaccatgggtttctggcaaagctaattccagagcagagcttcgggcactctttctacaaagagacaccagctgctttccctgatactattaaagagaaggagactccgacgccgggagaagatatccaggtggaatccagtatcccacacacagactcaggaattggtgaagaacaagtagcctctatcctgaacggtgcagaattggagacaagcaccgggcctgatgccatgagcgaactactgtctactctgagcagtgaggtgaagaaaagccaggaaagtctgacggagaatccttcagagacgcttaaacctgctaccagcatcagttccatcagccagaccaaaggcatcaacgttaaggagatcttaaaatcgcttgtagctgcgcccgtagagatcgctgaatgtgggccggagccaataccctatccagaccccgccctgaagcgtgaaacacaagccatcctccccatgcagttccattcttttgatcggtctgttgtggtccctgtgaaaaagccccctccgggctccctggcagtgacaactgtgggggcgaccactgcaggatcaggattgcccaccggtagcacatctaacatcttcgcagctacgggggccaccccgaagtccatgattaacaccacaggagccgtggatagtggatcctcctcttcctcctcctccagtagctttgtcaatggagctacatcaaagaatttaccagcggtgcagacggtcgcgcccatgccagaggactctgctgaaaacatgtccattacagctaaactggagcgagctctcgaaaaggttgcacctttgttaagagagattttcgtcgatttcgcccctttcttgtcccggacactgctgggctctcacggccaagagctcctgatcgaaggcctcgtttgcatgaaaagttccaccagcgttgtggagttagtaatgttactgtgcagtcaagagtggcaaaactcaattcagaagaatgcggggctggcgtttatcgagttgataaatgaaggacggctcctctgtcacgccatgaaggaccatatcgttcgggtcgcgaatgaggccgaattcatcctaaatcggcagcgggccgaggacgtgcataagcatgccgaattcgaatctcagtgtgcgcagtatgccgccgataggagggaagaagagaagatgtgcgatcatctgatttcagcggctaaacaccgcgaccatgtcacagcgaatcaattaaaacaaaaaatcctcaatattctcacaaacaaacacggagcatggggcgctgtcagtcacagccagctccacgatttctggcgtttggattattgggaggacgatctcagaaggcgacggaggtttgtgcggaatgcatttggaagtacacatgcagaagccctgttgaaagctgctattgagtatggtaccgaggaagacgttgtcaaatctaaaaaaacgttccggtcacaggccattgtgaaccagaatgccgagacagaattaatgctagagggcgatgatgacgcagtgagtctgctacaggagaaggaaatcgataacctggccggaccagtcgtgctgtccactccggcacagctcatagctcccgtggtagtcgccaaaggaacactgagcattaccacaaccgagatttatttcgaggtggacgaggacgacagcgccttcaagaaaattgataccaaagtgttagcctataccgaaggactacacggaaaatggatgttcagtgagattcgagccgtttttagccggcgctatctgcttcagaatacggcactcgaggtctttatggctaaccgcacatctgtgatgttcaattttcctgatcaggccaccgtgaaaaaagtcgtttattcgttgcctcgcgtgggggtgggcactagctacgggttaccccaggccagacggatctctctagccacacctaggcaactttataagtcctctaacatgacacagcggtggcaaagacgggagatctcaaacttcgaatacctgatgtttctgaatactatcgctggccggacctacaatgacctgaaccaataccctgtgttcccatgggtgctgaccaattacgaatcagaggagctggatcttactctgccagggaacttccgcgacctctctaagcctatcggtgcactaaatccaaagagggccgtcttctacgctgaacgatacgaaacctgggaagatgatcagtcccccccatatcactacaacacccattacagtactgctacttcaaccctttcctggttagttcgcatcgagcctttcactacattttttttgaacgcaaatgacggaaaatttgaccatccagataggacattctctagtgtggccagatcttggcgcacatcccagcgggacacgagcgatgtaaaggaattgattccggaattttattatcttcccgaaatgttcgtcaactcaaatggctacaatttgggcgtgcgggaggacgaggtcgtggttaatgacgtggacctgcccccatgggcaaagaagccagaggattttgttagaatcaataggatggccctggaatctgagtttgtgtcctgtcagttgcatcaatggattgacctcatcttcgggtacaagcagagaggccccgaagctgtgcgagcgctgaatgtcttccactatctgacctatgagggcagcgttaacctggattctatcaccgatcccgtgctgcgagaggccatggaggctcagatccaaaattttgggcaaacgcccagtcagcttttgatcgaaccgcacccacctagatcctcggcaatgcacctgtgctttcttcctcagtctcccctcatgttcaaggaccagatgcagcaggatgttattatggttcttaagttcccctccaactctcccgtaacacacgtggcagccaatacgttaccacatctcacaattccagctgtagtgactgtgacttgttctagactgtttgcagtgaataggtggcacaacacggtggggctcagaggagctcctggttacagtctcgatcaggcccaccatttgccgatagaaatggaccccttaatcgccaacaatagcggtgtgaacaagcggcagattaccgaccttgtcgaccaaagtatccaaatcaatgcccactgcttcgtggtgacagccgacaatcgatatatcttgatctgcggtttttgggataaatccttccgggtgtacagtacagagaccggtaaactaacccagattgtgttcggccattgggacgtggtaacctgcctcgctcgatccgaatcgtacattggcggagactgttacatcgtgtctggcagccgggatgccactctccttctgtggtattggagcgggaggcaccacatcattggagataatcctaatagttccgactacccagcgccaagggccgttcttacgggacatgaccatgaggtagtgtgtgtgtctgtatgtgctgagctgggcctcgtgatttccggggccaaagagggaccgtgtttggtgcatacgattaccggagatctgctgagggccctcgaggggcctgagaattgtcttttcccccgtctcatttcagtgtcttcggaggggcactgtattatctattacgagagggggcggttctcaaatttttcgattaacggcaagctgctggcacagatggagatcaacgatagcacccgcgcaattctgcttagctccgacggacagaaccttgtgactgggggggataacggagttgtcgaggtgtggcaagcgtgcgattttaaacagctttacatctaccctggatgcgacgccggtattagagcgatggacctcagccacgatcaaagaactttgattaccggaatggcttccggctcaattgtggctttcaacatagacttcaaccggtggcactacgaacaccaaaaccgctattag

SEQ ID NO: 196915 - DNA, 1575 bp, synthetic construct
  misc_feature 1..1575: note = Description of Artificial Sequence: Synthetic coding sequence
  source 1..1575: mol_type = other DNA
atgttcgtgaacagcaacggctacaacctgggcgtgcgggaggacgaggtcgtggtcaacgacgtggacctgcctccctgggcaaagaagccagaggactttgtgaggattaaccgaatggcactagagtccgagtttgtgagctgtcagctgcatcagtggatcgatctgattttcgggtataagcagcgcggccctgaggccgtccgtgccctgaacgtcttccactatctgacgtacgaaggtagtgtcaatctggacagcattacagatcccgtcctccgggagatccccgaagcttacttcatccgagatccccatacatttttgctcacaaaggatttcataaaggccatggaagcacagatacagaacttcgggcagactccaagccaacttctaatcgaaccacaccccccaagaagttcagcaatgcatttgtgtttcttgcctcagagtcctttaatgttcaaggaccaaatgcagcaggacgtcatcatggtacttaaattccccagtaattccccagttacacacgtggctgccaataccctgccccatctgacaattcccgctgtggtaaccgtaacatgttcaaggctctttgcagtaaatagatggcacaataccgtgggactgcgcggagctcctggatattccctcgatcaagcgcaccatcttcctatcgaaatggatcccctgattgcaaataattccggtgtcaacaagcgccagatcacggatctcgtggaccagtccattcagatcaatgcccattgcttcgtggtgaccgccgacaaccgctacattctcatctgcgggttctgggacaagtcctttcgcgtgtactctaccgaaacaggcaaactcacgcagattgtatttggccactgggatgtggtgacatgcctggccaggtctgagtcgtacatagggggcgattgttatattgtgagcggaagccgagatgccaccctgctcctctggtactggtcaggccggcaccacattatcggagataaccccaattcatcagactatcctgcgccacgcgccgtgctgactggacacgaccacgaggtcgtgtgcgtttcagtctgcgccgagctgggcctggtcatctcaggcgcgaaggagggtccgtgtctggtccacacaattaccggggacctgcttcgggcactcgagggtcctgaaaactgcctgttccctcgtctgatttctgtgtcgtccgaagggcattgtatcatttactatgaacggggacgcttctcaaatttctctataaatggcaaactgttagcacagatggaaatcaacgacagcacacgcgcaattttgctgtcatcagatggacagaacctcgtcaccggcggcgacaatggagtggtcgaggtgtggcaagcgtgcgacttcaagcagctttacatatatcccgggtgcgacgccggaattcgggcgatggacctctctcacgatcagcgcacgttaataaccgggatggccagcgggtcaattgtcgccttcaatatcgactttaaccgatggcattacgaacaccagaaccgatattag

SEQ ID NO: 196916 - DNA, 8832 bp, synthetic construct
  misc_feature 1..8832: note = Description of Artificial Sequence: Synthetic coding sequence
  source 1..8832: mol_type = other DNA
atggccagcgagaagcccggccccggccccggcctggagccccagcccgttggacttattgctgtaggggctgccggaggcgggggcggcggaagtggtgggggcggcaccggcggctccggcatgggggaactccgcggagcgtcaggatccgggagtgttatgctgcccgcaggtatgattaacccctctgtgccgatcaggaacataaggatgaagtttgctgtccttataggattgatccaggtcggcgaggtgagcaatagggacatcgttgaaactgtgctaaacctgctggtaggcggagaattcgacttagaaatgaattttatcatccaagacgccgaaagcatcacctgcatgacggagttacttgagcactgcgatgtcacttgtcaagcggaaatttggagtatgttcacagccattctgaggaagtccgttagaaatttgcagacctctactgaagtggggttaattgagcaggtgctgcttaagatgtctgctgtggatgatatgatcgcagacctcctcgtggatatgttgggggttcttgcaagctatagtatcactgtgaaagagctcaagctcctcttcagtatgcttcggggcgagagcggtatctggccaaggcatgctgtaaagttactttccgtcctgaatcaaatgccacaacggcatggcccagacacattttttaacttcccaggctgcagtgcggccgctattgccctgcctccaatcgcaaagtggccttatcagaacggattcactctgaatacatggttcaggatggacccactgaataatattaacgtggacaaggataaaccatacctctattgctttaggacaagtaagggtgtcggttacagtgcacatttcgtcggtaactgtctgattgtgactagccttaagagcaagggcaaggggttccaacactgtgtgaagtacgactttcagcctagaaagtggtacatgatctcaatagtccatatttataaccgatggagaaactcggagattcggtgttacgttaatgggcagctggtctcttacggagatatggcctggcacgttaacactaacgactcctatgataagtgctttctgggttcatccgagacagctgatgcaaaccgggtcttctgcgggcaacttggggccgtctatgttttttctgaagccctgaatccagcacagatcttcgcaatacaccagctcggaccgggatataaaagcacctttaaattcaagagcgaaagtgatatccatctggctgaacatcataaacaggtgctgtatgacggaaaactcgcttccagcatagccttcacatacaacgctaaagccaccgatgcccaactatgtctggaaagctcgcctaaggaaaacgcttctattttcgtgcatagtccgcacgccctgatgctccaagacgttaaagccattgtgactcatagcattcattccgccatccacagcatcggcggaatccaagttcttttccctttattcgcccagttggataatcggcaactgaacgatagtcaggttgaaaccacagtttgtgccaccctattggcattcttggtggagctcctcaagagcagcgtcgcaatgcaggaacagatgctgggcggaaaaggattcctggtgatagggtatctcttggaaaagagctccagagtccatattactagagcggtgctggaacagttcctttctttcgctaaatacctcgacggtctgtctcatggggcacctttactgaaacagttgtgcgatcacattctgttcaaccctgctatttggatccacacaccagctaaagtccagctgtcattatacacgtacctgtcagccgagtttattggcacagctaccatatataccaccatcagacgtgtgggaacagtactccaactgatgcacacactgaagtactactattgggtcattaatccagctgattcaagtgggattacccccaaaggactggatggtccacggcccagtcagaaagagatcatcagtctcagagcattcatgcttcttttcctgaaacagctgattctcaaagacagaggcgttaaggaagatgagctgcagagcatcttgaactatttgctgactatgcatgaggacgagaacatccacgacgttctgcagctactcgtggcactgatgtcagaacatccagctagtatgattcctgcattcgatcagcgcaatggcattagggttatctataagcttctggccagcaaatccgagtcgatctgggtccaggcgctgaaggtcctgggatatttccttaaacacctggggcacaagcgtaaagtcgagattatgcacacacactcactgttcactctcctgggtgagcggctgatgctgcacaccaacactgtcacagtcaccacatataatactctgtacgaaatcctgactgagcaggtgtgtacccaggtcgtccataagccccaccccgagcctgattcaacagtgaaaatccagaacccaatgattttgaaagtggtcgctaccctactaaagaattccacaccctcggccgaactgatggaggttagaaggttgttcctgagtgatatgatcaaacttttttctaatagcagggaaaaccgaagatgtctgctgcagtgttccgtgtggcaggattggatgttctccctgggctacattaatccaaaaaatagtgaagaacagaaaattaccgaaatggtgtacaacatctttcggatccttctgtaccatgcaatcaagtatgaatggggagggtggcgcgtttgggtcgataccctttccatcgctcattctaaggttacttatgaagcccataaagaatacttggctaagatgtacgaagaataccagaggcaggaagaggagaacataaaaaaggggaagaaagggaacgtgagtacaatctctggcctgagttctcaaacaaccggggcgaagggtggtatggaaattagggagatcgaagacctctctcagagccagtcacccgagagcgagacggactacccagtgtctaccgacactagggatctcctgatgagcacgaaggtctcggacgacattctgggaaactcggatcgtcccggctctggcgttcatgtagaggttcatgacttgctagtcgacattaaggcggagaaggtagaagccactgaagtaaaactagatgacatggacctgtctccagaaaccctggtgggaggggaaaatggcgccttggtagaagtcgaatcgctcctggacaacgtttacagcgctgcggtcgaaaagctgcagaacaacgtacatggcagtgtaggcatcatcaagaagaatgaggagaaagacaatgggccgttaattaccttagctgacgagaaggaggatctgccaaactcgtccacatccttcctgttcgacaagatccccaagcaggaagagaagttgctgccagagcttagttctaaccacatcattcctaatatacaagatacccaggttcacctgggagtgtctgacgaccttggcctgttagctcatatgactggcagtgttgatctgacctgtacttcgagcatcattgaagagaaagagttcaaaatacacacaaccagcgacggtatgagctctatttcagaacgggaccttgcctcctccacaaaaggtctggagtacgcagagatgactgcaaccaccctcgaaacagagagctcatcaagcaaaattgtccccaacatcgatgctggatcgatcatctccgacaccgaacgttcagacgatggaaaggaatccggcaaggagattagaaagattcagacaactactacaacccaggccgtgcaaggaaggagtatcacccaacaggacagggatcttcgagtggaccttggcttcagggggatgcctatgacagaggaacaaagaaggcaattttctccaggtccgcggactaccatgtttcgaatcccagagtttaagtggtcgcccatgcatcagaggttgcttactgatctactgtttgccctggaaactgacgtgcacgtatggaggagccattcgactaaatcagtgatggatttcgtcaattctaacgagaatattatcttcgtgcacaataccatacacttgattagtcaaatggttgataatataattatcgcctgcggaggtatcctgcctctcctgtccgcagcaaccagcccgactacagagcttgagaatattgaggtgacccagggcatgtctgcagaaactgcagtcacgttcctttccaggctgatggctatggtcgatgtgctggtatttgcatcttccctgaatttttccgaaatcgaggccgagaaaaatatgtcttccggggggttgatgagacagtgtctacgcctcgtgtgttgtgttgccgtaaggaattgtttggaatgtcgccagcgacagagagaccggggcaataaaagctcccatggcagctccaagccacaggaggtgcctcaatcagtgacagcaacggcagcctcaaagacacccctggagaatgtacctggaaatctttcccctattaaggaccccgatagactattgcaggatgttgacatcaatagactgcgcgctgtcgtgtttagggatgttgacgatagtaaacaggcacagttcctagccttggctgtggtctatttcatttcagtactcatggtctcgaaatacagggatattcttgagccacagagggagacgacgaggacagggtcccagcctggccgtaatattcgccaggaaattaactccccaacctcgacggttgtggtgatcccctctatcccacatccaagtctgaatcacggcttcctagcaaagctcattcctgaacagtcctttgggcacagcttttacaaagagacacccgctgcgtttccagacacaattaaagagaaagagacacccacacctggagaagatattcaagtcgaatcttcaattcctcacactgattctgggattggggaggaacaggtcgcttccatcttgaacggagcggagcttgagacttctacggggcccgatgccatgtctgagttgctgtccacattgtcctctgaagtcaaaaaaagtcaggagagcctcaccgagaacccctccgagacgctcaagccagcgacttctatctcctcaattagccagaccaaaggcatcaacgtgaaagagattctgaagagtctcgtggcagccccagtggagatcgccgaatgtggaccggagcctatcccttatccggaccctgctctcaagagggagacccaggcaattctgcctatgcagtttcatagcttcgaccggagcgtggtcgtgccagtcaagaagccaccgcccgggagcctggcagtgaccaccgtgggcgcaacaacggcgggttcagggttgccaaccggctccacttccaatatcttcgctgctactggtgcaactcccaagagtatgatcaatacgacaggagcagttgactcaggcagcagcagctcctcttcttcgtctagctttgtaaacggtgcaacttctaagaacctacccgcggtgcaaacggtggcaccaatgcctgaggacagtgcagagaatatgagcattactgcaaagctcgagcgtgcgctggaaaaagttgcccctcttctccgcgaaatcttcgtggactttgccccattcctctcaagaacacttctagggagtcacgggcaggagctcctgattgaagggcttgtatgtatgaagtcctctacttcagtggtagagctggttatgcttttgtgttctcaagagtggcagaattctattcaaaaaaacgctgggcttgcatttatagagctcatcaatgaaggtcggctgctgtgtcacgccatgaaagatcacattgtgcgcgtggccaatgaggctgagttcatccttaatcggcagagggccgaagacgtgcacaagcatgccgagtttgaaagtcagtgcgcgcagtacgcggcagatcgtagggaggaggagaagatgtgtgaccatttgattagcgctgccaaacaccgggatcacgtgacagccaaccagctcaagcagaagattctcaatatcttgacaaataagcacggagcatggggggccgtgtcccactcccagttgcacgatttttggaggctcgattactgggaggacgatctcaggcgaagaagacgcttcgtccggaacgcatttggttccacccacgccgaggcacttcttaaggccgcaattgaatatgggactgaggaggacgtggttaaatccaagaaaacatttcggtcccaggctatagtgaaccagaacgctgaaacagaactgatgctggagggagatgatgatgccgtcagcctcctgcaggagaaggaaatagataatctcgctggtccagtggtgttaagcacacccgcgcaattgatcgcccccgtagtcgtagcaaagggaactttgtcaattaccaccactgagatctacttcgaggttgacgaggacgattcagcttttaaaaaaattgacacgaaggttctcgcctacaccgagggactgcacgggaagtggatgttttctgagatcagagcagttttttctagacgatatttgctgcagaataccgcccttgaggtcttcatggctaatcggaccagtgtgatgttcaatttcccagaccaagcaaccgtaaagaaggtagtgtacagcttgccaagggtcggagtgggaacatcttacggcctgccccaggctagaaggatctctcttgcaaccccgaggcaactctacaaaagctccaatatgacccagcggtggcagcgaagggaaatctccaattttgagtatttgatgttcctgaatacaatcgccggtaggacatataatgacttaaaccaatatcctgtcttcccatgggtcctcaccaattacgagagcgaggagctggatctgactcttccaggaaacttccgagacctgtcgaaacctattggggctctcaaccctaaacgagcagtgttctatgccgaaagatatgagacctgggaagatgaccagtcacccccatatcactataatactcactattcaacagcaacctccaccctgtcgtggctcgtacgaatcgaaccttttacaaccttctttctgaatgcaaatgatggaaagttcgaccacccagaccggacttttagctcagttgctagatcttggcgcacatcccagagagacacatccgacgtcaaggagctgatccccgagttttattaccttccagagatgttcgtgaactccaacggctataatctgggagttagggaggacgaggttgtagttaacgacgtagacctgcctccttgggccaagaaaccagaagatttcgtgagaattaaccggatggccctggagtccgagtttgttagctgtcagctgcatcagtggatcgaccttattttcggctacaagcagaggggacccgaggctgtgcgagcactcaatgtcttccattatctgacatacgagggtagtgtcaatctggacagtatcacagatcccgtcctgcgcgaggccatggaggctcagatacagaactttggacagactccctctcagctgctgatcgagcctcatccaccacgctcctcagccatgcacctatgtttccttccccaaagcccactgatgttcaaggaccagatgcaacaagacgtaatcatggttctcaaattcccctcaaattcaccagtgacgcacgtggcggccaacacacttccacacctcaccatacctgccgtcgtgaccgtgacttgtagcaggttatttgctgttaaccgttggcacaatacagtgggtctcagaggcgctcctgggtactctctcgatcaggcacaccacctgcctatagaaatggaccccctaatcgcaaataattctggagttaacaaacggcagatcacggatttggtggatcagtccatccagattaacgcacactgcttcgtggtaactgctgacaaccgctatatactgatttgtggattctgggataagtcatttagagtatactccactgaaacaggcaaattaacccagatcgtgttcggacattgggacgttgtgacttgcttggctcggagcgagagctacatcggaggcgactgttacattgttagcggaagccgagacgccacacttctcctttggtactggtcagggaggcaccatattattggggacaaccccaactccagtgattacccagcaccccgagcagtgctgaccgggcatgaccacgaggtggtttgcgtgtctgtgtgcgcagagctcggtctggtgatcagcggcgctaaagaaggcccctgcctggtgcacactattacaggggacctcctaagggccctggaagggccagagaattgcctgtttccacggttaatctccgtgagttccgagggccactgcattatttactacgagcgtgggcgattttcaaactttagtattaatggcaagttgcttgcgcagatggaaatcaatgattcaactagggccatccttctgtcctctgacggccagaacctggtgaccgggggggataacggcgtggttgaggtgtggcaggcttgtgattttaagcagctttacatttaccccgggtgtgacgccggcattagagcaatggacctgtcccacgatcagcgtaccctgatcacaggcatggcaagcggatccattgttgctttcaatatcgacttcaatcggtggcattatgagcatcagaaccgctactag

SEQ ID NO: 196917 - DNA, 8841 bp, synthetic construct
  misc_feature 1..8841: note = Description of Artificial Sequence: Synthetic coding sequence
  source 1..8841: mol_type = other DNA
atggccagcgagaagcccggccccggccccggcctggagccccagccggtgggccttatcgctgtaggggcggcaggaggtggcggaggggggagcggaggtggtgggaccggggggagtggcatgggcgagctgagaggagcgagcgggtcaggtagtgtgatgctccccgctggcatgatcaaccccagcgtccctatccgcaatattcgcatgaagttcgcagtgctcatcggtttaattcaagtcggagaggtgtcaaaccgcgacatcgtcgagactgtgctgaacctactggttggcggcgaatttgacctggaaatgaatttcattatccaagacgctgagtctatcacttgtatgacagaactgcttgagcactgtgacgtcacttgccaggcggagatttggagcatgttcacggccatcctgcgtaaatctgtccgcaacttgcagaccagcactgaggtggggttgatagaacaggtgctgcttaagatgtctgcagtggatgatatgatcgcagacttgctggtcgatatgctgggtgtgttggcctcctactcgatcacagttaaggagctgaagctactcttctctatgctgcggggcgagagtggaatttggcctcggcacgccgtgaagcttctgtcagttctcaaccagatgcctcagaggcacgggcccgatacctttttcaattttcctgggtgcagcgctgccgccatagctcttccacccattgctaagtggccataccaaaatggctttacactgaacacatggtttagaatggacccgctgaataatatcaatgtggacaaagataaaccctacctgtactgtttccggacatccaagggtgtgggctatagcgcccactttgtcggtaactgtctaatcgtcacaagtcttaagagcaaagggaagggttttcagcattgtgtgaaatacgattttcagccccgaaagtggtacatgatttccatcgtgcatatctataatcgatggcggaactcagagatccgttgctacgtcaacgggcagcttgtgtcttatggggatatggcctggcatgttaacaccaatgactcatatgataagtgtttcctgggatctagcgaaaccgccgatgccaaccgggtcttctgcggacagctgggtgctgtctacgtcttttccgaagctcttaatccagcccaaatttttgcaatccatcagctgggtccagggtacaaatcaaccttcaagttcaagagtgagagcgatatccaccttgcggagcaccataagcaggtgctttatgacggcaaactcgctagttctatcgccttcacatataatgccaaggctactgacgcacaattatgccttgagtccagccccaaagagaacgcctccatattcgtgcatagcccgcacgctctcatgctgcaggacgtcaaggcaatcgtcacacactccatacactctgccatccactcaattggagggattcaagtgcttttcccactattcgctcagctggacaaccgacagctcaacgacagtcaggttgagacaaccgtatgcgctacgcttctggcattcttggtcgagctcctaaagtcttctgtcgccatgcaagaacagatgttgggcggaaagggcttcctggtgatcggatatctactggaaaaaagctctagagtgcacatcaccagagctgtcttggagcagtttctttcttttgcgaaatacctggatggcctatcacatggggcaccactgctgaaacagttatgcgaccatattctgttcaacccggcaatttggatccacacacccgccaaagtccagctgtccctgtatacatacctttctgccgaattcatagggacggccacaatttacaccacaatcagaagagtgggcactgtgttacagcttatgcataccttaaagtactattactgggttattaaccccgccgattcttctgggatcacccctaagggactggacggacccagacctagccagaaagagatcattagtcttagagcattcatgctactgttcctgaagcagttaattctcaaggatcgtggggtgaaagaggacgagctgcagtccatcctaaactacctcctaactatgcatgaagacgagaacatccatgacgttctccagcttctagtggctctcatgtctgaacatcctgccagtatgatccctgcatttgaccagcgtaatggaattcgggtgatatacaagcttctcgcctcaaagtcagagagcatctgggtgcaggcactgaaggtgctgggctacttcttaaaacacctaggacataaacgcaaagtagaaattatgcatactcatagtctgttcactctgcttggcgaacgcctaatgttacacacaaatactgtaactgtgacaacatacaatacgctgtacgagattctcacagaacaggtctgtacccaggtagttcacaaacctcacccagagcccgactcaacagttaagattcagaacccaatgatacttaaagtggtggccactctgctcaagaattcaaccccctccgcggagttgatggaagtacgcaggttatttctgtccgacatgatcaagttgttttctaattccagagagaaccggcggtgtctacttcaatgctctgtgtggcaggattggatgtttagcctgggctatatcaaccctaaaaactccgaggaacagaagatcaccgagatggtttacaatatttttaggatcctgctataccatgcaatcaagtatgagtggggcggttggagagtgtgggtggacactttatctattgcccattcaaaggtcacgtatgaagctcataaggaatatctcgccaaaatgtacgaggaataccagcggcaggaagaggaaaatatcaagaaaggcaagaaaggcaatgtgtcgaccatcagcggtctgtcaagccagaccaccggagctaagggcggtatggagatccgtgagatcgaagatctaagccagtcacagagcccagaaagcgaaacagactacccagtctcaaccgatacacgcgaccttcttatgagcacgaaggtctccgacgacatcctggggaactcagacaggccaggcagtggggtgcacgtggaagtgcatgacctgttagtggatattaaggcagagaaggtggaggccactgaagtgaagctcgacgatatggacctgtcaccagagactctggtaggcggagagaacggggctcttgtggaagtcgaatctctcctagacaacgtttatagtgcagccgtcgagaagctgcagaataatgtccacggctctgttggcatcatcaagaagaatgaggagaaggacaacggtccacttattaccttggctgacgagaaagaggatctgcctaatagtagtacctcctttcttttcgataaaatccctaagcaggaggagaagcttctccccgagctgtccagtaaccacatcattcccaacatccaggacacacaggtgcacctgggcgtcagcgatgatcttggtctcctcgcacacatgacgggcagcgtggacctcacttgcacctccagcattatcgaagaaaaagaattcaaaatccataccacgagtgatggaatgagctccatcagcgaaagggatctcgcatccagcactaagggcctggaatatgccgagatgactgccaccacactcgagaccgagtcatcttcatctaaaattgtcccaaacatcgacgcaggctctataatttcggatacggaacggtcagacgatggaaaggaaagtggaaaggagatacggaaaatccagactacgacaacgactcaagcagttcagggaaggtcaatcactcagcaggatagagacttgcgtgtggatctcggctttcggggcatgcccatgactgaggaacagcgcaggcagttctcccctggtccacggaccactatgttcagaatacccgaattcaagtggtcaccaatgcaccagagactgctgaccgatttactgttcgcattggaaaccgacgtccatgtctggcggagtcactcaaccaaaagcgtcatggatttcgtgaatagcaacgaaaacattatattcgtacacaacactatacacttaatctcacagatggttgacaacattattatagcgtgcggcgggattctgcccttgttatctgccgcaacgagccccactggatctaagaccgagctagagaatattgaggtgacccaaggcatgtccgccgaaaccgctgttaccttcctttctaggctgatggccatggtggacgtcctcgtctttgcatcctctctcaactttagcgagattgaagctgaaaaaaacatgagctcggggggcctgatgaggcagtgtcttcgactcgtgtgctgcgtagctgtgcgcaattgcttggagtgccgacagagacagcgcgatcgcggcaacaaatccagtcacggctcgtccaaacctcaggaggtcccccagagtgtaaccgccaccgccgcctccaaaacacctctcgaaaacgttccaggcaatctgagcccaatcaaggatccagatcgtctgttgcaggacgtagatatcaataggcttcgtgctgtcgtcttcagagatgtcgacgactccaagcaggcccagttccttgcattggccgtagtgtattttatctccgtcttaatggtatcgaagtatcgcgacatccttgaaccacagagagagaccactcgcacgggttcccagccgggaaggaacattcggcaagagatcaattctcctaccagtaccgttgtggtgatacccagtattccccatcccagcctcaaccatggctttttggccaagctcatccctgagcagtctttcggacacagtttctacaaagagaccccagccgcgttcccagacactattaaggagaaggaaacaccaaccccaggggaagacatccaggtcgagagttcaattcctcataccgactctggcataggagaagaacaagtcgcctcaattttaaatggggccgaattggagacctccaccggtccagatgctatgtccgaactgctttctacgcttagtagtgaagtgaagaagtctcaggaatcactgactgagaacccttccgaaacactcaagcccgccacttccatttcctccatatctcagaccaagggaatcaacgtcaaggaaatactgaagtcactcgtggcggccccagtggagatcgctgagtgtggcccagagcccataccttatccagatcccgcgctgaaaagggaaactcaagccattctgccgatgcaatttcattcctttgatcggtctgttgtcgtgccggtgaagaagcccccccccggttcgttagccgttaccactgtaggtgccacgaccgcggggtctggcctgcctaccggatccacttctaatattttcgcagccaccggtgccacacctaagtctatgattaacaccactggcgccgtcgacagtggctcatcatctagcagcagttcttcgtcctttgtaaacggggccactagcaagaatcttcccgccgtccagactgtggccccaatgccagaggattctgccgaaaacatgtcaattacagccaagctcgagcgggcattagaaaaagtagcgcctttactgagagaaatctttgtggactttgccccattcctctcacgaaccctgctcggctctcacggccaggagttactcatcgaaggcctggtctgcatgaaaagcagcactagcgtcgttgagcttgtcatgctgttgtgcagccaggagtggcaaaattcaatccagaagaacgctggtcttgctttcattgagctcattaatgagggacgactgctgtgccacgctatgaaggatcacatagtgcgtgttgctaatgaagctgagttcattctaaatcgccagagagcagaggacgtgcacaaacatgctgaattcgagagtcagtgtgctcagtatgccgcggacagaagagaagaggagaagatgtgcgaccacctaatcagtgcggcgaaacaccgagatcacgtaactgccaatcagcttaagcagaaaatactgaacattttaacgaataaacatggcgcgtggggcgccgtttcacattctcaactgcatgatttttggcggctggactattgggaggatgatctcaggaggagaaggcggttcgttcgtaatgcctttgggagcacacatgctgaggcactgctcaaggctgctattgagtatggaacggaggaagacgtcgtcaaaagtaagaaaacgtttagatctcaagcgattgtaaatcaaaatgctgagaccgaacttatgctggaaggtgatgatgatgcggtgagcttactacaggagaaggagattgacaatcttgcgggacccgttgtgctgagcacacccgctcagctaattgcccccgtcgttgtggcgaaagggactctaagcatcacaaccacagaaatttactttgaggtcgatgaagacgacagcgcctttaagaagatagacacaaaagtgttggcctatacggagggtctgcatggtaagtggatgttctccgaaatccgcgccgtgttcagtcgtagatatctcctacagaacacggcgcttgaggtattcatggccaaccgcacatccgtcatgtttaatttccctgaccaggctactgttaaaaaggtcgtatattctctgccacgggtgggcgtgggcacctcctatggactgcctcaagccaggcggatctccttggcgactccacgacaattgtacaaatcatccaatatgacccaacggtggcagcgccgcgaaatctcaaactttgaatacctgatgttcctgaacactattgccgggcgcacatataacgacctcaaccagtatccagtgttcccttgggttctcactaactatgagtcagaagagttggaccttacgctgccagggaacttcagagatctaagcaagccaattggcgcactgaatcccaagcgcgctgtgttttatgctgaaagatacgagacatgggaggacgaccagtcccctccatatcattacaacacccattatagcacagccacgtcgaccctgagctggctcgtcaggatcgagccatttactacattctttctgaacgccaacgatgggaaatttgatcaccccgataggacgtttagctccgtggcccggtcctggcgtacctctcagagggatacttctgatgtaaaggaactgattcctgaattctactatcttccggagatgttcgttaattctaacggctataatttgggggtgcgggaagacgaggtggttgtcaacgatgtggatcttccgccctgggctaaaaagcccgaggacttcgtgagaataaataggatggccctcgaatctgaatttgtgtcatgtcagttacatcaatggattgatctgatcttcggatataagcagagaggaccggaagccgttcgggctctcaatgtttttcattatctgacatatgagggcagtgtgaatctcgattccatcacagacccagtcctccgtgaggctatggaggctcagatccagaactttggacaaaccccctctcagttattaatagagcctcatccccctaggtcttccgcaatgcatctctgctttctgccacagagccccttaatgttcaaggatcagatgcaacaagacgtgatcatggttttgaagttcccatccaacagtcctgtgacccacgtggccgcgaataccctgcctcacctgacgattccagccgttgtcaccgtgacatgttcccgactgttcgcggtgaataggtggcacaacaccgtggggttaagaggagcaccgggctacagcttggatcaggcccaccacctccccatcgagatggaccccttaatcgcgaacaattcaggcgtgaacaagaggcaaatcacagatcttgttgatcagagtatccagatcaatgcccactgctttgtggttacagccgacaacagatacatcctgatctgcggattttgggacaagtcgttccgagtttacagtactgaaaccgggaaactaactcagatcgtatttggtcactgggatgtcgtgacctgcttagcccggtctgaatcctacataggcggcgattgctacattgtttccgggagcagagatgcaacccttcttttgtggtactggtctggccggcaccacatcatcggtgacaatccaaactccagcgactatccagcaccgcgcgctgtgctcacggggcatgaccatgaggtggtatgtgtatctgtgtgtgctgaactcggactggttatctccggtgctaaagaggggccatgcctagtgcacaccatcacgggagacttgctacgcgctctagaaggtccagagaattgtctgttcccaaggctgataagtgtgtcatccgagggacattgtataatatattatgaaagaggccgcttcagtaacttcagcattaatggtaagctcttagctcagatggaaatcaacgacagtacccgtgccatcctcctgagttcagatggtcagaacctcgtcacaggcggcgataatggagtggttgaggtgtggcaagcatgtgactttaagcagctttatatctatccaggctgtgacgcaggcatcagggccatggatctttctcacgatcagcgcaccctgatcactggtatggcaagtggctcaatagtggcttttaatatcgacttcaatcggtggcactacgaacatcagaaccgctactag

SEQ ID NO: 196918 - DNA, 1575 bp, synthetic construct
  misc_feature 1..1575: note = Description of Artificial Sequence: Synthetic coding sequence
  source 1..1575: mol_type = other DNA
atgttcgtgaacagcaacggctacaacctgggcgtgcgggaggacgaggtggttgtaaacgatgtggacttacctccatgggcgaaaaagcctgaggattttgtccgaatcaatcggatggcactggagagcgagtttgtatcctgtcagctccaccagtggatcgatctgatcttcggctataagcagcggggacccgaagcagtgagggcactgaatgtctttcattacctgacttatgagggcagtgtgaatctggacagcatcacggaccccgtgctgagagagattcccgaagcctacttcataagggatcctcatacgttccttctaactaaagattttatcaaggccatggaggcacaaattcagaatttcggacagaccccatcacagctcttgatcgaaccccaccccccgcggtcctccgctatgcacctgtgctttctcccacaaagccccttgatgttcaaggaccagatgcagcaggacgtgattatggtccttaaatttccatcaaattctcccgtcacccacgtcgctgccaataccctgccccatctcaccatcccggccgttgttaccgtgacatgttcgcgattgtttgcagttaatagatggcataacactgtcggtctacgaggggctcctggctattcactcgaccaagctcaccacctgcctattgaaatggaccccctcattgcaaataactcaggcgtgaataagagacagattactgatctggtcgatcaatccatccaaatcaacgcccattgctttgtagtcactgccgataacagatacatcttgatctgtggtttctgggacaagtccttcagggtgtattctactgagacaggcaagctcacccagatcgtgtttggtcattgggatgtggtgacatgtttagcacggtccgaaagctacattggcggagactgctatattgtttccggatcccgagatgcaaccctcctgctgtggtactggtcagggagacaccacatcatcggagataaccctaattcctcggattatcctgccccccgcgcggttctaaccggccacgaccatgaggtcgtatgtgtttctgtgtgtgctgagttaggccttgtgatcagcggagcaaaggagggaccctgtctcgtccatactataacaggggatctgttgagggctctcgaaggacctgaaaattgcctgtttccacgcctgatcagcgtatccagtgagggtcactgcatcatttactatgagcggggacgcttttctaacttttcaataaacggaaaattgctggcgcagatggagatcaatgactccaccagggccatcctcctctcctcagatgggcaaaatttagtcaccggtggtgacaacggtgtggtggaggtttggcaggcatgcgatttcaagcagctatacatctaccccggatgtgacgccggtattagagccatggatctctcccacgaccagcggactctgataactgggatggcctccgggtcaatcgtcgcctttaatattgacttcaatcggtggcactacgagcaccagaaccgatactag

SEQ ID NO: 196919 - DNA, 4728 bp, synthetic construct
  misc_feature 1..4728: note = Description of Artificial Sequence: Synthetic coding sequence
  source 1..4728: mol_type = other DNA
atgcaccagcggctgctgaccgacctgctgttcgccctggagaccgatgtgcatgtgtggaggtcccactctaccaaaagtgtgatggactttgtgaactctaacgaaaatatcatattcgtgcacaatacaattcatctaatttcacaaatggtggataacataatcattgcctgcggcggcatcctgccactgctgagcgcggccacgagtccaacaacggaattggagaacatcgaggtaacccagggaatgtccgcggagactgcagtgactttcctcagtaggcttatggcaatggtagatgtccttgtcttcgcttctagtttgaattttagcgagattgaggccgaaaagaatatgtcctctggcgggctaatgaggcaatgcctgagactggtgtgttgtgttgccgtcagaaactgtctggaatgtagacagcggcagagggaccggggcaacaagagcagccacgggagctctaagccccaggaggtaccccagagcgtgactgctaccgccgctagcaaaacaccgctggagaacgtcccagggaacctgtccccaatcaaagatcccgatcgattactacaggatgttgacattaataggttacgcgcggttgtgtttcgagatgtggatgactctaagcaagctcagtttttagcactagccgttgtgtacttcatttccgtgttgatggtgtccaagtacagggacatcctggagccccagcgtgagactacaaggaccggctctcaaccgggacggaatattcgccaggagattaacagtcccacttccacagagactcctgctgcttttccggacacgatcaaggagaaagagacccctacacctggagaagacatccaggtggagtcaagcattccacataccgatagtggcataggcgaggaacaggtggcatctatcttgaacggcgcagaattagagacatctaccggtcctgacgccatgtctgaactgcttagcaccctcagttctgaggttaagaagtcccaggaatcgcttacagagaatccgtctgaaacactcaagcccgccacgagtataagctctatcagccaaaccaaaggcattaacgttaaagagattttaaaatccctggtggcagcccctgtggaaatcgccgaatgcggcccagagcctattccctacccagaccctgctctgaaacgagaaacgcaggccatccttcctatgcagttccatagcttcgaccgtagtgtggtggtgcctgtgaaaaagcctccaccgggatctcttgccgtgaccactgtcggcgctaccactgccggaagcgggctcccgacaggaagtacgtcaaacatcttcgcggctaccggcgctacacctaaatctatgatcaacactactggggccgtcgattccggttcgagtagcagctcatcatcatcctcttttgttaatggcgcgacttccaagaacttgcctgcagtgcagaccgtcgcccccatgcccgaagactccgccgaaaacatgagcataacagcaaagttggagcgagcccttgagaaggtggcaccactcctgcgagaaattttcgtggacttcgctccgttcctttccagaaccctgcttggctcccatgggcaggagctgttgatagagggcctcgtgtgtatgaagtctagcacttccgtggtggaacttgtaatgcttctgtgctcacaggaatggcagaattctatccagaagaacgcaggcctcgccttcatcgagctgataaacgaaggacgcctgctatgtcatgcgatgaaggatcacatcgtccgggtggctaacgaggccgagttcatccttaacaggcagcgggcagaagacgtccacaagcacgccgagtttgaatcccaatgtgcccaatacgctgcggatcgtagagaggaggagaaaatgtgcgaccacctcatcagcgcagcaaagcatcgcgatcacgtgaccgccaaccaacttaagcagaaaatcctaaacattctgacaaacaagcacggcgcctggggtgctgtatcgcactctcagttacacgacttttggcggttagactattgggaggatgacctgagaaggcgacgccggttcgtcagaaacgcctttggatcgacccatgctgaggccttgctgaaggcggctattgagtatggcaccgaagaagacgtcgtaaaaagtaagaaaaccttcaggtctcaggcgattgttaatcagaatgcagagactgaattgatgctggagggggatgatgacgcggtatcgctcctgcaggagaaagagatcgataatctggccggacctgtggtgctgagcacccccgcccaactgattgcacccgtcgtggtcgccaagggaactctgtctattacaacaacagagatttatttcgaagtagacgaggatgattcagcttttaaaaagatcgacaccaaagtgctcgcttacacagagggtctgcatggcaagtggatgttttcggagattcgggcggtgttcagtaggcgctatctgctgcagaataccgcgttggaagtattcatggctaaccgaaccagtgtcatgttcaatttcccggaccaggccacggtgaagaaggtagtttattcgctgccacgagttggcgtgggtaccagctacgggcttccccaggcacgccggatttctttggcgaccccacgccagctttacaagtcctcgaacatgacacagcgatggcagcggagagagatcagcaatttcgaatacttaatgttcctgaacaccattgccgggaggacatataatgacctgaaccagtacccagttttcccctgggtactgaccaactacgaaagcgaggaacttgacttgactctgcccggaaattttcgggacctgtcaaagcctatcggcgcgttaaatcctaagagggcagtgttctatgccgaacgatacgagacctgggaagacgatcagtcaccaccctaccactacaacactcattatagcactgctacctctaccctgtcctggcttgtgcggatcgaaccctttactacattcttcctaaacgcgaatgatggtaaattcgaccatcctgatagaacattttcctccgtcgccaggtcttggaggacaagtcagagagatacctctgacgttaaggagcttatccccgaattctattatctgcccgagatgttcgtgaactccaacggatacaacctcggagtgcgggaggacgaggttgtcgtgaatgatgtagatctgcccccttgggcaaagaaacctgaagattttgtgcgaattaacaggatggccttggagtctgagtttgtgtcttgtcagcttcatcagtggatcgatctcatctttggctataagcagagagggcccgaggccgttcgggctctgaacgtctttcattacctgacctacgagggctccgtgaatctggactccattacagaccccgtcttaagggaagctatggaagctcaaattcagaactttggacagaccccatcccagctgctgattgaaccccatccccctaggagcagcgcgatgcacttgtgttttctgccacagtcaccactgatgttcaaagaccagatgcagcaggatgtaataatggttctgaaattcccctctaacagcccagtcacccatgtggcagcgaacaccttgcctcacctgacaatccccgcggtggtcaccgttacctgctctcgcctgttcgccgtgaacagatggcataacacagtcggccttcggggagccccaggatactcactagatcaggcccatcacctgcctatcgagatggaccccctgatcgcaaacaattctggagtgaacaaaaggcagatcacagatctggtcgaccagtctatccaaattaacgcccattgtttcgtagttaccgcagataatagatatatcctgatctgtggattttgggacaagagctttagggtgtactctacggagacaggaaagctgacccagatagtattcggccattgggacgtagtgacttgcctcgccaggtcagagtcctacatcggcggcgattgctacattgtgtcaggatccagggatgccaccctcctgctctggtactggtccggaaggcaccacataatcggcgataaccctaacagtagtgaatgcgactatcctgcaccacgggctgtcctgacaggccacgatcatgaggtggtgtgtgtgagtgtttgtgccgagcttggcctggttatctcaggtgcaaaggagggaccttgtttggtccataccataacaggtgatctgctgagggccctagaggggcctgagaactgtctgtttcctaggttaatttctgtgagttccgagggtcattgtatcatatactacgagcgcggacgtttttcaaacttcagcattaacggcaaattgctggctcagatggaaattaacgattccaccagggccatactcctgtcctctgacggccagaacctggtgacaggaggagacaacggagtcgtggaagtatggcaggcttgtgattttaagcaactttatatatacccaggctgtgacgctggcattagggccatggacctgtcccacgatcaaaggactctgatcactggcatggcaagtgggtctattgtggcatttaacattgatttcaaccgctggcactatgagcaccaaaatagatactag

SEQ ID NO: 196920 - DNA, 2220 bp, synthetic construct
  misc_feature 1..2220: note = Description of Artificial Sequence: Synthetic coding sequence
  source 1..2220: mol_type = other DNA
atgttcagcgagatccgggccgtgttcagccggcggtacctgctgcagaatacagccctggaggtgtttatggctaataggactagcgtgatgttcaactttcccgatcaggccaccgtgaagaaggttgtttactcccttccacgcgtgggagttgggacatcatatggactcccacaggcacgccgaatcagtctggccacaccacgtcagctgtacaaatcgagtaacatgacccagaggtggcagcggcgagagatctccaattttgaatacctcatgtttttgaacactatcgctggccggacgtataacgacctgaaccagtaccccgtctttccatgggtcctcactaactacgagtcagaagagctggacctcactctgcctggcaattttagagacctgagcaaacccatcggggctctcaaccccaagcgggcagtgttctatgctgagcgttatgagacctgggaggacgatcagagtccaccttatcactataatacgcactacagtaccgcgacatctacactcagctggttggtcagaattgaacccttcacaacatttttcctgaatgccaatgacggtaaatttgatcatccggatcgcactttctcgtcagtggccagaagttggcggacatctcagcgcgatacttccgatgttaaggagttaatccccgaattctactatctgcccgagatgttcgtcaatagcaatggctataaccttggcgttagggaggacgaggtggtggtgaatgatgtggatctcccaccatgggcaaagaagccagaggattttgttaggattaataggatggcgctggagtctgaattcgtctcctgccagctgcaccaatggatagaccttatcttcggatacaaacagagaggccctgaggcagtaagggctcttaatgtgttccactatctcacctacgagggctctgtcaatctagactcaataaccgatcctgttctcagagaggctatggaggcccaaattcagaattttgggcaaactccctcccagttactgatcgagccccatccaccccggagctccgcgatgcatttgtgtttcctgcctcagagcccactcatgtttaaggaccagatgcagcaggatgtaatcatggtcctcaagtttccatcaaattcgcctgtgacccatgtggcagccaacacactgccgcacctgactattcccgctgtcgtaactgtgacctgctcccggctattcgctgttaatcgatggcataacacggtgggcttgagaggcgcgcctggctattccctcgaccaggcccaccacctcccgatcgagatggatcccctcatcgcaaataactccggcgtgaataagcggcagattacggatttggttgatcagagtatccaaattaacgcccattgttttgtggtgacagcggataacaggtatatcttgatctgtggattttgggataagagtttccgtgtgtatagcactgaaacaggtaagctaacccaaattgtcttcggccattgggatgtggtcacttgtcttgctcgctcggaaagctatattgggggagactgttatatcgtcagcggcagtcgcgacgcaacactgctgctttggtactggtcagggcgacaccacattattggcgacaacccaaactcatctgattaccctgctcctcgggccgtgcttaccggccatgaccacgaagtggtgtgtgtctcggtgtgcgctgaactgggattggttatttccggtgccaaggagggtccttgccttgttcacaccattaccggggaccttctaagagccctcgaaggaccagagaattgcctgtttccccgtctaatctcggtcagctcagaagggcactgtatcatctactatgagaggggccgattttctaacttcagcatcaatggtaaactattggcccagatggagataaacgatagtacacgggctatactgttatcctcagacggtcagaacctggtcaccgggggagataacggagtcgtggaggtgtggcaagcttgtgatttcaaacagctgtacatctaccccggctgtgatgcgggcattagggccatggacttaagccatgaccagagaactctcataaccggtatggctagcggcagtatcgttgccttcaacatcgattttaaccgatggcattatgagcatcaaaacagatactag

SEQ ID NO: 196921 - DNA, 8841 bp, synthetic construct
  misc_feature 1..8841: note = Description of Artificial Sequence: Synthetic coding sequence
  source 1..8841: mol_type = other DNA
atggccagcgagaagcccggccccggccccggcctggagccccagcccgtgggcctcattgccgtgggcgctgccggcggcggtggagggggttcaggaggagggggtacaggaggatcaggaatgggcgaactgcggggagcaagcgggagtggcagtgttatgcttcctgctggaatgatcaaccccagcgtgcccatccgcaatatcagaatgaagttcgctgttctcatcggcctcatccaggtgggagaggtgagtaacagagatattgtggagacagtgctgaatttgctcgtcggcggcgaattcgatcttgagatgaactttatcatccaggacgctgaatctatcacttgcatgaccgaactactggagcattgcgatgtgacctgccaggccgagatctggtccatgtttacagctattctcagaaagtccgtcaggaatctgcagacctccaccgaagttggcctgattgagcaagtcctgctgaagatgtccgccgtagacgatatgattgcggacctgctggtggatatgctgggggtccttgcctcctattctatcactgtcaaggaactaaaattgctgttctccatgctcagaggagaaagtggaatttggccacgccacgcagtgaagcttctgagcgtgctgaaccagatgccccagcggcatgggccggataccttctttaactttccaggatgttctgctgcggccatcgcgttgcctcctatagcaaaatggccgtatcagaacgggttcacactgaatacctggtttcggatggatccgctaaataacattaatgtggacaaggataaaccatacctgtactgctttcgaacgagtaagggcgttggatactccgctcactttgtcggtaactgtctgatcgtgacttctctaaaatctaaaggaaaaggctttcagcattgcgtcaaatatgactttcagcctcggaagtggtacatgatttctatcgtgcatatttacaacagatggaggaatagcgagataaggtgctatgtgaacgggcagctggtgtcctacggtgacatggcctggcacgtaaataccaatgactcttacgacaagtgtttcctgggtagcagtgaaacggctgacgccaatcgcgtgttttgcggacagttgggcgccgtatatgtgtttagcgaagctttaaatcctgctcaaattttcgcgatccatcagctgggccccggttacaagagcactttcaagtttaagagtgagagcgacatccacctcgcagaacaccacaagcaagttctgtatgacggtaagctagcttccagcattgcatttacgtacaatgccaaagccacagacgcacagctctgtctggaatcatctcccaaagagaacgcctccatctttgtgcacagcccacacgccttaatgttgcaggacgtcaaagctatcgttacacattctattcactctgctatccacagtatcggggggattcaggtgctgtttcccttattcgctcagctggataacagacagctcaacgacagtcaggtggaaactacagtttgcgccacactgcttgcctttctggtcgagctgctcaaaagctccgtggccatgcaagaacagatgctcggtgggaagggttttctagttatcggatacttactggagaagagctcacgggttcacattacaagagccgttctcgaacagtttctcagctttgccaagtacctagacggactcagccatggagctccgctgcttaaacagctgtgtgaccacatcctcttcaatcccgcaatttggatacatacaccagcaaaagtccagctaagcctgtacacctatctgtcagcggagttcatcggcaccgcgaccatctacacgactatcagaagggtaggaactgtgcttcagcttatgcacaccttgaaatattattattgggtgattaatcccgcagattcttcaggcatcaccccgaaggggctggacggaccacggccttctcagaaggagatcatttcactgcgtgcttttatgctgttatttctcaaacagctgatcctgaaagatagaggcgtgaaagaagacgagttgcagagcattctgaattacctcttaaccatgcacgaagatgaaaatatccacgacgttctccagctgttggtggccttgatgagcgagcacccagcgtcaatgattcccgctttcgaccagcgcaatggaattagagtaatttacaaattactggcttcaaagagcgagtccatttgggtgcaggccctcaaggtactcggttactttctcaaacaccttggacacaagcggaaggtcgagatcatgcatacccactctctattcactctgctgggtgagcgcctgatgctgcatacaaacactgtgactgtcactacttacaatactctgtacgagatactgactgaacaggtgtgtacgcaggtggttcacaagccccaccccgagccggactccacagtgaaaatccagaacccgatgatcctgaaagttgtggccaccttgctcaagaactccacaccgtccgccgagttaatggaggtgcgacggctgttcctaagtgacatgatcaaactcttctctaactcacgcgaaaaccggcggtgtcttctgcagtgctctgtgtggcaagactggatgttctccttaggatatattaacccgaagaacagtgaagagcagaaaattacagagatggtctacaatatctttagaattcttctttatcatgcaatcaagtatgagtggggaggctggcgggtctgggtcgataccctatctatcgcccactctaaagtcacctacgaagctcacaaggaatatctagcaaaaatgtacgaggagtatcagcggcaggaggaagaaaacattaaaaaggggaagaagggcaatgtttccaccatttctggactttcttctcagacgacaggggccaaaggcgggatggagattcgagagatagaggatctgtcccagagccagagtcccgagagtgaaaccgattatccggtgagcaccgacacaagggacctgctgatgagtaccaaagttagcgacgacatcctgggaaatagtgaccgcccgggaagcggagtgcatgtggaagtgcacgacttactagttgacatcaaagcagaaaaggtggaagcgacagaggtcaagctggatgacatggatctgagccctgagactcttgttggcggcgagaacggtgccctggtggaggtggagtcactgctggataatgtgtatagtgccgctgtggagaaactgcagaataatgtgcacgggtccgtcgggatcatcaagaagaacgaggagaaagacaatggaccactgatcaccttagcagatgagaaagaagatttacctaattcttctaccagtttcctcttcgataagattccaaagcaggaagaaaagctgcttcccgagcttagtagcaatcacataatccctaatattcaggacacgcaagtacacctgggagtaagcgacgacctcggcctgctcgctcacatgacagggagtgtggacctgacatgtacaagcagcattatcgaggagaaagaattcaagatacatacaacttcagacggcatgtcttcaatttccgaacgtgacttggccagctccacgaagggtttagagtacgccgaaatgacagcaaccacgctggagactgaatctagcagcagcaagatagtgcctaacattgacgccggaagtataatttcagatacagagaggagtgatgatgggaaggaaagtggaaaagaaatcagaaagattcagactaccactactacccaggcggtacaaggaaggtccataacccaacaagacagagatcttcgggtggatctgggatttaggggaatgccaatgaccgaggagcaaagaaggcagttttctccagggccacgcacaacaatgttcaggatccccgaattcaagtggagtcctatgcaccagcgacttttgactgatctgctgtttgccttagagacagatgtgcacgtgtggaggagccattctacgaaatctgttatggacttcgttaactccaacgagaatataatctttgtgcataatactatccacctgatctcccagatggtagacaatattatcatcgcctgtggggggattctccccttgttgtctgcagctaccagtcccaccgtcagcaagacggagctcgaaaatattgaagtgacacagggcatgagtgcagagacagctgtgacctttctgagcagactgatggcaatggtggacgttctggtgttcgcatcatcactcaattttagcgagatagaagccgagaaaaatatgagcagtggcggcctgatgcggcagtgtcttagactggtctgttgtgtggctgtaagaaactgcctggagtgtcgtcagcggcagcgggatcgaggaaataagtcctcacacggttcgagcaagccccaagaggtgccccagtctgtaacggcgacagcggccagtaaaacacccctggaaaacgtacctggaaacctctcacctattaaggatcccgacagactgttgcaggacgtggatatcaatcgtctgagggccgttgtattccgagatgtggacgactcaaagcaggcccagttcctggctctcgctgttgtatacttcatttccgtgttgatggtgagtaagtatcgcgatatcctggagccccagcgcgaaactacgagaacagggtcacagcccggaaggaatatccggcaggagattaatagccctacttccaccgtagtggtgatcccttcaattccacacccatccctcaaccacggcttcctggctaaactaattcctgagcaatctttcggacactcattttataaagaaacacccgccgccttcccggatacaattaaagagaaagagacaccaacgcctggtgaagacattcaagtggagtcatccattccacacaccgacagcgggatcggcgaggagcaggtcgcaagcatcctgaatggcgctgagcttgagactagcaccgggccagacgctatgtccgagctgctgtccacactgtcttctgaagtgaaaaaatctcaggagtcactcacggagaatccatcggaaactctgaagccggcaacctctatctccagcatctcacaaaccaaagggattaacgttaaggaaatcctgaagagcctcgtggctgccccagtggagattgcagagtgtggtccagagccgatcccttaccccgatcccgccttaaagcgggaaacgcaagcgattctacccatgcaatttcatagcttcgaccggtctgtagtagtccctgtgaagaaaccgccacctggtagtctagccgtcactacggtgggcgctaccacagctgggagcgggctgccaaccgggtcgaccagcaacattttcgctgcgactggggcaaccccaaagtccatgatcaacacaacgggggccgttgatagcggatcgagctcctccagttcaagctcctccttcgtgaacggcgccacctcaaagaatttgccagccgtgcagactgtcgcccctatgcccgaagactctgccgagaatatgagcatcacagcaaaactggagagagccctggaaaaggtggccccactgttgagagaaatattcgtggattttgcccctttcctctctaggactcttttaggaagccacggacaagagctcctgatcgaaggtttggtctgcatgaaatcttcaacctcagtcgttgaattagtcatgcttttgtgttcccaggagtggcagaattccatccagaaaaacgccgggcttgccttcatagaactgatcaacgagggacgcctgctgtgccacgcgatgaaagatcacatagttcgggtcgcaaatgaggccgagttcatacttaacaggcagagagctgaagacgtgcataagcatgcagaattcgagagccagtgtgcccagtatgctgcagaccgccgcgaggaggagaaaatgtgtgaccaccttattagcgcggcgaaacaccgggaccatgtaaccgcaaaccagttgaaacaaaaaatattaaatatccttaccaacaagcacggcgcatggggcgcagtgagccactcacagcttcacgacttctggaggctggattattgggaagatgacttacgacgccgccggcgattcgtacgcaatgccttcggatcaacacacgcagaagccctgcttaaagccgcaatcgagtacggaacagaagaggatgtcgtgaagagcaagaaaacattccggtctcaagcaatcgtaaatcagaacgctgagaccgaactcatgctcgagggggacgacgacgcggtgagtctgctgcaggagaaagaaattgataaccttgccggcccagtggttctgtccaccccagcgcagctaattgcgcctgtcgtggtcgccaaaggtaccctcagcattactactacagaaatctactttgaggtggacgaggacgacagcgctttcaagaagatagacactaaggtgctcgcatatactgagggccttcacggaaagtggatgttttccgaaattcgagccgtcttttctcgccggtatttactacagaacaccgcactagaagttttcatggccaaccggacttcagttatgttcaatttcccagaccaggctaccgttaagaaagtggtgtatagcttacctcgagtcggtgtggggaccagctatgggttgccacaagcaaggcggatttcactggctaccccacgtcagctgtataaatcttccaatatgacgcagcgctggcagcgaagggagatttcaaacttcgagtatttgatgtttctgaacaccattgcgggtagaacctataacgacctcaatcagtaccctgtattcccatgggtgctgacaaattacgagtccgaagagctggatctcaccttacccggaaacttcagagacctgtcaaaacccatcggcgcccttaacccaaagagggctgtcttttacgcagagcgatacgagacatgggaggatgatcagagtccaccataccactacaacacgcattattcgacagccacctcgaccctgagctggctagtaaggatcgagccatttacaacctttttcttgaatgccaacgatgggaagttcgaccaccccgatcgaacattttcctccgtggcgaggtcctggcgcacaagccaacgagatacctctgatgtgaaggaactcattccagagttttactatcttccggaaatgttcgtgaactcaaacgggtacaacctgggagtgcgggaagatgaagtggtcgtgaacgatgtagatctgcctccatgggctaaaaaacccgaagacttcgtccggattaataggatggcgttagaaagcgaattcgtgtcatgccaactacatcaatggatagatctgatttttggctataaacaacgtggcccggaagcagtacgcgctttgaacgtgttccactatctgacctacgaagggtcagtcaacttggactcaataactgaccccgtcctgagagaagctatggaagcacagatccaaaatttcggtcagactccatcacaactcctcattgaacctcacccaccacgtagttctgccatgcatttatgcttcttaccacagagtcccctcatgtttaaggaccagatgcaacaagacgttattatggtgcttaagtttccatccaattctccagtgacacacgtggcagcaaacaccctgccccatctgactatccccgctgtcgtcacagtcacatgcagccggttgttcgccgtgaataggtggcacaacacagtaggactccggggggcccctggttattcgctagatcaggctcatcaccttcccatcgagatggatcctcttattgccaacaatagtggagtgaataaaaggcagattactgacctggtggatcaaagcatccagattaatgcccattgctttgtcgtgaccgccgacaatcgctacattctaatctgcggattttgggacaagtcctttcgtgtgtatagtacagagacaggcaagctgacacagatcgtctttggacattgggacgttgtgacgtgcctggctcggagcgagagctacatcggcggggattgttacattgtgagcggcagccgcgatgcaacacttctgctgtggtactggagcgggagacatcacatcattggggacaatccgaattccagcgattacccggcaccccgtgctgttcttactggacacgaccatgaagtagtgtgcgtgagcgtttgcgctgaattgggactagtgatcagcggagccaaagagggtccttgtcttgtgcataccataacaggagacctgctgcgggccctggaggggcctgaaaattgcctctttcctcgcctcatttccgtgagctcagaaggacactgcatcatttattacgaaaggggtagattctccaacttttccatcaatgggaagttgttggctcagatggaaatcaatgactccacacgagctattctactgagctcagatggacagaatctcgtgacaggcggggataacggtgttgtagaggtgtggcaggcatgcgatttcaagcaactttatatctatcccggatgcgacgccggcattagagccatggacctaagccatgatcaaaggactctgatcacaggcatggcgagcggtagcatcgttgcatttaacatcgactttaatagatggcattacgagcatcaaaacaggtattag

SEQ ID NO: 196922 - DNA, 834 bp, synthetic construct
  misc_feature 1..834: note = Description of Artificial Sequence: Synthetic coding sequence
  source 1..834: mol_type = other DNA
atgttcagcgagatccgggccgtgttcagccggcggtacctgctgcagaatacggctttggaagttttcatggcaaataggacatccgtcatgtttaacttccctgaccaggctaccgtaaaaaaagttgtttattctctgcctcgggttggagtgggcaccagctacggccttcctcaggctcggaggataagtctggcgactccccgacagctctacaagtcctctaatatgacacagaggtggcagagacgggagatctccaatttcgagtaccttatgtttctaaacacaatcgcaggaaggacatataatgacctcaatcaatacccagttttcccttgggtgctgactaattatgaaagcgaagagctggatctaacactaccaggtaattttagagacttaagcaagccgatcggagccctcaatcccaagcgggctgttttctatgccgagagatacgagacttgggaggacgaccaaagcccaccataccactataacacccactactctacagccacaagcactctaagctggctggtgaggatcgagccctttactacatttttcctaaatgcaaacgacggaaaatttgaccaccccgatagaactttctccagtgtggccagatcatggcgaacctctcaacgagataccagcgatgtcaaagagttgattccagaattttattacctgccagagatgttcgtgaactcaaatggttataacctgggcgtacgtgaggacgaggtggtcgttaatgatgtcgatctgccaccgtgggccaagaatctcaagaccctttgcgggtctactgggtggccctag

SEQ ID NO: 196923 - DNA, 7815 bp, synthetic construct
  misc_feature 1..7815: note = Description of Artificial Sequence: Synthetic coding sequence
  source 1..7815: mol_type = other DNA
atggccagccgggagcggctgttcgagctgtggatgctgtactgcactaaaaaggatccggactatctgaagctgtggctcgacactttcgtttccagctacgaacagtttctggacgtggacttcgagaaacttccaacacgcgtcgacgacatgccacccgggatcagcctcctgcccgacaatatactccaggttctgcgaatccagcttcttcagtgcgtgcagaaaatggccgacggccttgaggaacaacaacaggctttgtcaattttattggtcaagttttttattatactctgtaggaacctgtcaaacgtggaggagataggcacctgctcttacatcaattacgtgatcactatgactaccctttatatccagcagctaaagagcaagaagaaggagaaggagatggcagaccagacttgtatcgaggaatttgtcatccatgccctggccttctgcgaatccttgtacgatccctatcgcaattggaggcaccggatctcggggcgaatcctgagcaccgtcgagaagtcccgacagaaatacaaaccggcaagcctgaccgtagagttcgtgccattcttctaccaatgcttccaggagagcgaacatctgaaggagtcactgaaatgctgtctgttgcacctgtttggggcgatcgtggccggaggacagcgaaacgcgctgcaggccattagccctgccaccatggaagtcctgatgagggttttagcagattgcgattcttgggaggatggggaccccgaggaggtgggacgtaaggctgagcttactttgaaatgcctgacggaagtggtacacattctgctgtccagtaactcagaccagagacaggtggaaacatcaaccatactggaaaactactttaagctattaaatagcgaccatagcgccctccctaatcaacgcagaagcaggcagtgggaaaacagattcatcgccctgcagattaagatgctgaacactatcacggccatgctggattgcactgatcgcccagtccttcaggcaatcttcttaaactccaattgcttcgaacacctgatcaggctactacaaaactgtaaggtgttccagggccaactcgattgcctggccatttcaactattcaagctttgaccgccgtgatgaacaagtctccggccgcaaaagaggtctttaaggaacgtatcggttatactcacatgttggaggttctgaaatctttgggccagccccccctggagctgctgaaggaactgatgaacatggctgtcgagggggatcacacctctgtgggaattctcggcatttcgaacgtccaacctctgctgctactaattcagtggctccctgaattgcagtcacatgacctgcaaattttcatttcagattggctgaaacgcatctgttgcattaacagacagtcccgaaccacctgcgttaatgcaaatatgggaattaggattatcgagaccttggatctccacagctcactccaccaaacctgtgcagagaaccttattgctatccacgggtccctaggaagccaatctgtgtcttcagaggaaattcggcggctgctgcgtctcttgcgggtcgatgagtccgagagtgtccatccctacgtgaccccagtgacccgagctatcctcacaatggctcgcaagttgtcactggagtcagctctgcagtactttaacctgagccattctatggccggcatttccgtgccacccatccagaaatggccggggagtgcattcagcttctctgcatggttttgccttgatcaggatcagctgaccctcggaatcgccaataagggaggaaaaagaaagcagttatactcgttcttcaccggatcgggaatgggattcgaagcatttattacacactctgggatgctcgttgtcgccgtgtgtacaaaacgcgagtacgcgacagtcatgttgcctgatcatagcttctgcgactcactttggcacaacatcacagtggtccacatgcccggtaagagaccctttgggcagtcattcgtgtacatttacgataacggacagcagaaagtcagcgcccctctccggtttccagccatgaacgaaccttttacctcttgctgtatcggatcggcgggccaacgaacgactacccctcctccatctcagatcccagaccccccattctccagccctattactccacaccgcacaagcttcggtgggatcctgtctagtgcttcctggggggggacaatcgaaaagagcaagctgattacgaaactaataagcgccggaactcaggactccgaatgggggtgtccgacaagtttagagggccaactggggagcgttattatattctacgagcccttgcagcctcctcaggtaaaggccctttatctggcaggacccaactgtcttagtccatggaagtgccaagagtcagacatggcggacctgccaggaaatatcctcctctattatacagctaaagcctgcaagaattctatctgtttagacctctccaccaactgcctgcacgggagattgacggggaataaagttgtcaattgggatataaaggatattataaactgcataggtgggctaaacgtgctgtttccgcttctggagcagatctcgcatttttcagaaggccagatacctgaggagaagaacgaatccacagttcctgaatcagtgacacctgtcgaaggcgactggttagtttggacttcaactaaggcaagcgagtcccggctggagcggaatctggtcgcaacgttcatccttatcgtgaagcacttcatccaacgacaccccatcaatcagggcaacttgattcactcgcacggcgtggcaaccctcggagcactcctacagaaagtgccttcaacactcatggatgtaaatgtactcatggcagtacagctactcatcgaacaggtgtctctggaaaaaaatatgcaactactacaacagatgtaccagtacttgctttttgacttccggatctggaaccggggggacttcccattcaggatcggacatattcaatacctatccacaataatcaaagactcaagacgagtctttaggaaaaaatacggagtgcaatttctgctagacacactcagaatctactatggtaacggctgcaaatataacgaactttcattggacgacattcgcacaattcgcacaagcctctacggcctgatcaagtacttcctctgcaaaggtgggagccatgaggaaatacagtccattatgggatatattgcagccaccaatgaagaggagcaactgttcggcatcttagacgtgctgttctcacttctgaggaccagcccaacgaggggccaactgtttctcctgctctttgagcccggcaacgcagatattctttatgctttgctgctaaatcagaagtatagcgataggttgcgcgagattatcttcaagattatggagcaaatgctgaagtgcacgaatgtgtacgagcggagcaaacagcatatcaggctgagggaggtgggttatagcgggctgggactcttactgaatgaagctctggtgaacaccagtctgattaagaacctgactcatcaaataattaacactgaccccgtgataaactttaaagaccttctctctgttgtatacatctcacaccgcgcgcatatcaatgtccgagttgccatttgtcgcaaggtgctgcaaattctccagttccagcctgacgctgcccaccagatttctcagcaggtgggctggcaggacacacttgttcgacttttcttgaaagccaagttcgagaatgggaataccctccacaaacacagcagggccgtgctcatgaaagacaatgacaaaaacatgtccacagaagacaccaaaaaaaattcggatgagaaaactgacgaggaaaaaattacttcctttgctagcgccaatgtgagctccgaccagtggtcactcgaagacaggcatagtctcgattctaacacccccttgtttccagaagactcttctgttggggagcttagcttcaaaagcgagaatcaggaagagttttggcactccaacccctcccatctgtccctagacctctctggaattgactcatgcgaaatgtccgattccgggagccaggtgcctgatagtctaccgtcgaccccctctcccgtagagagcactaaaagcttttccgtccattcagacagggagtcaagtataaccaatgacatgggtttttctgatgatttttcacttctcgaaagccaggagcgctgcgaggaggagcttctacaactcctgacccacatcttgaactatgtcatgtgcaaggggttagagaaatctgatgatgacacctggattgagagaggacaggtttttagcgcactgtcgaagcccggcatcagctctgagctgctgcggccaagcgacgagatcaaactaacactgctacaaaagatgctggagtgggcaattagcgagaatagagaagcaaagacaaacccggtcaccgcagagaacgccttcaggctcgtgctcattatacaggacttccttcagtctgagggattggtcaactcaaacatgtggacagagaaactgctagaggatatgatgttgctttttgattgcctttctgtgtgttactctgaatctccagtgtgggttaaactttcccagattcagatccagcttctgctgggattcatcggacgcggaaacctgcaggtctgcgccatggcatccgctaaactgaatacactactgcagaccaaggtgattgagaatcaagatgaggcgtgctacatcttgggaaagctggagcacgtgctgtctcaatcaatcaaagaacaaactgaaatatattcttttctaatccctttggtaagaacactggtctcaaaaatatacgagctgctatttatgaatctgcacctgccgtccctaccatttaccaacggaagttcttctttctttgaggatttccaggaatactgcaactctaatgaatggcaggtatacattgagaagtatattgtgccgtatatgaaacaatacgaggcccacacattctacgatggtcacgaaaatatggcgttgtattggaaggactgctacgaggccctgatggtgaacatgcataaacgcgacagagaggggggtgagagtaaactgaaattccaggaactctttgtggaacccttcaatcgcaaagcaagacaagagaatcttcgctacaataatatgcttaaacaactgtccagccagcaactagcgaccctgcgaaggtggaaggcaatccaactgtatctgacctgcgaacggggaccttgggccaagagaaagcagaacccaattcactggaagctcgcaaatgtggagaactactcacgtatgcggctgaaacttgtccccaattataactttaagactcatgaggaggcgtccgcactaagagacaatctagggatccagcactcccagccatcaagcgacaccctattactggaggttgtgaagcaggttaaggtatccgacatggtggaggataagctggatctgcccgaggaggacattaccgcgagggtcaacgtggacgagaaagaagaacaggaccagaaggaaaagttggtactgatggaggattgtgagctgatcaccatcatagacgtcatcccaggcagactggagataactacacaacacatatatttttatgacggttctatcgagaaggaggatggagtgggtttcgacttcaagtggccccacagccagattagagagatccatttgcgaaggtacaatcttcggcggagtgccctcgaaatcttccacgttgatcagagtaattactttctgaatttcaagaaggaagtaagaaacaagatatatagtcggttgctgagcctacacagtccgaacagctactacggaagccgctctccacaggagctctttaaggcctcaggactgacacagaagtgggtgaatcgtgagatttccaactttgattacctgatccaaattaatacaatggccgggagaacgtataatgacttagctcagtaccctgttttcccctggattctgcaggactatacctccgaggagcttgatcttaataaccctgccgtctttagggacctgtccaaacccataggtgtggtcaacgagaaaaatgcaaaggccatgagagaaaagtacgagaatttcgaggacccgatggggacgatagacaagtttcactacgggacccattacagtaactctgccggcgtcatgcactatttgatccgggtggagcccttcactacattgcatattcagttgcagagtgggcggttcgactgcgccgatcgacaattccatagtatccccgccacttggcaggccctaatggacaacccctatgacgtgaaggagctgatccccgagttcttttacttcccagagtttctagagaatcagaatcaattcaatcttggtagactgcagattagtaaggagctggtaaatgacgtgatcctccccaagtgggcaaaaagcgccgaagacttcatttacaagcatcgcaaagcccttgagtcagaatacgtctcagcgcatctgcatgagtggatcgacctgattttcggttacaagcagcgaggtccagccgctgtggaagccctgaacgttttctactactgttcatacgagggcgccgtggacctagacgccctcacggatgagaaggaaagaaaggccctggagggaatgataaacaacttcggccagaccccttgccagctcctcaagatcaccatatccatgaattacgtcatcggaacgcatgggtggctgccatatgatcggaacatctctaactacttcacctttatcaaggaccagacagtgacaaacccaaagacgcaaaggtcaatcaatgggagttttgctcccggcctggagattacctctaagttgttcgtcgtgagccacgacgctaagttactgttctctgccgggtactgggacaattccattcaggtgatgtccctgaccaagggaaagatcatctcccatatcataagacacatggatatcgtgacttgcctagctacagattactgtgggattcatctaatcagcgggtctagagacaccacatgtatgatctggcaaattacacaacaggggggagttcccgtcgggctcgcttccaagcctttccagatcctgtacgggcacaccaatgaggtgctctccgtagggatttctaccgagctggatatggctgtctcaggctctcgggatggcactgtaatcatccacaccatcccaaacctcgccatttcatgggagggacatatagtggtctattcatctaccgaggagaagaccacgctgaaggataaaaacgccttgcacctgttctcgattaatggcaaatacctgggttctcagattttaaaggagcaggtctcagatatttgtatcatcggagaacatattgtgaccgggagcatacaggggttcttatctatccgtgatctgcattcacttaatttgtccatcaacccactagctatgaggctgcccatccactgtgtctgcgtcacaaaggagtattcccacatcctcgtcggcttggaagatgggaaattaatcgtggtgggggtgggcaagccggccgagatgcgaagcggccagctctcgcgaaaattttggggcagctctaaacgcctctcgcagatatccgcaggggagaccgagtacaacacccaagattcaaaatag

SEQ ID NO: 196924 - DNA, 8085 bp, synthetic construct
  misc_feature 1..8085: note = Description of Artificial Sequence: Synthetic coding sequence
  source 1..8085: mol_type = other DNA
atggccagccgggagcggctgttcgagctgtggatgctgtactgcacaaagaaggaccccgattatttgaagctgtggcttgacactttcgtgtccagctacgagcagttcctggacgtggatttcgaaaaactgcctacaagagtggacgacatgcctcccggtatcagcttgttgccggataacattctgcaggtattaaggattcagctgctccagtgtgtccagaagatggcagatgggctggaagagcagcagcaggctctatccattctactggtaaaattttttattatcctctgtcggaatttgtccaatgtggaggagattgggacctgttcttacattaactatgtgatcacaatgaccacattatatatccagcagttaaaatcaaagaagaaggaaaaagaaatggcagaccagacttgcattgaggaattcgttatacatgcgcttgcgttttgtgaaagcctgtatgatccctacaggaactggcgccaccgaataagcgggcgcattctgagtacagtagaaaagagcagacagaagtataaaccagcttcacttacggttgagttcgttccgttcttttatcagtgttttcaggagtccgagcacctgaaggaatctcttaagtgctgtctgcttcacttgttcggagcaatcgtagcaggcggccagaggaatgctcttcaagccattagtcccgccacaatggaagttctcatgagggtcctggcggactgtgattcatgggaggatggtgatccggaggaggtgggtcgtaaggctgagctgacacttaagtgccttaccgaggtggttcacatactcttatcttccaattccgatcaacgacaggtggaaacgagcacaatcctagagaactacttcaagctccttaacagcgaccattctgccctccccaatcagcgaaggtcccggcagtgggaaaaccggttcatagcgttgcagattaagatgctgaatactatcaccgccatgttggattgcaccgacaggcccgtcctgcaggccatcttcctgaattcaaactgcttcgagcacctgatcagactgttacagaattgcaaggtgttccaggggcagctcgactgcctagcaatttccaccatccaggctctgacagcagtgatgaacaagtcaccggcggccaaagaagtgttcaaggaaaggatcggctacacgcacatgctggaagttctgaagagtctaggccagcctcctctcgagttactgaaggaactcatgaacatggcagtggaaggcgatcatacaagcgtcgggattctcgggatttcgaacgtacaaccgctgctgctgctgatacagtggctccctgagctccaatcccatgatctccagatcttcatctccgattggctgaagaggatctgttgtatcaaccgccagtccaggaccacatgcgtgaacgcaaatatgggtataaggattatcgagacattggatctgcacagtagcctccatcagacatgtgccgaaaatcttattgccattcacggctctttgggctcccaaagcgttagctccgaagagatccgacgcctcttaagactcctcagggtcgacgagtcagaatcagttcacccatatgtgaccccggtgactcgggcgatcctgactatggcccgcaagctcagcctagagtctgcactccagtactttaatctgagccactccatggcgggcatttccgtccccccaatccagaagtggcctggctccgccttctctttcagcgcatggttttgcctcgatcaggatcagctcaccttaggcatagctaacaagggtggtaagcgcaaacagctgtactccttctttacaggatcaggcatgggctttgaggccttcattactcattcaggaatgctggtcgtggccgtgtgtacaaagagggaatatgccacagtgatgctacctgatcatagcttctgtgactctctttggcataacatcacagtcgtgcacatgcccggcaagcgcccattcggtcaaagctttgtttatatttacgacaatggtcagcagaaagtctccgctcctctgcgctttcccgccatgaatgagccttttacttcctgctgtattggatcagcgggccagcggacaaccacacctcccccatcacagatcccagacccgccgttctcttctcctatcaccccacatcggacgagcttcggggggattctgtctagtgcgtcttggggagggacaatagaaaagtccaagttgattaccaaactcatctcggccggaactcaggattccgagtggggctgcccaacctcgctcgaaggacagctgggatcggtgattattttttatgagcctctgcagcctccccaggtgaaggctctctatttggccggacccaattgccttagcccctggaaatgccaggaatccgatatggcagacctgcctggcaacatccttctgtactacacagccaaagcctgtaagaactctatctgtctggatctgtcgactaactgcttgcacggccggctcacaggaaacaaggtcgtgaactgggatataaaagacatcatcaattgcatcggaggcctgaacgtcctgtttccactgcttgagcaaatatcccacttctctgagggccagattccagaggagaagaatgagagcactgttccggagtccgtgactcccgttgagggcgattggctggtatggacatcaacgaaggccagcgagtcaaggctcgaacggaacttggtcgccacatttattttgatcgtaaaacactttattcaacgccatcccataaatcagggcaacctaatccattctcatggggtggcaactttgggggcgctgcttcagaaagtgccatccacactgatggatgtgaacgtgctaatggccgtgcaattattgatcgaacaggtgtcccttgaaaagaacatgcagctgttacagcagatgtaccagtatctgcttttcgatttccgcatttggaaccgcggcgatttcccattcagaataggccatatccagtacctctccacgatcatcaaagactcaaggcgggtgttccgcaaaaagtacggcgtacagttcttgctggataccctcaggatctactatggaaatggatgtaagtataacgagctcagtttggacgacatacgtacgatccgaacgtcgttgtacggactcattaagtacttcttatgtaaaggtggttcccacgaagagattcagagcattatgggatacattgctgccaccaatgaggaggagcaacttttcgggatcctggatgtcctgttctccctcctacgtacttcaccaacgagaggccagcttttcctgctgctttttgagccaggcaatgcagacattctctacgcattattgttaaaccagaaatactccgacagattgcgcgagatcatcttcaagatcatggaacaaatgttaaagtgtacgaacgtgtacgagcgcagtaaacaacacatccgcctaagggaggtaggctattctggcctgggccttctgttaaatgaggctctcgtaaatacgtctctgattaagaatttgacccaccagattattaataccgaccccgtgattaattttaaggacctgttaagtgtcgtttacatatctcaccgggcccacatcaacgtccgtgtggccatttgcagaaaggtgctacagatcctgcagtttcagcctgacgccgctcatcagatctcccagcaggtcggctggcaggatacactggtgaggctgttccttaaagcaaagttcgaaaacggaaacacactccacaaacattccagggccgtcttgatgaaagacaatgacaagaacatgagcacggaggatacaaagaagaactctgatgagaaaaccgacgaagaaaaaatcacctcatttgcctcagcaaatgtttcttctgaccaatggtccctggaggaccgtcacagtctggactccaatactcccttgttccctgaggatagcagcgtcggcgaactgtcatttaagagtgagaatcaagaggaattttggcattctaatccatcacaccttagtctagacctgagcggtattgatagttgtgaaatgtcagactcaggatctcaagtgcctgacagcctgccaagtaccccaagccctgttgagagtacaaaaagcttctccgtgcattctgatcgggagtccagcattactaatgacatgggattttctgatgacttctctctgcttgagtcgcaggaacgctgcgaagaagagcttctacagttgttgacccatatcttgaactacgtaatgtgcaagggtcttgagaagtccgacgatgatacatggattgagcgcgggcaggtgtttagtgcactctctaaacccggaatctctagcgagctgttacgcccgagcgacgaaattaagcttaccttgctgcagaagatgttggagtgggcgatttcagaaaacagggaggctaagacaaacccggtaaccgcggaaaacgcctttcgtctagtcctgattattcaggatttcctgcagagtgaggggttagtgaactccaatatgtggacggaaaaactgctcgaagacatgatgcttctatttgattgtttaagcgtttgctattcagaaagtcctgtgtgggtgaaactgtctcagattcagattcagctgctcctggggttcatcggccgcggaaatttacaggtttgcgcaatggcatccgccaagctgaatacgcttctgcagaccaaggtcatagagaaccaggacgaggcttgttacatcctgggtaagctggaacatgtattatcacaaagtatcaaggaacagaccgaaatctattcgttcttgatacctctagtacggaccctagtcagtaaaatatacgaactgctatttatgaatctccacctcccgtccctgccgtttactaatggctcatcatctttctttgaggacttccaagagtactgcaattcaaatgaatggcaagtgtatattgaaaagtacattgtgccttacatgaagcaatacgaagctcacaccttctatgacggccacgagaatatggcgctttactggaaggactgctatgaagccctcatggtgaacatgcataagcgcgacagggaggggggcgaatctaaattgaagtttcaggagttgtttgtggagcccttcaaccgcaaggcgcgtcaggagaacctgagatataacaacatgcttaagcagttgtcatcccaacagctggctaccttgcgaaggtggaaagcaatccagctgtacctgacatgcgagcgtgggccatgggctaaacgcaagcaaaatccaatccattggaagctcgcgaatgtggaaaactatagccgcatgcggctaaagttggtgcctaattacaactttaagactcatgaagaggccagtgcactccgggacaatctgggcattcaacacagtcaaccatcctctgacaccttacttctggaagtggtgaaacaagtgaaggtatctgacatggtggaggataaactcgatctacccgaagaagatatcacagcccgggtcaacgtagacgaaaaggaagaacaggatcagaaggagaagttggtgctgatggaggactgtgaactgattactattattgatgtcatcccaggtcggctggagattacaacgcagcatatttatttctacgacggaagcatcgaaaaggaggacggtgtgggttttgactttaagtggccacactcgcagatcagagagatccacctgcgccgctataacttgcggaggagtgctctcgaaatatttcacgtggaccagtcgaattattttttgaattttaagaaggaagtccgcaacaaaatctactctcggctcctgtccctacattcccccaattcctactatggctccaggtccccccaggagttatttaaggcctctggcctgacccaaaagtgggttaatcgtgagatttccaatttcgattaccttattcagatcaacaccatggccggcaggacgtataatgatttggcccagtatcccgtttttccttggattctccaagattatacgagcgaggagttggatcttaataaccccgccgtgttccgtgatctttctaaacccatcggcgtggttaacgagaagaatgccaaagctatgagagagaagtacgagaacttcgaggatcctatgggcaccatagataaattccattacgggacccattactcgaattcagctggcgtgatgcactatcttattagggtcgaacccttcaccacactgcacatccagctgcagagtggtcgtttcgattgcgccgatcggcagtttcactctattcctgccacatggcaagccctgatggataatccttacgacgttaaagagctgatccctgagttcttctatttccctgagtttttggaaaaccagaatcagtttaacctcgggcgtttacagatctctaaggaactggtgaacgacgtgatactgcctaagtgggccaagagcgcagaggactttatctacaagcatcgaaaagcacttgagtccgagtacgtttccgctcacctgcatgagtggattgacttgatcttcggctataaacaacgggggccagcagcagttgaagcactcaacgtgttctactattgctcgtatgagggtgcagtggatctggacgcattgactgatgagaaggagaggaaggccctcgaaggcatgattaataactttgggcaaacgccatgccagctgctcaaggagcctcaccccccgcggctcagcgcggaggaagctgtgcaaaagcctaccaaaattgacacgtctactctgaacctctttcagcacttgcctgagctgaaatcgttctttattgaaggtatatcagacggaattcccctcctgaaagcaactattcccaagaatcagtataggagtttcatgagccagggttcgcctgagctgctcatcactatttccatgaactatgtcataggtacccacggatggctgccttacgaccggaatatatccaattactttacttttatcaaggaccagaccgtgaccaatccaaaaacccaaaggtctatcaatggctcctttgcccctggactcgagataacatccaagcttttcgtcgtgtcccacgatgcaaagctcctcttctccgcaggttactgggacaatagcattcaggtcatgagtctgaccaaaggcaagataatctcccatattatccggcatatggatatcgtgacctgcttggcaactgactactgcgggatacatctgatttctgggtctagagacactacctgtatgatatggcagatcacccaacagggaggagtccctgtcgggcttgccagtaaacccttccaaattctttacggacatactaacgaggtgctgtcagtaggcatatccacagagctggatatggcagtgtctgggagtagagacggtacggtgattatccatacgattcagaagggacagtacatgcggacactgcgccctccctgtgaatcatccctgttcctgacaatccctaatctggccatcagctgggaaggacacattgtggtctactcctcgaccgaagagaaaactaccctcaaggataagaatgcgcttcatctgttcagcatcaatggaaagtatctggggagccagattctaaaggaacaggtgtcagacatttgcatcattggtgagcacatcgtcaccgggagcattcaaggctttctgagcatccgcgatctgcactcactcaacttgtctattaaccccctcgctatgaggcttcctatccattgcgtttgtgtgactaaggagtatagtcatatcctggtgggcctggaagacggcaaattaatcgtggtgggagttgggaaaccggctgagatgaggagcggccagctgtccaggaagttttggggaagttctaagcgcttgagccagatctccgccggagaaacggagtataacactcaggacagcaagtag

SEQ ID NO: 196925 - DNA, 7713 bp, synthetic construct
  misc_feature 1..7713: note = Description of Artificial Sequence: Synthetic coding sequence
  source 1..7713: mol_type = other DNA
atggccgccagcgagcggctgtacgagctgtggctgctgtactacgctcagaaggaccttggatatctgcagcagtggctgaaggccttcgtgggcgcattcaagaaaagtatctccctcagctccttggaaccaagaagaccagaggaggccggggctgaagtgccactgcttccccttgatgaactgcatgtgctagccgaacaactgcatcaggcagatttggagcaggcattgctgctcctcaagctctttatcatactttgtaggaaccttgaaaacatcgaggccggcagggggcaggtcctggttccacgggttctggcccttctgactaaacttgtggcagaacttaagggatgtcccccaccccaggggagaggaacccagctcgagaatgtggccttacacgcactgttgctttgcgagggtctgttcgacccttatcaaacttggcgccgccaacgctctggggaggtgattagcagcaaggaaaaatctaaatacaagttccctcccgcagccttgcctcaagaattctctgccttcttccaagagtccttgcagaacgcagatcatctgccccccatcctgttactcagactgatacatctgttctgcgctgtactggctggggggaaagaaaacggtcagatggctgtgagtgatggttcagtgaagggcctcctttccgtcgtgagaggttggtcaagaggccccgcccctgacccatgcctggtgccccttgctcttgaagctctggtgggcgctgtgcacgtcctgcacgcttccagggccccacctcggggccccgaactgagggctcttctggaaagctattttcatgtactcaacgcagactggccggcggggctcagttcggggcctgaggaggccctggtaactcttcgtgtgtccatgcttgatgctatccctatgatgctggcttgtgaggatagacccgtgctccaggctacttttctcagcaataattgtttcgaacacctcacccgcttaatccagaattcgaagctgtacctgcagtcccgggccccacctgagggtgactccgacctggccacaaggttgcttacagagcctgatgtgcagaaggtgttagaccaggatacggacgcaattgccgttcacgttgtgagggtccttacctgcattatgtccgacagcccatccgccaaagaggtattcaaagaacgcatcggctacccacatctccaggaagtcctgcaatctcacggccccccaacccacaggctgctgcaggagctcttaaacatggctgtggagggtgaccatagtatgtgtcctcctcctcctatcagaaacgaacagccggtcctggtgctcgctcaatggcttccctccctgcctacagccgaacttagactgtttctcgcgcagcggttacgatggctgtgtgatagttgccctgccagccgggccacctgcgttcaagctggtctggtgggatgcctgttagagaccctcagcacaggtctggcccttgaggcgcggtgccaggaacaattgctggccctccttcaggcccttggcagggtgtcaattagaccgatggagcttcggcatctcctacgccctcgccctggcctggacagtgaacctggaggggcagaggctgggaaggcacgacatgcgggagccgttatcaggactttgtctgggatggctaggcatcagggccccgccagagcgctcaggtatttcgacctcaccccttctatggccggcataatggtgccgccagtgcagagatggcccggtcctggctttaccttccacgcctggctttgtctgcatcctatggatacagcacctacgccagccccgacaagacctctccagaggaagcaactgtatagcttcttcaccagttccggaagcgggttcgaggcctttttcacagcagccgggacactggtcgttgcggtctgtacccggaaggaatatttgacaatgtctctgccagaagtgagcttcgccgatagtgcttggcattgtgtcgctatcgtgcatgttccaggacggcgtccattttctcagaacctagtccatgtgtacaaagacggccacttggtcaaaaccgccccattgcgatgcccctctctgtcagaaccatttagcagttgttgcatcggtagcgcaggctatcgaacgacaactaccacgacagggcttcccaccccgcccgtgcctgctacactagcgtacacccaccccgccctcacaaggtcacagtccgtaccagcctctactggtctaggttggggatcaggtctggttgctccattgcaggaggggtccatagattcaacactggccggaacccaggatacgcggtggggatctcccaccagtctggagggggagcttggggctgtggcaattttccacgaagctctgcaggcaactgctctgagaaccctctgtaccctcggcccaaatgagactgcacccttcaagcctgagggcgaattacatgaactgagcactcgtcttttgctccactattctccacaggcgtgtaaaaataacatctgccttgatctgtccccaagccatggattggacggcagactgaccggccaccgagttgagacctgggacgtgaaagatgtggttaattgcgtgggaggcatgggcgccttattaccacttttagaaagagtggccgctcaacccaaagaagcggaggcaggtccagcagagactcacgatctcgttggcccagaactgacgagtggccacaacactcaaggcctagtgctacctttggggaaaagctccgaggagcggatggaaagaaatgctgtggccgcgttcctgctgatgctgcgaaactttctccagggccatatggtgaatcaggagagcctagtgcaatgtcaggggcctgccattatcggcgcactgcttaggaaggtcccatcctgggctatggatatgaacgtgcttatgtccgctcagctcctgatggagcaggtcgccgcagagggaagcggtcccctgctctatttactgtaccaacacttattattcaatttccacttgtggaccctttctgactttgcagtgcggttgggacatatacagtacatgagctctattgtgagggagcataggcaaaagctaaggaagaagtatggggtccaattcatcctcgacgcactgcgaacgcattactctccccagcgcgaaagacccttagccgctgacgatcttcgcacagtgcaaactagcttacttggtctcgccagggaattcctcgtgcgcagcctgagcgccgacgatgtgcaggtgactcaaaccatgctttcatttttggcagccacaggggacgacggccagatcttgcgtcgtctccaacagaatgaacgactacctgagcgcagccgacagcggttgagactgagagagtgcgggctccaggggctcgtcgcttgcctacctgaggggacagtgtccccccagttgtgccaaggcttatacaaactgtttctaggggctgggtctggaaataccgcaggtggaggcggcagctctgggacactgacccctgcaagtcagcccggaactccgtcccccctggacggccctcggcccttccccgccgctcccgggaggcacagttccagtctgagcaacgttttagaagacggtagcctgcctgaacccacaatctcaggtgacgacaccagcaatacaagcaacccccagcagacttccgaggaagagctgtgcaaccttttaaccaacgtcctattcagcgtcacatggagaggtgttgaaggaagcgacgaggcagcatggagggagcgcggacaggtgtttagcgtgctaactcagctcggagcgtctgcaaccctggtccgaccgcctgactgtatcaagaggtctttgcttgaaatgatgctggaatccgcattgactgacattaaggaggcccctgttggggtgctggcatccctgactcagcaagccctatggctcctgcgtttgctgcaggatttcctttgtgctgaggggcacggcaaccaggaactctggagtgaaaagctatttgagggcgtgtgctccttgctggataggctcggggcgtggccgcacctggccaacggcactgctgaccttcgggaaatggcacagatcggattgaggctggttctgggatatattctgttggaagacccacaattgcacgctcaggcatatgtgcggctccacatgctactgcagacagccgtgcctgctcgtagggaagaggcatgctatgtgctctcaaaactggaggccgccttgggcagagtgctcaacacaagttcacttgaatcagccactgacgaagcaggtagccccttggccgcggcagccgccgccgccgcagcagagagatgtagctggctggtgcccttagtgagaacgctcctggatagggcatatgagcccctgggtcttcagtggggactgccttccctcccaccaaccaacggaagccctaccttttttgaagatttccaggctttctgtgcgactcccgagtggcgtcatttcatcgataagcaggttcaaccaacaatgtcacagtttgagatggatacttacgcaaagtcccatgacctcatgtcagggttctggaacgcatgttacgatatgctgatgtcttccgggcagcgcaggcaatgggaaagggcacagagcagacgggccttccaggaactcgttctggaacccgcacagcgccgtgctcggctggaaggtctgcggtacacagcggtcctaaaacagcaggcgacacagcattctatggcattgttgcactggggcgccctgtggaggcagttggcctctccgtgcggggcatgggcactcagggacaccccaattccgaggtggaaactgtcttcagcagagacctactctcggatgcgactgaaactggtgcccaaccaccattttgacccacatctcgaggccagcgctcttagggacaacctgggcgaagtgccactaacccctactgaagaggcttcactccccctcgcagttaccaaagaggctaaagtgtcaaccccgccagaactcttgcaggaggaccaactgggcgaggacgagctggccgagctggagactcctatggaggcagctgaattagacgagcagcgggagaagctggtactctcagcagagtgccaattggtaaccgtggttgctgttgtccctggcttactggaagtgacaacgcagaacgtctatttttatgatggctctaccgaacgtgtggagaccgaggagggtatcgggtacgacttccggcgccccctcgcccaacttcgcgaggttcacctccgccggttcaacctacgtcgctccgccctagagctattctttatcgatcaagcgaactacttcctgaacttcccatgcaaggtggggactacccctgtctcttcaccctcgcagaccccaaggcctcaaccaggccctatcccacctcacacccaggtgcgaaatcaggtctacagctggcttctaagactgagaccccccagccagggctacctgtcttctcgtagcccccaggaaatgctgcgcgcctccgggctcacccagaaatgggtgcaacgggaaattagcaatttcgagtatctgatgcagctcaatacgatagccggcaggacatacaacgacctctcacagtatccagtcttcccttgggtacttcaggattatgtgtcaccaactttagatttgtctaatcccgcagtgttcagggatctttccaaacccataggcgtggtcaacccgaagcatgctcagctggtccgcgagaagtacgagtcttttgaggacccagcaggaactatagacaaatttcactacggtacccactatagcaacgctgctggagtcatgcactacttgatcagggtcgaaccttttacttctctgcacgttcagctgcaatccgggcgctttgactgctccgacagacaattccactctgtggcagccgcatggcaggcccgcctggaatcacctgccgatgtgaaagaactcattcccgagtttttctatttccctgactttctagagaatcagaacgggttcgatttgggttgtctccagctgaccaatgaaaaggtcggcgatgtggtgcttcccccatgggcatcttccccagaagacttcattcagcagcaccgccaggccctcgagtctgagtacgtgtcggcacatctgcacgagtggatcgatctgatcttcggatacaagcagcgcggacctgccgccgaggaagcattgaatgttttctactattgcacctacgagggtgcagtggacctggaccacgttacagacgagcgtgaacggaaggctctggagggcatcatatcgaactttggacagactccttgtcagctgctcaaagagccacaccctactagactaagcgctgaagaggccgctcacagactcgccaggctcgatacgaatagcccgagcatctttcagcacctggacgaactgaaggctttcttcgccgaagtggtctctgatggtgtcccacttgtgttggccctagtgcctcaccggcagccacacagctttattactcaaggaagtcccgatcttctagtcacagtgagcgcttcaggcctgcttggaacccactcctggttgccttatgatcgtaatatttccaattacttcagctttagcaaagaccccactatgggttcacacaaaacgcaacgcctcctcagcggtccgtgggtcccgggctcgggggtgtctgggcaagcgttggctgtcgcgccagacggaaaattgctcttctccggtggccattgggacggaagtcttcgcgttactgctctgccccgaggcaaactgctgagccagttgtcatgccatctggacgtggtgacttgcctggctctggatacgtgtggaatttacctaatcagcggcagtcgcgacacaacgtgcatggtctggaggctactccaccagggagggttgtccgtcggcctcgctcccaaacccgttcaagtactgtacgggcatggcgccgccgtcagttgtgtagccatttctaccgagctggacatggctgtgtctggctctgaggatgggacagtgattatccacacagtccggcgcggccagttcgtcgcagcgttacgacctctgggagccacattccccggccctatattccatctggccctaggttcagaagggcaaatagtggtgcagtcatccgcctgggagagacctggagcacaggttacatactctctgcatctctacagtgtcaatgggaagctgcgggcatcacttccattggccgagcaacctaccgctctgactgttaccgaggacttcgtactgcttgggactgcacagtgcgctctgcacatcctgcagctgaatacgttacttcccgccgccccaccactgccaatgaaagtggcgattagatcggtcgctgtgacaaaggagcggtcccatgtgctggtgggattggaagacggtaaactgatcgtggtggttgctggtcagccctccgaggtgagatcctctcaattcgccagaaagctttggcgttcgtcaaggaggatcagccaggtgagctccggtgagactgagtataaccccactgaggcccggtag

SEQ ID NO: 196926 - DNA, 1848 bp, synthetic construct
  misc_feature 1..1848: note = Description of Artificial Sequence: Synthetic coding sequence
  source 1..1848: mol_type = other DNA
atggagcccgccctgggccccggcgtgcagaaggacctgggctacctccagcagtggttaaaggcttttgtgggggcctttaaaaaatcaatctctctctcctctctagagccgcgcaggccagaagaagccggcgcagaagtgcccttgttgcccctagatgaactccacgtgctggcagaacagttgcaccaggccgacttagaacaagccctattgctgctcaaactttttatcattctttgcagaaatttggaaaacatagaagcagggagaggccaggtgctggtgccacgggtcctggccctgcttactaaacttgttgccgagttgaaagggtgcccgccgccacaaggtcgaggcacccagctcgaaaatgtggctcttcacgctctgcttttgtgtgaaggattatttgatccgtaccagacctggcggaggcagaggtccggggaggtcatcagctcaaaggagaaatccaagtacaagtttccaccagctgctcttcctcaggaattttccgccttctttcaggagtccctgcagaacgctgaccatttgccaccaatcctgctcctgagattgattcacctgttttgtgccgtcctagctgggggtaaggaaaatggtcagatggccgttagtgacgggtccgtcaaaggcctgctgagcgtggtgagagggtggtcacgagggccagcgcccgacccgtgcttggtccccctcgccttggaagctcttgtgggcgccgtccatgtgctgcacgcatctcgcgctcctcctcgaggccctgaactacgcgcgctccttgagagctacttccatgttttgaatgccgattggccagcaggcctctctagcgggcccgaagaggcccttgtgaccctgcgtgtcagcatgcttgacgcaattcctatgatgctcgcctgtgaggaccgccccgtgctgcaggccacctttttatccaacaactgtttcgaacacctgacaagattgattcaaaactcaaaggtactcgaccaggacacagacgcaatcgccgttcatgtggtgagagtattgacgtgtatcatgtccgattctccttctgctaaagaggtgttcaaagagcgcattggttatccccacttgcaggaggtgttgcagtcccacggacctcccacccacagactgttacaggaacttctgaacatggctgtggagggtgaccatagtatgtgtcctccgccacccattcgcaacgagcagcccgtactcgtcttggcccagtggctgcctagcttgccaaccgccgagctgcgcctgttcttagcgcagcgcctccgctggctttgcgattcttgcccagcctccagggctacctgcgtgcaggcaggacttgtgggctgtctgctggagacactgagtacaggactggcactggaggcacgctgtcaggagcagctgctggccctgctccaggctctgggcagggtgtctatcaggcccatggagcttcggcatctgctgagacccagacccggcctggactccgagcccgggggggccgaggctggcaaagcgagacacgcaggcgcagtcatccgaactctttccgggatggctcgccaccaagggccggcaagggcactgaggtatttcgatctgactcccagcatggctggaattatggtccccccagtgcagagatggcctggacctggcttcactttccacgcctggctgtgtttacatcccatggacaccgcccccacacctgctcccccaaccctgccctcaagtgggatcgggggacggtgctaccctctcagggactggagagccgaggtgccccctttagccggttag

SEQ ID NO: 196927 - DNA, 3012 bp, synthetic construct
  misc_feature 1..3012: note = Description of Artificial Sequence: Synthetic coding sequence
  source 1..3012: mol_type = other DNA
atgagccagttcgagatggacacctacgccaagagccacgacctgatgtccggtttctggaacgcttgttatgacatgctgatgtctagtggccagcggcggcaatgggagcgggcgcagtcccgccgggcttttcaggagttggtcctcgaaccagcacaaagaagggcccggctggaaggcctccgctacaccgcagtgttgaagcagcaggccacccaacacagcatggccttactccattggggtgctctttggagacagctggcaagtccttgtggcgcttgggctctacgggatacccccatccccagatggaaactctcaagtgccgagacatacagcagaatgcgactgaagctcgttccaaaccatcacttcgacccacaccttgaagcctccgccctgcgcgacaacttaggtgaggtgcccttgaccccaactgaggaggccagtcttcctctggccgtgaccaaggaggccaaggtctctacgcccccagagctacttcaagaggaccagctgggcgaggatgagctggccgagcttgaaaccccgatggaggcagcggaactggacgaacaacgcgaaaagttggtgttgagcgcagagtgccaactggtcacggttgtggccgtggtccctgggctcttagaagtgacaacccaaaatgtttatttttacgatggctctaccgaacgtgtggagactgaggaggggattggatacgatttccgccggccacttgctcagctgcgggaggttcacttacgaaggtttaacctcagaaggtctgccttggagcttttttttatcgatcaggccaactacttccttaatttcccttgtaaagttggcaccaccccagtgagcagccccagccagactcccaggcctcagccggggcccattcccccccacacacaggtcagaaaccaggtctacagctggctgcttcgattaaggccgccctcacaagggtatctgtccagtaggagccctcaagagatgcttagggcttccgggttaactcagaagtgggtgcaacgggagatcagcaactttgagtatctcatgcagttaaataccatagctggcaggacttacaatgacttaagtcagtaccctgtatttccctgggtcttgcaggattacgttagcccgacattggacctgagtaacccggcagtgtttcgcgacctttctaagccgatcggagtcgtgaacccgaaacatgcacaactcgtaagagagaagtacgagtcgttcgaggaccctgcaggaactatcgataaatttcattacgggacacattattccaacgcggcaggcgtgatgcattatctaatacgggtggaaccttttacttctctgcatgtgcagcttcagagcgggcgctttgactgtagcgaccgacagtttcacagcgtggctgccgcatggcaggcgaggctggagtctcctgccgacgtcaaggaattgatacctgagtttttctacttccctgactttctagagaaccagaatggctttgacctggggtgccttcagttgaccaacgagaaagtcggtgacgtggtgctccctccatgggcttcatcccccgaagattttattcagcaacatcggcaggccctcgagagtgaatacgtttcggctcatctgcacgagtggatcgacttgatcttcggctacaaacaacgagggcccgccgctgaggaggccttaaatgtcttctattattgcacctatgagggagctgtggatctggatcacgtaactgacgaaagagaacgtaaagcactggaggggattatcagcaattttgggcagaccccgtgtcagctgctcaaggagccacaccccacgcggctcagtgctgaggaggcagcccatcgtctggctcgcctggacaccaacagccctagcatcttccaacatctggacgagttgaaggcatttttcgccgaagttaccgtgtccgcctctggactcctcggaacccacagctggcttccatatgatcgcaatatctcgaactacttctcctttagcaaggatccaactatgggtagccacaaaacacaacgtttattatccgggccctgggtgccaggatcaggggtttctgggcaggctctcgcagtcgcaccggacggtaagctgctctttagtggcggccactgggacggttcacttagagttaccgccttgcctcgaggcaagctattaagccaactttcttgtcacctcgatgtggtgacctgcttggccctcgacacatgcggaatctacctcatctccgggtcaagggatactacatgcatggtttggcgcttgcttcatcagggcgggctgtccgtgggcctggctcctaaaccagtgcaggtgctatatggccatggcgcggctgtttcctgtgtggcgatctccactgagcttgatatggcggtgtccggaagtgaagatggcacggtgatcatacataccgtgagacgcggacagtttgttgcagctcttcgccccctgggcgccacctttcccgggccaatatttcacctggctcttggctccgaagggcagatcgtggttcagtcatctgcttgggagagacccggtgcccaggtgacctacagcctgcatctgtatagcgttaatggaaaactgcgggctagcctccctcttgccgaacagccaaccgctctcaccgtgactgaggacttcgtcctcctgggtactgctcagtgcgccttacacatacttcagctaaatacactacttcctgcagccccgcccctgcctatgaaagtcgctattaggagcgttgcagtcactaaggaaaggagccacgtcctagtcggactcgaggacgggaagttaattgtggttgtggcagggcagccatctgaggtgcgctcttcacagttcgctcgcaaactctggcgttccagtcggcggatcagtcaagtatcctctggggagaccgaatataatccgaccgaggctaggtag

SEQ ID NO: 196928 - DNA, 2094 bp, synthetic construct
  misc_feature 1..2094: note = Description of Artificial Sequence: Synthetic coding sequence
  source 1..2094: mol_type = other DNA
atgctgcgggccagcggcctgacccagaagtgggtgcagcgggagatctcgaacttcgagtacttgatgcagttgaataccattgctggacggacttacaatgacctgtcacagtatcctgtcttcccttgggtgctccaggactatgtttctcccaccctggatctgagcaacccggctgtctttcgggacctgagcaaaccaattggtgtcgtgaatcccaagcatgcccagttggtgcgcgagaagtacgaatcttttgaagatcccgcaggcacaattgataagttccattacggaacccactacagcaatgcagctggggtgatgcattacctcatcagagttgagccgtttacaagtctgcacgtgcagctgcagtctggccgctttgactgctcagatcgccagttccatagcgtggcagctgcctggcaggcccggctggagtctcccgctgacgtgaaggaactcataccagagttcttttacttcccggatttcctggagaatcagaatggctttgatctcggctgtctccagttgaccaatgaaaaggtcggagacgtcgtgttgcccccatgggcctcttccccagaagacttcatccagcaacaccgtcaagcactggaaagcgagtacgtcagcgcacacctccacgagtggatcgatctcatcttcggatataaacagaggggcccagccgccgaagaagccttgaatgtattttattactgtacctacgaaggcgcagtagacctcgatcacgtgaccgatgagcgggaacgtaaggctctggagggaattatctctaattttggtcagacgccgtgtcagctgttgaaggagccacacccaaccagattatccgccgaggaggctgctcacagactggcccgcctcgatactaacagccccagtatctttcaacacttggatgagctcaaagccttttttgcagaggtggtgagtgacggcgtgccactagtgctggctctggtgcctcaccgtcaacctcactcgttcatcacccagggctcgcccgatctgttggtcactgtgtcagctagtggtctcctgggcactcattcttggctgccatatgacaggaacatctcaaactactttagcttttctaaggatcctaccatgggttcgcacaaaactcagagactgctgagtggcccttgggtacctggctccggagtgtccggtcaggcactggcagtggctccggacggcaagctgttgttctctggcggccattgggatggctccctgagagtgaccgcgcttccacgcggcaagttactgtcccagcttagctgccatctagatgtcgttacatgtttggctctggacacctgtgggatttaccttatcagcggctcacgtgataccacttgcatggtctggaggctgctccatcagggcggattatcagttggactagctcctaagcccgtccaggtgctctacgggcacggagcagccgtgtcatgcgtcgccatctcaacggaactggacatggccgtctctggctcggaggatggtacagtgatcattcatacagtgcggcgcggacagtttgtggccgctttgaggccactgggggccacatttcccggtccaattttccatctggcgctggggtcagagggtcaaattgtcgttcagtcttccgcatgggagcgacccggggctcaggtcacctacagcctgcatctttactccgttaacggcaagttacgggcctcgttgcccctggctgaacagcccactgcactgaccgtcaccgaggactttgtgttattaggcaccgcccagtgcgcactgcatatcctacagttaaatactctgctcccggccgctccaccactgcccatgaaggtggccatccgctctgtagctgtgactaaagaacgctcacacgtgctcgtcggactggaagacggaaaactcatcgtggtagtggccgggcaaccaagcgaggtgagatcctctcagtttgcccgcaagctctggaggagctccagacggatatcccaggtgtccagtggcgaaacagaatataacccgaccgaagcacgctag

SEQ ID NO: 196929 - DNA, 8265 bp, synthetic construct
  misc_feature 1..8265: note = Description of Artificial Sequence: Synthetic coding sequence
  source 1..8265: mol_type = other DNA
atggccgccagcgagcggctgtacgagctgtggctgctgtactacgcacagaaagacttggggtacctccagcaatggctcaaagcctttgtaggagccttcaagaaaagtatttctttatcaagcctcgagccccgacgacctgaggaggctggggcagaggtcccgctgcttcctctagatgaactccacgtcctcgcggaacagctgcaccaagccgacttagagcaggctctgctcttactgaagctcttcattatcctgtgtcgtaatttagaaaatatcgaagcaggaaggggtcaagtcctggtgccacgagtcctcgccctcctgactaaactcgtcgctgagcttaagggctgcccgcccccacagggtagggggacccaattggaaaacgtggctttgcacgcgctcctactgtgtgaaggcctctttgatccataccagacctggcggaggcagcgatcaggggaagttatctctagcaaggaaaagagtaagtacaagttccctccagcggcacttccgcaagagttttcggccttctttcaggaatcactgcaaaacgcagaccacctcccccctatactcctgctgagacttatccatttgttttgtgccgtattggccgggggaaaggagaatgggcagatggctgtatcagatgggagcgtgaaaggactcctgtccgttgtgcggggatggagccgtggccctgcgcccgatccttgcctcgtccctctagccttagaggcactagtgggtgcggtgcatgtcctgcatgcctcccgggcgcctcccaggggaccagaactgagggctcttctcgagtcctacttccacgtgttgaatgccgattggcctgccggcctgtctagtggccctgaagaggcactggtaacactgcgtgtgagcatgctggacgctattccaatgatgctagcatgtgaagatcggcctgttctccaggcaaccttcctctctaacaattgtttcgaacatttgacgcgcctaatccaaaattcaaagctgtatcttcaatctcgagcacctccagaaggggacagtgatctggctacccgcctcctcaccgagcctgatgttcaaaaggttctagatcaagataccgatgctattgccgtgcacgtggttcgcgtgttgacctgcatcatgagcgacagccccagcgccaaagaagtcttcaaagaaagaattggctatccccacttgcaggaggtattacagtcgcatggcccacccacccaccggctgctgcaggagctgcttaatatggcagttgagggggaccacagtatgtgtccacctcctcccatacgaaatgaacagcctgtcttagtacttgcacagtggctgcccagcctgccgacagcagagctccgtctgttcctagcacagcggctccgctggctttgcgactcatgtccagcctctagagcgacttgcgtacaggctgggcttgtagggtgtttgctggagacattgtcaactgggctagctctggaagctcggtgccaggagcagctgctagccctccttcaggcactgggcagagtttctatcagaccgatggaactgcggcacttgttgcggccaagacctggattggatagtgagccaggcggtgctgaagccggaaaggccaggcatgccggagcagtcattcgtacgctgtctggaatggcacgtcatcaggggccggcccgcgctctgcgatacttcgaccttacaccttccatggctgggatcatggtgcctcctgtacagcggtggcccgggccaggattcaccttccatgcctggctgtgtttacacccaatggatactgcgcccacccctgcaccaactagacccctccagcggaagcagctgtacagctttttcacatctagtggatctggttttgaggccttcttcactgcagccggcactctggtggttgccgtctgtacacgcaaggagtacctcacaatgtccctccccgaagtaagcttcgccgattccgcctggcactgtgtggcaattgtccacgtccctggaagaagacccttttcccagaacctcgttcacgtgtacaaagacggccatctggtgaaaaccgcccccctccggtgtccttctctgtccgagcccttcagttcctgctgcataggtagtgctggctatcgtactaccaccacgaccacaggacttcccaccccacccgtgcccgccactcttgcttatacccatcctgccctgacccgctctcagagtgtgccagcatcgaccggactcggttggggtagcggactcgtggctcccctgcaggaaggttctattgatagcaccttagctggaacgcaggacacacgctggggctcccctacctcactggagggggagctcggagcagttgccatcttccacgaggcgctgcaagcaacggcccttcgtaccctgtgcaccttggggccgaacgagaccgcccctttcaagccagaaggcgagctgcatgagctctccacccgtctgctcctacattatagtccacaggcgtgtaagaacaacatttgtttggacttaagcccttctcacggccttgacgggcggttgaccgggcaccgggtggaaacctgggacgtgaaagacgttgtcaattgcgtcggaggaatgggcgccctgcttcccctgctcgagcgagtggcagctcaacctaaagaagccgaggctgggcctgctgaaactcacgacctggttggtcccgaactgacctcaggacataatacccaggggctcgtcctccctttgggcaagtccagcgaagaacgcatggagcgtaatgcggttgccgcttttctgctgatgctcagaaattttctccagggccatatggtgaatcaagagtccctggtacagtgccaggggcctgccattataggcgcgctgctgagaaaggtgcctagttgggctatggatatgaacgtcctgatgagcgcacaattgctgatggaacaggtcgccgcggagggctccggccccctcctgtaccttctttaccagcacctgctgttcaacttccatctctggacactgtcagacttcgccgtgcggctcgggcacatccaatacatgtcatcaatcgtgcgggaacaccgccagaagttgaggaaaaagtatggggtgcagttcattcttgatgctctgagaacacactacagtcctcaaagagagagaccactagcagccgatgatctgcgcacagttcagaccagtcttcttgggctagcccgtgaatttctcgtccggtccctgagtgcagatgatgtgcaggtgacccagaccatgctcagcttccttgccgcgacaggggatgatggccaggcagtgggtgccttagatctgctactcgctctgctccacggtagcctcgtacaggagtccctcgccgtgtttctcttggagccagggaatttggaagtcctcctagcactgctggtgcggccaggttccctccccctgctgcctgatcgggtttgcaagatcctgcgtcggctgcaacagaatgagcgcctccccgagcgcagtcggcagaggttacgcctccgggaatgcggtttgcaggggcttgtcgcttgtctgcccgaaggaactgtcagtccccagttgtgtcaggggctctacaagctttttctcggagccgattgcctgaacctctcggatcttctggccgtcgttcagctttccctgcaggcagatctcagtgtgagattggacatctgcaggcagttatttcacctgatctatggccagcccgacgtggtgcgcttactggcaagacaggctgggtggcaagacgtccttacaaggctgtacgtgttagaagctgccaccgccggcagccccccaccgagttctccagagtctccaacatcacctaagccagctccacccaagcctcccacagagtcgccagctgaacctagcgatgtgttcctaccatcggaggctccatgtcccgatcccgacgggttctatcacgcactgtcgccattttgcacgcccttcgatctgggcctggagcggtccagtgtgggaagcggaaacaccgccgggggcggcgggtcctcaggcactctgactccagctagccagcccggtacaccctcacccctcgatggtcccaggccattccccgcagctcccggccgccactcatcgtctctcagtaacgtgctcgaagatgggtccttgccagagcccaccatctccggcgatgacacaagcaatacgtccaaccctcaacagacatccgaggaggagctgtgtaatcttttgactaatgtgcttttctctgtgacctggagaggggttgagggctccgacgaggcagcctggcgcgaaagaggccaggttttctccgtacttacccaactgggggcctccgccactttagtcagaccaccagattgcatcaagaggtccctgctggaaatgatgctggaaagcgctctcacggacattaaggaggcacccgtcggcgtgctggcctcgctcactcagcaggccctgtggttactccgcctgcttcaggattttctctgcgccgaagggcacggtaaccaggaactttggtctgagaagctgttcgaaggggtgtgtagtctgttggatcggctgggagcctggccccatctggccaacggaacagcagacttgcgggagatggcgcagatcggccttcggctcgtgctggggtatattctcctggaagatcctcagctccacgctcaggcttatgtacgactccacatgttgctccagacagctgtgcctgctagaagagaggaagcttgttatgtgcttagtaagctggaagcggcactcggacgagtgttaaataccagcagcttagagtcagccactgacgaagctgggagccctctcgcggcggcagctgcagccgccgcagcagagcgatgcagttggttagtgccattagttcgtacactgctggatagggcgtacgagcccctcgggctccagtgggggcttccttccctgcctcctacgaacgggagtccgactttcttcgaagactttcaggccttttgtgccacacctgaatggagacacttcattgacaagcaggtccaacccaccatgtcgcagtttgaaatggacacttatgccaagtcgcatgatctcatgtccggcttttggaacgcctgctatgacatgctgatgtcaagcggccagcgacggcaatgggagagggcacagtcccggcgcgcgtttcaggagctggtgctagaaccggcccagagaagagctaggctggagggcctgagatacacggccgtactaaaacagcaggccacccagcactcaatggcccttctccactggggtgccctgtggagacagctggcctctccttgtggcgcttgggccctgcgtgacacccctataccccgctggaagctgtctagcgcagagacttactcccgtatgcgcctcaagttagttccaaaccatcatttcgaccctcaccttgaagcttcggcacttcgcgacaacctgggggaagttcctctgacacctactgaggaggcctcccttccgctggccgtcaccaaggaggctaaagtgagcactccccctgagctgcttcaggaagatcaacttggggaagacgagctcgctgagctggaaaccccaatggaggccgccgagctggacgaacagcgggagaagctggtgctgagtgccgagtgtcagctggtgaccgtggtagctgtggtacccggattgctggaggtgactactcaaaatgtttacttctatgacggctccaccgagcgcgtcgaaaccgaagagggtatcggctatgattttcggcggccactggctcagctcagggaggtccaccttcggcgatttaatctgcggcgaagtgcactcgagctcttttttatcgaccaggccaactacttcctgaatttcccctgcaaggtgggcacaaccccggtgagctctccaagccagaccccacggccgcaaccaggcccaatcccccctcacacacaagtgcgcaatcaagtgtactcttggttgcttcggctcagaccaccctcacaaggatacttatcttccagatcccctcaagagatgctgcgggcctccggacttacacagaaatgggttcagcgggagatttccaatttcgaatacttaatgcagctgaacaccatcgctgggcgaacatataacgatctaagccagtaccccgtttttccttgggtgctgcaagattatgtctccccaaccctcgatctgagcaatcccgccgtgttcagagatctgtccaaaccaatcggcgttgtaaacccaaagcatgcacaactagtcagggaaaaatacgagagttttgaggaccccgcgggcacaatcgataagttccactatggcactcattacagtaatgcggcaggcgtgatgcattacctgattcgggtggagccgttcaccagtctacatgttcagttgcagagcggccggtttgactgctcagatcgtcagttccactccgtcgcggcagcgtggcaggctagactcgagtctcccgccgacgtgaaggagctcatacctgaatttttttatttcccagattttctagagaaccaaaacgggttcgacctcggatgcctgcaactaacgaatgaaaaagtgggcgatgtcgtgctgccaccctgggcctccagccctgaagactttattcagcagcacagacaagccttagagagtgagtacgtgtctgctcatcttcacgagtggattgacctgatctttgggtataaacagagaggccctgccgcggaagaagctctgaacgtgttctactactgtacgtacgagggcgcggtggacctggaccacgtcaccgacgaacgtgagaggaaagctctggagggcatcatatcaaatttcggccagaccccatgtcaacttctgaaggagccccaccccactcgcttgtctgctgaagaagcagcccatcgtctcgcaagattggacaccaacagtccgtccatttttcagcacctggacgagctgaaggcattctttgctgaggttgtatccgatggagtgcctctcgtgcttgcgctggtacctcaccgccaaccacattctttcatcactcagggttcccccgatctcctcgttacagtgtccgcatccggactgctgggaactcattcctggctcccctatgaccggaatatatcaaactatttcagcttctctaaagatcctaccatgggatcgcacaagacgcagcgactcctgagcggtccttgggtgccgggctctggcgtgagcgggcaagcgctggcggtagcgcctgacgggaaactgctgtttagcggaggccactgggatggctcccttcgcgtaaccgccctgcctaggggaaaactgctttctcaactttcctgccacttggacgtagtgacctgcttagcccttgatacttgcgggatatacttgatcagcggctctagagacaccacttgcatggtgtggagactcttacaccaaggaggcctttccgtgggtctggcacccaaaccggtgcaggtgttgtatggccacggggcggcagtgtcatgtgtggccatcagcactgaacttgatatggctgtgtccggatcggaggatgggacggtgattatacacacagttagacgggggcaatttgtggctgccctcaggcccttgggcgccacttttcctggaccaatctttcatctcgcgctcgggagcgaggggcagatcgttgttcaatccagtgcatgggagcggcccggggcccaagtgacctattcactccacctttacagcgtgaatgggaaattgcgggcaagcctgcccctcgctgagcagccgaccgctcttaccgtcaccgaggactttgttctcctggggactgctcagtgcgctctgcacatcttgcagttgaacacactgctgcccgctgcaccgccacttcctatgaaggttgctatccggtccgtagccgtcactaaggaacgttctcatgtgctggtcgggttggaagacggtaagctcatcgtggtggtggcgggtcagccaagcgaggtccgctccagccagttcgcgcggaaattatggaggtcctccaggcgaataagtcaggtgtccagtggcgaaacagaatacaaccctaccgaggctcgctag

SEQ ID NO: 196930 - DNA, 7116 bp, synthetic construct
  misc_feature 1..7116: note = Description of Artificial Sequence: Synthetic coding sequence
  source 1..7116: mol_type = other DNA
atggccgcccccgagagcggccccgccctgagccccggcaccgccgagggggaagaagagacgattctgtatgacctcctggtgaatacagagtggccacctgagaccgaagtgcagccgcgtgggaatcagaagcatggagcgtctttcataatcacaaaagcgatcagagaccgcttactgtttctgagacagtatatctggtatagccctgcccccttcttactgcctgatggactggtgcggttggtaaacaagcagattaattggcacttggtcttggccagcaacggaaaacttttggctgccgtgcaggatcagtgcgtcgagattcgctctgctaaggacgactttactagcatcatcggtaaatgccaggtgcctaaggaccccaaaccacaatggaggcgcgtggcctggtcctatgactgcacactcctggcttacgccgaatcaacgggaactgtgcgggtgtttgacctgatggggtctgaactgtttgtgattagccctgctagtagttttatcggagacctttcatacgccatagccggcttgatattcctggagtacaaagcaagcgctcaatggtccgcagagctgctggtgataaactaccgcggcgagctcagaagttacctggtgtccgtggggactaaccagtcttaccaggagagccactgtttttctttttcttctcattatccccatggaataaacaccgccatttatcatcccggccatcgtctgctcctggtcggcggatgtgagaccgcagaagtgggaatgagcaaggcttccagctgcggactgagtgcctggcgcgttctttccggtagcccttactataagcaagtgactaatgggggcgacggcgtcaccgccgttccaaaaactctcgggctgttgcgcatgctgtcagtgaagttctattctcggcagggccaggaacaagacggcatttttaagatgagcctgagccccgatggaatgctgctggccgccattcacttctctggaaaacttagtatctgggcaattccatccctgaagcaacaaggggagtggggacagaatgaacagcctggatacgatgacctcaatcctgactggcgcttatctaccgaaaagcgtaagaagattaaggacaaagaaagtttctatccattgattgacgtaaattggtgggccgacagcgctgtgaccttggcaaggtgcagcggtgccctaaccgtgtcaagtgtgaagacgctgaagaatctcctaggaaaatcatgtgagtggttcgaacccagcccacaggtcactgccacccatgatggagggtttctgtcacttgagtgtgaaattaagctggctcctaagagatcaagacttgagacaagagctggggaggaagacgagggggaggaagattccgattccgattacgagatttctgcaaaagctcggtatttcggatatattaagcaggggctgtatctcgtcacagagatggagagattcgcccctccgcggaagcgacctcgcactattacaaagaactatagattagtctccctgcgttcgactaccccagaagagctatatcagcgtaaaatcgagtctgaggaatatgaggaggcgctctctctcgcgcacacatacggactggatacagaccttgtgtaccagagacagtggaggaaaagcgcagtcaatgtggctagcatacaaaattacttgtcaaagattaagaaaagatcctgggtccttcacgaatgtctagagcgggtcccagaaaacgtggacgccgccaaagagctgctccagtacggcttgaaaggcaccgatcttgaggcactgctggctattgggaagggagctgatgatggtcggtttaccctgcccggggagatcgatatcgattctatctcctacgaggagctgagcccaccagatgaagagcccgctaaaaacaagaaggagaaagagttaaaaaagaggcaggaactgcttaaactggtcaatttcagcaaactgacactggagcaaaaggagctatgccggtgtcggcgcaagctcctgacttacctcgatcggctagcaacttacgaagagatattaggagtaccacacgccagcgagcagaggtacgatgccgagttttttaagaaattcagaaaccagaacattgtcctaagtgctcgcacatatgcccaggagagtaatgtgcaagccttggaaattctttttacttaccatggttctgatctgctgccacaccgtctggcaattctctccaacttcccagaaaccacctctcctcatgagtacagcgtgcttctccccgaagcttgcttcaatggagatagccttatgatcatcccttggcacgagcataagcatcgggccaaggactggtgtgaggaactggcatgcagaatggtggtagagcctaacctccaggacgagagtgaattcctctacgctgctcaaccggaattattgcggtttaggatgacccagcttacagtcgaaaaggtgatggattggtatcaaacaagagcagaagaaatagagcactatgcccgacaggtggattgcgcactctcactcataagactggggatggaacggaacatacctggcttgctggtcctgtgtgataatctggtcacactcgaaactctggtgtacgaagccaggtgtgacgttacacttacattaaaggagctgcagcagatgaaagatattgaaaagctgcggctgcttatgaattcctgttccgaggataagtatgtgacatctgcatatcaatggatggtgccatttttgcacaggtgtgagaagcagtctcccggcgtcgccaacgaattgctcaaggaatatcttgtcactctagcgaagggcgatttgaagtttccccttaagattttccagcattctaagcctgacctgcaacagaaaatcattccagaccaggaccagttaatggccatagcattggagtgtatctatacctgtgagcgaaatgaccagctgtgtctgtgctacgaccttctcgagtgcctgccagaaaggggctatggcgacaagaccgaagccactaccaagctacacgatatggtggaccagctggagcagattctgagcgtttcagagttgctcgaaaaacatggattggagaaaccaataagcttcgtgaagaacacacagtcatcaagcgaagaggcaaggaaactgatggtccgcctgacgcggcacactggacggaagcagccccccgtgtccgagagccattggcggaccctcctccaggatatgttgactatgcagcagaacgtctacacctgtctagattccgacgcatgttacgagatctttacggaatccctgttatgttcttcacgtctcgagaacatacacctcgccggccagatgatgcattgttccgcttgctctgaaaaccctccggcggggatagcacacaagggaaaaccgcactatcgcgttagctatgaaaagagcattgatctggtccttgccgcctcacgggaatatttcaattcgtcaactaacctgaccgattcatgtatggatctggcccggtgctgcctgcaactgatcaccgatcggccccccgctatacaggaggagctcgacctgattcaggcggtgggctgcttggaggagttcggggtgaaaatactaccacttcaggtaagactctgtccagatcgaatctccctaatcaaagaatgtatatcgcagagtcccacatgttacaagcaaagcactaaacttctaggcctagccgaactgctgcgcgtcgcaggggagaatcctgaggagcgcagaggacaagtgcttatcttgctcgtggagcaggccctgcgcttccatgactacaaggctgcgtctatgcactgccaggagctgatggcaaccggatatcctaaatcatgggacgtgtgtagccagttaggccaatcggagggctatcaggatctcgcgacgaggcaggagttgatggcgtttgctctgactcactgtccaccatcatcaatcgagctcctgctcgctgcgtccagctctcttcagaccgaaattctgtatcagcgggtgaactttcagatccaccacgaaggaggcgagaatataagcgcaagtccactcacatccaaggccgtccaggaggacgaggtgggcgtgcctgggagcaattctgcagacctgctgcgttggaccacggccaccactatgaaggtgctgtcaaatacgactactaccactaaggccgtactgcaggctgtctctgatggccagtggtggaagaaatcattaacttatctccggccccttcagggacagaaatgcggaggggcataccagatcgggaccaccgccaacgaagaccttgagaaacagggttgccacccattttacgagtcagtaatatcaaatccctttgttgcggaaagcgaaggcacttatgatacgtaccaacatgtgccagtcgaatcctttgccgaagtcctgctcagaaccgggaaacttgctgaagcgaagaataaaggcgaagtcttcccaacaacagaagtactcctccagctggcaagcgaggctctccccaatgacatgaccctggccttggcatatttgcttgctttgccacaagtattggacgcaaaccggtgtttcgagaagcagtccccttctgctctctctctccagctggccgcctattattactctctccaaatatacgctcggctggcaccatgctttcgggataagtgccatcccctctatcgggcggaccccaaagaattgattaagatggtgacccgtcacgtgactcgccacgaacacgaggcttggcctgaagacctgatcagcttgacaaagcagctgcattgttacaacgagcgccttctggacttcacgcaggctcagatcttgcagggccttagaaagggagttgatgttcagcgctttaccgccgatgatcagtacaagagagaaaccattctggggttagcagaaaccctggaagagagtgtgtattctatagccatctcccttgctcagcgatattcggtcagcagatgggaagtcttcatgacccacctcgagtttttgtttaccgattctgggttgtctaccctcgagattgaaaatcgggcccaggatttgcacctgttcgaaaccttaaaaaccgatccggaggccttccaccagcatatggttaagtacatttatcccactatcggaggatttgatcatgagagactgcaatactattttacactccttgaaaactgcggatgcgcagacctgggtaactgtgccataaagcccgaaactcacatccgtctcctgaaaaaatttaaggtggtggctagcggtttgaactacaagaagctgactgacgagaacatgtcacccctggaggctttggagcctgtgttatcatcccaaaatattctgtccatttctaagctcgtgccaaagattcccgaaaaggatggccagatgctttcgccctcatcactgtacaccatttggctgcagaaactgttctggaccggtgatccccacctgatcaaacaggtgccagggtcgtcccccgagtggctacacgcttacgatgtatgcatgaagtatttcgaccgactgcaccccggcgacctgatcaccgttgtcgatgccgtcacattttccccaaaagcagtgacgaaactttccgtcgaagcccggaaggagatgacaaggaaagccatcaagactgtcaagcacttcatcgaaaagcctcgcaagcggaatagcgaggacgaggctcaggaggcaaaggattcaaaggtgacctacgcggacaccctcaatcaccttgagaaatcactagcccacttagagacactctctcacagttttatcctgagtctgaagaactcggagcaggaaaccctacagaagtatagtcatctctatgatctatcaagatctgagaaagagaagctgcacgatgaagccgtggccatctgcttggacggccagccccttgcgatgatacagcagctccttgaagttgccgtaggtccgctggatatttcccctaaggacatcgtccagtcagctatcatgaaaatcattagcgcactgtctggtggctccgctgatttgggagggcctcgggaccctctcaaggttctggaaggagtagtcgctgccgtccatgcaagcgtggataaaggggaagaactcgtgagcccagaggacctgctggaatggttgcggcccttctgcgcagatgatgcctggcccgtgcggcctagaatacacgtcctccaaatcttaggccagagtttccatctcaccgaggaggactctaagctgctagtcttctttagaaccgaggcgatcctcaaggcatcctggccccagaggcaggttgacatcgcagacatcgaaaatgaggagaaccggtactgcttgtttatggaattgttagaaagctcccaccacgaggccgagttccagcacctcgtgctgctgctccaggcctggccacctatgaaaagtgaatatgtgatcacgaataacccctgggtcaggcttgctacagtgatgctgacgagatgcaccatggagaacaaggagggtttggggaatgaggttctcaagatgtgcaggtccctatataacactaaacagatgctgcccgccgagggggttaaagaactgtgtctcttactgttaaatcagagtctgcttctgccctctctcaaactgctccttgaatccagggacgaacaccttcacgagatggctctggaacagataaccgcggtgaccactgtaaatgactctaactgcgaccaggagctgctcagcctccttctggacgccaagctcctggtcaaatgtgtgagcaccccattttacccaaggatcgttgatcacctgctggctagtctccagcaggggcggtgggatgccgaagaactgggcaggcacttacgggaggctggccacgaagccgaggctggctccttgcttctcgcagtcaggggcacccatcaggcgtttcgaaccttctccaccgccctgagagccgcccagcactgggtatag

SEQ ID NO: 196931 - DNA, 6756 bp, synthetic construct
  misc_feature 1..6756: note = Description of Artificial Sequence: Synthetic coding sequence
  source 1..6756: mol_type = other DNA
atggccgcccccgagagcggccccgccctgagccccggcaccgccgagggtgaggaagagactatcctgtacgacctccttgtgaatacagagtggccccccgagaccgaggtgcagcctagaggaaaccagaagcatggcgcatcttttatcattacaaaagctatcagggataggttgctgtttctgcggcaatacatctggtactctcccgcaccttttcttttacccgatgggttagtaagattagtaaacaagcaaattaactggcacttagtgctggccagcaatgggaagctactggccgctgtgcaggaccagtgtgtggaaatcaggagtgcaaaggacgatttcactagcattattggaaagtgccaggtcccgaaggaccctaagcctcagtggcgaagagtggcttggagctacgactgcacgctgttagcgtacgcagaatcgacgggcaccgtgcgagtgtttgacttaatgggaagcgaattgtttgtgatcagtccggcctcttcttttattggcgatctcagctacgccatagccggcctgatttttctggaatacaaagctagcgctcagtggagcgcagagctgctggtaataaactatcgtggcgagctcagatcctatctggtttcagtggggaccaaccagtcctaccaagaatcgcactgcttcagcttttcttcccactaccctcacggaattaacacggccatctatcacccaggccataggcttctgctagtggggggctgtgagaccgctgaggttgggatgtccaaggcttcctcttgtgggctgtcagcttggcgcgttctctccggatctccctattataagcaggtcaccaacggcggagacggcgtaaccgcggtgccaaagacactgggattgctgagaatgctctcagtgaaattctattcacgccaggggcaggagcaggatggcatatttaagatgtccttgtctcccgatgggatgcttcttgctgcgatacacttctctggcaagctgagtatttgggcaatcccatccctgaagcagcaaggagaatggggacagaacgagcagcccggctatgatgacctcaaccctgattggaggcttagcacagagaaaaggaaaaagattaaagacaaggagtccttctacccgctgattgatgtgaattggtgggcggactccgccgtgaccctggctcgctgttccggagctctgactgtgagttctgtcaagacacttaagaaccttctcgggaagtcctgcgaatggttcgaaccaagcccacaggtcaccgccactcacgacggaggatttctcagccttgagtgcgaaatcaaactcgctccaaagcgatccagactggaaacacgcgccggtgaggaggatgaaggtgaggaggactcagattccgactatgaaatttccgccaaagccagatacttcggatatatcaaacagggactatacctggtgaccgaaatggagcggttcgctccaccacgcaaaagaccaaggacgattactaagaattaccgcctagttagcttgcgaagcacaacacctgaggagctttatcagaggaaaatagagtccgaagaatacgaagaggcactctcactagctcacacctacggactggatacagaccttgtttatcagaggcagtggaggaaatccgccgtgaacgtggcctccatccaaaattacctctcaaaaatcaaaaagaggagctgggttttgcacgagtgtctggaacgggttcctgagaacgtcgatgctgctaaggagctcctacagtatggcctaaaaggcaccgatttggaggcgctgctggccattggcaagggggccgatgatggacgcttcaccctgccaggggagatcgatatcgatagtataagttacgaagaattgagtcctcctgatgaggaaccggcaaagaataaaaaggaaaaagaacttaagaaacgacaggagctgctcaaactcgtgaatttctctaagttgacactggaacagaaggagctttgccgatgtagaaggaagctgctcacttacctggatcgccttgcaacatacgaggaaatcttgggcgttccccacgcatccgaacagcgctatgatgctgaattcttcaagaaattcaggaaccagaacatcgtgttgagcgcccgaacgtatgcccaggagtctaacgttcaggccctcgagatcctgtttacctatcatgggtcagatttgcttccccaccggttagccatccttagcaacttcccagagacaacctcccctcacgagtactctgttctgctgcctgaggcatgttttaacggggactcactgatgatcattccttggcacgaacacaaacaccgtgccaaggactggtgcgaagaactggcatgccgaatggtagtggagcccaatttgcaggatgagtctgagtttctgtatgctgctcagcccgaactgctccgctttcgtatgacacagctaacagttgagaaggtcatggactggtaccagaccagagccgaggagatcgagcattacgcccggcagctccagcagaagataattccagaccaggatcagctcatggctatcgcactggagtgcatttacacttgtgagaggaacgaccagctttgcctgtgctatgatctccttgagtgcctgcctgagcgtgggtatggcgacaagacagaggccacaacaaaactccacgatatggtcgatcagcttgagcagatcctgtctgtgagcgaactcctggagaagcacgggttggagaagcccatttctttcgtgaaaaacactcagtcctctagtgaggaggctcgcaaactcatggtacggctcacccggcacactggccggaagcagcctcccgtaagtgaatcacactggcggaccctccttcaggacatgttgaccatgcaacagaacgtttacacgtgtctcgactcagacgcatgttacgagatctttacagagagcctcctgtgtagcagcagacttgagaacatccatttagccggtcagatgatgcattgttcagcctgtagtgaaaatccaccagcaggtattgcccacaagggtaaaccacattaccgagtgtcatatgaaaagagtatcgatcttgtcctcgccgcatctcgggaatatttcaactcctctaccaatctgaccgatagctgtatggatctggcacggtgctgtttgcaactgatcacagatcgaccacccgctatccaggaagaacttgatctgattcaggccgtagggtgtcttgaggagttcggcgtgaagattttaccgctgcaagttaggctgtgcccagaccggatttctctgatcaaggaatgcattagccagagccccacctgctacaaacagagtactaagttattggggctcgccgagctcttgcgagtcgcgggtgagaatccagaagagcgacggggccaggtgttgatcttactggtggaacaggccctgcggtttcacgactataaggccgcttcaatgcactgtcaggagttaatggccacaggataccctaaaagctgggacgtgtgttctcagctgggccagagcgagggataccaggacctggccactcggcaggagctcatggccttcgccctcacgcattgtccaccttcctctattgaactgttactggccgcctcaagctccctgcagacagagatattgtatcagcgcgtgaactttcagatccatcatgaggggggcgaaaacatctcagcctcgccgttgaccagcaaagcggttcaagaagacgaggtgggtgtaccaggatcaaattccgcggatttgcttaggtggaccactgccaccacaatgaaggtgctaagcaacacgaccaccaccaccaaagccgtgctgcaggccgtgagcgacggtcagtggtggaaaaaatctctcacatatcttcgtcctctccagggccagaagtgtggcggagcctaccagattgggaccaccgctaatgaggatctcgaaaaacagggatgccatccattctacgaatctgtaattagcaacccattcgtcgcagaatcagagggtacatacgacacctatcagcacgttccggtggagtcatttgccgaggtactcctccgcacggggaagttggctgaggcaaagaacaagggggaggtgtttccaacgacagaggtgctgctccagctggcttcagaagcgctgccaaatgatatgaccttggccctcgcttatctgcttgctctacctcaggtcttggacgcgaacagatgtttcgagaagcaaagcccatcagccctgtccttgcaactggctgcctattattattccctgcagatttatgctcggttggcaccttgcttcagagacaaatgtcatccactttacagagccgacccaaaggagttgatcaagatggtgacgcgccacgtgacacgacatgagcatgaggcttggcccgaagatttgatatcactgaccaagcaattgcactgttataacgagcgcctgttggattttacacaggcacagattctgcaggggctgcggaagggtgtcgacgtccagcgcttcacggcagatgatcagtataagcgcgaaacgatcctcgggctcgctgaaaccctggaggaatccgtttactcaatcgccatttcattggcgcaacgttattcagtctcgagatgggaggtcttcatgacacacctggagttcctctttacagattcagggttaagcaccttggaaatagagaatcgggctcaagatcttcatttgttcgaaacgcttaaaactgacccggaggctttccaccagcacatggtgaaatatatataccccacaattggcggattcgaccacgagaggctccaatattattttaccctgctcgagaactgtggctgtgcagatctgggcaactgcgctattaaacccgagacacacattcgactccttaaaaagtttaaagttgttgccagtgggctgaactataagaagcttaccgatgagaacatgtcacccctggaagccctcgagcccgtgctgagctcccaaaatattctttccatttcaaagttagtacctaagatccccgaaaaggatggccaaatgcttagcccttccagcctgtatacgatctggctccagaaattgttttggacgggtgaccctcatttaatcaagcaggtaccaggaagttcacccgagtggctccacgcatacgatgtctgtatgaaatattttgacagattgcatcccggagacctaatcaccgtcgtcgacgccgttactttcagtcccaaagcagttaccaagctctctgtagaggcacggaaggaaatgacaagaaaggccataaagaccgtaaaacatttcatagagaagcctcgcaagaggaatagcgaagatgaggcgcaggaggccaaagacagtaaggtgacatacgccgacactttgaaccatcttgagaaatccttggcccaccttgagaccctgtcccactcattcattctctctctaaagaactctgagcaggaaacccttcagaagtattcacatctgtacgatctgtctcgctcggagaaagagaagctgcacgacgaggcggttgccatctgtctggacggtcagccattagccatgatccaacagttgttggaggtggccgttgggcctctggacatcagtcctaaagatattgtgcagagcgctatcatgaagataatttcagctctgagcggcggatctgctgatctgggcggaccacgagaccccctgaaggttcttgaaggagtggtcgcagccgtgcatgccagcgtggacaaaggagaggagcttgtgtccccagaggatctgctcgagtggctgcgccccttctgcgctgacgacgcatggcctgtccggccgcgtatccacgttcttcagattctggggcagagcttccatttgactgaagaagatagcaaactactggtgtttttcagaaccgaggccatcctgaaagccagttggcctcagcggcaggtcgacattgcagacattgagaatgaagagaatagatattgtctgttcatggagctgctggagtcatcccatcatgaagctgagttccagcatctagtgctgctgctccaggcgtggccacccatgaaaagcgaatacgtgatcacaaacaatccctgggtgagattggctacagtaatgctaactcggtgtacaatggagaataaggagggactgggcaacgaggtcttgaagatgtgtaggagcctgtataacacaaagcaaatgctgcccgcagagggcgttaaagaactctgcctgctgctgttgaatcagtctctcttgttacctagtctgaagctcctgctcgagtctcgggacgagcacctccatgagatggctctcgagcagatcacagcagtgacgacagtgaatgactccaattgcgatcaagaattactgtccttgctgcttgacgctaaactcctggtaaaatgtgttagcacaccgttttacccaaggatcgtggaccacctgctagcctcgctgcagcagggtcggtgggatgcagaagaactgggcaggcatctccgggaggccgggcacgaggctgaggcgggaagccttttgctggccgtgaggggtactcatcaggcgtttaggacatttagtaccgccctgagggcagctcagcactgggtttag

SEQ ID NO: 196932 - DNA, 10662 bp, synthetic construct
  misc_feature 1..10662: note = Description of Artificial Sequence: Synthetic coding sequence
  source 1..10662: mol_type = other DNA
atggtggtgagcgccggcccctggagcagcgagaaggccgagatgaatatcctcgagataaatgaaactcttaggccacagttggccgagaagaaacagcagtttagaaatctgaaggaaaagtgcttcctaacccagctagccgggttcttagcaaacagacagaaaaaatataagtatgaagaatgtaaggatcttatcaagttcatgctccggaacgagcgacaattcaaagaggagaagttagccgagcagctgaagcaggcagaggagctccggcagtacaaggtgctcgttcacagccaggagagggagctgacccagcttagagaaaaactacgcgagggacgcgatgcatcccggtcgttgtacgagcatctacaggccctgctgacacccgacgagcctgacaagtctcagggacaggacctgcaggaacagctggcagaggggtgtcgattggcccagcaccttgtccagaagctctccccagaaaatgacgaggacgaagatgaggacgtgcaggtggaggaagctgaaaaagtgttggagagctctgcaccacgagaggttcagaaagccgaggaatctaaggtgcccgaagacagcttggaggagtgtgctatcacctgtagcaatagccacggaccctgtgactccaaccagccccacaaaaacatcaagattacattcgaggaggacgaagtaaattctactctggtggtcgacagggagtcaagccatgacgagtgccaggatgcattaaacatacttccggtccctggacctactagcagtgcaaccaatgtgtcgatggtggtgagtgccggccctttatcctccgagaaggcagagatgaacatcctcgagatcaacgagaagctccggccacagcttgctgagaaaaaacagcagttccgaaacctgaaggaaaaatgcttcttaacacagctgtctggattcttggccaatcagcagaagaaatacaagtacgaggagtgtaaggatctgatcaagttcatgcttaggaatgaaagacagttcaaggaagaaaagcttgcggagcaacttaagcaggctgaggagctgcggcagtacaaagttctcgtgcacgcacaggagagagaactgactcagctgaaggagaagctgagggagggacgggacgcctcacgatctttgaatgaacatctgcaggctcttttaacgccctacgagccggacaagtcacagggccaagacctgcaagagcagctcgccgaaggctgccgactggcccagcacttagttcagaagctgagccccgaaaacgacaacgatgacgacgaagacgtgcaggtcgaggtagccgagaaggtccagaaaagttccgcgccaagggagatgcagaaggccgaggagaaggaggtccccgaagactcgctggaggagtgcgccatcacctactccaactctcatggcagctacgacagtaatcagcctcaccgaaagacgaagattacgtttgaggaagacaaagtggattctactctgatcgggtcctcatcccacgtcgaatgggaggacgccgtgcacatcattcccgagaacgaatctgatgatgaggaggaagaggagaagggcccagtcagcccgagaaacctccaggaatcggaggaagaggaggtgccccaggagtcatgggatgagggatacagcactttaagcatacccccagagatgctggcttcctaccagagctattcttcgactttccactctctcgaggagcaacaggtctgtatggctgtggacatcggtaggcatagatgggaccaagtgaagaaagaggaccaggaagcaacagggccacgactctctcgggaactgctcgacgagaaggagccagaggtcttacaggactctctggatcgctgctacagtactcccagcgggtatcttgaactccccgatctcgggcagccctactcctccgctgtttattctcttgaggaacaatacctgggtcttgctctggacgtagaccgtataaagaaggaccaggaggaggaagaggatcagggcccgccatgtcctcgactctctagagaactgctggaggtggtggaaccagaagtgctgcaggactctctggatcggtgttattcaactcctagctcttgtctggagcagccagactcgtgccagccatatgggtcctcattctatgccttagaggagaagcacgttgggttctccctcgacgtgggcgaaattgagaagaagggtaaaggcaagaagagacgggggaggcgatcgaagaaagagaggcggcgcggacgcaaggagggcgaagaggatcagaacccaccctgcccgagacttagccgcgagctcctcgatgaaaaggggccggaggtcctgcaagactccctggaccgatgttatagcaccccgtccgggtgtctggagctcaccgattcttgtcagccataccgctccgccttttatgtgctggagcagcaacgagtggggttcgccgtcgacatggacgagatcgaaaagtaccaggaggtggaggaggaccaggatccgagttgcccccgactgtctcgggaactcctcgatgagaaagaaccagaagttctgcaggatagcctggacagatgctacagcaccccctctgggtacctggaactgccagacctgggacagccttactcatctgccgtttattcactagaggagcagtacttagggcttgccctggacgtcgatcggatcaaaaaggatcaggaggaggaggaggaccagggacctccttgtcctcgattgtccagagagctgctggaggttgtggaaccggaagtgctccaggactcacttgataggtgttattctacaccctcatcttgtctcgaacagccagactcctgccagccctacggatcctctttttacgcgctggaagaaaaacacgtgggattcagtctcgacgtgggcgagatagaaaaaaagggaaaaggcaagaagcgccggggtcggagatctaagaaggaaagacgtaggggacgtaaagagggggaagaagaccagaacccgccttgccccaggctgtctagggagctgttagatgagaaggggccagaggtcttgcaggactctttagaccgttgttattccaccccgagcgggtgcctggagcttacagactcgtgccagccgtatcgcagcgcgttttacgtactggaacagcagcgggtggggttcgcggtcgacatggatgaaatcgagaagtatcaggaagtggaagaagaccaagatccaagttgtcccaggctgtcgcgggagttgctcgacgagaaagagcccgaggtgttacaggattctctggatcggtgctattcaacaccctccggatacctggagctaccagacctgggccagccgtactccagcgcagtgtatagtttagaagagcagtaccttggactcgcccttgacgttgatagaattaagaaggacgaagaagaggaggaggaccaggacccaccttgcccgagattgtcgcgtgagcttttagaagtcgtcgcccctgaggtcctgcaggacagcttggaccgatgttattctacaccttcaagctgcctggaacagccagattcttgccagccttatggaagctccttttacgcccttgaagaaaagcatgtgggattcagtttggatgtcggagaaatagaaaaaaaaggaaagggtaagaaaaggaggggccggaggtctaaaaaagaacggagaagagggagaaaagaaggggaggaagaccagaacccgccatgtccacgactgagtagggaacttctggatgagaagggtccagaagtcctgcaggactcccttgatcggtgctactcaacacctagcggatgtttagaactcaccgacagttgtcagccatatcgtagtgcattttatgtgctcgaacagcagcgcgtgggaatggctgtcgatatggacgaaatcgagaagtatcaagaggtggaggaggaccaggatccatcctgtcctcgcctgtccagggaactcctggatgaaaaagagccggaagtgctgcaagacagtctgaacaggtgctactcgactccatccgggtacttagaactgccagacttaggacagccatatagctccgccgtgtattcactggaagagcagtatttgggactcgcactcgacgtggatcgcatcaaaaaggaccaggaggaggaggaggacgaggaccaggatcctccttgcccgaggctctcccgcgagcttttggaggtcgtggagcccgaggttctgcaggattctctcgacaggtgctattccactcctagtagttgtttggaacagccggactcatgccagccatacggaagctccttttacgccctggaggagaatcatgttgggtttagcttggatgtcggtgagattgagaagaaaggaaaaggtaagaagcggcgagggaggcgcagcaagaaagagaggcggaggggacggaaagagggcgaggaggaccagaaccccccctgtccccggctatcccgcgaactgcttgatgaaaaaggccccgaggtcctgcaggactccctggatagatgttattcaacaccctctggctgccttgaacttaccgattcctgccagccttacaggtcggccttttacgtcctggaacagcaacacgtcggccttgccgtcgacatggacgaaatcgagaagtatcaggaggtggaggaggaccaagacccaagctgtccgaggctgtcccgggaactgttggacgaaaaagaaccagaagtgctgcaggattcgctagataggtgttatagtacaccttccggttatctggagttacctgatctggggcagccatatagcagtgcagtgtattccctggaagagcagtacctgggactcgcgttggacgtggatcgaatcaagaaagaccaggaagaagaggaggaccaagggcccccttgtccaagactgagcagagaactgctggaagtggtagagcctgaggtgctgcaagacagcttggatagatgctattccaccccctctagttgcctggaacaaccagattcatgccagccttatggaagctctttttacgcccttgaagagaaccacgtgggcttctcactggatgttggtgaaattgaaaagaaaggaaaggggaaaaagaggcgtggcaggagatccaagaaagagagaagaaggggtcggaaagagggggaagaggaccagaaccctccctgcccccgcctttctagagagctgctggacgaaaagggaccggaggtgttacaggattctctggataggtgttactccaccccttctggctgtctggaactgacagattcttgtcagccttacaggtctgccttttatgtgctagaacagcagcatgtgggcctcgctgtggacatggacgagatagaaaagtatcaagaagtcgaagaggatcaggatccctcatgccctaggttaagccgcgaacttcttgatgagaaagaacccgaggtgctgcaggattccctcgatcggtgctattctacacctagtgggtatctggagctcccagatcttggacagccatactcctctgccgtgtattctttggaggagcagtacttgggactcgcactcgacgtagataggataaaaaaagatcaagaggaagaagaggatcaggggcccccatgcccccgtctaagcagggaactcttggaagtcgtggagccagaagtgcttcaggattccttggacagatgctacagtaccccatcgagctgtctcgagcaacccgatagctgtcaaccttacggtagttccttctatgctctggaggagaaccatgttggattttctctggatgtgggggagatcgaaaaaaagggcaaaggcaaaaaacgaaggggcaggcgctccaaaaaggagcgccgacggggccgcaaagaaggggaagaagaccagaacccaccttgcccacgactgtctagagagcttctcgacgagaagggccctgaagtgcttcaagattcactggaccggtgctatagtaccccctctggctgcttggaactgactgacagctgccagccataccgctctgcattttacgtgctcgagcagcaacacgtggggctagctgtggatatggatgagatcgagaagtaccaggaggtagaggaggatcaggacccctcatgtccccggctgagtagagagctgttggatgagaaagagccagaggttctccaagacagcctggataggtgttatagcacaccttccggatatttggagctgcccgaccttggacagccttatagtagtgccgtgtatagcctggaggagcagtacctgggtctggccctggatgtggaccgcatcaagaaggatcaggaagaggaggaggaccagggcccaccttgcccgagactctctcgcgagctgctcgaagtggtggagcctgaagtgctgcaggattcacttgataggtgttacagtacgccctcttcttgtctggagcagcctgactcctgccagccctatggaagcagtttctacgctctggaagaaaatcacgtgggattttcactagatgtgggcgaaatcgagaagaagggaaaaggcaagaagcggcgtggcagaagaagcaaaaaggagcggcgtaggggtcgcaaggagggggaggaagaccagaatcccccatgtccacgtctgtctcgagaactgctcgacgagaagggcccagaggtgctccaggactcgctcgataggtgttactccactccatcaggctgcctggagctcaccgactcgtgccaaccgtaccggtcggctttctacgtgttggaacagcaacacgtcggtcttgctgttgacatggatgaaatcgaaaagtaccaggaggtcgaggaggaccaagacccgtcatgtcctcgcttgtccagggagctcttggacgagaaagagcccgaggttctccaggatagtctggaccgatgttactcaacaccctccggctatctcgagctacccgacttggggcagccttacagctcagcagtgtacagcctcgaggagcagtacctgggactggccctggacgtggaccgaatcaagaaagatcaagaggaggaggaagaccagggtccaccctgccctagactgtcccgggaacttttggaggtagtagagccagaggtgctgcaggatagtcttgataggtgttacagcactccctccagttgcctggagcagcccgacagttgccagccctacgggtctagtttttatgccttggaggagaatcacgtgggcttctctttggacgtcggggaaatcgaaaagaagggcaaaggcaagaaaaggaggggaaggagaagtaaaaaagaacgacgtcgaggacgaaaagagggagaggaagatcaaaatcccccatgtccaagactgtcacgggagctgctagatgagaagggtcctgaggttctccaagatagtctagacagatgttattcaacacctagcggctgcttagagttgacagacagctgccagccctaccggagcgctttttacgtacttgaacagcagcacgtagggctggcagttgacatggacgaaatcgagaagtaccaagaagtggaggaggatcaagacccctcttgccctagattgtcgagagagttacttgatgaaaaagagccagaagtgcttcaggattccctcgacagatgttattcaacacccagcggctacctggagttaccggacttgggacagccgtacagctctgcagtgtattctctggaagagcagtacctgggcctggccttggatgtcgaccggattaagaaggatcaagaagaggaagaagatcaaggaccgccatgtccccgcttgtcgcgcgagttactggaggtcgttgaacccgaggtgctgcaggactcattggacaggtgctattctacacctagctcctgcttggaacagccagactcttgccagccttacggaagctcgttctacgctctggaggaaaaacacgtcggattcagcctagatgtgggcgaaatcgaaaagaaagggaaaggaaagaagcgccggggacgtaggtccaaaaaggaacgacgcagaggcaggaaggagggggaggaggatcagaaccctccatgcccacggctgtctcgagaactgcttgatgagaagggtccggaagtgctgcaggacagcttggacagatgttattccacaccttccggatgtcttgagctcaccgacagttgtcaaccatatcgcagcgcgttttacgttctcgaacagcagcatgtcggtctggccgtggacatggacgagatcgagaagtaccaggaggtggaggaggatcaggacccatcgtgccccagattatctagggagctgctagacgaaaaggaaccagaagtactccaggattctctcgacagatgttactctaccccttcaggctacctggagctgcccgacctagggcagccatactcttcagccgtctactccctcgaggaacagtacttgggcctcgccctcgatgtggaccggattaagaaagatcaagaagaggaagaagaccaggggccaccgtgccctcgcctgtctagagagttgttggaggtggttgagccagaagttctccaagattcattagaccggtgttattccactccaagctcctgtcttgaacagcccgactcttgccagccgtacggctctagtttctacgctctggaggaaaagcacgtgggcttttccctcgatgttggcgaaatcgagaaaaaagggaaaggaaaaaagcggagaggacggcgtagtaaaaaagagcggcggcgcgggcggaaagaaggcgaagaggaccaaaatcctccatgtcctcgcttgtcacgtgagctcctcgacgaaaagggacccaaggtgctccaggactcattggacaggtgctactctacaccttccggatgcctggagctctgcgactcgtgtcaaccttatcgatctgcattctacgtgctcgaacagcagcgggttgggctggccgtggatatggacgagatagagaaataccaggaggtggaggaggatcaggacccatcttgcccaaggctgagtcgcgagctgctggacgaaaagggtcccgaagtcttacaagacagcttggatcggtgctatagtaccccttctgggtgtctggaactgtgtgactcctgtcaaccatatcgaagtgcgttctacatcctggagcagcagcgcgttggattagcggttgacatggacgagattgaaaagtaccaagaagttgaagaggaccaggatcccagctgtcctcgtctgagcagggagctcctggatgaaaaagaacctgaggtgctgcaggacagcctggacagatgctattcgacgccaagcgggtatctggagctccccgacttagggcagccctattcgtctgcggtttattccctggaagagcagtatcttggactggctctggatgtggaccgtatcaagaaagaccaggaggaggaggaggaccagggtcccccttgcccccggctttccagagagctcctcgaggtggtcgaaccggaggtgttacaggattccttggatagatgctattctacccccagctcatgcctcgagcagcccgactcgtgccaaccatatggaagcagtttctacgccctcgaggaaaagcacgtggggttctctctggacgtcggtgagatcgagaaaaaaggcaagggcaagaagaggaggggacgcagatcaaagaaggaaagaagacggggacgcaaggagggcgaggaggaccagaatccaccgtgccctagacttagtcgcgagctgttggacgagaaggggccagaggtcctgcaagatagcctcgatcgatgctactcaaccccttcagggtgtctggagctatgtgacagttgccagccttataggtcagccttttacgttctcgagcagcaacacgtgggtcttgccgtcgacatggacgaaatagaaaagtaccaggaagtggaagaggaccaggatccttcttgcccacgcctcagtcgcgagctcctggatgagaaggagccagaggttctccaggattccctggataggtgctatagtaccccttctggatatctggaacttcccgatctcggacagccgtattcgtcagccgtgtattcacttgaggagcagtatctcggcctcgcgctcgacgtggataagattgaaaagaaagggaaggggaagaagaggcgcgggcgccgatcgaagaaagaacgccgacggggtaggaaggagggagaggaggatcagaatcctccatgcccgcggctgaatggcgtgctaatggaggtggaggaaagggaagtgctacaggatagtctagacagatgctacagcacccccagcatgtatttcgagctgcctgacagtttccaacactatcgatcagtgttttatagcttcgaggagcagcacatttccttcgctctctacgttgacaatcgatttttcacactgaccgtcacctctctccacctggtattccagatgggtgtgattttccctcaatag

SEQ ID NO: 196933 - DNA, 900 bp, synthetic construct
  misc_feature 1..900: note = Description of Artificial Sequence: Synthetic coding sequence
  source 1..900: mol_type = other DNA
atggtggtgagcgccggccccctgagcagcgagaaggccgagatgaatattctggagattaacgagaagcttcggcctcagctggcagaaaagaaacaacagtttcggaacctaaaagaaaagtgctttctgacacagttatctgggtttctggccaatcagcagaaaaagtacaaatacgaagaatgtaaagatctgatcaagttcatgttacgcaacgagcgccagtttaaggaggagaagctggccgaacaattaaaacaggctgaagagttacgccaatataaagtgttggtgcatgctcaggaacgcgaacttactcagctgaaagagaaacttcgggaaggccgtgacgcgtcccgatcccttaatgagcacttgcaggctctccttacaccttatgaacccgataagtcccaaggccaagacctgcaggaacagctagccgaggggtgcagactggctcagcacctggtgcaaaaactgtcccccgaaaatgacaacgacgacgacgaagatgtccaggtggaggtggctgagaaagtgcaaaaaagctcagccccaagggagatgcagaaagcagaagaaaaggaggtgcccgaagactccctcgaggaatgcgccataacttacagcaattcccacggatcatatgattccaaccagccacatcggaaaaccaagatcacctttgaggaggacaaagtcgactcgaccctgattggcagctcatcgcatgtggaatgggaggacgctgttcacattatcccagaaaacgagtcagatgacgaagaagaagaggaaaaaggccccgtctcgccacgaacatccgtagggagctcagaaaaagggggcccacgcggaaatcggagtcaagctcaacaaggcgctgctggctag

SEQ ID NO: 196934 - DNA, 2010 bp, synthetic construct
  misc_feature 1..2010: note = Description of Artificial Sequence: Synthetic coding sequence
  source 1..2010: mol_type = other DNA
atggtggtgagcgccggccccctgagcagcgagaaggccgagatgaatattcttgaaattaatgaaaagctgagaccccagcttgctgaaaagaagcagcagttccgcaatctgaaagagaagtgctttcttacgcaattgtccggtttcctcgccaatcagcagaagaaatataagtatgaggaatgcaaggatttgatcaaatttatgctgcgtaacgaacgacaattcaaggaggaaaaactggccgaacagctaaagcaagcagaggaactgcgacaatataaagtcctggtgcatgcccaagagcgagagttaacgcaactcaaggagaaactgcgcgaaggacgagatgcgtcacggtctttaaatgagcatctgcaggcactacttaccccatatgagccggataagagtcagggtcaagatctgcaggaacagctcgccgagggctgtcggctggcacaacacttggtccagaagttaagtccggagaacgataacgatgacgacgaagatgtacaggtggaggtggccgagaaggtccagaaatccagcgcaccccgggagatgcagaaggccgaggaaaaagaggtccctgaggattcactggaagaatgcgccattacctattcaaatagccatggctcctacgacagtaaccaaccccaccgtaaaaccaaaatcacgtttgaggaggataaagtcgatagcaccctgataggcagttctagtcacgttgagtgggaagacgctgttcacatcattcccgaaaatgagtccgatgatgaggaagaagaggagaaagggccagtgagtccccgtaatctccaagaatccgaggaggaagaagtcccccaggaatcttgggacgaaggatacagtactctgtctattccacccgaaatgcttgccagctaccagagctactcttctaccttccactcactggaagaacagcaagtatgcatggccgttgatatcgggcgacatagatgggatcaggtgaagaaggaggaccaggaggcgaccggcccctctcgcgaactgctggatgaaaaaggccctgaggtgtttcaagactcccaggatagatgctattccacacccagcggctgcctggaattgacagatagttgtcagccatatagatccgccttctacattctagaacagcagagggtggggttagcaatagatatggacgaaatagagaaatatcaggaagtcgaagaggaccaagatccgagttgtccaaggctctcgagagagttgctggatgaaaaggaaccagaggtgttgcaggattccctggaccgctgctacagcacccccagtggctacctggaacttcctgatctgggccagccttatagctcagcagtttactccctggaggagcaatatctaggccttgctctcgacgttgatcgaatcaaaaaggatcaggaggaagaagaggaccaagggccgccttgcccccgcttgtctcgggagttgcttgacgagaagggccctgaagtcctgcaggactcgctggaccggtgctacagtacaccatcagggtgtctggaactgaccgattcctgtcagccttaccgtagcgcattctacgtcctggagcagcagcacgtggggctggctgtcgacatggacgaaatcgagaagaagggaaaaggcaagaagaggagaggaaggagaagtaaaaaggaaaggagacgcgggagaaaggaaggtgaagaagaccagaatccaccatgcccaagactgaacggcgtgttgatggaagtagaagaacgggaggtactgcaggacagcctggaccggtgttactcaacgccatctatgtatttcgagttgcctgactcattccagcattaccggtccgtcttttattcctttgaggaacagcacatctctttcgccctgtacgtagacaatagattttttacgctgaccgtgacgtcactccaccttgtcttccaaatgggagtgatatttccccagtag

SEQ ID NO: 196935 - DNA, 2022 bp, synthetic construct
  misc_feature 1..2022: note = Description of Artificial Sequence: Synthetic coding sequence
  source 1..2022: mol_type = other DNA
atggtggtgagcgccggcccctggagcagcgagaaggccgagatgaacattctggagatcaacgagaccctgagaccacagctggcagaaaagaagcagcagtttaggaatctgaaggagaagtgcttcttaacgcagctggctggttttttagctaatagacagaagaagtacaaatacgaagaatgtaaagacctgatcaaattcatgctgcggaatgagagacagttcaaggaggaaaagctggcagagcagctcaagcaggcggaggagctgaggcagtataaggtgttagtccactcacaggaaagagagctgactcagcttcgtgaaaaactgagagaggggcgggacgcatcccggtccctctatgagcacctacaggctcttttgacccccgacgaaccggacaaatcccagggccaagatttacaggagcaactggccgaaggctgtagacttgcccagcacttggttcagaaactcagccctgagaacgatgaggatgaggacgaagatgtgcaggtggaagaagcagaaaaggtcctggaaagtagcgcccctcgggaggtgcagaaggcagaggagagtaaggttcccgaggacagcctggaagaatgcgccataacctgctcaaactcccatggaccttgtgattctaaccagccacataagaacatcaagatcaccttcgaagaggacgaagtgaattcgacgctcgtcgtggacagggagagttcacacgatgaatgccaggatgctttaaacattctgcccgagaacgagtctgacgatgaagaggaggaagagaaggggccagtttccccaagaaacctgcaagaatcggaggaggaagaagtgcctcaggagtcctgggatgaagggtacagtactttgagtattccaccggagatgctggccagctatcagagctacagtagcacatttcactcactggaggaacaacaggtctgtatggctgtggacatcggacgccatcgctgggaccaagtgaagaaggaggaccaggaggccaccgggccacgcttgtctagagagctcctggatgagaagggcccagaggttctgcaggactcgttggatcgatgttatagcactccatctggatgtttggaactaaccgactcctgccagccctacaggtccgctttttacgtgctcgaacaacagcgagtcggattcgcagtcgatatggacgagattgagaagtaccaggaagtggaggaagatcaagacccaagctgcccacggctcagccgggagctcttggacgagaaggagccggaggttctccaagattcattagaccggtgctacagcaccccctctggctacttagagctgcctgatttgggccagccctacagctcagcagtatattctctcgaagaacagtacctaggccttgcattggacgtagaccgtataaagaaagatcaggaggaagaggaagatcaagggccgccatgcccaaggctctcacgggaacttctcgaagtggtcgagcctgaggtcctccaggatagtctggaccgctgctatagtacgccttcgagttgtctggagcagccagacagctgtcagccttacggctcatcattttacgctctggaggaaaagcatgtaggattcagtctcgatgtcggtgagatcgaaaaaaaggggaaaggcaaaaagcgccggggtcgccgctcaaagaaggagagacgccggggaagaaaggagggagaagaagatcaaaacccgccttgcccacggttgaacggggtccttatggaagtagaagagcgggaggtcttgcaggatagcctggaccggtgttattcaacaccctcgatgtattttgagttacctgacagctttcaacattatcgcagcgtcttctattcgtttgaggagcagcatatatcttttgccctgtatgtggacaacaggtttttcaccttgactgtcacaagcctccaccttgtgtttcagatgggggtgatcttcccgcagtag

SEQ ID NO: 196936 - DNA, 519 bp, synthetic construct
  misc_feature 1..519: note = Description of Artificial Sequence: Synthetic coding sequence
  source 1..519: mol_type = other DNA
atggccgtggacatcggccggcaccggtgggaccaggtgaagaaggaagaccaggaagcaacgggcccttccagagagcttctggatgagaagggtcccgaggtctttcaggattcccaggaccgctgttactccacccctagcgggtgcctggagttgaccgactcctgccagccatatagatccgccttctatatattagagcagcagcgagtcggactcgctattgacatggatgaaattgagaagtaccaggaagtggaggaagaccaggatcccagctgccctcgtctgtctcgcgaattactggacgagaaagaacccgaggtgctccaagactcactagatcgatgctattctacaccctcggggtacctggaactgcccgatctggggcaaccctactcctctgccgtttactccctggaggaacagtacttaggcttggctttggatgtagacaggatcaagaaggatcaggaggaagaggaagaccaaggcccaccatgtccgagatag

SEQ ID NO: 196937 - DNA, 2295 bp, synthetic construct
  misc_feature 1..2295: note = Description of Artificial Sequence: Synthetic coding sequence
  source 1..2295: mol_type = other DNA
atgttcagcaacagcaccggccggctgcccggccagcccaccgaggaaatccaacagtacaaagtacttgtccactcacaggaaagagagctcactcagctgcgtgagaaattgagagaggggcgcgacgcgtctaggagtttgtacgaacatttacaggctttactgacacctgacgaaccagacaaatctcagggccaggacctgcaggagcagctcgccgaggggtgcaggctggcacagcatctagtgcagaaactctctcccgagaacgatgaggacgaagatgaggacgtgcaggtagaagaagcggagaaggtcctggagagcagtgccccacgcgaagtgcagaaggcggaagagtcaaaggtgccagaggactccctcgaagagtgtgcaataacatgcagcaattcccacggcccgtgcgattctaatcagccgcacaaaaacatcaaaatcactttcgaggaagatgaagttaactcaaccttggtcgtagaccgcgagtcctcgcacgatgagtgccaggacgcactgaacatcttacccgtgcctggtccaacatcatctgccactaatgtttcaatggtcgtgagtgccggacctctgagctcggagaaggcggagatgaatatcttggagataaacgagaaactgcggccacaactcgccgaaaaaaagcaacaattcagaaacctaaaggaaaagtgcttcttgactcagctatcaggattcttggccaaccagcagaagaagtacaaatatgaggagtgtaaggacttgatcaagtttatgctcaggaatgaacggcagtttaaagaggagaagctggccgagcagttgaagcaggctgaggagctgcgccaatacaaggtgctcgtccatgctcaggagagggagctgacccagctgaaggagaaactaagggaggggagagacgccagccgaagcctgaacgagcatcttcaagcactgttgacaccttacgagccagataaatctcagggacaggatcttcaagagcagttggccgaggggtgcagactggcccagcatctggtgcagaaactgtccccagagaatgacaacgacgacgatgaggacgtgcaggtagaggttgcagagaaagtgcagaagtcctctgccccacgggagatgcaaaaggccgaggaaaaagaggttcctgaagactccctcgaggaatgtgctataacttattctaattcccacggaagctacgactctaaccagccccatcggaagactaaaataaccttcgaagaggacaaagtggactcaaccctgattggatcctctagccatgtggagtgggaggacgccgtgcatattattcccgaaaacgagtcagacgacgaagaagaggaggaaaaaggacccgtgtccccacgcaacctgcaggagagcgaagaggaagaagttccccaggagtcttgggacgaagggtatagcactctcagtatacctcccgagatgttagcctcttaccagagctactcttctacttttcactccttagaggagcagcaagtatgtatggccgtcgatatcggtcgccaccgctgggatcaagtaaaaaaggaagaccaggaggctacagggcctcgcctgagtagggaactcctggacgaaaaagggccagaagttttgcaggacagcttggaccgttgctacagtaccccctctggttgtttggagttgactgatagctgtcaaccctacaggagtgccttctacgtgctggagcagcagcacgtgggcctcgccgtggacatggatgagattgaaaagtaccaggaggtggaggaagatcaggatccaagctgcccccggttatcacgggaactgttggatgagaaggagccagaggttctgcaggattctctagacagatgttactcaacaccaagtggctatctggaattgcctgatctgggacagccttattcttcggccgtgtactcactagaggaacagtacctggggctagcacttgacgtggataggatcaagaaggatcaagaggaagaggaagaccagggaccaccgtgccccagactcagccgcgagcttctggaagtggtggaacccgaggtgcttcaggatagcctggacagatgctactcaactccaagtagttgcctagagcagccagactcctgccagccctacggaagctctttttacgcattagaggagaaacatgtaggcttttccctagatgtcggcgaaatcgagaaaaaagggaagggaaagaagcggcgcggtcgatag

SEQ ID NO: 196938 - DNA, 105 bp, synthetic construct
  misc_feature 1..105: note = Description of Artificial Sequence: Synthetic coding sequence
  source 1..105: mol_type = other DNA
atcggcagcagcagccacgtggagtgggaggacgccgtgcacatcatccccgagaacgagtctgatgacgaagaagaggaagagaagggccctgtgtcaccttag

SEQ ID NO: 196939 - DNA, 2517 bp, synthetic construct
  misc_feature 1..2517: note = Description of Artificial Sequence: Synthetic coding sequence
  source 1..2517: mol_type = other DNA
atggtggtgagcgccggcccctggagcagcgagaaggccgagatgaacatactcgagattaatgagaaacttaggccacaactggcagaaaataaacaacagttccggaatctcaaggagcgttgctttctcacccaactggcagggtttctagctaaccgtcaaaagaagtacaaatacgaggagtgtaaggacctcatcaagttcatgctgcgtaatgaacgccagtttaaagaggagaagctggccgagcagcttaaacaggccgaggagttaagacagtataaggttctcgtgcattcacaagagagagaactgacacagctccgcgaaaagcttcgggaaggcagagatgccagtcgttcgttaaatgagcacctgcaggcactgttaacccccgacgagcccgataagtcccagggacaggatctccaagagcagttggcagagggatgtcggctggcccaacacctagtgcagaaactgagccctgagaatgacgaggatgaagatgaagatgtgcaggtggaggaggacgaaaaagtgctcgagagcagtgctccacgcgaggtgcaaaaagctgaagagagcaaggtacctgaagactctctcgaagaatgtgctattacatgttctaatagtcatggcccctgcgatagcattcagcctcacaaaaatatcaaaattaccttcgaggaggacaaggttaacagctctttggtagtggaccgcgagagcagccacgacgggtgccaggacgcgctaaacattcttcctgttccaggacctaccagcagcgctacgaatgtctctatggtagtcagcgctggcccgctcagtagcgagaaggcggagatgaatatcctggaaatcaatgagaaactgtgcccccagctggctgagaagaagcaacagttccggagcctcaaggagaaatgctttgtgacacaagtagcctgctttctcgccaaacaacaaaataaatataaatatgaagagtgtaaagatctaattaaatcgatgctccgcaacgagagacaatttaaagaggaaaagctcgctgaacagcttaagcaagccgaggagctgaggcagtacaaggtgcttgtgcattcccaggaacgcgagctcacgcaactccgggaaaaattacgagaaggcagggacgctagccgctcactgaatgagcatctgcaggcactgttgacccccgacgagcccgacaagagccaagggcaggacctgcaggaacagttggccgaaggatgtcggctcgcacagcatctggttcagaaactttcccccgagaatgacaacgacgacgatgaggatgtgcaggtggaggtggctgagaaggttcagaagtcaagctcacctagggagatgcagaaggcggaggagaaagaggtgcccgaagattctcttgaggaatgcgcgatcacatgttcaaattcccacgggccgtacgactctaaccagccgcaccgcaagcctaagtcgcaccttagaaagaccaagagcacccagctgtcgcttgcacatcccctcatgctcaacggccgcatgctgtacactctgtcccagaaaatgaaagtgatgatgcggaaaagaaaaaagaagggtcagtgtctgccgggaatttgcaggagcctgaagagaaggaaatctccacgctctcccggaatgaaagtaatcagactgtcccaatttctgttgaagggacatcggtgggatcaggtcaagaaggaggaccaggaagccaccgggcctaggctgtccagggagttgctagacgagaaagaacccgaagtgctgcaagattccttagatagatgctactccaccccatccgtatatctgggtcttacagactcttgccaaccctatagatcagccttctacgtgctcgagcagcagcggatcggcttggcagtagacatggacgagatcgagaaataccaagaggtggaagaggatcaggatccttcatgcccaaggctgtctcgagagctgctggcagaaaaggagccggaggttttgcaggactcgctagatcggtgttattctactccttcaggctatctggagctgcccgatctgggtcagccgtaccgcagcgcagtatactctttagaggagcagtacctgggactggcgttggacgtagaccggatcaagaaggatcaggaagaagaagaggatcagggtcccccctgtccacgactctctcgagagctgctggaggtcgtggagcccgaggtcttgcaggactctcttgacgtgatacaactcttgcccgtcgtgctgaatagccttactcccgcatctccaaccgaggttcctttcatgcactggcgtaagaatatgctggcctttctcctgacatgggagaagctgaagcgcagggggcgtggaagaaaggagggcgaggaggaccagcgcagaaaagaggagggggaagagaaaaagggcaaaaagatcaaaactcatcatgcgcccggatctgccgcctgttag

SEQ ID NO: 196940 - DNA, 2373 bp, synthetic construct
  misc_feature 1..2373: note = Description of Artificial Sequence: Synthetic coding sequence
  source 1..2373: mol_type = other DNA
atgttcagcaacagcaccggccggctgcccggccagcccaccgaggaaatacagcagtataaggtgctggtccactctcaggagcgtgagttaacccaacttagagaaaaactgagagagggtcgggatgccagtaggagcctgaatgagcacttgcaggctttactgacaccagatgagcccgacaagtcccagggccaggatctgcaagagcaactggccgagggatgtcgcctggcccaacatctcgtccagaagctgtccccggaaaacgacgaagatgaagacgaggacgtgcaggtggaggaagatgaaaaggtgctggaaagctctgcacctagagaggtgcagaaggccgaggagtctaaggtccccgaggactccctcgaggaatgcgccatcacctgttcaaattcacacgggccctgtgactccatccagccacacaagaatattaagattacgtttgaagaggataaagttaattccagtcttgtggtcgacagggagagctctcatgacggttgccaagacgctcttaatatcctgcctgttcctggccccactagttcagctactaatgtgtccatggtggtctcggccggcccactttcaagcgaaaaagcggagatgaatatcttggagattaatgagaagttgtgtcctcaactcgcggagaagaaacagcagtttcgaagcctgaaggagaaatgttttgtgacccaggtggcttgctttctggccaagcagcaaaataaatacaagtacgaggaatgtaaggatctgattaaatccatgttgcgaaacgagaggcagtttaaggaggagaaactggctgagcaacttaaacaagcagaagagctgaggcagtacaaggtactggtccacagccaggaacgtgagctgacacagctaagagaaaaactgcgcgaaggccgagatgcttccaggagtttaaacgagcacctccaggccctactgaccccagatgaaccagataaatctcaaggccaggacctgcaggagcagctcgcagaagggtgtagattggcacagcaccttgtgcagaaactcagcccagagaatgacaacgatgacgatgaggatgtccaggtcgaagtcgccgagaaagtgcagaagtcctctagcccaagagaaatgcagaaggctgaggagaaagaagtgccggaggattccctcgaggagtgcgctatcacatgttctaattcacacggaccttatgactcaaatcagcctcatcggaagacgaagattacatttgaagaggacaaggtggattctacactaataggaagtagctcacacgtcgagtgggaagacgctgttcacataattcccgaaaacgagtcagacgacgaggaggaagaagaaaaagggcctgtaagcccacgtaatttacaggaatcagaggaagaagaggtgccacaggagtcatgggacgagggatactctacccttagtattcctccagagcgactcgcaagctaccagtcctattctagcacattccactccctggaggagcaacaagtgtgcatggctgttgacatcggtcgccacaggtgggaccaggtgaaaaaggaagatcaggaagccaccggaccaagacttagccgcgaactgcttgacgagaaagagccagaagtgctgcaggattccctggacagatgctatagcactccatcggtttatctgggtctcactgattcctgtcaaccttaccggagtgccttttacgtgctcgaacaacagcgaattgggctcgctgtggacatggatgaaatcgagaagtatcaggaagtcgaggaggatcaggacccctcttgccccaggctgagtagagagctgttagcagagaaagagcccgaggtcctgcaagattctttggacaggtgttacagtacaccctctggctatctggagctgcccgacttggggcagccctaccggagcgccgtatattccttggaagaacagtacctgggactggcactcgacgtggatcggatcaaaaaagaccaggaagaagaagaggatcaggggcccccctgtccacgtctgtctagagagttacttgaggtcgttgaacctgaggtactccaggacagcttagacgtcatacaattactgcccgtcgtgctgaactctctgacacctgcctcaccaaccgaagtgccctttatgcactggagaaagaacatgttggcctttcttctaacttgggagaagctgaaacgccgcggccgcggaagaaaagaaggagaagaggatcagcgccgcaaagaggaaggtgaggaaaagaagggcaagaaaattaagacccatcacgcgccagggtctgctgcgtgctag

SEQ ID NO: 196941 - DNA, 258 bp, synthetic construct
  misc_feature 1..258: note = Description of Artificial Sequence: Synthetic coding sequence
  source 1..258: mol_type = other DNA
gagatgcagaaggccgaggagaaggaggtgcccgaggacagcctggaggagtgcgcaattacctgcagtaactcacacggcccctacgactccaatcagccacacagaaagaccaagataacctttgaagaagacaaggtggactcaacgctgatcgggtccagttcccacgtggagtgggaagacgcagtacatattattccagaaaacgaatccgatgatgaggaagaagaggagaaaggccccgtttcaccctag

SEQ ID NO: 196942 - DNA, 1101 bp, synthetic construct
  misc_feature 1..1101: note = Description of Artificial Sequence: Synthetic coding sequence
  source 1..1101: mol_type = other DNA
ctggccagctaccagagctacagcagcaccttccacagcctggaggagcagcaggtttgcatggctgtggacattggccgacaccgttgggatcaggtcaagaaagaagaccaagaggcaactgggccccgattgagcagagagctcttggacgagaaagaaccagaggtcctccaagactctctggaccgatgctatagtaccccctctgtttatttggggctcacagactcatgtcagccttaccggtccgccttttatgtcctagagcaacaacggatagggctagcagtggacatggacgaaattgaaaagtatcaagaagtggaagaggaccaagatccatcttgtccccgcctttcacgggagcttctggcggagaaggaacctgaagtgttacaagattcgctggacagatgctacagcactccgagcggatatctggagctgcccgacctcgggcaaccttacaggagcgccgtctactcactagaggagcagtatctggggttggctttggacgtggacagaatcaaaaaggaccaggaggaggaagaagatcaaggccccccctgtcccaggctgtcccgggaacttctggaggtcgtggagcccgaggtcctgcaggatagtttgtgttattccacgcctagcagttgtctggagcagcccgattcctgtcagccttacggctcgtctttctatgccttggaggaaaagcatgtggggttttccctagatgtcggtgagattgagaaaaagggtaaaggcaaaaaacgtcgaggccggcgcagcaagaagaaaagacggcgtggtagaaaagagggcgaggaagaccaaaatcctccatgccctcggctgtcctctgtgctgatggaggtggaggtgcccgaggtgttgcaggactcccttgatcgttattactcaactccatccatgtacttcgaattgcccgacagcttccagcattatagatctgtgttttactcttttgaggagcagcacatcagctttgctctcgacatggacaaccgttttttcaccctgactgtcaggagtctccacctcgtctttcagatgggagtaatttttccacagtag

SEQ ID NO: 196943 - DNA, 2598 bp, synthetic construct
  misc_feature 1..2598: note = Description of Artificial Sequence: Synthetic coding sequence
  source 1..2598: mol_type = other DNA
atggtggtgagcgccggcccctggagcagcgagaaggccgagatgaacatcctcgagataaacgaaaagctgagaccacagctggcggagaacaaacaacagtttcgcaacctgaaggaacggtgcttcctgactcaactcgctggttttctggcaaaccgccagaagaagtataaatacgaagagtgtaaggatttaattaaattcatgttgcggaatgagcgtcagtttaaagaagagaagctcgctgagcagctcaaacaggccgaggagctccgccaatacaaggtcttagtccattcacaggaacgcgaattaacacagctgcgtgaaaagctgcgagagggaagagatgcatctagatctctgaacgagcatcttcaggcgctgctcacacccgatgagcctgacaagagccagggtcaagacctgcaggagcaactggctgagggatgtcgattagctcagcaccttgtgcaaaaattgagccctgagaacgacgaggacgaagacgaggacgttcaagtcgaggaagacgaaaaagtgctggaatcctccgcaccacgcgaagtgcagaaagccgaggaaagcaaggtccccgaagatagccttgaggagtgtgccatcacgtgttcaaactcccacggaccttgcgacagcattcagccacacaagaatatcaagattaccttcgaggaggataaggttaacagctcgctggtggtggatagagagtctagtcacgacggctgccaagatgctcttaacattctccctgtccccggcccaacatcgtcagccacaaatgtgtctatggtcgtgtccgccggtccccttagcagcgagaaagcagaaatgaatattttggaaataaacgaaaagctttgcccccagttggcggaaaagaagcaacagttccgtagccttaaggagaagtgttttgtcacccaagtagcctgttttctggccaagcagcagaacaagtacaagtatgaggagtgtaaggatctcatcaaaagcatgctccggaatgagcggcaattcaaagaagaaaaactggcagaacagctaaagcaagctgaggagctgagacagtacaaagtgcttgtgcattctcaagagcgggaactgacacagctaagagagaagttgcgtgaaggccgcgatgctagccgctcactgaatgaacacctacaagctctgctgacccctgacgagcccgacaaatctcagggccaagatcttcaggagcaactggctgagggctgcaggctggctcagcacttagtgcagaagttgagccccgagaacgataatgacgatgacgaggatgtacaagttgaagttgctgagaaggttcaaaaaagttcaagccctagagaaatgcaaaaagcggaggagaaagaggtcccagaagattctctcgaagaatgcgcaattacctgctccaattcgcacggcccttacgactcaaaccagcctcatcgtaagacaaagatcacctttgaagaagataaggtggactctacactgataggatcaagttcccatgtagaatgggaggacgcagtacacatcatacccgagaacgaatctgacgacgaagaggaagaggagaaagggcccgtgagtcctcggaatctgcaggaaagtgaagaagaagaagtcccgcaggaatcatgggacgagggctactcaaccctctccatccctcccgaacgactggcatcatatcagtcatattcaagcactttccacagtctggaagagcagcaagtttgcatggcggtagacatcggccgccatcgatgggaccaggtgaagaaggaggatcaggaggctactggaccgcgtctgtcgcgggagttgctggatgagaaggaacctgaagtcctgcaggactctctggataggtgttactccacaccgtcggtgtatttggggttaactgacagctgccagccataccgaagtgcgttttacgtacttgagcagcagcggataggcctcgctgttgatatggatgagattgagaagtaccaggaggtggaggaggaccaggacccctcctgtcccaggctctcacgagagctgctggcggaaaaggaaccagaagttcttcaggatagtttggacaggtgctatagtactccgagtggttacctggagctccctgatctcggacaaccttaccgctccgccgtgtactctctcgaagagcagtacctcggactggccctggacgtcgatcggatcaagaaggatcaagaagaggaggaggaccagggacccccatgccctagactttcccgggagctgcttgaggttgtggagcctgaggtgctccaagatagtctggatgtcatccagcttctacctgttgttttaaacagtttaactcctgcaagcccaaccgaggttccttttatgcactggcgcaagaacatgcttgcattcctcttgacatgggaaaagctgaaacgccgcggcagggggcgaaaagagggcgaagaggaccagcggcgaaaggaggagggcgaggagaagaaaggcaagaaaatcaaaacacaccatgcgcctggctccgcggcttgttag

SEQ ID NO: 196944 - DNA, 2373 bp, synthetic construct
  misc_feature 1..2373: note = Description of Artificial Sequence: Synthetic coding sequence
  source 1..2373: mol_type = other DNA
atgttcagcaacagcaccggccggctgcccggccagcccaccgaggaaattcagcaatacaaagtgctggtccactctcaggaaagagagctgacacagctcagagagaagctgcgcgagggccgggatgcatcccgctcactgaatgaacacctgcaggctttattgaccccggacgagccggacaagtctcagggccaagacctgcaggaacagctagctgagggctgtcggctggcgcaacagcttgtccagaagctctcccccgagaacgacgaagacgaagatgaggatgtgcaggtggaggaggacgagaaggtcctcgaatcctccgctcctcgggaagtgcagaaagctgaagagtcgaaagttcccgaggacagtctggaagagtgtgctattacctgctccaattcccatgggccttgtgattcgaaccaaccgcacaagaatattaaaataacctttgaagaggacaaagtcaactcgtcactcgttgtcgatcgggagtattcacatgatgaatgccaagatgcccttaacattctgcccgtccccggaccaacgtcttccgccacaaacgtgtccatggtcgtgtccgctggccccctatcttccgagaaggctgaaatgaatatattggaaatcaatgagaagctccgtccgcagctggccgaaaagaaacagcagttcagaagccttaaagagaaatgttttgtgacgcaggtcgcctgctttctggccaaacagcagaacaaatataagtatgaagaatgtaaagatctgatcaagtcaatgctacgcaacgagttacaattcaaagaagaaaaactggccgaacaactgaagcaagcagaagagttgcgtcaatacaaagtactggttcattctcaggagcgagagctcacgcagcttagagagaagttgcgcgaaggacgcgacgcttcccgttcccttaacgagcacctgcaggccctcctgacgcccgacgagccagataagagccagggccaggaccttcaggagcagctggctgagggttgccgcctggctcagcacctggtgcaaaaactctccccggaaaacgataacgatgacgacgaggacgtgcaggtcgaggtggcagagaaggtccagaagagttccagccctcgtgaaatgcagaaagcagaggaaaaggaagtcccagaagactccctggaagagtgcgccattacctgtagcaattcccacggcccctacgattccaaccagccacaccggaaaacgaagatcactttcgaggaggataaggttgactctactttgattggtagctcgagccatgtggagtgggaagatgccgttcacatcattccagaaaacgagagtgacgacgaggaagaggaggagaaaggccctgtttccccccgcaacctgcaagaatcagaggaagaagaggtgccccaggaatcctgggacgagggatatagcacactttctattccacctgagagacttgcctcctaccagagttactcctcaactttccacagcctggaggaacagcaggtttgcatggctgtggatataggtaggcatagatgggatcaggtaaaaaaagaggaccaagaggccactggccccaggttaagcagagaactcctcgccgagaaggaacccgaggtgttgcaagactctctggaccggtgttactcgactccgtctgtttatttggggctcactgactcctgtcagccttatcgatcagctttctatgtgctggagcagcaacgcgtgggactcgctgttgacatggatgaaattgagaagtaccaagaggtggaggaagaccaggatccctcctgtccacggctttcacgagagctgctggctgagaaggaaccggaggtccttcaagatagcctggaccgctgctattcaacgccttccggctatctggagctcccggaccttggacaaccttatcgatcagccgtgtacagtctcgaggaacaatatctgggcctagctctcgatgttgatagaattaagaaagatcaagaagaggaggaggaccagggtcctccatgccccaggctgtctagggagctgttggaggtggtcgagcccgaagtactgcaggactccctggacgtgattcagttgttacctgtggtgctcaactcacttacacccgccagtccaacggaggtccccttcatgcattggaggaagaacatgctcgctttcttacttacttgggagaagcttaagcggagaggtcgaggaaggaaggaaggagaggaggaccagcgtagaaaggaagagggagaagagaagaaagggaaaaagatcaaaactcatcatgcaccagggtctaccgcatgctag

SEQ ID NO: 196945 - DNA, 234 bp, synthetic construct
  misc_feature 1..234: note = Description of Artificial Sequence: Synthetic coding sequence
  source 1..234: mol_type = other DNA
atggacgagatcgagaagtaccaggaggtggaggaggaccaggacccctcgtgcccccgtctgagtcgcgaactgctggctgaaaaggagcctgaagtgctccaagattctctggaccgatgctactccacccctagcggctatttagagctaccagatcttggccagccctataggagcgccgtgtatagcttggaagagcagtatctgggtctggcactcgatgtggattag

SEQ ID NO: 196946 - DNA, 234 bp, synthetic construct
  misc_feature 1..234: note = Description of Artificial Sequence: Synthetic coding sequence
  source 1..234: mol_type = other DNA
atggacgagatcgagaagtaccaggaggtggaggaggaccaggacccttcctgccctcgactgtccagggagttgctagcggagaaagaaccagaggtgcttcaagattcgctggatagatggtatagcacgccatccggctacctggaactcccggatctcggccagccataccgtagtgctgtgtatagcctagaggagcagtatctcggacttgccttagacgttgactag

SEQ ID NO: 196947 - DNA, 234 bp, synthetic construct
  misc_feature 1..234: note = Description of Artificial Sequence: Synthetic coding sequence
  source 1..234: mol_type = other DNA
atggacgagatcgagaagtaccaggaggtggaggaggaccaggacccatcgtgtcctcgtctgagtcgagaactgctcgctgaaaaagaacccgaggtgcttcaggactcgttggaccgttgttatagtactcctagcggttatcttgagctgccggatctaggccagccttatagatcagctgtgtacagcctggaggaacaatatttagggctagcattagacgtcgactag

SEQ ID NO: 196948 - DNA, 207 bp, synthetic construct
  misc_feature 1..207: note = Description of Artificial Sequence: Synthetic coding sequence
  source 1..207: mol_type = other DNA
gagatgcagaaggccgaggagaaggaggtgcccgaggacagcctggaagaatgtgccatcacgtgttcgaattcacatggtccctacgatagcaaccagccgcaccgcaagaccaaaatcacatttgaggaggacaaggtcgattcgaccctgattggctcctcatcacatgtggagtgggaagatgccgttcatataataccgtag

SEQ ID NO: 196949 - DNA, 9996 bp, synthetic construct
  misc_feature 1..9996: note = Description of Artificial Sequence: Synthetic coding sequence
  source 1..9996: mol_type = other DNA
atggtggtgagcgccggcccctggagcagcgagaaggccgagatgaatattctggaaattaacgagaaattgaggccacagctggccgagaataaacagcagtttagaaacttgaaggaacggtgctttctcacacagttggccggctttcttgcgaaccgacagaagaagtataaatatgaggaatgcaaggatctcattaaattcatgctccgaaacgaacgtcaattcaaggaagaaaagctggcagagcaactgaaacaggcagaagaactacgccagtataaagtgctggtgcactctcaggagcgtgaactgacacaactcagggagaaactgagggagggtcgcgacgcctcacgttccctgaacgagcatctccaagccctgctgactcccgatgaaccagataagtcacagggccaggacttacaggagcagttggcggagggatgccgactggcccagcaactggttcagaagctaagtcctgagaacgatgaggatgaagatgaagatgtccaggtcgaggaggatgagaaagtgctcgagagttcggctccaagagaggtgcagaaagccgaggaatccaaagtccctgaggattcacttgaggagtgcgccatcacctgttcgaattcgcacggaccttgtgattcaaaccagcctcacaaaaacatcaagattaccttcgaagaagataaggtaaactcgactgtcgtggtcgatcggaagtcctctcacgacgaatgccaggatgccctgaacatcctgcctgttccaggtcctacctcctctgccaccaacgtgtccatggtggtgtccgcaggaccactgtctagtgagaaagcagagatgaacatcctggagattaacgagaaactgcgtcctcagttggccgagaaaaaacagcagttccgctcgcttaaagagaagtgcttcgttacccagttagccggcttcttggccaagcagcagaataagtataagtacgaagagtgcaaagacctgatcaaatcaatgcttagaaatgaactgcagttcaaggaagagaaactagccgagcagctcaaacaggctgaagagttacgccaatacaaggttctggttcactcccaggagcgtgagttaactcaactcagagagaaacttcgggaagggagagatgcttctcggtccctgaacgaacacttgcaggcactgttgaccccggacgaaccggataaaagccaaggccaggatctccaggaacagttagctgagggctgccggttggctcagcacctggtgcagaagctgtcgcctgagaacgacgaggacgaagacgaagacgtacaagtggaagaggatgagaaggtgctggagtctagctcccccagggaaatgcaaaaagctgaggaatctaaggtgcctgaagactctctggaagagtgtgccatcacctgttcaaactcccacgggccatgtgattcgaaccagccccacaaaaacataaaaattacctttgaggaggacaaggtgaattcttctctggtcgtggaccgcgagtatagtcacgacgagtgtcaagacgctttgaacatactccccgtcccaggaccaacttcctctgctacaaacgtttcgatggtggtgtctgcaggccccctttcttctgagaaggccgagatgaacatcctggaaataaatgagaaattaagaccacagctggccgagaagaaacagcagtttcggagtctgaaggagaagtgctttgtgactcaggtcgcatgctttctggccaaacagcagaacaaatataagtacgaggagtgcaaagatctgattaagagtatgctgagaaatgagctacagttcaaagaggagaaattagccgagcagctgaagcaagctgaagagcttagacagtataaagtcttggtccactcgcaggaaagggagctgactcagcttcgggaaaagctccgcgagggccgggacgccagccgatcactgaatgaacatctccaggcgttattgacgcccgacgaaccagacaagagtcagggacaagatctgcaagagcagctggctgagggttgcaggctagcacaacatctggtccagaagctgtcgcctgaaaatgacaacgatgacgacgaagatgtgcaggtagaggttgcagagaaagtacagaaatcctcttccccccgcgagatgcagaaagccgaggagaaggaagtgcccgaagactcattagaagagtgcgcaattacctgctccaacagtcatggtccctatgatagtaatcagccccataggaagaccaagattactttcgaagaagacaaggtagactcgaccctgatcgggagctcctctcatgtcgagtgggaggatgcagtgcatattattcccgagaacgaatcggacgatgaagaggaggaggagaagggcccggtctccccacgaaacctccaggaatcggaggaggaagaggtgccacaagagagctgggacgaaggatacagcactttgtccattccgccagaacggctcgcgagctatcaaagttactcctctaccttccactcccttgaggagcagcaggtttgcatggctgttgatattgggagtgaatacagcatcgttaaggtgatcaagctgcagttcatggcccagagtcaagctatgccggtcccaacgtggacagactgtcacgatatcgaactgaaggccggccataggtgggaccaggttaagaaggaggaccaggaagcaacggggcctcggttatcaagagagctccttgcagaaaaggagcccgaagtgctgcaggacagcctcgaccgatgttactctaccccaagcgtgtatctcgggctcaccgacagttgtcagccttatcgctccgcgttctatgtgctcgaacagcagcgcgttgggctggccgtggatatggacgaaatagagaagtaccaggaggtcgaagaggatcaagatccctcgtgtccacggctgtcccgggagcttttggcagaaaaggagcccgaagtcctccaggatagtctggatcgttggtatagcacccccagcggatacctggagttgcctgatctggggcaaccttaccggtccgcagtgtactcactcgaggagcagtacctcggcctggctctggacgtggacaggatcaaaaaagatcaagaggaggaggaggatcagggccccccgtgtcctaggctctcaagagagctactcgaagtcgttgaaccagaagtccttcaagatagcttagatcggtgttatagcacaccatcgagttgccttgagcaaccggactcttgtcagccataccggtcctctttctacgctcttgaggagaagcatgtggggttctctttggacgtgggggaaattgagaagaaggggaagggcaagaaaaggagaggaaggcgctccaaaaaaaaacgtcgacgaggccgaaaagagggcgaagaggatcaaaatcctccttgcccgcgtctgagccgtgaactgctcgcggagaaagaacctgaggtcctgcaggactccttggacagatggtactcgacaccttccgtctacttgggactgactgacccatgccagccatatcggagcgccttttatgtcctagagcagcagcgcgtcggattggccgtcgacatggacgagatcgaaaaataccaggaggtcgaggaggatcaggacccttcatgccctagattgtcccgcgagctgctggctgaaaaggaacccgaggtgctccaggatagtttggatcgctggtatagcactccttcaggatacttagagcttccagacctgggccaaccgtaccggtccgctgtttacagcttagaagaacagtacctgggactggccctggacgttgacaggattaaaaaagaccaggaggaagaggaggatcagggccccccatgcccacgactgtcccgagaactgctggaagtggtggagcctgaagttcttcaggatagtctagatcgttgttactctaccccatcctcgtgtttggagcaacccgacagctgccagccctatagatcctccttttatgctctagaggaaaagcacgtaggattcagtctggacgttggagagattgagaagaagggtaaagggaaaaagagaagagggaggcggagtaaaaagaaacggagacgggggcggaaagagggggaggaggaccagaatccaccatgcccaaggctgtcacgagaactgttggcagagaaagagcccgaagtgctgcaggactctcttgacagatggtacagtaccccctctgtgtacttaggtctaaccgatccgtgccaaccttatagatctgcattctacgtgttggagcagcaaagggtgggcctggcagtcgatatggacgaaatcgagaagtaccaggaagttgaggaggaccaggacccctcttgtccgcgcctgtcccgcgaactcctagctgaaaaggagcccgaagtgctccaggacagcctcgaccgctggtattcaactccgagcggttatctcgaactgcccgacctcgggcagccatacagaagcgcggtctatagtctcgaagagcagtacctgggcctagccctggacgtggacaggatcaagaaagatcaggaggaggaggaagatcaaggccctccttgccctcgtttgagtcgggagctgctggaggtcgtcgagcccgaagtcttacaggactcgctggaccggtgttattctacgccaagcagctgcttggagcagccagactcctgccagccatatagatcgtctttttacgccttagaggagaagcacgtagggttttcgctggatgtaggcgaaatcgaaaagaaagggaaaggcaagaaaaggcgcgggaggcgatccaaaaaaaaacgaagaagaggccgaaaagaaggggaagaagaccagaatccaccatgcccacgcttgagtcgggaactgttggccgagaaagagccagaagtgctgcaggatagtctggatcgttggtactccacgccctccgtctacttgggcctgactgacccttgtcaaccataccgctccgcattttacgtgctcgagcagcaacgcgtggggctagcagtggatatggacgagatagagaagtaccaggaggtggaggaagatcaggaccctagctgtcccagactatcaagagaattgttggcggaaaaagagcccgaggtccttcaggattctctggaccgatggtacagcacacctagtggctatttagagcttccggatttgggccagccctacagatcagccgtctatagtctggaagagcagtatctcggactagccctagacgtagatcgcataaagaaggatcaggaggaagaagaagaccagggacctccctgtcctaggctttctcgcgagctgctagaagtggtggaaccggaggtgttacaggactctttggacagatgctactcaacaccaagtagctgtctggagcagccagacagctgccagccctacaggtcatccttttatgctcttgaagagaaacatgtgggcttcagtctggatgtgggggagattgagaagaagggtaagggaaagaagcgccgaggacgtcgaagcaaaaaaaagcggcgaagaggaagaaaagagggtgaagaagatcagaatcccccttgtccccggctctccagggaactcctggcagaaaaggagccggaagtgcttcaagattccttggatcggtggtatagcaccccatccgtttacctcggccttaccgatccctgccagccttataggtctgcgttttacgtgctggagcaacagcgcgtcgggctcgccgtggatatggacgaaattgaaaagtaccaggaagtcgaggaagatcaagatccctcctgccctcggttgagccgggaactgctggccgagaaggagcctgaggtcctgcaggactctttggatagatggtactccaccccgtccggctacctcgagttgcctgatcttgggcagccctatcgcagtgccgtgtatagtttggaggaacagtaccttggacttgcattggatgtggacaagattgagaaataccaagaagtggaggaggaccaggacccttcttgcccgcgcctgtctcgcgaactactcgccgaaaaagaacccgaagtgctccaggatagtctggacaggtggtactccacaccatccgtgtacctcggcctgactgatccctgtcagccttaccggtcggctttctatgttctagagcaacagcgggtggggttagccgtggacatggacgagattgaaaagtaccaagaggttgaggaagaccaggacccaagttgcccgcgccttagcagggaactgctcgccgagaaggaacccgaggtgctccaggactcgctggaccgatgttattcaacccctagcggctacttagaactcccggatcttggccaaccatatcgtagtgctgtatactcactcgaggaacagtaccttgggttggctcttgatgtggataggatcaagaaggatcaagaggaagaagaggaccaaggcccgccatgtccccgactgtctcgagagctcctcgaagttgtcgagccggaagtgttacaagactccctcgaccgctgctattctaccccctcctcatgtttggagcagcctgactcctgccagccatatcgctcatcattctatgctctggaggaaaaacacgtagggttctcactcgacgtgggtgagatcgaaaagtaccaggaagtggaggaagaccaggatccttcatgtcctcggctttctcgggaacttctcgcggaaaaagaacctgaggtgttacaagattcattagatcggtggtactccacaccgtccgtgtacttgggcctgacagacccctgtcagccttaccggagtgcattttatgtcctagaacagcagagggtcggcctcgcggttgatatggacgagatcgaaaaataccaggaagtcgaagaggatcaggatccaagctgtccccgccttagccgggagctgcttgccgaaaaggagcctgaggtgctgcaagatagcctggatagatgttatagcacgccttctgggtatctggaactccccgacctcggacagccctataggtccgccgtgtactcgctggaagagcagtacctcgggctggcgctggatgtcgatcggatcaagaaggaccaggaggaggaggaggaccaaggacctccatgccccaggctaagcagggagctgctggaagtcgtcgagcccgaggttctgcaggactccctggacaggtgctattcaactccgtcttcatgcctggagcagcccgacagttgccagccttacaggagttccttttacgcgttggaggagaagcatgttggcttctccctggacgtgggcgagatcgaaaaaaaaggcaaaggcaagaaacggcggggtcggcggtccaagaagaagaggcggaggggccgaaaggagggcgaggaagaccaaaatcctccttgccccaggctctcacgggagcttctggctgaaaaagaacccgaggtattacaagattctctcgatcgctggtattctacgcctagcgtctatttgggactgacagacccttgccagccctatcgatccgctttttatgtgcttgaacagcagagggtgggcttagcagttgacatggacgagatcgagaaatatcaagaagtggaagaggaccaggatccctcctgtccgcgactctctagggagctgttggcggagaaggaaccagaagtcctgcaggactcactggacaggtggtactctacacctagtggatatctggagctccccgacctggggcagccgtataggtcagccgtgtattctctggaggagcagtatttgggcctagccctagacgtggaccggatcaaaaaagaccaagaggaggaagaagatcagggacctccatgccctcgcctttccagagagctacttgaggtcgtcgaacccgaagtgctgcaggacagcctcgaccggtgttactcgaccccgagcagttgcctcgaacaacccgattcctgtcagccctaccgctcctctttctatgccctggaagagaagcacgtcggtttctccctggatgtgggagagatcgagaagaaggggaaggggaaaaagagacggggtagaagatctaagaaaaagcgtcgccgtggtcgaaaggagggagaagaagatcaaaatcccccctgcccccggctgagcagagaattattagcagaaaaggaaccagaagtgctccaggacagcctagatcggtggtattctaccccctctgtctatttggggttgacagacccctgtcaaccctatcgctctgcattctatgtgttagagcaacaaagagtgggcctggcagtggatatggacgagattgaaaagtaccaggaagtggaagaagaccaggacccgagctgccccagactcagccgggagctgctggctgagaaggaacctgaagttctgcaggatagcctcgatcgctgttatagcacgcccagtggttatctcgaactgcccgatctgggccaaccataccggtccgccgtttacagcctcgaagaacagtacttgggcctggctctagacgtcgaccgcatcaagaaagatcaagaagaggaggaggaccaaggtcctccttgtcctcgattgagccgcgaactgctcgaagttgtggaacctgaagttttacaagacagcttagaccggtgttactcaaccccgtcttcatgtctggaacaacctgattcatgccagccttatcggtccagtttctacgctcttgaggagaagcacgtagggttctcgttagatgtgggtgaaattgaaaaaaagggcaagggtaagaagaggagagggcggaggtctaaaaaaaaaagaagaaggggcagaaaggagggggaggaagaccagaaccccccatgcccccggctgtcccgcgagcttcttgctgaaaaagaacctgaggtactgcaagattccctcgatcgttggtactccacaccaagcgtgtacctggggctcacagacccatgccagccatgtaggtccgccttttacgtattggagcaacaaagggtcgggcttgcagtggatatggacgagatagagaagtatcaagaagtcgaagaggaccaggatccctcctgtccaaggctcagtagagaactgctcgccgagaaggaacccgaggtcttgcaggactccctggatcgctgttacagtacccccagtggatacttggagcttccggacctcggacagccttaccggtcagcagtgtactctctcgaagagcagtatctgggactggcccttgatgttgacaggatcaaaaaggaccaggaggaagaggaagaccaggggccaccctgtccacggctgtctagggaactgctggaagtggtggagccagaagtactgcaagattccctcgaccgctgctactcgactccttcatcatgcctggagcagccggacagctgtcaaccatacaggagttcattttacgcactggaagagaagcatgtagggtttagcctggacgtaggggagatagaaaagaaaggcaaaggtaagaaaagaaggggaagacgcagcaaaaaaaaacggcgccgggggcgaaaagagggcgaagaggatcagaaccctccctgccctcgattgaactctgtgctgatggaagtcgaagagcccgaggtcctccaggacagtctggatcgctgctactccacaccttctatgtactttgagctgcctgattctttccagcattatcgctcggtgttttactcttttgaagaacaacatatcacatttgcactggacatggacaattctttcttcacactgaccgtcacgtctctgcacttggtatttcagatgggcgttatcttccctcagtag

SEQ ID NO: 196950 - DNA, 234 bp, synthetic construct
  misc_feature 1..234: note = Description of Artificial Sequence: Synthetic coding sequence
  source 1..234: mol_type = other DNA
atggacgagatcgagaagtaccaggaggtggaggaggaccaggacccaagttgcccaagactatccagggaattgcttgccgaaaaagagcccgaggttctgcaggattctttggaccgctgctactcaacgccatcaggctacctggaactgcccgacctggggcagccttaccggtccgctgtctactcacttgaggagcagtacctgggcctcgctctggacgtggattag

SEQ ID NO: 196951 - DNA, 2517 bp, synthetic construct
  misc_feature 1..2517: note = Description of Artificial Sequence: Synthetic coding sequence
  source 1..2517: mol_type = other DNA
atggtggtgagcgccggcccctggagcagcgagaaggccgagatgaatatcctggagataaacgagaaactaaggccccagctggcggaaaataaacagcagtttaggaacctaaaggaaaggtgtttcttgacacagctagctggatttctggctaacaggcagaagaagtataagtacgaggagtgtaaggacttgataaagtttatgctgcggaacgaacggcagttcaaggaagagaaattggccgaacagctgaaacaggctgaggaacttagacaatataaagtgcttgtgcattctcaagagcgggagctgactcagttgagggagaagctgcgagaaggccgggatgctagcagaagccttaatgagcatctacaagccttgctgacaccagacgagccagacaagtctcagggtcaagacctccaggagcaactggcggaaggatgtcgcctggcgcagcaactggtacaaaagttgagcccagaaaatgacgaggacgaggacgaggatgttcaagtagaggaggatgaaaaggttctggagagctcagcacctagagaggtccagaaagccgaagagagtaaggtgcccgaggacagcttggaggaatgtgccatcacttgttccaactcccacggcccatgcgactctaaccaaccccacaagaacatcaagatcactttcgaagaggacaaagtgaacagtagcctggtggttgacagagaatattctcatgatgaatgtcaggacgctttgaatattttgcccgtgcctggcccaacctcttcagccacgaacgtaagcatggttgtgagtgccgggcctctgtcctctgagaaggccgagatgaatatcttggaaatcaatgagaaactcaggccacagctggcagaaaaaaaacagcagtttcggtcgctcaaggaaaagtgtttcgtgacccaggtggcatgctttctggccaaacagcagaacaagtacaaatatgaggaatgcaaggacctgattaaaagtatgctgcggaacgaactccaattcaaggaggaaaagttggctgagcagctgaaacaggctgaagagctacgacagtataaagtgctggtgcatagtcaagagcgagaactgacccaactaagagaaaaactcagagagggtcgggacgcatcgcgcagcctgaatgagcacttgcaggcacttttgacccccgatgaacccgataaaagtcagggccaagacttgcaagaacaactggctgaggggtgtcgcctggcacagcacctggtgcagaagctttctccagagaacgacaatgacgatgatgaggacgttcaggtggaggtagcggagaaagttcagaaaagctcttcccctagagagatgcaaaaagctgaagagaaggaggtgcctgaggacagcttggaggaatgcgctatcacatgctccaatagccatgggccatacgactccaaccagccccaccgcaagccaaaatctcacctgcgcaaaaccaagagcacccagctgagcttggcccaccctctgatgttgaacgggcgcatgctatacactctgtcacagaaaatgaaggtcatgatgagaaagcgaaagaagaaagggcagtgcctcccaggcatttgtcggtcactgaagcggcgaaagtctcctcgctctccggggatgaaagtgattcgcctgtctcagttcctcttgaagggccatcggtgggatcaggtgaaaaaagaagatcaggaagccaccggcccccgcctgtccagagaactgttagctgagaaggaacccgaggtgctgcaggatagccttgacagatgctatagtacaccgtctgtttaccttgggcttacggactcgtgccagccctacaggagcgctttttacgtgttggaacagcagagggtcggcttggcagtggacatggacgagatagagaaataccaagaggtggaggaggaccaggatccctcctgtcccaggttgtcccgagaactgctggcagaaaaagagccggaggtgctccaagactcccttgacagatgctattcaacaccgtccggctaccttgagctgcctgacctgggccagccatatcgatcagccgtttacagtttggaggagcagtacttaggtcttgcgttggatgtggacagaatcaaaaaggaccaagaggaggaagaagatcaaggaccaccgtgccctcggctgagccgtgaacttctggaagtggtggaacctgaggtgctccaagatagcttggacgtaatacagcttctgccagttgtgctgaatagccttaccccagcttcgcctaccgaggtgcccttcatgcattggagaaaaaacatgctggcattcctcctcacatgggagaagctgaaacgaagaggaaggggcaggaaagaaggcgaggaagatcaacgccggaaggaggagggcgaggaaaaaaaaggtaaaaagatcaaaactcatcatgcccctgggtccactgcttgttag

SEQ ID NO: 196952 - DNA, 288 bp, synthetic construct
  misc_feature 1..288: note = Description of Artificial Sequence: Synthetic coding sequence
  source 1..288: mol_type = other DNA
atcgccgagatcgagaagtaccaggaggtggaggaggaccaggaccctagctgtccaagactgtcccgcgagctcttagcggagaaggaacctgaagtgttacaggactcactggaccgctggtattccaccccctctgggtatttggaattgcccgacctcgggcagccctaccggagcgcagtttactccctggaggaacagtatctgggcttagctcttgatgtggacaaaattgaaaagtatcaagaagtcgaagaggaccaggatcctagctgccctaggtag

SEQ ID NO: 196953 - DNA, 234 bp, synthetic construct
  misc_feature 1..234: note = Description of Artificial Sequence: Synthetic coding sequence
  source 1..234: mol_type = other DNA
atggacgagatcgagaagtaccaggaggtggaggaggaccaggacccaagctgtccaagactgtcgcgggagctcctggctgagaaggaaccagaggtattacaggactctttggatcggtgctactctaccccttccggctacttggaactccccgatttaggtcagccttatagaagcgccgtatattcacttgaggaacagtacctgggattggctctggatgtggattag

SEQ ID NO: 196954 - DNA, 2784 bp, synthetic construct
  misc_feature 1..2784: note = Description of Artificial Sequence: Synthetic coding sequence
  source 1..2784: mol_type = other DNA
tgagacctgatcaagagcatgctgcggaacgagcggcagttcaaggaggaaaagctcgcggagcagttgaaacaagcagaggagctacggcagtataaggttctcgtgcacgcccaggagcgcgaactcacacagctcagagagaaattacgcgagggtcgcgacgccagccggtctttgaatgagcacttacaagccctcctgacacccgacgagcctgataaatcccaaggtcaggatctgcaagagcagctggccgaaggctgtcggttggcccaacatttggtgcagaagttgtctcccgaaaatgacaacgatgacgatgaggatgtgcaggtcgaggtggctgagaaagttcaaaaatcatcggcaccgagggaaatgcagaaggccgaggagaaagaggtgcccgaggattcacttgaagagtgtgcaatcacctgtagcaattcccacggcccttatgactcaaatcaaccacacaggaagacaaagattactttcgaggaagataaggtggactccacactcataggttcctccagtcatgtcgagtgggaggacgctgtgcatattatcccagagaatgagtcagacgatgaggaggaagaggagaaggggcctgtgagcccccgtaacctgcaggagtcagaagaggaagaagttccacaggaatcttgggatgaaggctactcaaccctgtctatccctccagagatgttagcgtcatacaaaagttactcatccacattccactcactggaggaacaacaggtgtgtatggcggtggacataggccgccatcgctgggaccaggtcaagaaggaggatcacgaagcaacaggacccaggctgagtagagagctgctcgacgagaagggaccggaggtgcttcaggattctttggaccggtgctactccacaccgtcgggatgcctggagctcactgatagctgccagccataccggtccgcattttatgttttagaacagcagagagtgggccttgcagttaatatggatgagatcgagaaataccaggaggtagaggaagaccaggatcctagctgccctaggctatcacgcgaactgctggacgagaaggagccagaagtattgcaagactcgctcggtaggtgctactctacaccgagtgggtatctggaactgcctgaccttggacagccatactctagcgctgtatactccctggaggaacaatacctgggattggcactggatgtcgaccgaataaagaaggaccaagaagaggaggaggaccaagggcccccatgtccacgattgagtcgggagcttttagaagttgtcgaacctgaggtgttgcaggattccctggacaggtgctacagcactccatccagttgtctcgagcagccggactcctgccagccatacggctcctccttttacgcactggaagaaaagcacgtcggcttctctcttgatgtaggagaaatcgagaagaaagggaaagggaaaaagaggcggggacggcgctctaaaaaagagcgccggaggggtcggaaggagggtgaagaagaccaaaaccctccctgcccccggctgtctcgcgagctcctggatgagaaggggcccgaagtgctacaagacagcctggatcgctgctattcaactccctctggatgcctggaattgacagattcatgccagccttatcgcagcgccttttatattctggagcaacagcgggtaggcctggcagtggacatggatgagatagagaaatatcaggaggttgaagaagatcaggaccccagttgcccaagattatcaggcgagctgctggacgagaaggaaccagaagtactgcaggaatcccttgataggtgttactctaccccctcaggctgccttgagctaacagacagctgccagccctacagatcagccttttacatactggaacaacaaagagtagggttagctgtcgacatggacgagatcgagaagtatcaagaggttgaggaggaccaggacccaagctgtcccaggctcagccgtgagcttctggacgagaaagaaccagaggtacttcaggactccctcggccgttgttacagcacgccctctggatatctagagttacctgacctgggccagccttactccagcgcagtctattcattggaagagcaatacctcggcctggctctagatgtggacaggatcaaaaaggatcaagaggaagaagaagaccaaggtccaccttgcccccgcctgagccgggagctgttggaggtggtcgaacctgaggtgctgcaagactccttagacagatgttactctaccccatcatcctgtctggagcagcccgacagttgccaaccgtacgggtcctctttttatgctctagaggagaagcatgtgggattttctctcgacgtgggggaaatcgaaaaaaagggtaaaggcaagaagaggcgcggccgtagaagcaagaaggagagaagacgcggtagaaaggaaggcgaggaggatcaaaacccaccatgtccacgccttaactctatgctcatggaggtggaggaacctgaggtcttacaggattctctcgatatttgttatagcacaccctctatgtattttgagctgcccgacagctttcagcactataggtccgtgttctatagtttcgaagaggaacacatatcctttgccctttacgtggataaccgcttctttactctcaccgtgacttctctccaccttgtgttccagatgggcgttatattccctcaatag

SEQ ID NO: 196955 - DNA, 2766 bp, synthetic construct
  misc_feature 1..2766: note = Description of Artificial Sequence: Synthetic coding sequence
  source 1..2766: mol_type = other DNA
atgctgcggaacgagcggcagttcaaggaggagaagctggccgagcagttaaaacaggccgaggaattgcgccaatacaaggttcttgtccatgcccaggaacgagagctgacccagctgcgtgaaaagctgcgggagggccgcgatgcctcccgaagcctgaatgagcacttgcaagctctcttaactcccgacgagcctgacaaatctcaaggacaggaccttcaggagcaacttgctgagggttgtcgattagcccagcatttggtgcagaagctctcccccgagaacgacaatgatgatgatgaggacgttcaagttgaagtggctgaaaaggtgcagaaaagtagcgcacctcgggaaatgcagaaggccgaagagaaagaagttcctgaggatagcctggaggaatgcgctataacttgctctaactctcacgggccttatgattccaaccagccacaccggaagacaaaaatcacctttgaggaagataaggtggactcaacgcttatagggagcagtagtcatgtcgagtgggaggacgctgttcatatcattccagaaaacgagagtgacgatgaggaagaggaggaaaagggacctgtctctccaaggaacttgcaagagtctgaggaagaagaggtcccccaagaatcatgggacgagggctacagtactttatcaattccccccgaaatgctggcctcctacaaatcctacagcagcacatttcacagcttggaggaacagcaggtgtgcatggccgtcgatatagggagacatcggtgggatcaggttaagaaggaagatcatgaggccacaggaccccgactgtctagagaactactggacgaaaagggccctgaggttctgcaggatagtctggacagatgttattccactccatcggggtgcctggaactaaccgacagctgccaaccatatagatctgctttttacgtgttagaacagcaaagagttggactggccgttaatatggatgaaattgaaaagtaccaggaagtggaggaagaccaagatccgtcatgtccccgactgtcaagagaactgctggacgagaaagaacccgaggtcctgcaggattcgctcggccgctgttactcaactcccagcggttacctcgaactgcccgacttgggccaaccttattcaagcgccgtttactcccttgaggaacaatacctgggtctcgctctggacgtcgacagaattaaaaaggaccaagaagaggaagaggatcagggccctccctgtccacggctgagccgggagctgttggaagtagtggagcctgaagtactgcaagattcgctcgaccgttgttactcaactccatcctcatgcttggagcaacccgactcctgtcagccttatggatctagtttttatgcactcgaagaaaaacatgttggctttagcctagatgttggcgaaattgagaaaaagggcaagggcaagaagagacgggggcgacgctccaagaaggagcgaaggcgaggccgcaaagagggtgaagaagaccagaatcctccttgtccaaggctctctcgagaactccttgacgagaagggccccgaggtgctgcaggattccctggatcgctgttactccacaccgtctgggtgcctggaactgaccgactcttgtcaaccttaccgttctgccttctacatcctagaacaacagagggtgggcctggcagtggatatggatgaaatcgagaaataccaagaagtggaggaagaccaagaccccagctgtcctcggctctctggcgaactcttggacgaaaaagaaccggaggtgctgcaagagagtctggatcgctgctactcgacaccatcgggatgcctggaattaactgattcctgccaaccatacagatcagctttttacatcttggaacaacagagggtggggctcgccgtggatatggatgagatagagaagtaccaagaggtggaggaagatcaggacccctcctgtccccgtctcagcagggagctgctcgatgagaaagaacctgaggtgttgcaagattccctggggaggtgttacagcaccccaagtggttacctcgagcttcccgacctaggacagccatactcttccgcagtttatagtctagaagagcagtacctgggcctcgcactagacgtagacagaataaaaaaggaccaggaggaagaggaagaccagggccctccatgtccgcggttgtcccgcgagcttctggaagttgtcgaacccgaagtgctccaggattctctcgaccggtgttacagtactccttcctcttgcctggagcaacccgattcttgccaaccctatggctcctccttctatgcccttgaagagaaacacgtgggattcagcctagacgttggggaaattgaaaaaaaaggtaagggaaagaaaaggcgcggccggcgcagcaagaaggagcgccgcagaggtcggaaggagggagaggaagaccagaacccaccctgccccaggctgaatagcatgctgatggaagtggaagagccagaggtgctccaggatagcctcgatatctgctacagcacaccctcaatgtacttcgagctgccggattccttccagcactacaggagcgtcttctattcctttgaagaggagcatatttcgttcgccttgtatgtagacaacaggttctttaccctcacagtcacatccctccatctggtgttccagatgggagttatcttcccccagtag

SEQ ID NO: 196956 - DNA, 810 bp, synthetic construct
  misc_feature 1..810: note = Description of Artificial Sequence: Synthetic coding sequence
  source 1..810: mol_type = other DNA
atggacgagatcgagaagtaccaggaggtggaggaggaccaggacccatcctgccctcgtctgtcgagggaactgcttgacgagaaggaacccgaagtgttacaggactctctgggtcgctgctacagcactccaagtgggtatctcgaactaccagatctgggacagccctattctagtgccgtgtattcactggaggagcagtatctgggcctagccctagacgtcgaccgtataaaaaaggaccaggaggaggaggaggaccagggcccaccatgtccccggctgtctcgcgagctccttgaggtcgttgagcctgaagtgttacaggacagccttgaccgttgctattcaaccccgagttcatgccttgagcagccagattcctgccaaccatacgggagctccttttacgcactggaggagaaacacgtaggattctcgctcgatgttggggagatcgagaagaagggaaagggcaagaagagacgaggcagacgttctaagaaagagcgccggcgaggacgcaaggagggggaagaagaccaaaatccaccctgtcccaggctgaattcaatgctgatggaagtcgaagagcccgaagtgctacaggatagcctagatatctgttattctaccccgtctatgtactttgagctcccagattcatttcaacattataggtccgttttctatagttttgaggaggaacatatatcatttgctctatacgtggacaacagattcttcactttaactgttaccagcctccacctggtctttcagatgggagtcatttttcctcagtag

SEQ ID NO: 196957 - DNA, 1539 bp, synthetic construct
  misc_feature 1..1539: note = Description of Artificial Sequence: Synthetic coding sequence
  source 1..1539: mol_type = other DNA
tgatacgaggagtgcaaggacctgatcaagagcatgctgcggaacgagcgccaattcaaagaagaaaagctcgcagaacaactgaagcaagccgaggagctgcgccagtataaggtcttggtacacgcccaggaacgcgagttaacacagctccgggaaaaactgagggaggggcgggacgcctctcgaagcctcaatgaacaccttcaggccctcctgacgccagatgaaccagataagtcccaggggcaggacttacaggagcagcttgccgaggggtgtcggttagcccagcacctggtgcagaaactgagtcccgaaaatgataatgatgacgacgaggatgtacaagttgaagtggctgaaaaggttcagaagtcctcggccccacgcgaaatgcagaaagccgaagagaaggaagtgcccgaggattcactcgaggagtgcgcaattacctgctccaacagccacggaccttatgattctaaccagcctcacaggaagacaaaaatcaccttcgaggaagacaaggtcgattctacactgattggatcatcctctcacgtcgagtgggaagatgcggtgcatatcatcccggagaacgaatcggacgatgaggaagaagaggagaagggacccgtgagcccgagaaacctccaggagagcgaggaggaagaagtgccgcaggagtcctgggacgagggctactccactctgtctatccctcccgagatgctggcctcgtacaaaagctatagtagcactttccactctctagaggagcagcaagtatgtatggcggtcgacatcggccggcacagatgggatcaagtgaagaaagaggatcacgaggctaccggtccgagactgagccgcgagctcttggacgagaaaggcccggaggtcctacaggactcacttgaccgatgctatagcactccaagcggctgcttggaactgacagatagttgccagccatacagatccgccttctacgtcctagagcagcagcgggtgggcctcgccgtgaacatggatgaaatcgaaaagtaccaggaggtagaggaagatcaggacccctcttgtccgcggctgtcccgcgaacttctcgacgagaaagaacctgaagtgcttcaggatagtctgggacgatgctactccacaccctccgggtatctggagttacccgacctaggtcagccctattctagcgccgtgtacagtctagaagagcagtatttgggactcgcacttgatgtggatagaattaagaaggatcaggaagaggaggaggaccagggccccccttgccctagactctctcgggaactgctggaagtcgtggaacccgaggtcttacaggattcccttgatagatgttatagcacccccagttcatgcttggagcagcccgacagctgtcagccatatggcagctcattctacgcccttgaggagaagcatgtaggattttcactggacgtaggtgagattgaaaaaaaaggcaaaggcaaaaaacggcgcggccgacggtcttag

SEQ ID NO: 196958 - DNA, 567 bp, synthetic construct
  misc_feature 1..567: note = Description of Artificial Sequence: Synthetic coding sequence
  source 1..567: mol_type = other DNA
atggacgagatcgagaagtaccaggaggtggaggaggaccaggacccgagttgccccagactaagccgcgaactgctcgatgaaaaggagccggaggtcctccaagactcactcggacggtgttattcgactccctcaggttatctcgaactccctgatcttgggcagccatacagctcggcggtctattctctggaagagcagtacctcgggctcgccctggacgtggatcggattaaaaaagatcaggaagaagaggaagaccaggggccaccctgtcctcggctgagtcgcgaactcttagaagtggtggagcccgaagtgctgcaagattctctggataggtgctattctaccccttcaagctgtctcgagcagccggactcgtgccagccctacgggagcagtttctatgctctggaggaaaaacatgtaggcttttcactggatgtgggcgagatcgagaagaagggaaagggcaagaagcggagaggaaggagatccaagaaagagcgcaggcgtgggaggaaggagggagaagaggatcaaaatcccccttgtccttag

SEQ ID NO: 196959 - DNA, 1539 bp, synthetic construct
  misc_feature 1..1539: note = Description of Artificial Sequence: Synthetic coding sequence
  source 1..1539: mol_type = other DNA
tgatacgaggagtgcaaggacctgatcaagagcatgctgcggaacgagcgacaattcaaagaagaaaagcttgcagagcaactcaagcaggctgaggagctcagacagtacaaggtcttggtgcacgcacaagagcgtgaactcacacaactccgagaaaagctccgggagggcagagacgctagtcgttccctgaatgagcacctgcaggccctgctcactcctgacgagccagacaagtcgcaaggccaggatctccaggagcaactcgcagaaggttgcagactggctcagcacctcgttcaaaagctctcacccgaaaatgacaacgatgatgacgaagatgtgcaggtggaagtggccgagaaggttcagaagtcttctgcaccacgtgaaatgcaaaaagccgaggagaaggaggtgccggaagattccttggaggaatgcgccatcacctgcagcaactcccatgggccatacgattccaatcaaccacatcgcaagaccaaaattacgtttgaagaagataaagtggatagcaccctcattggctcatcctcccatgtggagtgggaggacgccgtccacattattcccgagaatgagagtgacgacgaagaggaagaagagaagggacctgtctcacccaggaatttgcaagaatcggaggaggaggaagtgccacaagagtcctgggatgagggctactccaccctttccattccccccgagatgctggcaagttataagagttactcatctacattccattcccttgaggaacagcaggtttgtatggcagtcgatatcggtcgccataggtgggatcaggtaaagaaagaagatcacgaggcaaccgggccacgcctttcccgggagctgctcgatgaaaaaggtccggaggttctgcaggattcacttgaccgatgttacagtacaccatcagggtgtctggaactcactgactcctgccagccctatcggtcagccttttatgtgctggaacaacaaagggtaggactagccgttaatatggatgagatcgagaaatatcaggaggtggaggaggatcaagacccatcgtgtccccgcttaagcagagagctcttggacgaaaaagagcctgaggtcctgcaggactctttagggcgatgctacagtacccccagcggttatcttgagttgccagatctgggtcaaccttattcgtctgctgtgtactccttagaggaacagtatctgggcctggcgttagatgtggacaggattaaaaaggaccaagaagaagaggaggaccagggaccaccatgtccacggttatcccgagaactcctggaagtggtggaacctgaggtgttgcaggattctctggatcgatgctactccactcctagcagctgtcttgaacaaccagattcttgccaaccatacggttccagcttctacgctctggaagagaagcacgtaggatttagtctggatgtcggtgagattgaaaagaaaggcaagggcaaaaagcgccggggcagaaggtcttag

SEQ ID NO: 196960 - DNA, 1539 bp, synthetic construct
  misc_feature 1..1539: note = Description of Artificial Sequence: Synthetic coding sequence
  source 1..1539: mol_type = other DNA
tgatacgaggagtgcaaggacctgatcaagagcatgctgcggaacgaacgtcaattcaaagaggaaaaattggcagaacagcttaaacaagctgaggagctcaggcagtacaaggtgctggttcacgctcaggaacgcgaactcacacagctgcgggaaaagctaagggaaggccgagatgccagccggtctctgaacgaacacttgcaggccctgctcacccccgacgagcccgataagtctcagggccaagacctgcaggagcagctggccgaagggtgccgcctcgctcaacaccttgttcagaaattgagcccggagaatgacaacgatgatgacgaagatgttcaagtggaggtcgctgagaaggttcaaaaaagctcggctccccgtgaaatgcagaaggcagaggagaaggaggtgccagaagacagcctggaagagtgcgctattacctgcagcaacagccatggaccctacgattccaaccagcctcaccgcaaaaccaagatcacttttgaagaggacaaggttgacagcacgcttatcggctcctcaagtcacgtggaatgggaggatgcagtgcacattatacctgagaacgagagcgatgacgaagaggaagaagagaagggaccagtgtccccaagaaacctgcaggaatcagaggaagaagaggtgccccaagagagctgggatgaggggtacagcacattgtcgattccacctgagatgcttgccagttacaaaagctactcatctacctttcattctttagaggaacaacaggtctgtatggctgttgacatcggtagacaccgctgggatcaggttaaaaaggaggaccacgaggctacaggcccccgactgagccgggagttattagatgaaaaaggacccgaggtcctgcaggacagtctggatcgctgctactcaactccctcaggatgccttgagttgacagatagttgtcagccttacaggtctgctttctatgtcctcgagcagcaacgggtagggttggctgtgaatatggatgagattgaaaagtatcaggaggtggaagaagaccaggatccctcgtgtccaaggctgtctcgcgagctcctggatgagaaggagccagaggtgctccaagacagcctgggacggtgctactccacacctagcgggtatttggagttgcctgaccttggacagccatattccagtgccgtatatagcctggaggagcagtacctgggcctggctctggacgtggacagaatcaaaaaggaccaggaggaagaggaagaccagggcccaccctgccctaggctttcacgagaattactggaagtggtggagcccgaagtactccaagacagcttggatcgctgctacagcaccccttcaagctgcttggaacagcctgacagctgccagccgtacgggtcttcgttttacgccctggaggaaaagcacgtgggattttctctggacgtgggggagatcgagaagaagggcaagggcaagaaacggcggggccgccggtcttag

SEQ ID NO: 196961 - DNA, 753 bp, synthetic construct
  misc_feature 1..753: note = Description of Artificial Sequence: Synthetic coding sequence
  source 1..753: mol_type = other DNA
gagatcgagaagtaccaggaggtggaggaggaccaggaccccagctgcccccgactgtctcgcgaactgttagacgagaaggagcccgaagtccttcaggatagtttgggtaggtgttattccacaccaagtggctatttagaattgccagatctcggccagccatattctagtgccgtttactccctggaagaacaataccttggccttgccttagacgtggataggattaaaaaagaccaggaggaagaggaggaccaaggcccaccgtgccctagacttagtcgcgaattgctggaggtcgttgaacctgaagtgctccaagatagcttggaccgctgctattcaactcctagctcctgtctggaacagcctgacagttgtcagccatacggtagcagtttttatgcactggaggagaagcacgtcggtttctctttggatgttggggagattgaaaagaagggaaaaggaaaaaagagacggggccgccgcagcaaaaaggaaaggaggcgaggcaggaaggagggcgaagaggatcaaaatcctccctgccccagattgagcggtgagctcctggacgagaaagagcccgaggtgcttcaagagtcgctggaccgctgctatagcaccccaagcggctgcctagagctaacagactcttgtcaaccctaccgctcagctttctacattctggagcagcaaagggtgggcttggctgtggatatggacggggagtatcttagcatgtag

SEQ ID NO: 196962 - DNA, 1539 bp, synthetic construct
  misc_feature 1..1539: note = Description of Artificial Sequence: Synthetic coding sequence
  source 1..1539: mol_type = other DNA
tgatacgaggagtgcaaggacctgatcaagagcatgctgcggaacgaaaggcaattcaaggaggaaaagctcgccgaacaactcaaacaggctgaggagctgcgtcagtacaaagttttggtgcacgcccaggaacgcgaattgacccaactgcgtgaaaagcttagagaggggcgcgacgcctcccggagtctgaatgaacaccttcaggccctgctcacaccagacgagccagataaaagtcagggccaagacctgcaggagcagctggccgagggatgccgtctggcccagcatctggtccagaagttatcgcccgaaaatgataatgatgatgacgaggatgtccaagtggaagtggctgagaaagtgcagaaatccagcgctccacgagaaatgcagaaggccgaggaaaaagaagtgcctgaggattctcttgaagaatgcgccattacgtgtagtaattcgcatggcccatatgatagtaatcagcctcaccgaaagaccaagatcacatttgaggaagacaaagttgacagcacactcatcggctcttcctctcacgtggagtgggaggacgctgtgcatattattcccgaaaacgaaagcgacgatgaagaggaagaggaaaaggggccagtgagtcccaggaatctgcaggagagcgaagaagaagaggtccctcaggagtcatgggatgaagggtactccactctttccatcccccctgagatgttagctagctataagtcctatagcagtaccttccactcactggaagaacagcaggtctgtatggccgtggatatcgggcgccatcgctgggatcaggtgaaaaaagaggatcatgaagctaccggacccagactgagccgggaacttctggacgagaaaggtccggaggtactgcaggactccctagataggtgttatagtacaccctcaggatgtctagagctgaccgactcctgccagccttataggtccgccttctatgtactggaacaacagcgcgtaggcctcgcagttaatatggatgagattgaaaaatatcaggaggtggaggaggaccaggaccctagctgccctcgcttgtcccgggagttgctggatgaaaaggagcccgaagtgttgcaagattcccttggccgctgctactccactcccagtggatatctggagctgcccgacctggggcaaccttactcaagcgcagtctacagtcttgaggagcagtatctcggcctggccctggacgtggatcgcatcaagaaggaccaggaagaggaggaggatcaaggaccaccttgcccgcgcctctctcgggagctgttggaagtggtggagcctgaggtgcttcaggacagtctggaccgctgctatagtaccccttccagctgcttggagcaacctgacagctgccagccctatgggtcgagtttctatgccttggaggaaaagcacgttggtttctccctggacgtcggggaaatagagaaaaagggtaaaggtaagaagcgaagaggacggcgatcctag

SEQ ID NO: 196963 - DNA, 1539 bp, synthetic construct
  misc_feature 1..1539: note = Description of Artificial Sequence: Synthetic coding sequence
  source 1..1539: mol_type = other DNA
tgatacgaggagtgcaaggacctgatcaagagcatgctgcggaacgaaagacaattcaaggaagagaagctagcagaacaattgaaacaagccgaggagctaagacagtataaagtgcttgtgcacgctcaggaacgcgagctcacccagctgagagaaaaactgcgcgaggggagagacgcatctcggagcctcaacgagcatctgcaggctttactgactccagacgaacctgataagtctcaagggcaggatctgcaggagcagctcgccgagggttgtcgcctcgcgcaacacctggtgcagaaactgtccccagagaacgataatgatgacgatgaagatgtgcaggtggaagtcgcagagaaggtgcagaagtcctctgccccccgggagatgcagaaagcagaagagaaagaagtgcctgaagatagcctcgaggagtgtgccatcacctgttctaactcccacgggccctatgattcaaaccagccccacagaaaaacgaagataacctttgaggaggataaggtggattccacactgattgggagcagctcacacgtggagtgggaagatgctgtgcacatcataccggaaaatgagagcgacgacgaagaggaggaggagaaggggcccgtctcaccgcgcaatctgcaggagagcgaagaagaggaagtccctcaggaatcctgggatgaaggttatagcaccctctctattccaccggagatgctggcatcctataaatcctattcttccacttttcactcactggaagagcagcaggtctgtatggccgtagacatcggccgacacaggtgggatcaagttaagaaggaagatcacgaagcaacgggccccagactgtctagagagctgctagacgaaaaaggcccagaggtgctgcaggactctctggacaggtgctactctaccccctctgggtgcctggagttgacggattcttgtcagccatacagatccgccttctacgttctcgagcagcagcgtgtgggcctcgcagtcaacatggacgaaattgaaaagtaccaggaggtggaggaagaccaggacccatcatgtcctcggctgtcccgagagctcttagacgagaaagagccagaggtcctgcaagattccttagggaggtgctactccaccccctctggctacttggagctgccagaccttggccagccatacagttctgctgtatatagcttggaagaacagtatttaggccttgcactggacgtcgacagaatcaagaaggatcaggaggaagaagaagatcaggggcccccttgccctaggctgtcccgagaactcctggaggtggtggagccagaggtgctgcaagactcattagacaggtgttatagcactcccagctcttgccttgaacagcccgacagctgtcagccatatggctcttctttctacgccctcgaagagaagcacgtaggtttttccctggatgttggggaaatagaaaagaaaggtaaaggtaaaaaacgccgtggccgccggtcctag

SEQ ID NO: 196964 - DNA, 1539 bp, synthetic construct
  misc_feature 1..1539: note = Description of Artificial Sequence: Synthetic coding sequence
  source 1..1539: mol_type = other DNA
tgatacgaggagtgcaaggacctgatcaagagcatgctgcggaacgagagacaatttaaagaggaaaagttagctgaacagctgaaacaggcagaagagctgagacagtacaaggtgctggttcacgcccaggaacgcgagctgacacaattgcgggagaagctgcgggaggggcgggatgcctctcggagcctcaatgaacacctgcaggctctgttgacaccagatgaacccgataaatcacaaggtcaggatctgcaggaacagttagcagagggctgtcggctggctcagcacctggttcagaagttatctcccgagaatgataatgacgatgatgaagatgtgcaagtggaggtcgcggagaaagttcagaagtcctctgccccacgggaaatgcagaaagcagaagaaaaagaagtccccgaggatagtctcgaggagtgtgccattacatgtagcaactcgcacgggccctatgattcaaaccagccacatcgcaagacgaagattaccttcgaggaagacaaagtcgatagtactctgataggaagcagctcacacgtcgaatgggaggatgcagttcacatcattcccgaaaatgagtccgacgatgaagaagaggaggagaagggcccggtgtccccacgaaatctgcaggagtctgaagaggaggaagtgccccaggaaagttgggatgaggggtacagtacgctgagcatcccacccgaaatgctagccagctataagtcatactcgtctacattccacagtctggaggagcaacaggtttgtatggcggtggatattgggcggcacagatgggaccaggtgaaaaaagaagaccacgaagcaaccgggccaaggctgtctcgtgagctgctcgatgagaaagggcctgaggtgctccaggactcacttgatcgctgctatagtacccccagtggctgtttagaactgactgattcctgtcagccatacagatcagcattttacgtgctcgagcagcagcgagtgggcctggccgttaatatggatgaaatcgaaaagtatcaggaagtggaagaggaccaagatcccagctgcccccggctctccagagagctgctggatgagaaggagcccgaggttctccaggactccctgggtagatgctactcaactcccagtgggtatctggagctccccgacttgggtcagccctatagctccgcggtctacagtctcgaagagcagtacctgggtctggctctggatgtggacagaataaaaaaagatcaggaagaagaagaggaccaggggccgccatgcccacgtctctctcgggagctgctggaagtcgtggagcctgaggtacttcaggactcgctggaccgctgttatagtaccccttcttcttgcctcgaacagccagatagctgccagccatacggttcaagtttctacgcgctggaagaaaaacacgtgggcttttctctggatgtgggcgagattgagaagaaagggaaaggaaaaaaacgccggggacggcggagctag

SEQ ID NO: 196965 - DNA, 1539 bp, synthetic construct
  misc_feature 1..1539: note = Description of Artificial Sequence: Synthetic coding sequence
  source 1..1539: mol_type = other DNA
tgatacgaggagtgcaaggacctgatcaagagcatgctgcggaacgagcggcagttcaaagaggagaagcttgcggagcagttgaaacaggccgaggagctccggcagtataaggtgttggtgcacgcacaggagcgggagctgactcagctgagggaaaagctccgtgaaggccgagacgcctccagatcactaaacgaacacctacaggctctactcactccagacgaacccgacaaatcccagggccaggatctccaggagcagttggctgaggggtgccggctagcacagcacctggtgcagaaactgagcccagagaacgacaacgacgacgacgaggatgtgcaggtcgaagtggccgagaaggtgcaaaagtcttcggcaccccgcgagatgcagaaggccgaggagaaagaagtccccgaggactccttggaggagtgtgccataacatgttccaattcccacggaccgtatgacagtaatcaacctcacagaaagacgaagatcacctttgaagaggataaggtggacagcactctgatcggttcctcaagccatgtcgagtgggaagacgccgtccatataattcctgaaaatgaaagcgacgacgaggaggaagaggaaaaaggccccgtgtcccctcgcaatcttcaggaatctgaggaggaggaagtaccccaggagtcctgggatgaagggtatagcacacttagtatccctccagaaatgttggctagctataaatcctacagctccactttccacagcctggaggaacaacaggtgtgtatggccgtggacattggacgtcacagatgggaccaggtgaagaaggaagaccatgaagctactgggccgagattgtccagagaactgcttgatgaaaaagggccagaagtgctacaggactccctggaccggtgctacagcacacccagcggctgtctggagctgaccgatagttgccagccctatcgctcagcattttacgtcctcgagcagcagagggttgggctggccgtgaacatggacgaaatcgaaaaatatcaggaagtagaggaagaccaggatccctcatgtccacggctgtccagggagctcctggatgaaaaggaaccggaagttctgcaagatagtttgggcagatgttactcgactcccagtggatatctagagttgcccgacttgggccaaccgtactcgtcagctgtatatagtctggaagagcagtaccttggtctggcgctggacgtagatcgtatcaaaaaggaccaagaggaagaagaagatcaaggacccccttgtccacgtttatccagagaactcttggaggtggtggaacctgaggttctgcaagattcgctggaccgttgttactcaacacctagtagctgcctagaacagcccgactcttgccagccatatggttcgagcttctatgctctcgaggaaaaacatgtaggcttctctctggacgtgggggaaatcgagaagaaaggcaagggcaaaaagagacggggcaggagaagttag

SEQ ID NO: 196966 - DNA, 2013 bp, synthetic construct
  misc_feature 1..2013: note = Description of Artificial Sequence: Synthetic coding sequence
  source 1..2013: mol_type = other DNA
atggtggtgagcgccggccccctgagcagcgagaaggccgagatgaacatcctggagatcaatgagaaacttcgacctcagttggctgagaagaagcaacagttccggaatctgaaggagaaatgctttttgacacaattagccggttttctagccaaccgccagaagaagtacaaatacgaagaatgcaaggatctgatcaagttcatgctgagaaacgaacgtcagttcaaggaagaaaagctggccgaacagctcaaacaggccgaggagctccggcagtacaaggtgttagtgcatgcccaggagcgagagctgacccagctccgtgagaaattaagggagggccgggacgcttctcgcagtctgaacgaacacttgcaagccctcctgacacctgatgagcccgataagtctcagggacaggatttgcaagagcagctggcagaggggtgtcgcctaacccaacacttagtgcaaaagctgtcacccgagaatgacaacgatgacgacgaggatgttcaagtggaggtggcagagaaagttcagaaatcctcagctcctagggaaatgcagaaagccgaggaaaaagaagtccccgaggatagcttggaagaatgtgctattacttgttcaaatagtcacggcccctacgactccaatcaacctcataaaaagacgaagattacgtttgaggaggataaggtggactccaccttgatcgggagcagcagccatgtcgagtgggaggacgccgtccacattattccagaaaatgagagcgacgatgaggaggaagaagagaagggcccagtatcgccccgcaacctccaggagtctgaggaagaggaggtcccgcaagaatcttgggatgagggctattccacgctgtccattccccccgagatgctcgccagctaccagagctattcttctactttccactccctggaagaacagcaggtgtgcatggccgtagacatcgggaggcatagatgggatcaggtgaaaaaagaagaccaggaggctacaggtccccggttgtctagggagctgctggacgagaaggagccagaagtcctgcaagactcgcttgatagatgttattctaccccttctggttgcttagagctcaccgactcctgtcaaccatataggagcgctttctacgtgctcgaacagcagcgagtcgggctcgcgatcgacatggatgaaattgagaaatatcaagaagtagaggaagaccaggatccaagttgcccgaggctgagtagggagctgcttgacgagaaggaacctgaagtgctgcaggattcattggatcggtgttactctactccaagcgattacctggaacttcccgacctgggtcagccttattcaagtgccgtgtactcattggaagagcagtatcttggcctggctttggacgtcgacagaattaagaaagaccaggaagaagaggaggatcaggggccaccttgtcctcggctatctcgagaactcctggaggtagttgagccagaagtgttgcaggacagcctggatcgctgttatagcaccccgtcttcatgcctggagcagcccgacagctgccagccatatggatcctcattttacgcactcgaggaaaaacacgttgggttcagcctggatgttggcgaaatcgaaaagaaagggaaaggcaagaagcgccgcgggagacgttcgaaaaagaagaggagaagaggtcgcaaggagggtgaagacgataatcccccctgcccaagactgtacggggttctcatggaggtggaggagcccgaggtgctgcaggattccctggatcgctgctactccaccccttctatgtatttcgagcaaccagattctttccagcattacagatccgttttttactcattcgaggaggagcatatttccttcgctctctacgtagacaatagattttttacactgaccgtaacatccctgcacctcgtcttccagatgggcgtgatattccctcaatag

SEQ ID NO: 196967 - DNA, 2013 bp, synthetic construct
  misc_feature 1..2013: note = Description of Artificial Sequence: Synthetic coding sequence
  source 1..2013: mol_type = other DNA
atggtggtgagcgccggccccctgagcagcgagaaggccgagatgaatattctggagattaatgaaaagctgcgtccccagctcgcagagaaaaagcagcagttcaggaaccttaaggaaaagtgttttcttacccagcttgctgggttcctggcgaataggcagaagaaatataagtatgaagaatgtaaagacctgatcaagtttatgctgaggaacgagcgccagttcaaggaggaaaagctggctgaacaactgaaacaggcggaggagctccggcaatacaaggtgctggtccacgcccaggagagggagttgacacagctccgggagaagttgcgggaaggacgggatgcgtcacgtagcctgaacgaacatctgcaggctctgctcacccccgatgaacccgataaaagtcaggggcaggatttacaagaacaacttgctgagggatgccgcctcacccaacatctcgtgcagaaactttcgccagagaatgacaatgacgatgacgaggacgtccaggtggaagttgctgaaaaggtacagaagtcgagtgctcctcgagaaatgcagaaagccgaagagaaggaggtgccagaagattctctggaggagtgtgcaataacctgctcaaattcacatggaccatacgatagcaatcagccacataaaaaaactaagatcacgtttgaggaggacaaagtcgatagcaccctgattggctcaagcagtcatgttgagtgggaggatgctgtccacattattccagagaatgaaagcgacgacgaggaggaggaagagaagggcccagtcagccccagaaacctgcaggagagtgaagaggaggaggtaccacaggagtcatgggatgagggctatagcactctgagcatccccccagaaatgctggcatcttaccagagttactcatctacatttcattcgctcgaggaacagcaagtttgcatggctgtagacattggtaggcacagatgggatcaggtcaagaaggaggaccaggaggctacaggaccacgtctgtcacgcgaactcctggacgagaaagaacctgaggtcctgcaggattcactggatcgctgctactcaactccatcaggctgcctggaactgacagactcttgtcagccatatagaagcgcattttatgttctggagcagcagagagtcggtctggccattgatatggatgaaattgagaaataccaggaagtcgaggaggatcaggacccgtcatgcccaaggcttagccgggaactcctcgatgaaaaggagccagaggtcctccaggatagtctcgacaggtgctactcaactccgtctgactacctggaactcccggatctcggccaaccctacagctccgcagtctactctctggaagagcagtacttgggcctggcactggacgtcgacaggataaagaaggatcaggaggaggaggaggatcagggacctccttgtccccgactcagtagagagctgcttgaggtggtagaacccgaagtgcttcaggacagtctcgacaggtgttactccacaccttcatcctgccttgagcaacctgactcctgccagccctatggaagcagtttttatgcgctggaagaaaagcacgtggggttttcattggatgtgggtgagattgagaaaaaaggaaagggcaagaagagacggggcagacggtcaaaaaaaaagcgccgtcggggccgaaaggagggggaagacgacaatccaccatgcccacggctgtatggggttctgatggaagtcgaagaacccgaggtcctgcaggactctctagacagatgctattctacccccagcatgtacttcgagcaaccggacagttttcaacactaccggagtgtattctattcctttgaggaggagcatatttccttcgcattgtatgtggataacagatttttcacccttaccgtcaccagtctacacctggtattccagatgggcgtcatattcccccagtag

SEQ ID NO: 196968 - DNA, 2013 bp, synthetic construct
  misc_feature 1..2013: note = Description of Artificial Sequence: Synthetic coding sequence
  source 1..2013: mol_type = other DNA
atggtggtgagcgccggccccctgagcagcgagaaggccgagatgaacatactcgagatcaacgaaaaattgagacctcagcttgctgagaagaagcagcagttcaggaatctgaaggaaaaatgttttctgacgcagctcgccggatttctagcaaacaggcagaagaaatataagtacgaagaatgtaaggatctgatcaaatttatgctcagaaacgagaggcagtttaaggaggagaagcttgccgagcagctgaaacaagcggaggaactgcgacaatataaggtgctggttcatgcccaggagcgtgagctcacacagttgagagaaaagctgagagaaggtcgggatgcctcgcggagccttaacgaacatttgcaagcactgctaaccccagatgagcctgacaagtcccagggccaggatttgcaagagcagttggcggagggatgtcggctcacacagcacctcgtgcagaaactgtccccagaaaatgataatgacgatgatgaggacgtgcaggtagaggtggccgagaaagtgcaaaaaagcagcgcccctcgagagatgcagaaagctgaggagaaagaggtccctgaagattctctggaggaatgcgctatcacctgctccaactcccatgggccttatgactctaatcagcctcacaaaaagactaagataacattcgaggaagacaaggttgatagcacactcatcggcagtagctcccacgtggagtgggaagatgcggtgcatatcattcctgaaaatgagagcgacgacgaagaggaggaagaaaagggtcctgtgtcccctaggaatctgcaggagtccgaggaagaagaagtccctcaggagtcctgggacgagggttactccacactgtctattccgcccgagatgctggcctcctaccagtcatacagctcgaccttccactctttggaggagcaacaagtttgtatggctgttgacatagggcggcataggtgggatcaggtgaaaaaggaagatcaagaagcgacaggcccccggctgagccgtgagctgttagatgaaaaagagcccgaggtcctgcaggactctctggaccggtgctattctacgccttcgggatgcttggagctaacagattcttgccaaccatataggagcgccttctacgtactggagcagcaacgggtcgggttagccatcgatatggacgaaattgaaaagtaccaagaggttgaagaagaccaggacccctcatgtccccgtctaagtcgtgagctgcttgatgagaaggaacccgaggtactgcaggacagcctggataggtgctattcgactcctagtgactatctggaactgccggatctgggacagccatattcttctgccgtttactccctcgaagagcagtatctgggtttggccctggacgtggacaggatcaagaaagaccaggaagaggaagaagatcagggcccgccgtgtccacgattgtcccgagaattacttgaggtggtagaacctgaagtgttgcaggattcactagatcggtactacagtactcctagttcgtgcctggaacagcccgatagttgtcaaccgtatggaagttcattctacgctctcgaggaaaaacatgtgggattctcattagacgtgggagagattgagaagaaagggaaaggcaagaagagacgtggccgtcgatctaaaaaaaagaggagaaggggcagaaaggaaggagaggacgacaatcccccgtgccccaggctgaacggggtgctgatggaagtggaggagccagaggtgctccaggactctctagatcggtgctactctacccagagcatgtatttcgagctacccgacagctttcagcattatagatctgtcttttacagtttcgaagaggagcacatcagctttgcactgtatgtcgacaataggtttttcaccttgaccgtcacgagtctgcacctggtcttccagatgggcgtgatcttcccacagtag

SEQ ID NO: 196969 - DNA, 2013 bp, synthetic construct
  misc_feature 1..2013: note = Description of Artificial Sequence: Synthetic coding sequence
  source 1..2013: mol_type = other DNA
atggtggtgagcgccggccccctgagcagcgagaaggccgagatgaacatccttgagattaatgagaaattaaggccgcagttagccgaaaagaagcagcagtttagaaatctaaaggagaagtgtttcctgactcagctggccggatttctcgctaaccggcagaagaagtataaatatgaagagtgtaaagatctgataaagtttatgctgcgcaatgaaaggcagtttaaggaggaaaagttggccgagcagctgaagcaggccgaagagttacgtcaatacaaagtgctggttcacgctcaggagagagaactgactcagctgagggagaaattgagggaaggccgggatgcctctcgctccctgaatgaacatctacaggccctgttgacgcccgatgaaccagacaagtctcagggtcaagatttgcaggaacagctcgctgaggggtgccgcctgacccagcacttggtccaaaagttgtcacccgaaaatgacaatgacgatgacgaagacgtacaggtggaggtggcagagaaagtgcaaaagtcaagcgcacctcgcgagatgcagaaagccgaggaaaaggaagtgcctgaggattccttggaggagtgcgccatcacctgctccaactcgcacggtccttatgactctaaccagcctcacaaaaagacaaagatcacattcgaagaggataaggtggactctactctcatcgggagctcttctcatgtggagtgggaggatgccgtgcacattatcccagagaatgagtccgacgatgaggaggaggaggagaagggccctgtgagtccccgcaacttacaggagagcgaagaggaggaggtcccccaggagagttgggacgagggctattccacactcagtatccccccggaaatgctcgccagctaccagtcctattcatctacgttccacagcctcgaggagcagcaggtatgcatggccgttgacatcggtcgacaccggtgggaccaggtgaagaaagaggatcaagaagccactggcccacgcctgtcacgggagttactcgacgagaaagagcccgaggtgttgcaggatagtcttgataggtgttactcaacgccctccgggtgtctggagttgacggactcttgccaaccatacaggagcgcattttacgttctagagcagcagagggtggggctggctattgatatggacgagatcgaaaagtatcaagaggtggaggaggatcaggatccttcatgccccagactcagtagagagctactagatgaaaaggagcctgaagtcttgcaggactcactggaccgctgctacagtacgcctagcgattatctcgagctgccggacttagggcagccttactccagtgccgtgtacagtctggaggagcaatatctcggcctggctctagatgtcgacagaatcaaaaaggatcaagaagaagaagaggaccagggtccgccatgcccgcggttaagcagagaactgctggaggtagtcgaacccgaggtattgcaagactctctggaccgttactattcaaccccatcctcctgccttgaacagccagactcatgccagccttacggttctagtttttacgctctggaggagaaacacgtgggattcagccttgatgtgggggagatcgagaagaaaggcaaagggaaaaagaggagggggcggaggagtaaaaagaagagaagacgcggcaggaaagaaggcgaggacgacaatccaccttgccctcgcctcaacggcgttctgatggaggtggaggagcctgaggttctccaagacagcttagacaggtgttactctacccagtccatgtattttgaattgccggattcgttccagcactataggtctgtgttctatagcttcgaggaagagcacatctccttcgccctctatgtggataatcggttcttcacgctaaccgtgacgtccctgcacttggttttccagatgggagttatcttccctcaatag

SEQ ID NO: 196970 - DNA, 2526 bp, synthetic construct
  misc_feature 1..2526: note = Description of Artificial Sequence: Synthetic coding sequence
  source 1..2526: mol_type = other DNA
atggtggtgagcgccggcccctggagcagcgagaaggccgagatgaacatcctggaaattaacgaaaaactgagacctcaactcgccgaaaacaaacagcaatttggtaacctcaaagaacggtgctttgttacccagctggctggattcctcgccaatcagcaaaagaagtataactatgaggagtgtaaagacctgatcaaatttatgctacgaaatgagcgacagttcaaagaggaaaaactcgccgaacagctgaaacaggccgaggaactgcgacagtacaaagtgttagtgcattctcaggaaagagagctgactcagctgagggagaagctcagggaaggcagagacgcctccaggtctctgaacgagcacttgcaagcgcttcttactctggatgaacccgacaagtcccaaggtcaggatttgcaggaacagttggccgaaggatgccgacttgcccagcacttggtccaaaagctgtcccccgagaatgacgaagatgaggatgaagacgtacaggtcgaagaagcagagaaggttcaaaagtcatccgcacccagggaggtccagaagacggaagaatccaaagttcccgaggacagcctggaagagtgtgctattacctgctctaacagtcacggcccttgtgattccaaccagccacataagaacataaagattacatttgaggaagacgaagtaaatagcacgctcgtggttgaccgtgaatcttcccatgacgaatgccaggatgcccttaacatccttccggttccaggacctacaagctccgcaaccaatgtatccatggtagttagtgcaggccctctctcatccgagaaggccgagatgaacattctggaaatcaacgagaagctccacccgcagctcgccgaaaaaaaacagcagttccgcaatctcaaggagaggtgctttgtcacacagctggctggcttcttggctaaccagcagaagaaatataagtacgaagagtgtaaagatctgattaagtcaatgctgagaaatgaacgacagtttaaggaggagaaactggccgagcaactgaagcaagccgaagaactccgacagtataaagttctggttcatgcccaggaaagggagctcacacagctgagggagaaactgcgcgagggcagggacgcttcccggtcactgaacgaacatctgcaggccctcctcactcccgacgaaccggataaatcccaggggcaggaccttcaggaacaactagctgagggctgtaggctggcccagcatttagtccagaagctgagtcccgaaaatgacaacgacgacgatgaggatgttcaggtcgagttagcagaaaaagtccagaagtccagcgccccgagagaaatgcagaaggccgaggagaaggaggtgcccgaggactcgcaagaggagtgtgcaatcacgtactccaatagccatggtccttatgattcaaaccaaccgcaccgcaaaacaaaaattacgtttgaggaagacaaagtggactctacattaattgggtccagtagccacgtcgaatgggaagatgctgtccatataattcctgaaaacgagagcgatgatgaggaggaagaggagaagggacctgttagtcctaggaatttacaagaatctgaagaggaggaagtcccacaagaaagttgggatgagggatattctacactgtccatcccaccggagatgttggcctcgtaccagagttactcatctacctttcattccctggaagaacagcaggtgtgcatggcagtggatattgggcgccaccgttgggatcaagttaagaaagaagatcaagaggccactgggccacgactgtctcgggagcttctggatgagaaaggaccagaagtgctgcaggattcattggatagatgctattccacaccatctggatgcctggaattgaccgattcatgccagccttacagatctgcattctacgtgttggagcagcagagggtcggactagcggtcgacatggatgaaattgagaagtaccaggaggtagaagaagaccaggacccttcctgtcctaggctttcaagagagttacttgatgaaaaggaacctgaggttctgcaggactctctagacagatgttactccacccctagtgggtacctggagttaccggacctgggacagccttacagctccgccgtctactcattggaggagcagtatttggggcttgctctcgacgtggataggacaaagaaggaccaagaggaggaggaagatcaaggtccgccatgtcctagactgtctcgcgagctcttagaggtggtggaaccagaagtgttgcaagatagcctcgataggtgttacagcacaccttcttcttgtttggaacagccagattcttgtcagccatacggaagcagtttttacgctctggaggaaaagcatgttggttttagcctggatgtcggggagatcgaaaaaaaagggaagggcaagaaaagaagggggagaagaagctag

SEQ ID NO: 196971 - DNA, 13866 bp, synthetic construct
  misc_feature 1..13866: note = Description of Artificial Sequence: Synthetic coding sequence
  source 1..13866: mol_type = other DNA
atggtggtgagcgccggcccctggagcagcgagaaggccgagatgaacattctagaaattaacgaaaagctgcggcctcagctggccgagaataaacaacaattcggtaaccttaaagaaagatgctttgtgactcagctcgctggctttcttgcgaatcagcagaaaaagtacaactatgaggagtgtaaagaccttatcaagttcatgttgaggaacgaacggcagttcaaggaggagaaactggctgaacagctgaagcaggctgaagagcttagacagtataaggtccttgtgcactctcaggaaagggaactaacacaactcagggagaagctacgggagggtagagacgcgagccgctccttgaacgagcatctgcaggccctactgacactcgatgaacctgataagtcccaaggacaagacctgcaagaacagctggcagaaggatgtagactggcacagcatcttgtacagaaattatctcccgaaaatgatgaggacgaggacgaagatgttcaggtggaggaggccgaaaaggtgcagaagtcttcggcacctagggaagttcagaagaccgaggagagcaaggtccccgaggattccttggaggaatgcgccatcacctgcagtaactcccacggcccttgtgactcgaaccaacctcacaagaacatcaaaattacattcgaagaggatgaagttaacagtactttagtggtcgaccgcgaatcctcacacgacgagtgtcaggatgctctaaacatccttccagtgcccggccctacctcatctgctacaaacgtctccatggtggtttccgccggccccctgagctcagagaaggctgaaatgaacattctggaaatcaatgagaagttgcatccacagttggctgagaaaaagcaacagttccgtaacctgaaggagcggtgttttgtaacacagctcgcaggcttcctggccaatcaacaaaagaagtataagtacgaggagtgtaaagatctgattaaaagcatgctgcgaaatgaacggcaatttaaagaagagaagctggccgaacagctcaaacaggctgaggaacttagacagtataaggtcctggtccatgctcaagaaagagagttgacgcagctccgggagaaactccgagaagggagggacgcatcccggtcactgaacgagcatctgcaggcccttctcacgccagacgagccggacaaatcccaagggcaagatctgcaggagcaacttgctgagggatgtcgccttgcccagcatctagtccagaaactgtctcccgaaaacgataacgatgatgacgaagacgtccaggttgagctggctgagaaagtgcagaaatcttcagcgcccagagagatgcagaaggctgaagagaaggaggtgcctgaagacagccaggaagaatgtgccataacctatagtaatagccatggcccctatgacagtaatcagccgcatagaaagaccaagatcactttcgaggaggacaaagtagactccacactgatcggcagctcaagccacgttgaatgggaggatgccgtgcacattatccccgaaaacgagtcggacgacgaggaggaagaggagaaggggccagtgtccccccggaacctgcaagagtccgaggaagaggaagtgccccaggagtcttgggacgaagggtattccacactgtctattccacctgaaatgctagcgagttaccaatcatacagctccacattccactctctggaggagcaacaggtttgcatggcggtggacatcggccgtcatcggtgggaccaggtgaagaaggaagatcaggaggctacaggaccccggctctctcgtgagctgctggatgaaaagggccctgaggttttgcaagattctctcgatcgctgttattcgacaccttctgggtgtctggaacttaccgacagttgtcaaccgtatcgctcagcattttacgtcctagaacagcaacgcatcgggctggccgtggacatggatgagatagaaaagtaccaggaggtcgaggaggaccaggatccaagctgtccaagactcagccgagagctgctcgatgagaaagagcctgaagttctgcaggattccctcgacaggtgttattccactccgtcagggtacctcgagctgcctgacttaggtcaaccctactcctcagccgtttactcattagaagaacaatacctgggactcgccctcgatgtagatcgcactaaaaaagaccaggaggaggaagaggatcaggggcctccatgccccagactgtccagagagcttctggaggtggtggagcccgaggtactccaagactccctggaccggtgctattccactcccagctcctgtctcgagcagcccgatagttgtcaaccgtatggatctagcttttatgccttggaagaaaagcatgtggggttctcattagacgtgggggagatcgagaagaagggaaaggggaaaaaaaggcgggggagacggagtaagaaggagcgtaggagaggtaggaaagaaggggaagaggaccagaatcccccatgccctcgcctgtcacgtgaactgctagatgagaaaggccccgaggtcctgcaggattctcttgatcgcagctactctactccctccggctgtctcgaattgactgactcatgccagccttaccgctccgctttttacgttctggagcagcagagagtagggttggctgttgacatggacgagattgaaaaataccaggaagtggaggaagaccaagaccccagttgccctcgcctatctcgagagctcttggacgagaaggaaccagaggtccttcaggattccctggaccggtgttactccaccccgtccggctatcttgagttgcccgaccttgggcagccatatagctccgctgtctacagcctggaggaacaatatctggggctcgctctggatgttgaccggacaaagaaggaccaggaagaagaggaagatcagggtccaccttgtcctagactgtccagagaactcctcgaagtcgtagagcccgaggttctacaagacagcttggaccggtgctacagcacaccgagctcttgcctcgagcaacccgatagctgtcagccctacggctcctctttctacgcacttgaagagaagcacgtcggcttttccttggatgtcggcgagatcgagaagaaagggaaggggaaaaaaaggaggggacgacgctctaaaaaagaacggaggaggggaagaaaagagggcgaagaagaccagaaccccccctgtcctagactgtcccgggaacttctagacgaaaaaggaccggaagtgctccaggactcgctcgatagatgctatagtactccctccgggtgcttagagctgactgacagttgccaaccctaccggtctgccttttacgtccttgaacagcagcgtgtcggactggccgtggatatggatgagatcgaaaaataccaagaggtggaggaggaccaggacccttcttgcccccgcttgtcccgggaactcctagacgagaaagaacctgaagtgctgcaggacagcctcgaccggtgctactccacccctagcggctaccttgagctgccagacttaggacagccttactcctctgctgtgtactcactcgaggagcagtatttgggtctggccctggatgtggacaggactaagaaggatcaggaagaggaggaggaccagggtcccccctgcccccgactgagtagagaacttctcgaagtcgtggaaccggaagttctgcaggactcattagaccgttgctatagtacaccgagttcctgtctggaacaacccgacagctgtcagccttatggctcaagtttttacgctctagaagagaaacacgtgggttttagcctggacgtgggggagatagagaaaaaaggaaaaggcaagaagcgccgagggcgccgatccaagaaagagagacggcgcggacgtaaggaaggagaagaggatcaaaatcctccgtgccctaggttgtcaagggagctgcttgacgagaagggaccggaggttttacaggattccctggaccgctcatactctacaccctccgggtgccttgagctgaccgatagctgccagccttatcgcagtgccttctatgtcctggagcagcaacgggtggggctcgccgtggacatggacgaaattgaaaaataccaggaggtggaggaagaccaggatccaagctgtcccaggctctcacgggaactgcttgatgaaaaagagccagaggtgttacaggattcgctggatcgatgctacagtacccctagcggatacttagaactgcccgatctgggccagccgtatagtagcgccgtctacagccttgaagaacagtacctggggctagctctggatgtggatagaactaagaaagaccaagaagaggaggaagatcaaggaccaccatgcccccgtttgtcacgggagttgttggaagtcgtggagccagaggtattacaagattcccttgatcggtgctatagtaccccctctagttgtctggagcagcctgactcctgccagccctatggctcttctttttatgcattagaggagaaacacgttggattctccttggacgtcggggaaatcgaaaaaaagggcaaaggaaagaaacggcgcggccgccgatctaagaaggaaagaaggagaggaaggaaagaaggggaagaggatcagaatcctccctgccctagactgtctagggaactgctagacgaaaaaggtcctgaggtgctgcaggacagcctagataggtgctatagcactccctccggctgccttgagctgactgactcatgtcagccataccgcagcgcattctatgtacttgagcagcaacgcgtcggcctcgctgtggacatggacgagatcgaaaagtatcaggaagtggaggaagaccaggaccctagttgtcccagactgagtcgagagcttctcgatgagaaagagccagaggttcttcaggactctctcgaccggtgctactccaccccttccggctatctcgagttaccggacctaggccagccatactcttccgccgtctatagcttagaggagcagtacctcggactggcccttgatgttgatagaacgaagaaggaccaggaggaggaagaggatcaaggccctccatgcccaaggctctctagagagctgttggaagtcgtggagcccgaagtcctccaagatagcttggaccgctgttactccaccccttcaagctgtctcgagcagcccgattcttgccagccttatggatccagtttctacgctctcgaggaaaaacacgtgggctttagtctcgatgtcggtgaaatcgagaaaaagggaaagggcaagaagcgacgcggccgacgttcgaagaaagaaaggcgccggggcaggaaggagggggaggaggaccagaatccgccatgtccacgtttgtcacgggaattgttagacgaaaagggcccagaagttcttcaggacagtctggaccggtcttacagcacaccaagcggctgcttggagctgacggattcatgtcagccatataggagcgccttttatgtgttggaacagcagagggtcggcttggctgtcgatatggacgagattgaaaaataccaggaagtcgaagaggatcaggatccaagctgcccccgcttatctcgcgagctgctggacgagaaagagccagaggtgctacaagacagtctagataggtgctactcaaccccatcaggttatctggagctgccagacttgggccaaccctacagcagtgctgtgtactccctcgaagaacaatatctcggactcgccctcgatgtggacaggactaaaaaggatcaggaagaggaggaggaccagggtcccccttgtccacggctttcgcgggaactcctcgaggtggtcgagccagaggtattgcaggatagtcttgacaggtgttattccaccccctcatcttgcctcgagcagccagactcctgtcaaccctatggctcatctttttacgcactggaggagaaacatgtaggattcagcctggacgttggtgagattgagaaaaagggaaaggggaaaaagcgtcggggcaggcggagtaaaaaggaaaggcggcggggccgaaaagagggagaggaggaccagaatcctccatgtccacgactgagtagggaacttctcgacgagaaagggccagaagtccttcaggacagtctggaccggtcttattccacacccagcggctgccttgagctcaccgattcttgtcagccttacagaagtgctttctatgtcctggaacaacagagggtgggcttagctgttgacatggatgagatcgagaaataccaggaggttgaagaggaccaagatccgagctgccctcgactgagccgcgaactattagacgagaaagaaccagaagtactccaggactcattggaccgctgctacagtaccccatccgggtatcttgagctccccgatctgggacaaccttatagcagcgccgtatattctctggaggaacagtatctgggactggccctagacgtagataggacaaaaaaggaccaggaggaagaggaagatcagggacccccctgcccacggctgtcaagggaattgctggaggtagtggagcccgaagtacttcaggatagcctggacagatgctattcaacgccatcgagttgcctggagcagcctgactcttgccaaccttacggctcctccttctatgcattggaggagaagcacgttggcttctctctggacgtcggggaaattgagaaaaaaggaaaaggaaagaagaggagaggccgacggtctaagaaagagagacgcaggggccgcaaggagggagaagaggatcaaaacccaccatgccctcgacttagtagagagttgctcgatgaaaaggggcccgaggtcctgcaggattctttagatcgtagctacagcacgccttccgggtgcttagaactcaccgactcatgtcagccgtatcgctctgccttctacgtgctggaacagcagagggtgggactagcagtggacatggacgaaattgagaagtatcaagaggtcgaagaggaccaagatcccagctgtccaaggctctccagagaactgctagatgaaaaagaacccgaggtgctacaggactccctggacagatgctattcaacaccctccgggtacttggagttgcctgacctgggtcagccgtactcgagcgccgtgtactccctagaggagcagtacctggggctcgcactcgacgtagaccgtacgaaaaaagaccaggaggaggaggaggatcagggcccaccatgtccaaggctgtccagggagctgcttgaagtggtggagccggaggtgctgcaagactctctcgaccgctgctattcaacaccatcttcttgcctggagcagccagactcttgccaaccctacggatcttcattctacgcactggaggaaaaacacgtaggtttctcactggacgtgggcgaaattgagaaaaaaggtaaagggaaaaaaagaaggggacgccgctcaaaaaaagaaaggaggagagggcgcaaagagggcgaggaagatcaaaacccaccgtgcccacggctgagcagagagttactggacgaaaaggggcctgaggtgctgcaagactcactggatcgatcctacagcactccatctgggtgtctcgaactgaccgatagttgccagccttaccgcagcgccttttacgtgttggaacagcaacgagttgggctggccgtggatatggacgaaattgaaaagtatcaagaagtcgaggaagaccaggatccatcctgcccccggctgtctcgtgaacttctggacgagaaggagcccgaggttttacaggacagtctagatagatgttactccaccccttcaggctatcttgaactgcctgacctaggacaaccatatagctccgccgtctattccctggaggagcaatatttgggcttggccctagacgtggaccgaactaagaaggaccaggaggaagaagaggaccaagggccgccatgccctaggctgtcccgagaacttttggaagtcgtcgaaccagaggtgttacaagacagtctagataggtgttattctaccccatccagctgtctagaacagccggattcctgtcaaccctacggatcctccttttatgctcttgaggagaaacacgtgggattttctcttgatgttggtgagattgagaagaagggcaagggcaaaaaacgaaggggacgccgctcaaagaaggaacgcaggcgaggtcggaaggaaggggaagaggaccagaatcccccttgccctcgcctgagcagggagctcctggacgagaaagagccagaggtgttgcaagactcactagaccgttgctacagtacccctagtggctacttggagctccctgatctggggcagccttacagttcagctgtctactcacttgaagagcaatacttaggcctggcattggatgttgatagaacgaaaaaggaccaggaggaggaggaagaccagggccccccatgccctagattgagcagagaactgctggaggtggtggagcccgaggtattgcaggattctttagacagatgttatagtacaccatcctcttgtctcgaacagccagatagctgccagccttatggttcaagcttttacgccctggaagaaaaacatgtcggattttcactggacgtgggcgagattgagaagaaaggaaaggggaaaaagaggcggggccggaggtctaagaaagaacggcgacggggtagaaaagaaggtgaggaagatcagaaccccccttgtccacgattgtcccgggaactgcttgacgagaaggaaccagaagttttacaagacagcctggaccgttgttacagcaccccatcaggctacctggagctgccggacctgggccagccttatagctctgcagtttattccttggaagagcagtatcttggcctcgccctggacgtggatcgcacgaagaaagaccaagaggaggaagaggaccaggggcccccatgcccccgactgtcccgagagctcctggaagtggtggagcctgaagtccttcaggactcccttgatagatgttattcaactccctcctcttgcctagaacagcctgatagctgccagccttacggtagtagtttctatgccttggaggaaaagcacgtcggcttttcgctggatgtgggcgagattgagaaaaaggggaaggggaagaaaagacgcggccgccgaagcaagaaagaaagaagacggggcaggaaggagggcgaggaggaccaaaatcccccctgtccgcgcttgtcacgggaactcttagacgaaaaagagccagaagtgctgcaggatagccttgatagatgttactcaaccccctctggctacctcgaacttcccgacctcggacagccatacagctctgccgtttattctctcgaagagcagtacctggggttggctttggacgtggatcgaaccaaaaaagatcaagaagaggaggaggatcaggggcccccctgtccccggctgagccgcgaactcctggaggttgtcgaacctgaggtgctgcaagatagccttgaccggtgctactctacgccctcgagctgcctagagcaacccgactcctgccagccctacggatcctctttctacgccctggaggagaagcatgtcgggtttagtttggatgtaggcgagatagaaaaaaagggaaaagggaagaaacgacgcggtagacgtagcaagaaggagaggaggcgagggaggaaagagggcgaggaggatcagaatcccccctgtcctagactcagccgcgaactgcttgacgagaaaggcccagaggtgctgcaggatagcttggatcgctgttacagcaccccttctgggtgcctcgagctgacagactcgtgtcagccgtatcgaagcgcgttttatgtattggagcagcagcgagttgggctggccgtggacatggatgagatcgaaaagtaccaagaggttgaggaggatcaggatccttcatgcccgcgcctgagtagagaattgttagacgagaaggagccagaagtgcttcaggacagcctcgatagatgctacagcactccttctggttacctagagctgcctgacctggggcagccatatagctctgccgtctatagcctggaggagcagtacctggggctggcgctggacgtggatcgtacaaagaaggatcaggaggaggaggaggaccaggggcctccgtgtccacggctcagccgagagctcttagaagtcgtggaaccagaggtcctgcaggatagccttgaccggtgttacagtactccctctagttgtctggagcagccagacagctgccagccttatgggtcatctttctatgccctcgaggaaaagcacgtgggattttcactcgacgtcggcgagatcgagaaaaaggggaaaggaaaaaagcgcagagggcgccggtctaaaaaagaacgccgaagggggcgaaaagaaggagaggaggatcagaatcccccctgcccgagactgagtcgggaactgctggacgaaaaaggcccggaggttttacaggatagtctggataggtgctactctactcccagtggatgccttgaattgacagactcttgccaaccttatagatcagctttctacgtccttgaacagcagagggtcggactagctgttgatatggatgagatagagaaatatcaagaggttgaagaggaccaggatccctcctgtcctcggctgtcacgggaactgctcgatgaaaaagaaccagaagtgctgcaggacagcttggataggtgctactcaaccccaagcggctatctggagctgccggatctaggacagccatactcatcggcggtgtacagcttggaagaacaatatcttggcttggcactggatgtagacaggacaaagaaggatcaggaggaagaggaagatcagggccctccatgtccacgcctttcaagggagctgctcgaggtggtggagcctgaggtcctgcaggacagtcttgatcggtgttattccacaccctcgtcctgtctggagcagcccgacagttgccagccatatggctcatccttttacgctctcgaggaaaagcatgtgggtttctccttagatgtgggggaaatcgaaaaaaagggcaaaggcaagaagcgacgaggccggcgttccaagaaggagcgacgtcgcgggaggaaagagggtgaagaggatcagaatcccccttgcccccgtctctcgagagagctgctcgatgagaaaggtcctgaagtgctccaggattccctcgaccggtgttatagtacaccaagcggatgcttggaactaaccgattcctgccagccctaccgcagtgccttctatgtccttgaacaacagagagtgggcctggctgtcgacatggatgaaatagaaaaatatcaggaggtcgaggaggatcaggacccctcttgccctcggctctcacgggaattactggatgaaaaagaacctgaggtcttgcaagactctctcgacagatgttatagcaccccatctgggtacctggagctcccggacctaggccagccatacagtagcgccgtctattcactcgaggaacaataccttgggctggctctcgacgtcgaccgcactaagaaggatcaggaagaggaggaggaccagggcccgccttgccctaggctgtcccgagagctgctggaagtcgtcgaacctgaggtgctccaggacagtttggacaggtgctactccactccctctagctgcctggagcagccggattcttgccagccatatggatcctctttctatgccttggaggaaaagcacgtcggcttttcccttgatgtgggagagatagaaaagaaaggtaaggggaaaaaacgccgaggccgcagatccaaaaaagagcgccggcgtggacgcaaggaaggtgaggaagatcagaccccaccctgtcctcggttatctcgggaactgctcgatgagaaaggccctgaagtccttcaagacagcctggatcgatgttactctacaccatccggctgcctagaactgacggatagctgtcagccataccggtctgcgttttacgtgctggaacagcagcgtgtgggcctggcagtggacatggacgagattgagaagtatcaggaagtggaggaagatcaggatccaagttgccctcgactcagccgggaactcttggacgaaaaggaacctgaggtgctgcaggattctctggacaggtgctactctaccccaagcgggtacttggaattgccagatctgggtcagccgtactcctcagccgtttattccctcgaggaacagtatctcggcttagctcttgatgtcgataggaccaagaaagaccaggaagaggaagaagatcagggccccccctgtcccaggctgagccgcgagttactcgaggtagtcgaacccgaagtcctacaggacagcttagaccggtgctatagtacaccaagttcctgccttgagcaacccgactcatgccagccatatggttcctcattctatgcactcgaagagaagcacgtggggttcagcctggacgtgggggagatcgaaaagaaaggtaagggaaaaaagcgtcgcggccgtaggtccaagaaagagcgtcgccgagggcggaaggaaggggaggaggaccagaaccccccatgtcccaggctttcacgcgaactactagatgaaaaaggccccgaagtgttgcaggactctttagacaggtgttactctacccccagcggatgcctggagctgaccgactcctgccaaccttacaggagcgccttctacgtgctggagcagcagagggtggggctggcagtcgacatggatgaaatcgagaagtaccaggaggtcgaagaggaccaggatccctcctgccctcgcttatccagagagttgctcgatgaaaaggaacctgaggttctgcaggattcactcgatcgatgttactcaacgccgagcggttacctcgagctgcccgacttaggacaaccttactctagcgccgtctattcgctcgaggagcagtacctggggttagctcttgacgtggacagaacaaagaaagaccaggaggaggaagaggaccagggtccaccgtgtccccgattatcgagagaactgctggaggtcgtagagcccgaggtcttgcaggatagtctcgatcggtgttactctacaccgtcatcttgccttgagcaaccagatagttgtcaaccatatggcagttcattctatgctctcgaagagaaacacgtgggattcagcctggatgtgggcgaaatagagaaaaaggggaagggaaaaaagcgtcgcggacggaggtccaaaaagaagaggaggcggggaaggaaggagggggaggaggaccaaaatcccccttgtcccaggctaaacggagtgttaatggaggtcgaggaacccgaagtgctgcaagatagccttgatggctgttactccactccctcgatgtactttgagttaccggattctttccaacactacagatccgtgttttactcatttgaggaacagcatatctcatttgcgttgtacgtagataaccgcttcttcactctgacagtgacttctctccacctcgtctttcagatgggcgtcatcttcccacagtag

SEQ ID NO: 196972 - DNA, 780 bp, synthetic construct
  misc_feature 1..780: note = Description of Artificial Sequence: Synthetic coding sequence
  source 1..780: mol_type = other DNA
atggtggtgagcgccggcccctggagcagcgagaaggccgagatgaatatcctcgagatcaatgagaagttgcgtccccagcttgcagagaacaaacagcagtttggaaatctgaaagagcggtgcttcgtgactcaactggccggctttctcgccaatcagcagaagaagtataactacgaagaatgtaaagatctgatcaaatttatgttacgcaacgagaggcagttcaaggaggagaaactggccgagcagttgaaacaggccgaggagctgcggcagtataaggtgctggtacatagtcaggaacgcgagctcacccagctcagagagaagcttcgcgaagggcgcgacgcttccagatcactgaacgagcacttgcaagccttgctaacattggatgaacctgacaaatcacaaggtcaggacctgcaggaacagttggccgaaggttgtagactcgcccaacacctggtccagaagttatcgccggaaaatgatgaagacgaagacgaggacgtgcaggtagaagaggcagagaaggtgcagaagagttctgcccctcgtgaagttcagaaaacagaggaaagcaaagtacctgaggactcattggaggagtgcgcaatcacctgtagtaacagccacggaccttgcgatagtaaccaaccacacaagaatatcaagataacgttcgaggaggatgaggttaactccaccctggttgtggatagagagtcatcacacgacgagtgccaagacgccttgaacatccttccttag

SEQ ID NO: 196973 - DNA, 456 bp, synthetic construct
  misc_feature 1..456: note = Description of Artificial Sequence: Synthetic coding sequence
  source 1..456: mol_type = other DNA
ctgagccgggagctgctggaggtggtggagcccgaggtgctgcaggattctctcgacaggtgctatagcaccccctcaagctgcctggaacaacccgattcatgccaaccctacggctcttcgttttacgctcttgaggagaagcacgtgggttttagtctggatgttggcgaaattgagaaaaaggggaagggcaaaaagaggcgaggacggcgtagcaagaaagagcgaaggcgcggccgaaaggaaggagaagaagaccagacgcccccctgcccccgtctgtcaagagagctcctagacgaaaagggccctgaagtactccaagactcgctggatagatgctactcaactcccagtgggtgcttggaactcacggattcctgtcagccttaccgtagtgctttctatgtgttagagcagcagagggtcggcttggccgtcgacatggattag

SEQ ID NO: 196974 - DNA, 456 bp, synthetic construct
  misc_feature 1..456: note = Description of Artificial Sequence: Synthetic coding sequence
  source 1..456: mol_type = other DNA
ctgagccgggagctgctggaggtggtggagcccgaggtgctgcaggactctctagacaggtgctactcaacaccaagcagctgcctggaacagcccgactcttgtcagccctatggttcctcattctatgcccttgaggagaagcatgttggattctctctagacgtgggcgaaattgaaaagaagggaaaaggcaagaagcgtagaggccgcaggtccaagaaagaacggagaagaggcaggaaggagggcgaagaggaccagaatcccccatgcccaaggctgagtcgggaactgctcgatgaaaaagggcccgaggtgttgcaggattcactagatcggtgctattccaccccatcgggatgcttagaactgaccgattcctgccagccctatcgttccgcattttatgtattagaacaacagcgagtcggtctcgctgtcgacatggattag

SEQ ID NO: 196975 - DNA, 456 bp, synthetic construct
  misc_feature 1..456: note = Description of Artificial Sequence: Synthetic coding sequence
  source 1..456: mol_type = other DNA
ctgagccgggagctgctggaggtggtggagcccgaggtgctgcaggacagcctggatagatgttattcaaccccctcgtcctgtctcgagcagccagacagctgccaaccatacggctctagcttctatgctctggaggaaaaacacgttggcttctcacttgacgtgggggaaattgaaaaaaaaggcaaagggaagaaaagaagaggtcggcgctccaagaaagagcggcgacgaggaaggaaagaaggggaggaagatcagaaccccccgtgccctcggctgtccagggagcttttagatgaaaagggtcccgaggtgctccaagatagcttagacaggagctatagcaccccctccgggtgcctggaactgacagatagttgtcaaccataccgaagcgctttttacgtgttagaacagcaaagggtgggactggccgtggatatggactag

SEQ ID NO: 196976 - DNA, 456 bp, synthetic construct
  misc_feature 1..456: note = Description of Artificial Sequence: Synthetic coding sequence
  source 1..456: mol_type = other DNA
ctgagccgggagctgctggaggtggtggagcccgaggtgctgcaggatagcctggaccgctgttattccactccatcgagctgtctggagcaacctgactcttgccaaccttatggcagttctttctatgcgctggaagagaagcatgtcgggtttagtctggacgtgggtgagattgaaaagaaggggaagggaaagaaaagacggggacgccgatcaaagaaggaaagacggcgaggcaggaaggaaggggaggaggatcaaaatccgccatgccccagactgtcccgcgaactgctggatgaaaaggggccagaagtgttgcaggattctctcgatcgctgttactccacgcctagcgggtgcctggaactgaccgattcatgccagccatacaggtccgccttctacgtactggagcagcagagagtcggcctggctgtggatatggattag

SEQ ID NO: 196977 - DNA, 2016 bp, synthetic construct
  misc_feature 1..2016: note = Description of Artificial Sequence: Synthetic coding sequence
  source 1..2016: mol_type = other DNA
atggtggtgagcgccggccccctgagcagcgagaaggccgagatgaacatactggagatcaacgagaaacttcaccctcaactggctgagaagaagcagcagtttaggaacctaaaagagcggtgctttgttacccagctagccggttttctggccaatcagcagaagaagtacaagtatgaggaatgcaaggacctgatcaagagcatgttaaggaatgagcgacagttcaaagaagagaaactggcggagcagctgaagcaggcggaggagctgcgtcagtacaaggtcctggtccatgcccaggaacgggaactgacacagctgcgagagaaactgagagagggaagagatgcttcccggagcctcaacgagcaccttcaggccctgctgacgccggatgaaccagacaaaagtcagggccaggacctgcaggagcagctggccgagggatgcaggctcgcacaacacctggtacagaaattaagtcctgagaacgataatgacgatgacgaggacgtgcaggtggaactggccgagaaggtgcagaaaagttcagcacccagagaaatgcagaaggcagaggagaaggaagtacctgaagactctcaagaggaatgcgccattacctactcgaattcacacggcccatacgatagtaaccaaccccaccgtaaaaccaaaatcacgtttgaggaggacaaggtggattccacactgatcggaagcagttcgcacgtggaatgggaggatgctgtgcatataatacctgagaatgagtcagacgacgaagaagaggaagagaaaggcccagtttccccacgtaatctacaagagagcgaggaagaggaggtgccacaagaatcatgggatgagggatatagcacactgtcaatccctcccgaaatgctggcctcataccagagttatagcagcactttccacagccttgaggagcagcaggtgtgcatggccgtagatatcggccgacaccgttgggaccaggttaagaaagaagaccaggaggcgactggacccaggctcagcagagagcttctggatgagaaaggacctgaagtgctgcaggactcgctggaccggtgctattcaacaccatctgggtgcttggagctgacagatagttgccagccttacagaagcgctttttatgttctcgaacaacagagggtagggctagccgtcgatatggacgagattgagaagtatcaggaggttgaagaggatcaggatcccagttgtccaagactgtccagagaactgctcgatgaaaaagaaccagaggtgcttcaagactcactcgaccgttgttactctaccccaagcgggtatctggagctgccagatttaggccagccatacagcagtgccgtgtactctttagaagagcagtacctgggcctggctttggatgtggatcggaccaagaaggaccaggaggaagaagaggaccagggccccccgtgccctagactgagcagagaactcttggaagtcgtcgaaccagaggtactacaggattcactggaccgttgctactccacacccagctcttgtctggagcagcctgactcatgccaaccctatggctcatccttttacgccctcgaggagaagcacgtcgggtttagcctagatgtgggagagatagaaaaaaaggggaaaggcaagaaaaggcggggccgacggtcgaaaaagaagaggcggagaggtagaaaggaaggggaggaggatcagaacccaccgtgccctagattaaacggcgtactgatggaagtggaggagcccgaagttctccaggactcactggatggctgttactccactccatccatgtacttcgagctccctgactcattccagcattatagaagcgtcttttattcctttgaagagcagcacatttcttttgctctgtacgttgacaaccgcttcttcaccctgacagtgaccagcctccacttggtcttccagatgggcgtgatattcccccagtag

SEQ ID NO: 196978 - DNA, 474 bp, synthetic construct
  misc_feature 1..474: note = Description of Artificial Sequence: Synthetic coding sequence
  source 1..474: mol_type = other DNA
ctgagccgggagctgctggaggtggtggagcccgaggtgctgcaggattctctcgacagatgctactcaacaccgtccagctgtctggaacaaccggattcttgtcaaccttatggaagctctttttatgctctggaggagaagcacgtcgggttcagcttggacgtaggagagatcgaaaagaaggggaagggcaagaaaaggaggggccggaggtcaaagaaagaaagaaggcgcggacgcaaggagggagaggaagaccaaaacccaccatgccctcggctaagcagagagctattagacgaaaaaggcccagaagtcctacaggattctctggatcgctgttattcaacaccaagcggctgtcttgagctcactgattcatgtcagccctaccggtccgccttttatgtgctcgagcagcaacgggttggtctggctgttgatatggatggcgagtatctgtcgatgtag

SEQ ID NO: 196979 - DNA, 681 bp, synthetic construct
  misc_feature 1..681: note = Description of Artificial Sequence: Synthetic coding sequence
  source 1..681: mol_type = other DNA
ctgagccgggagctgctggaggtggtggagcccgaggtgctgcaggattctttggacagatgttacagcacgccatcaagctgtctcgagcagcccgactcgtgccaaccgtacggcagctcattctacgctctcgaggagaaacacgtgggattctcactggacgtgggggaaatcgagaaaaagggcaaaggaaagaagcggagagggcgccgtagtaagaaagagcggcgaaggggcaggaaggaaggggaagaggatcagaatcccccctgccctcggctgagcagagagttactcgacgagaagggcccagaagtgctgcaggatagtttggatcggtgttatagcactccctctggatgcctggagctgaccgattcgtgtcagccttaccgtagcgctttctacgtactggagcagcagagggtcggactggctgtggacatggacgagatagagaagtatcaagaggttgaggaagaccaagatccttcatgccccaggctgtcgagggaactgctggacgaaaaggagcccgaggtcctccaggactcactggaccggtgttattcaacaccgtctggttacctggaactccccgatcttggccaaccatatagcagtgctgtgtattctctggaagagcaatacctggggctggccttggacgttgattag

SEQ ID NO: 196980 - DNA, 810 bp, synthetic construct
  misc_feature 1..810: note = Description of Artificial Sequence: Synthetic coding sequence
  source 1..810: mol_type = other DNA
atggacgagatcgagaagtaccaggaggtggaggaggaccaggacccctcctgtccacggctttctagagaactccttgatgagaaggagcctgaagtgcttcaggactctctggatagatgttactctactccttctgggtacttggagttgccagaccttggacagccatactcctccgcagtatattcattagaggagcagtatctgggactcgctctcgatgtagaccgcaccaagaaagaccaggaagaggaggaagatcagggaccgccatgtccacggttgtcacgggagttgctggaggtggtggagcccgaggtgcttcaggacagcctggaccgatgctacagcactccttcttcgtgcttggagcagcccgactcgtgccaaccatacgggtctagcttttacgcactggaggaaaagcatgtcggtttctcactggacgtcggggagattgaaaagaagggaaagggaaagaagcggaggggccggcgatctaaaaagaaaagacggaggggccgcaaagagggggaggaggaccaaaacccaccttgtcccaggcttaacggagtcctgatggaagtggaggagccagaggttttgcaggactcactcgatggctgttattctaccccatccatgtactttgaattgccggattccttccagcactaccgcagcgtgttttacagctttgaggagcagcacatctccttcgccctgtacgtagacaaccgtttcttcactttgacggtcacgtccctgcacctcgtcttccaaatgggggtgatatttccccaatag

SEQ ID NO: 196981 - DNA, 474 bp, synthetic construct
  misc_feature 1..474: note = Description of Artificial Sequence: Synthetic coding sequence
  source 1..474: mol_type = other DNA
ctgagccgggagctgctggaggtggtggagcccgaggtgctgcaggattccttggaccggtgctatagtaccccctcatcttgtctggagcagccagacagctgccagccctatgggtcctcattctatgcccttgaagaaaagcacgtcggtttcagccttgatgtcggtgaaatcgaaaaaaaaggcaaagggaagaagcgcaggggacggcgcagcaaaaaggagaggcgccgaggcaggaaagagggcgaggaggatcagaatcccccctgcccacgactctcacgcgagctgctagatgagaaaggccctgaagtgctacaggattctctggatcgctgctattcgactccttcagggtgtctggagttaactgattcctgccagccttaccggtcagcgttctacgtgctggaacagcagcgcgtcggactggctgtggatatggacggggaatacctgtctatgtag

SEQ ID NO: 196982 - DNA, 525 bp, synthetic construct
  misc_feature 1..525: note = Description of Artificial Sequence: Synthetic coding sequence
  source 1..525: mol_type = other DNA
ctgagccgggagctgctggaggtggtggagcccgaggtgctgcaggacagcctcgacagatgttatagtacaccatcatcctgtctggagcaacctgacagttgccaaccttacggatcaagtttctatgcactcgaggagaagcatgtgggattttctctggacgtaggagagattgagaagaaggggaaggggaaaaagcgtcgtggaaggaggtccaaaaaaaagcgccgaaggggtcgcaaggagggtgaggaagatcagaatcctccctgtccgcggttgaacggggttttgatggaagtggaagagccagaggtgcttcaggactccctggatgggtgctactccactccatcgatgtacttcgagctccccgactcattccagcattatcgctccgtattctatagctttgaggagcaacacatctcatttgcgttatatgtcgataatcgattcttcactttgacggtgacgtcacttcatttagtatttcagatgggtgtgatctttcctcaatag

SEQ ID NO: 196983 - DNA, 456 bp, synthetic construct
  misc_feature 1..456: note = Description of Artificial Sequence: Synthetic coding sequence
  source 1..456: mol_type = other DNA
ctgagccgggagctgctggaggtggtggagcccgaggtgctgcaggactccttggaccggtgttactctactccttcttcttgtcttgagcaacctgattcatgccagccatatggatcgtccttttatgcacttgaggagaagcatgttggattcagcctcgacgtgggcgagattgagaagaaggggaagggaaagaagagacgtggaagacgcagtaaaaaagaaagacgaagggggagaaaggagggcgaagaggatcagaaccctccgtgtccccgtttgagtagagagctgctcgatgagaaaggccccgaggtgcttcaggattccctggaccgtagctactcaaccccctcaggttgtctggaattgactgatagttgtcagccctatagaagtgcattctacgtcttagagcagcaaagggtaggtctcgccgtggacatggattag

SEQ ID NO: 196984 - DNA, 759 bp, synthetic construct
  misc_feature 1..759: note = Description of Artificial Sequence: Synthetic coding sequence
  source 1..759: mol_type = other DNA
atggacgagatcgagaagtaccaggaggtggaggaggaccaggacccctcctgccctagactatcaagagagctcttggacgagaaagaaccagaagtcctgcaagactctctggaccgatgttacagtacgccaagcgggtatctcgagctccctgacctcggccagccatattcatctgcggtgtacagtctcgaagagcaatatcttgggttggcgctggatgtggataggaccaagaaggatcaggaggaggaggaggatcagggacctccatgtcctcgactgagtcgggaactgctggaggtcgtagagccagaagtgcttcaggattcactggaccggtgctactcaacccctagctcttgtctcgaacagccagactcttgccagccatatggcagctctttttacgctttggaagagaaacacgtgggcttctcccttgatgtgggtgaaattgagaagaaaggaaaggggaaaaaacggaggggcagaaggagcaagaaggagcggagaagggggaggaaagaaggggaggaagatcagaaccctccgtgcccccgcctgtctcgggagctgctggacgaaaagggacccgaagtgctccaggattccttggataggtgctactctaccccttcaggatgcctggaactcactgatagctgtcaaccatacagatcggctttttatgtgctagaacagcaaagggtcggcctggccgtcgatatggatggcgaatacctgagtatgtag

SEQ ID NO: 196985 - DNA, 1734 bp, synthetic construct
  misc_feature 1..1734: note = Description of Artificial Sequence: Synthetic coding sequence
  source 1..1734: mol_type = other DNA
atggtggtgagcgccggcccctggagcggcgagaaggccgagatgaatattctcgaaatcaacaaaaagagtcgccctcagctggccgagaacaagcagcaattccggaacctcaaacaaaagtgtctggtcacccaggtcgcctacttcttagctaatcgtcagaataactacgactacgaagattgtaaggacctgatcaagagtatgctgcgcgatgagaggctgcttacagaagagaaactcgccgaagaactcgggcaagctgaggagctcagacagtataaagtcctggtacactcacaggaaagagagctgacgcagctcagagaaaagctacaggagggcagggatgcatcacgaagcctgaatcaacacttgcaggcactgctcacccccgacgagccagataatagtcagggaagggacttaagggaacagcttgccgagggatgccgcctggctcaacatctagtgcagaagctgagccctgaaaatgatgatgatgaggacgaagatgtaaaggttgaggaggcggaaaaagtgcaggagctatacgctccacgtgaggttcagaaagcagaggagaaagaggtgcctgaagactcactggaagagtgcgccatcacttgttccaactcacatcatccttgtgaatcaaaccagccatacggtaatacaaggattacgtttgaggaggaccaggtcgattccactctcatagacagtagcagccatgacgagtggctggacgccgtgtgcatcattccagagaacgagtccgaccacgagcaggaggaagagaagggacccgtgtctccccggaatttgcaggaatcagaagaagaggaagcacctcaagaaagttgggatgagggtgactggaccctgtcaattcctccagatatgtcagctagttatcagagcgaccggtccacattccactctgtggaggaacagcaagtcgggctcgcactggacatagggcgccactggtgcgaccaagtcaaaaaggaggaccaagaggctaccagcccaaggctctcccgggaactgctggacgagaaagagccagaggtcctccaggatagcttggaccgcttctactctaccccgtttgaatacttagaactgcccgatttgtgccagccctatcggagcgacttttactcccttcaagaacagcacctgggccttgccctggacctcgacagaatgaagaaggaccaggaggaagaagaggaccaaggaccgccctgccctcgattatctcgagagctccccgaggtggtggaacccgaagacttacaggattctttagacaggtggtactccactccgttctcctaccccgagctccctgactcatgccagccctacggctcatgtttctactcactcgaggaggagcatgtgggcttctctttagatgtggacgaaatcgaaaaataccaggaaggtgaggaggaccagaaacccccctgcccgcgtctcaacgaggtactgatggaggccgaggaaccagaagtactgcaggactcactggatcgttgctacagtacgacctcaacatatttccagctgcacgcctcattccagcagtacagatcagcattctattctttcgaggagcaggacgtgtcgctggccttggacgtcgacaacaggttcttcacccttaccgtgatccgccaccatctagcttttcagatgggtgtgatctttccccactag

SEQ ID NO: 196986 - DNA, 1902 bp, synthetic construct
  misc_feature 1..1902: note = Description of Artificial Sequence: Synthetic coding sequence
  source 1..1902: mol_type = other DNA
atgcccctgacccccaccgtgcagggcttccagtggaccctgcggggtccggatgttgaaacctcacctttcggcgctccccgggccgcaagccacggtgtggggaggcaccaagagttacgagatcccacagtcccaggacccacaagtagcgccacaaatgtgagcatggttgtgtctgctggcccttggagcggggaaaaagctgagatgaacattctggagattaacaaaaagtcaaggccccaactcgccgagaacaaacagcagtttagaaatctgaagcaaaaatgtctggtgacacaggtcgcctattttttagccaaccgccaaaataattacgactacgaggactgtaaggatctgattaaaagcatgctgcgagacgaacgcctgctgaccgaagagaagcttgcagaggagttaggacaggccgaagagctgagacaatacaaggtcctggtgcactctcaagaaagagagctcacgcagttgagggagaagctgcaggagggccgggatgctagtcgcagcctcaaccagcatctgcaggcgttgctgacccctgacgagcctgataattcgcaaggccgtgatctgcgggagcaactggccgaggggtgcaggctcgctcaacacctggtccagaagctgagccctgagaacgacgacgacgaagacgaagatgtgaaggttgaggaagcggagaaggtgcaagagctgtacgcgcctcgagaggtgcaaaaggctgaagaaaaggaagtcccagaagactcgctggaagagtgtgccattacatgttccaacagccaccatccctgcgagtctaaccagccttatggcaacacccggataacattcgaagaggatcaggttgatagcaccctcatcgattcatcctcacacgacgagtggctcgatgccgtctgtatcattccggaaaatgagtctgatcatgagcaggaagaggagaagggacctgtctccccccggaatctgcaggaatcggaggaagaagaggcaccccaggagagctgggacgaaggcgattggaccctgtccatccctccggatatgtcagcctcatatcagtctgaccgatcaacatttcatagtgtggaagaacagcaggtggggcttgctctggacataggccgccattggtgtgatcaagtcaagaaggaagaccaggaggccacatctccaaggttgtcacgtgagctcctcgacgagaaggagcccgaggtgctgcaagattctttggatagattttactctactccttttgagtacttggaactgcccgatctgtgccagccctatagatccgacttctattctttacaggagcagcacctgggtctcgcactggaccttgatcggatgaagaaggaccaggaggaggaggaagaccaaggccccccctgtcctcggctatctcgcgaactgccagaggtggtggagcccgaagacttgcaggactccctcgatcggtggtactccactcctttctcttaccctgagcttcccgatagctgccaaccgtacgggagttgtttctatagccttgaggaagagcatgtcggcttttctctcgacgtggatgagatcgaaaagtaccaggagggcgaggaagatcaaaaacctccatgcccacgcctcaatgaggtgctcatggaagccgaggagcctgaggtgctccaggattctttagacagatgttattcaaccaccagcacatacttccaactccacgcctccttccaacagtacagatctgcattttattcctttgaggaacaggatgtatcactggctctggatgtagacaaccgcttcttcaccttgaccgtgatacgccatcatcttgcctttcaaatgggggtcatcttccctcactag

SEQ ID NO: 196987 - DNA, 1866 bp, synthetic construct
  misc_feature 1..1866: note = Description of Artificial Sequence: Synthetic coding sequence
  source 1..1866: mol_type = other DNA
atgcccctgacccccaccgtgcagggcttccagtggaccctgcggggtcccgatgtcgagacttccccgttcggggcaccacgtgcggcctcgcacggagtgggcaggcatcaggaacttcgcgatcccacagtgccaggtccaacttcctccgctacaaatgtgagcatggtggtttccgctggcccttggagcggcgaaaaggccgagatgaacattcttgaaatcaacaagaagagccgaccccaattagcagagaacaagcagcaattccgaaacctcaaacagaaatgcctggtcacccaggtggcatatttcttagcaaacagacagaacaattacgactatgaagactgtaaggacttgattaagtcgatgttacgggatgagcgccttttgacagaggagaagcttgccgaagagttaggacaagccgaagaactgagacagtacaaggttctggtacacagtcaggagcgagagctgacacagctgcgggagaagctccaagaggggcgagatgctagcagaagtctcaaccagcacctgcaggctttgctcaccccagatgagcctgacaattcccaaggacgtgatctgcgagagcagttagccgagggctgcagacttgcccagcacctcgtccagaagctgagcccagaaaacgacgacgatgaagatgaggatgtgaaggttgaagaggcagaaaaggtccaagagctgtatgccccccgcgaagtccagaaagcagaggagaaagaggttcccgaagattcactggaagagtgcgcgatcacttgttcgaattctcatcacccttgtgagtctaaccagccgtacgggaacactaggatcacattcgaggaggatcaagtggattctacactgatcgacagcagctcccatgacgagtggttggatgcagtgtgcataatcccagagaatgagagcgaccacgagcaggaggaggaaaaagggcctgtgtcaccaaggtcttcgggcagattctgttgcctgatctcagtcggttatatattctgtcacccttgtcccgcatggctgatccggaacctccaggagtccgaggaggaagaggcgcctcaggagagctgggatgaggggcactggtgcgaccaggtaaagaaggaagatcaggaggcgacaagtccacgccttagccgagagctactcgacgagaaggagcccgaagtgctccaagacagcttggataggttttacagcacaccatttgaataccttgagctccccgacctgtgtcagccatacagaagcgacttctattctctgcaggaacagcacctgggacttgcgctggacttggatagaatgaagaaggaccaggaggaggaagaggaccagggacctccctgtcctcgcctgagccgcgagttacctgaagtggtcgagccagaggacctgcaggattcccttgaccgatggtacagcaccccctttagttacccggaactacccgatagctgccagccctatgggagctgcttttatagtctagaggaagagcacgttgggttctccctggacgttgacgaaatcgaaaagtaccaggagggggaagaagaccagaaacccccttgccccaggctcaatgaggtgttgatggaggccgaagaacctgaagtgctgcaagactcactcgaccgctgttactccaccacctcaacctatttccagttgcacgcatccttccagcagtatcgttctgcattctactcatttgaggagcaagatgtgtctctcgcactcgacgttgacaacagattttttacactcaccgtgatccgccatcaccttgcgtttcagatgggggtgatcttccctcactag

SEQ ID NO: 196988 - DNA, 1062 bp, synthetic construct
  misc_feature 1..1062: note = Description of Artificial Sequence: Synthetic coding sequence
  source 1..1062: mol_type = other DNA
atggtggtgagcgccggcccctggagcggcgagaaggccgagatgaatattttagagattaacaagaaaagcagaccgcagcttgccgagaataagcagcagttcaggaatctcaagcagaagtgtctcgtaacccaggtagcttatttccttgccaacagacagaataattatgactatgaggactgcaaagatctgatcaaaagcatgctccgggacgagcgacttctgaccgaagagaaattagccgaagagctagggcaggctgaagagcttagacagtacaaggtgctagttcacagccaggaaagagagctgactcagctgagagaaaagctccaagagggcagggatgctagtcggagtctcaaccaacatctgcaggcacttctgaccccggatgagcctgataattctcaaggtcgcgacctgagggagcaactggcagagggctgcagattagctcagcatctggtccagaagctgtccccagaaaatgacgatgatgaagacgaagatgtcaaggtggaggaggcggagaaagtgcaagagctgtacgcgccccgggaggtgcaaaaggcagaagagaaggaagtccctgaggatagcctcgaagaatgtgccattacatgttcaaactctcatcatccatgtgagtccaaccagccttacggaaatacacggattacgttcgaggaagaccaggtcgactcaaccttaattgatagttcctcccatgatgagtggttagatgcagtatgcatcattccagagaacgaatccgaccacgagcaggaggaggagaagggccctgtcagccctcggaatctgcaagagagcgaagaggaagaggcacctcaagagagctgggatgagggcgattggaccctgagtatccccccagacatgtcggcatcttatcagtccgatagaagtaccttccattctgtcgaagaacagcaagtcggactggctctggacataggtcgacattggtgcgaccaggaaaaaggcggccctcggggccataaatcccaagcccaacaaggggctgctggctag

SEQ ID NO: 196989 - DNA, 1668 bp, synthetic construct
  misc_feature 1..1668: note = Description of Artificial Sequence: Synthetic coding sequence
  source 1..1668: mol_type = other DNA
atggtggtgagcgccggcccctggagcggcgagaaggccgagatgaatattctggagatcaacaaaaagtctcgtccacaactggccgaaaataagcagcagttccgcaacctgaagcagaaatgcctggttactcaggtggcttactttttggctaataggcagaacaattatgactatgaggactgcaaggatctgataaaaagtatgttaagggacgaaagactgttgacagaagaaaaactggctgaggagcttggccaggcagaggagcttcgtcagtataaggtgctggttcattcccaagagcgggagctgacccagctccgcgagaagctgcaggaaggcagagacgcgtcacgttcactgaaccagcatctacaagctttgcttacccctgacgaacctgacaacagtcagggcagagacctcagggaacagttggccgaggggtgtaggcttgcccagcacctcgtgcagaaattaagtcccgagaatgatgatgacgaggacgaggatgttaaagttgaggaagctgaaaaagtacaggagctctacgccccccgagaggtccaaaaggcagaagaaaaagaggttccggaagactccctggaagagtgtgcgatcacctgctccaatagccatcatccctgtgaaagtaaccagccttacggaaacacgcggattacttttgaggaagatcaggtagactccaccctcatcgactcctcctctcatgatgaatggctcgacgccgtgtgtattatacccgagaacgaatctgatcatgaacaagaagaggagaaaggccctgtgtcgccacgaaacctgcaggaaagtgaagaggaggaagcaccccaggaatcttgggatgaaggagactggacgctgagcatcccgcccgatatgtcggcttcttaccaatccgaccggtccaccttccattctgttgaggagcagcaagttggcctggcactcgatattgggcgccactggtgtgaccaggtgaaaaaagaggatcaggaagccacatcccctaggctatctcgagagctcctggacgaaaaggagccagaggtgctccaggattcgttggacagattctacagcacaccatttgaatacctggaactccctgatctgtgccagccctaccgatccgacttctattcactgcaggaacaacatctggggctcgcacttgacctggatcgtatgaaaaaggaccaggaggaggaggaagaccaagggcctccatgcccccgtttgtctagagaacttccagaggtggtcgagcctgaggacctgcaggatagtctggatcgttggtattccacaccattcagttaccccgaactacctgatagctgccagccctatggatcgtgtttctactccttggaagaagaacacgtcgggttctcgttagatgtggatgaaattgaaaagtaccaagagggggaggaagaccaaaagcctccctgtccacgcctgaacgaggttctgatggaggcggaagaaccagaagtgctccaggattccctcgacaggtgttacagtactacatcaacctactttcagctacatgctagctttcaacagtaccggtcagcattctattccttcgaggaacaggatgtatcactggctctggacgtggataactag

SEQ ID NO: 196990 - DNA, 1692 bp, synthetic construct
  misc_feature 1..1692: note = Description of Artificial Sequence: Synthetic coding sequence
  source 1..1692: mol_type = other DNA
atgcccctgacccccaccgtgcagggcttccagtggaccctgcggggacccgatgtagaaacatctccttttggggctccccgagcagcgtcccacggtgtgggccgacaccaggaactgagggacccgaccgattacgaggactgtaaagatctcatcaagtccatgttgcgggatgagcgcctcctgaccgaagagaaactagcggaggagctgggacaggccgaggaactgcggcaatacaaagtactggtgcattcccaggagagggaactgacacagttgcgtgagaaactgcaagagggcagggacgcaagtaggtccttgaaccagcatttacaggccttgttaacgcctgatgaaccggacaacagccagggccgcgatttgcgtgaacagttggccgaagggtgccggctggcccagcacttggtccagaagttgtccccagaaaacgatgatgacgaggacgaagacgtcaaagtcgaggaagcagagaaggtacaagaattgtacgcccctcgcgaggtgcagaaagcggaggagaaggaggtacccgaggactctctggaagagtgtgcgataacctgtagcaactcccatcatccgtgcgaaagtaatcagccttacggtaataccagaattaccttcgaggaggatcaggtggacagcacgctcatcgacagtagttcccacgatgagtggctcgacgctgtgtgcattatccctgagaatgagtctgatcatgaacaggaggaagaaaaagggcctgtctccccacgcaacttgcaagaaagtgaggaggaagaagctccgcaggagtcttgggacgagggggactggactctgagtataccacctgatatgagcgcctcatatcagtccgatcgatctacgtttcactccgtggaggagcagcaggtggggctggctctggacatcgggagacattggtgcgaccaagttaagaaagaagatcaggaggctacgtctccccgcctctctagggagctcctggacgagaaagagcctgaagtgctccaggactctctggacagattttactccactcccttcgaatatctcgagttacctgacttgtgccagccttaccggtccgacttctatagcctgcaggagcaacacctggggctggctttagatctggatcggatgaaaaaggatcaggaggaagaggaagaccaggggcccccttgccctcggctgtctagagaactccctgaggtggtcgagcctgaagacctccaggattccctggatcgttggtacagtaccccgttttcctacccagagctccccgacagttgccaaccctatggctcctgcttctatagcctggaggaggagcacgttgggttttctctggatgtcgatgagattgagaagtaccaagagggggaggaagaccagaagccaccttgccctagactcaacgaagtgctcatggaagcagaggaacccgaagtccttcaggatagtttggacagatgttactccaccacttcaacttatttccaacttcacgcgagtttccaacagtaccgctccgcattctactcattcgaggaacaggatgtcagtctggcactagatgtcgacaatcgttttttcacactcacggtgatccgacaccacctcgcctttcagatgggagttatatttcctcattag

SEQ ID NO: 196991 - DNA, 1917 bp, synthetic construct
  misc_feature 1..1917: note = Description of Artificial Sequence: Synthetic coding sequence
  source 1..1917: mol_type = other DNA
atggtggtgagcgccgaccccctgagcagcgagcgggccgagatgaacatactggagatcaatcaggagctacgatcgcaacttgccgaatccaatcagcagttcagagatctgaaagagaagtttctgataactcaagcgaccgcttactctcttgccaatcaactcaagaagtataaatgcgaggaatacaaggacattatcgactccgtacttagagacgagttacagtctatggaaaagctggccgaaaaattgcgccaggccgaggaacttcggcagtacaaagccctcgtccactcccaggctaaagagttgactcagcttcgggagaagctaagggaaggtagagacgcttctcggtggctcaacaagcaccttaagaccctgctgacccctgatgatccagacaaatcgcaaggacaagatctgcgggagcaattggctgagggccatcggctcgctgaacacctcgttcataaactctctcccgagaatgatgaagatgaggacgaggacgaggatgataaggacgaagaggttgaaaaagtgcaggagtcaccagccccgcgggaagttcagaagacagaagaaaaggaagtgccccaggactcattagaggagtgtgctgtgacgtgctccaattctcacaatccgtctaacagtaatcagccccatcgcagtaccaaaattacatttaaagagcacgaggtagactccgctctcgtcgtcgaaagcgagcacccacacgatgaggaggaggaggccttgaacatccctccggaaaaccagaacgaccacgaagaggaggaaggcaaggcccctgtccctcctcgacatcatgacaagagcaattcatatagacacagggaggtgagctttctagctctcgatgaacaaaaggtgtgctcagctcaagacgttgcccgggactacagcaatccgaagtgggatgagacgtctttaggctttcttgaaaaacagtctgatctcgaggaggttaagggacaggagactgttgcccccagactgtctcgggggcctctccgggtggacaagcatgaaatccctcaggagtctctagacggatgctgcctcacccctagtatccttccagatctgactccatcctatcacccatattggagcaccctctattcctttgaagataagcaagtctcccttgcccttgtcgataaaatcaagaaggatcaggaggaaatcgaggaccagagccctccctgtccgcgactttcacaagaacttccagaggttaaggaacaggaggtgcctgaggacagcgtcaacgaagtgtatctcaccccctccgtccaccacgatgtgtctgactgtcatcagccttactcctctaccttgagttcccttgaggaccagctggcatgctcagcccttgacgtggcaagtccaaccgaagctgcttgtccacagggcacttggagcggcgacctgtctcatcaccagtccgaggtgcaagtgtcacaggcccaactggaacccagcacactcgtccccagttgcctaagactgcaactggaccagggcttccactgcgggaacggactggcacaacgaggcctgtccagcacaacatgtagcttctcggcaaatgctgattccggaaaccaatggcctttccaggaactcgtattagaaccgtcattgggaatgaagaacccacctcagttagaggatgatgccctcgaaggctccgcgtccaacacacagggccggcaggtgacaggtcgaattcgcgccagcctagtgctgatactcaagacaattcgtaggcgcttacctttttccaagtggaggttggcattcagattcgccggaccacacgctgagtctgccgagattcctaatactgcgggccggacccagagaatggcaggctag

SEQ ID NO: 196992 - DNA, 1917 bp, synthetic construct
  misc_feature 1..1917: note = Description of Artificial Sequence: Synthetic coding sequence
  source 1..1917: mol_type = other DNA
atggtggtgagcgccgaccccctgagcagcgagcgggccgagatgaacatccttgagattaatcaggagcttagatctcagctggccgaatcgaatcagcaattccgtgacctaaaagaaaagttcctgattacacaggctaccgcgtacagcctagcgaaccagctgaagaagtataaatgtgaggagtataaagacatcattgattctgttttgagggatgaactccagagcatggagaagctggcagagaaactccgacaggcggaggaactccggcaatataaggctttagtccatagtcaggccaaagagcttacccagctgcgcgaaaaactgcgggaagggagagatgccagccgctggctcaataagcacttgaaaacactgcttaccccagacgacccagataaaagccagggacaggacctgcgcgagcaacttgcagagggacatagactggcagaacacctggtccacaagctcagtcccgagaacgatgaggacgaggacgaagacgaggacgataaagacgaagaagtcgaaaaggtgcaggagtctcccgcaccgcgggaagtacaaaaaactgaggagaaggaggtgccccaggacagcctggaagagtgtgctgtgacatgctccaatagccataaccctagtaatagtaatcaaccacaccgttcgaccaagatcacatttaaagagcatgaagtggacagcgccctggtggtggagagcgagcacccacacgatgaggaagaggaagccctgaacattccgccagagaatcaaaatgaccatgaagaagaggagggcaaggcccctgttccccctagacatcacgataaaagtaacagttatagacacagggaggtctcttttctcgcgctggacgagcagaaggtgtgttccgcccaggatgttgcccgcgactactctaatccaaagtgggatgaaaccagtctgggatttctcgaaaaacaatccgatctcgaagaagtcaagggccaggaaaccgttgcgccacgactgtccagagggcctctgcgagttgataagcatgagattccccaggagagtttagatggctgttgtctgacgccatcaatcctgccagaccttacgccaagttaccacccatattggtcgaccttatactccttcgaagacaagcaggtgtccttggccttggtggacaagattaagaaagatcaggaggagatcgaggaccagtcacctccttgcccccgcctatcacaggaattacccgaggttaaagaacaagaggtgccggaagatagcgttaacgaggtttatttaaccccaagcgtgcaccatgatgttagtgattgtcatcagccctattctagcaccctatcgtctttggaggaccagcttgcatgctctgccctggacgtagcctcacccactgaagccgcctgcccccagggcacatggagcggagatctgagtcatcaccagtccgaggtgcaagtttcacaggctcagcttgaaccaagcaccttagtaccttcttgcctgcggcttcaactcgaccagggcttccactgtggaaatggactggcacagaggggcctctcatcaacaacatgctcattctctgctaacgccgattccggcaatcaatggccgttccaggagctggtgctggagcctagcctgggtatgaagaatccgccccagctggaagatgatgccctggaagggtccgcatcaaacacccaggggcgccaagtgaccgggaggatccgtgcgtctctcgtgctgatcctcaagacgattaggcggaggttaccattttctaaatggaggctcgcattccggttcgctggaccccatgctgagtccgccgagatcccgaacacagcagggcgcacccagcgcatggcgggctag

SEQ ID NO: 196993 - DNA, 1722 bp, synthetic construct
  misc_feature 1..1722: note = Description of Artificial Sequence: Synthetic coding sequence
  source 1..1722: mol_type = other DNA
atggtggtgagcgccgaccccctgagcagcgagcgggccgagatgaacatcctggaaatcaaccaggaattgcgcagccagctcgccgagagcaaccagcaattcagagatctcaaggaaaagttcctgataactcaggccactgcttatagccttgctaaccagctgaagaaatacaagtgtgaggagtataaagacatcatcgattccgtgcttagggacgaactccagagtatggagaagcttgccgaaaagttgaggcaggccgaggagctccgacagtataaagccctcgttcactcccaggccaaggagctaacacagctccgtgaaaagctgcgtgaagggagagacgcttccaggtggctaaacaagcacctgaagactctgctcacacccgatgatcccgacaagtcccagggccaggatctgcgagagcagctggctgagggtcacagactggcagagcacctcgtgcacaagctatctccagaaaatgatgaggacgaggacgaggacgaggatgataaggacgaagaggtcgagaaggtgcaggagagtccagcccctagggaagttcagaaaactgaagaaaaggaggtcccccaggattccctggaggagtgtgcagtgacttgttcaaattcccacaacccttctaactctaaccagccacaccgcagcactaaaataacattcaaagagcatgaggtcgacagtgctctggttgtggagagcgagcacccgcacgacgaagaggaggaagctttaaatatacctcccgaaaatcagaacgaccacgaggaagaagagggaaaggctcctgttccccccagaaatcgtcagtctctggagccaggtgagctcactaatctgcgtgattttctgattagcccggtcgtgtcccatgttgccaaccccggccaccacgacaaaagtaatagttatcggcacagggaggtctcttttctcgccttagatgagcagaaggtctgtagcgcccaggatgtggctcgcgattatagcaatcccaagtgggatgagacgtcgctgggcttcctcgagaaacagtcagaccttgaggaagtaaagggccaggagaccgttgcgcctagactgtcgcgcggacctcttagggtagataagcacgagatcccccaggagtctcttgatgggtgctgtctcaccccctctatcctccccgatcttacaccttcctaccacccctattggtcaactctttattcattcgaggacaagcaagtgagtctcgctttggttgacaaaatcaagaaggatcaggaggagatcgaagaccagtcacccccttgcccgcgcctgtcacaagagctgcccgaggtgaaggaacaagaagtgccagaggactccgtgaacgaggtctacctgactcctagcgtgcaccatgacgtttctgattgtcatcaaccgtactcttcgacgctgagtagtttagaggatcagctggcctgtagtgcacttgacgttgcgagtccgacggaagccgcgtgtccccagggtacctggtccggggacctgagtcaccaccagagtgaagtccaggtcagccaggctcagctagagccatccacacttgtgccctcttgcttgcgcctccagctagatcaaggctttcactgcggaaatgggctggctcagcggggtctgtctagtactacatgttctttcagcgctaatgcctag

SEQ ID NO: 196994 - DNA, 372 bp, synthetic construct
  misc_feature 1..372: note = Description of Artificial Sequence: Synthetic coding sequence
  source 1..372: mol_type = other DNA
atggtggtgagcgccgaccccctgagcagcgagcgggccgagatgaatatcctggaaataaaccaggagctgcggtcgcagctcgccgagtcaaatcagcagttccgggacttgaaagaaaagtttctcattacccaggccaccgcttactctctcgccaatcaactgaaaaaatattcatgcttgaaatacaggaatcacctgccccccgaaaggtgccggaggctgaaaaaaagaaagtcactgcggacccactggcgaaacgtcctgagtcttgtccagatcgtcacaacgctgctgactccaaccagcttgacaggcgcgcccaagagccatctgagaaatactaagtccacacttttgtggctgtag

SEQ ID NO: 196995 - DNA, 2004 bp, synthetic construct
  misc_feature 1..2004: note = Description of Artificial Sequence: Synthetic coding sequence
  source 1..2004: mol_type = other DNA
atggtggtgagcgccgaccccctgagcagcgagcgggccgagatgaatattctcgagataaatcaggaactgcggtcccagctggcggagagcaaccagcagtttagagacctgaaagaaaagtttctgatcacacaggccacagcatacagtctggcaaatcagctcaaaaaatacaaatgcgaggagtataaagacatcattgacagcgttctcagagatgagctgcaaagcatggagaaactcgcagagaagcttaggcaggcagaagagctgcgtcagtataaggccttagtacatagtcaggccaaagaattaacccagttacgagagaaactcagggagggacgagacgcctcacgatggctaaacaaacacttgaagaccctgctgacccccgacgacccagataagagtcaagggcaggatctgagggaacagctcgcagaggggcaccgactggcggagcacctagtgcacaaactgagtccggaaaacgatgaggacgaggacgaggacgaggacgacaaggacgaggaagtcgagaaggtccaagagtcccccgccccacgtgaggtccaaaaaaccgaagagaaagaggtgcctcaggatagtttagaagaatgcgccgtgacctgtagcaattcgcacaacccatctaattccaatcagccccaccgaagcacaaaaattacatttaaggagcacgaggtcgactccgccctagttgtggaaagcgagcacccccacgatgaagaggaggaggccctgaacatcccccctgagaatcagaacgaccacgaggaagaagagggaaaggcccccgtgccccctcggaataggcagtccctggagcccggagagctgaccaatctccgcgatttccttatttcacccgttgtgtcccatgtggcaaaccccggccatcacgataagagcaactcatatcggcacagagaggtgagcttcctggccctagacgaacagaaggtctgctctgcacaagatgtggcccgggactactcgaaccctaagtgggatgagacaagcctggggtttttggagaagcagtctgatttagaggaggtcaaaggacaagagaccgtggctcccagacttagccgggggccattgcgggtcgataagcacgaaatcccacaggagagtttggatgggtgctgcctaacaccaagcatcctgcctgatttgacccccagctatcacccttactggagtacactgtattcctttgaagacaagcaggtgagcttggccctcgtggacaagattaagaaagatcaggaggaaatcgaggatcagagtccaccttgccccagattgtcccaggagctgcccgaagtgaaggaacaggaagttcctgaagacagcgtcaatgaggtctaccttactccttctgtccatcacgatgtgtcagattgtcatcagccatactcttcgactctgtctagcctcgaggatcagttggcctgtagcgcactggacgtggctagccctaccgaagccgcgtgcccacagggcacctggtctggagacctatcacatcatcggagtgaggtgcagatctcgcaagcacagttagagccttcaactctggtcccaagctgcctgagactccagctggatcagggttttcattgcggaaacgggttggctcagcgcggcctctcttcaacgacttgctcattcagtgcaaacgcagactccgggaatcagtggccgtttcaggagcttgttcttgaaccttctctgggtatgaagaatccccctcagctcgaggatgacgcactggagggaagtgcgtcaaacacccagggacgacaggtgacaggacgtatccgcgcttccttggtgctgatcctcaaaactattcgacggcggctcccattctccaaatggcgtctcgcgttccgatttgcgggcccacacgctgagtctgcagaaattccaaataccgctgaacgcatgcagagaatgattggatag

SEQ ID NO: 196996 - DNA, 1722 bp, synthetic construct
  misc_feature 1..1722: note = Description of Artificial Sequence: Synthetic coding sequence
  source 1..1722: mol_type = other DNA
atggtggtgagcgccgaccccctgagcagcgagcgggccgagatgaatatcctggaaattaaccaggagctcaggtcccaacttgccgaatccaaccagcagtttcgagacctgaaggagaaatttttgatcacccaggccaccgcgtactccctggccaaccagctgaagaaatacaagtgtgaggaatacaaggatatcattgatagtgtgctgagggacgagttgcaatctatggagaagctggctgagaagctgcgccaggcagaggaattacgacaatacaaggctctggtgcactcccaagctaaggaactcactcaactccgtgagaaactgcgcgaaggacgcgatgcatcccggtggctgaataaacacctaaagaccctcttaacccccgacgacccagacaagtcccagggacaggatcttcgggaacagctggcggaggggcacaggctagctgagcatctagtccacaagctgtctcccgagaacgatgaggacgaagatgaagacgaagatgataaggacgaagaggtcgagaaggtacaagaatcacctgcaccccgcgaagtccaaaagacagaggaaaaggaagtccctcaagactccctggaggagtgtgcagtcacctgctctaattcccataatcctagtaactccaatcagcctcacaggagcacaaaaataacctttaaagagcacgaagtcgacagcgctctggtggttgaatctgaacatcctcacgatgaagaggaggaggctctgaatattccccccgaaaaccagaacgaccacgaggaggaagagggcaaagctcccgtgccaccccgaaaccggcaaagcctggagcccggcgagttgactaatcttagagacttcctcattagccctgtcgtcagtcacgtggcaaacccgggtcaccatgacaagtcaaattcctatagacacagggaggtgtcattcctggctttggacgagcaaaaggtgtgcagcgctcaggacgtggcccgggattactccaacccaaagtgggatgagactagtctgggtttcttagagaagcaatctgaccttgaagaagttaagggacaagagaccgtggctcctcgcctgtccagggggccactccgagtggataaacacgagattccgcaagagtccctggatggatgttgtttaacgccctcaatactgcccgaccttacaccatcttaccacccatattggtccacactctatagctttgaagataaacaggtttccctggcactcgtggataagatcaaaaaggaccaagaagaaattgaagatcaatctccaccatgcccccgattgtcccaggagctcccagaggtgaaggaacaggaagttcccgaggattccgtgaacgaagtgtacctgactccttctgttcaccacgacgtatctgactgccatcagccctacagcagcaccctcagttcattagaggaccagctggcatgctctgcactagatgttgcgagtccgactgaggctgcatgtccccaagggacctggagcggagatctatcccatcacagaagcgaagtgcaaatctcgcaagcccagctggagccaagtactttggtcccttcttgcctgcggctgcagctggaccagggattccattgcggcaacggtctggcccagagagggctaagctctaccacttgtagtttctccgctaacgcttag

SEQ ID NO: 196997 - DNA, 1917 bp, synthetic construct
  misc_feature 1..1917: note = Description of Artificial Sequence: Synthetic coding sequence
  source 1..1917: mol_type = other DNA
atggtggtgagcgccgaccccctgagcagcgagcgggccgagatgaatattttagagattaaccaagagttgcgcagccagttagctgagtccaatcaacaatttcgggatctcaaagagaagtttcttattacccaagccacggcttattcactggctaaccagctgaagaaatataagtgcgaagaatacaaggatattatagactcggtgctgcgggacgaactccagagtatggagaagttggcggagaagctacgtcaggctgaagaattgcggcaatacaaggccttggtacatagtcaggccaaggaactcactcaacttcgggagaagttacgcgaggggagagatgcttcaagatggttgaacaagcacctgaaaaccctactgactcctgacgatcctgacaagagccaggggcaagaccttcgggagcagctcgctgaaggacataggcttgctgaacacttagtgcacaagctgagtcccgaaaacgacgaagatgaggatgaggatgaggatgacaaggacgaggaggtggaaaaagtgcaggagtcaccagcgccccgcgaggttcagaaaactgaggagaaagaggtccctcaagattccttggaggaatgcgctgttacatgcagcaatagtcacaacccctctaacagcaaccagcctcaccgaagtaccaaaatcaccttcaaggaacatgaagtggacagcgctctggtggttgaatccgaacacccgcatgatgaggaagaagaggccctgaacatcccccccgagaatcagaacgatcatgaagaagaggagggaaaggccccagtgccaccccgtcatcacgacaagagcaatagttacagacatagagaagtgtcctttctggctcttgacgaacaaaaagtatgctcagcacaggacgtggccagagattacagcaaccccaagtgggacgaaactagtcttggttttctagagaagcaatctgatctggaggaagtcaaggggcaggaaaccgtcgccccgcgcctgagccggggacctctccgggtggacaagcatgagattccacaagagagcctcgacgggtgctgcttgaccccttccatcctgccagacctgactccatcctaccacccatattggtcaaccttgtactccttcgaagataaacaggttagtctggctttggtggataagatcaagaaggaccaggaggagatcgaagatcagagccccccctgtcccagattatcacaggagttacctgaggtcaaagagcaggaagtgcctgaggactctgtaaacgaggtttacctgactccctctgttcaccatgatgtgagcgactgccaccagccttactcctcaacactgagctcgcttgaggaccagcttgcctgttccgctctggatgtcgcatctcccacagaagcagcctgtccacaaggaacgtggtccggagacctgtcacatcaccgatctgaagttcagatttcacaagcccagcttgagccatctactcttgttccctcgtgtctccgccttcagctcgaccagggcttccactgtggtaacggcctggcccaaagaggcctgtccagcacaacgtgttcgttctccgccaatgcggacagcgggaatcaatggcctttccaggagttagtgctcgaacccagtctcggtatgaagaatccgccccagctggaggacgatgccctagaagggtcagcatcgaatacacagggacgacaagttaccggacggattagagccagtcttgttctcatactgaaaacgattcgccgcagacttccgttcagcaaatggcgattggcttttcgttttgcggggccacacgccgaatccgccgagatcccgaatactgctgaacgcatgcagcggatgataggatag

SEQ ID NO: 196998 - DNA, 1917 bp, synthetic construct
  misc_feature 1..1917: note = Description of Artificial Sequence: Synthetic coding sequence
  source 1..1917: mol_type = other DNA
atggtggtgagcgccgaccccctgagcagcgagcgggccgagatgaatatactggagattaaccaggagttgcgtagtcagctagctgagtctaatcagcagttccgtgacctgaaggaaaagtttttgattactcaggccacagcgtattcattggccaaccagttgaaaaagtataagtgcgaagagtataaggatatcatcgactccgtccttagggacgagcttcagtccatggagaaactggctgagaagttacgtcaggcggaggaattgcggcagtataaagcactcgtccactctcaggctaaggagttaacacagcttagggagaagctgagagaggggagggacgcaagccggtggctaaataaacatcttaagaccctactcactccggatgatcccgacaagagccaaggccaggatctgagagagcaactggccgaggggcacaggttggcagagcacctcgtgcacaaactgtcacccgaaaatgacgaggatgaagacgaggatgaggacgacaaagatgaggaggtggagaaggtccaggagagcccagcaccccgggaagtccaaaagacagaggagaaagaggtcccccaagacagcttagaagagtgtgccgtgacctgttctaacagtcataatccttccaacagcaaccagccccacagaagtacgaagatcacatttaaggagcacgaagtagatagcgccctggtcgtggaaagtgaacaccctcacgacgaggaagaagaagcactgaatatcccacctgagaaccagaacgaccacgaggaggaggagggaaaggcaccagtgccaccccggcatcacgacaagagtaactcatatcggcaccgcgaggtcagctttttggccctggatgaacaaaaggtgtgttctgctcaggatgtggcacgcgactattccaaccctaaatgggatgagacgagtctcgggtttctagagaagcagtctgatttggaagaggtgaaaggccaggaaaccgtcgcccccagactctcccgtggaccccttcgcgtggacaagcatgaaattcctcaagagtccctagatggttgttgtcttacccctagcatcctgcccgaccttaccccctcttaccatccctattggagcaccctctactcttttgaggataagcaggtctcactcgccctggtggataaaatcaaaaaagaccaagaagagatcgaagaccagtcaccaccatgcccacgcctgtctcaggaacttccagaagtgaaagagcaggaagtgcccgaggacagtgtgaatgaagtgtatctgactccatctgtccatcatgatgttagtgattgccatcaaccatattctagcaccctgtcttctcttgaggaccagttggcgtgctctgctcttgacgtcgcttcccccaccgaggcggcatgcccccagggaacttggtccggagatctctcacatcaccgcagtgaagttcagatctctcaagcacagttagaacccagtacccttgtgcctagttgcctgcgcctccagctggatcaggggttccactgcgggaatggtctggctcaacgcggtctctctagtacgacatgcagcttttcagcaaatgccgacagtggcaaccagtggccttttcaggaactggtgttggagccctcacttgggatgaagaaccctccacaattggaggatgacgcactggagggctcagcatccaacacccaagggagacaggtcactggacgcattagggcgtctctggtcctaatcctcaaaacaattaggcgaaggctgcccttctccaaatggcgtcttgcctttcggttcgcaggccctcacgcagagtcagccgaaattccaaatacggctgaacggatgcagcgaatgatcggatag

SEQ ID NO: 196999 - DNA, 624 bp, synthetic construct
  misc_feature 1..624: note = Description of Artificial Sequence: Synthetic coding sequence
  source 1..624: mol_type = other DNA
atgctggccagctacaagagctacagcagcaccttccacagcctggaagagcagcaggtgtgcatggctgtggatatcgggaggcaccgatgggaccaagtcaaaaaggaggaccaggaagccacgggcccccgcctgtcgagagagctactcgacgagaaaggtccagaggtcttgcaggattcgttgtaccgatgttacagtactcccagcggatgcctggaacttacagatagctgtcaaccttacaggagcgcattctacgtgctggagcagcaacgggtagggcttgccgttgatatggacgaaattgagaagtatcaggaggttgaagaggaccaagggagatgggaagaggatcaaaacccaccctgcccccggctcaacggggtgctcatggaagtggaagagccagaagtactgcaggattcattagacggatgctactctactccttccatgtacttcgagcttcccgacagctttcagcactaccggtcggtcttctattcctttgaagagcagcacatttcattcgctttatatgttgataatcgctttttcactctgacagtcacaagcttgcaccttgtgtttcagatggaagtcattttccctcaatag

SEQ ID NO: 197000 - DNA, 1830 bp, synthetic construct
  misc_feature 1..1830: note = Description of Artificial Sequence: Synthetic coding sequence
  source 1..1830: mol_type = other DNA
cccgtgcccggccccaccagcagcgccaccaacgtgagcatggtggtgtccgctggaccccttagcagcgagaaagcggaaatgaacatcctggagatcaacgagaagctaagacctcagctagccgaaaagaaacaacagtttcggaatctgaaagaaaagtgcttcctgacacaactgtccggtttcctggcaaatcagcaaaacaagtacaagtatgaagaatgcaaggatctgattaagtttatgttacgaaacgagcgccagttcaaggaggaaaagttggccgagcagctgaaacaggccgaggagcttcgccagtacaaagtgcttgtgcacgcgcaggaacgggagctcactcaattgcgggagaaactgagggaggggagagacgcatctagaagcctgaatgagcacctgcaggccctactgaccccggatgaacccgataaatcccagggacaggacctgcaggagcagcttgctgaagggtgccgcctagctcagcaccttgtccagaaattgtcgccggaaaatgacaatgatgacaatgaagacgtacaggtggaggtggccgagaaggtacaaaagagctccgctcctcgggagatgcagaaggccgaggaaaaagaagtgccagaagactctttagaggaatgtgcgataacctactcaaattctcacgggccttacgacagcaatcagcctcatcgaaaaacaaaaatcacattcgaggaagacaaagtggattcaactttaatcggaagctcttcgcacgtagagcgcgaagatgccgtccatataattcccgagaatgaatcagacgacgaagaggaagaagagaaagggccagtgagcccaagaaatttgcaagagagtgaggaggaggaggtgcctcaggaaagctgggacgagggatatagtacaccttctattccacccgaaatgctggcaagctacaagagttactcttccacattccactctctggaagaacagcaggtttgtatggccgtcgatattgggagacatagatgggaccaggttaagaaagaagaccaggaggcaactgggccccgcctgagccgggagctgctcgacgaaaagggccccgaagtgttacaggactcactgtacagatgttattctactccaagtgggtatctggaactccctgatctgggccaaccgtatagttctgcagtgtactcactggaagagcagtacttggggctcgcgctcgatttggatcgtattaagaaggaccaggaggaggaggaggaccagggacccccatgcccgaggctatctagagagctactggaggtggttgagcctgaggtgctgcaggactctctggatagatgctattctactccctcaagttgcctcgagcagcctgacagttgccaaccgtacgggtccagcttctacgccctagaagaaaaacatgtgggtttctccctcgacgtcggtgagattgaaaaaaagggaaaaggcaaaaagcggcgaggccgacggagcaagaaggagcgcaggcggggtcggaaggagggcgaggaagatcagaatcccccatgccctaggttgaacggcgtactcatggaagttgaagaacctgaggttctccaggattccctagatgggtgttactcaacaccatcaatgtacttcgaactgcccgatagctttcaacactatagatccgtgttttactcgttcgaggaacagcacatctcttttgctctctacgtggacaaccggttcttcaccctcactgtaacatcactgcatctcgtttttcagatggaagtgatttttccccagtag

SEQ ID NO: 197001 - DNA, 2052 bp, synthetic construct
  misc_feature 1..2052: note = Description of Artificial Sequence: Synthetic coding sequence
  source 1..2052: mol_type = other DNA
tgacccggccccaccagcagcgccaccaacgtgagcatggtggtgtccgcgggtcccctcagctccgagaaggcagaaatgaacattttggagattaacgaaaagctccgaccccaactcgctgagaaaaaacaacagtttcgaaatctgaaggagaagtgcttcctgactcagctctctggtttcctggccaaccagcaaaacaagtacaagtacgaggagtgcaaggacctgatcaagttcatgctccgaaacgaaagacagttcaaagaagagaagctggccgaacagcttaaacaggccgaggagctgaggcagtataaggtccttgtccatgcccaggagcgcgagctcactcaactgagagagaaacttcgggagggccgcgacgcttctaggagtctgaacgaacaccttcaggcactgctcacacctgacgagcccgataaatcccagggacaggacctgcaggaacagctggcggaggggtgtagactggcccagcatctcgttcaaaagctcagccccgagaacgacaacgacgacaacgaggacgtgcaggtggaagtagcagagaaggtgcagaagtcttcagcccccagggaaatgcagaaggcagaggagaaggaagtgcctgaggactctctggaggagtgcgccattacctacagcaacagccatggaccttacgactccaatcagccacacaggaagactaagatcacgttcgaagaagataaggtagactccacccttatcggctcatcctcgcacgtcgagagagaggacgccgtgcacataattccagagaatgagtccgatgacgaagaggaagaggagaagggtccagtttcaccgcggaaccttcaagagtccgaggaggaagaggtcccacaggagagttgggatgaggggtatagcacccctagtattccacccgaaatgctcgcaagctataaaagctactcttcaacctttcacagcttagaagagcagcaggtctgcatggcagtggacattgggcggcatcgctgggatcaggtgaaaaaggaagaccaagaggccaccgggcctcggcttagccgcgagttactggacgagaagggcccagaggtcctccaggactcactgtatcgctgctatagcactccatccggatgtttggagcttactgactcctgccagccctataggtcagcattttacgtgctggaacagcagcgcgtggggttggcggtagacatggatgaaatcgagaagtatcaggaagtggaagaggaccaagatccttcatgccctaggctgagccgcgagctgttggacgaaaaagagccagaggttcttcaagactctctcgggagatggtacagcaccccatcaggctacctcgagctgccggatctgggtcagccctactcttctgcagtatatagcctggaggaacagtatctgggtctggcattggacctggaccggatcaagaaggaccaggaggaggaagaggaccagggcccgccctgtccccggctttcccgtgaactactggaggtggtcgagcctgaggtgctgcaagacagcttggaccggtgttactcaacaccatcctcttgccttgaacagcccgattcttgtcagccctacgggagctccttctacgctctggaggaaaaacatgtgggcttttctctggatgtcggcgagatcgagaagaaaggcaaagggaagaagagaagaggtcgccggagcaaaaaggagcggaggcgtggtcgcaaagagggcgaagaagaccagaaccccccttgtccccgtttgaacggcgtactcatggaagtcgaagaaccagaggtgctccaggacagtctcgatggttgctacagcacgccttctatgtatttcgagctgccggattctttccaacactaccgatcggtcttctacagtttcgaagagcagcacattagcttcgccttatacgttgataatcggtttttcacgcttacggtgacttccctgcatctcgtattccagatggaagtgatctttccacagtag

SEQ ID NO: 197002 - DNA, 1824 bp, synthetic construct
  misc_feature 1..1824: note = Description of Artificial Sequence: Synthetic coding sequence
  source 1..1824: mol_type = other DNA
cccgtgcccggccccaccagcagcgccaccaacgtgagcatggtggtgtcagcggggccactgagctccgagaaagccgagatgaatattttagaaattaatgagaagctgcggccccagcttgctgagaaaaagcagcagtttcggaacttaaaagagaagtgctttctaactcagttgtcaggctttctggctaaccaacagaacaagtacaagtatgaggaatgtaaagacctgataaaattcatgctccggaatgagaggcaattcaaggaggagaagctggccgagcagctgaaacaggccgaagaactaaggcagtataaagttctggtgcacgcacaggaacgggagttgacacagctgagagagaaactgcgcgaaggccgtgatgccagccgcagtctgaatgagcatttacaagcactcctgacacccgacgagcccgataagtcgcagggacaggacctgcaggagcagctcgccgagggttgtcggctggctcagcatcttgtccagaaactgagccccgagaatgacaacgatgataacgaggatgtccaggtagaggtggccgagaaggttcagaagagcagtgccccacgggaaatgcagaaagccgaggaaaaggaggtccccgaggacagcctagaggagtgcgctataacatacagcaactctcacggaccctacgattcaaaccagcctcaccggaagacaaaaatcacatttgaagaagacaaggtcgactcaaccctgatcgggtcatccagtcatgtggagagagaggatgccgtgcatatcatcccagaaaatgagagcgacgacgaggaggaggaagagaaaggacccgtatccccaagaaatctccaggaatcagaggaggaagaggttccacaggaatcttgggacgagggctactctacaccgtctatacctcctgagatgcttgctagctataagagttacagttctacgttccattccctggaggagcaacaagtgtgcatggcggtggatatagggcggcaccgctgggaccaggtgaagaaagaagaccaggaggccaccggacctcgcttaagccgcgagctcttagatgagaagggccccgaagtgcttcaggacagcttgtaccgatgctacagtacacctagtgggtgccttgagctgactgactcatgccagccataccgttcagctttctacgtgcttgagcaacagcgggtaggtttggccgtcgacatggacgaaatagagaaatatcaggaagtggaagaagatcaggatccttcttgtcctcggttgagtcgggagttgctggacgagaaggagcctgaagtgctgcaggattccctcggtagatggtattccaccccttctggttacctggagctgccggaccttggccagccatattcctcggcagtgtattccctggaggagcagtacctcggactcgcactggatctcgaccgcataaaaaaagaccaggaggaagaggaggatcagggaccaccatgtccccggctttctcgagagctcctggaggtggtcgaacctgaagtgctacaggattcacttgacgtcattcagttgctccccgttgtcctgaattctttaactccggctagtcccatggaggttccttttatgcattggaggaagaatatgttggcatttttactgacctgggagaagctcaagagacgagggaggggccgaaaggaaggagaggaggatcagcgcaggaaagaagagggtgaggaaaagaaaggaaaaaaaatcaagacacatcacgctcccggtagtaccgcttgttag

SEQ ID NO: 197003 - DNA, 396 bp, synthetic construct
  misc_feature 1..396: note = Description of Artificial Sequence: Synthetic coding sequence
  source 1..396: mol_type = other DNA
atggccgacgtggtggtgggcaaggacaagggcggcgagcagcggctgattagtctacccctgtccaggattcgtgtgataatgaagtcaagtccagaagtttctagcatcaaccaggaggccctagtcttaacggccaaggcaacagaacttttcgtgcaatgtcttgcaacctacagttaccgccacggatcaggaaaagagaagaaagtcctcacttattctgacctggcaaatacagctcaacagtccgagacattccagtttctggctgatattctgcctaagaagattttggcatctaaatacttgaagatgctgaaggaagagaaacgggaagaggacgaagagaacgataacgataacgagagtgaccacgacgaggccgattcttag

SEQ ID NO: 197004 - DNA, 582 bp, synthetic construct
  misc_feature 1..582: note = Description of Artificial Sequence: Synthetic coding sequence
  source 1..582: mol_type = other DNA
atgggcaagcagaacagcaagctgcggcccgaggtgatgcaggacctgctggagtctacggactttactgagcacgaaatccaggagtggtacaagggcttcctccgggactgcccaagtggacacctgtctatggaggagttcaagaagatctacggtaacttcttcccctacggcgatgcgtccaaatttgcggaacacgtttttaggactttcgatgctaatggcgatggaacaatcgatttcagagagtttatcatcgcactatccgtgacttctagaggtaaattggaacaaaagctcaaatgggccttctcaatgtatgacttagacggcaacggctacatttccaaagcagagatgcttgagatcgtgcaggccatatacaaaatggtttcaagcgtgatgaaaatgcccgaagatgaatcaacacccgaaaagcgtacggaaaaaatattcagacagatggatactaaccgggatggcaagctgtcactggaagaattcatacggggcgctaagtcagatcccagcattgtgcgcctgctccagtgtgatccaagtagcgctggccagttctag

SEQ ID NO: 197005 - DNA, 582 bp, synthetic construct
  misc_feature 1..582: note = Description of Artificial Sequence: Synthetic coding sequence
  source 1..582: mol_type = other DNA
atgggcaagcagaacagcaagctgcggcccgaggtgatgcaggacctgctcgagtcaactgattttaccgaacacgagattcaagagtggtataagggcttcttgcgggattgcccaagcgggcatctgtccatggaggagttcaaaaagatttatggaaacttctttccatacggcgatgcctccaaattcgccgaacacgttttccggacttttgacgccaacggagatggcacaatcgactttcgagagttcattattgccctaagcgtgacctccagggggaagctcgagcaaaaacttaagtgggccttctccatgtatgatctggatggcaatggctatataagcaaggctgagatgttggagatcgtgcaagccatatacaagatggtgtcttccgtaatgaagatgcccgaggatgagtccactccagaaaagcgcactgagaaaatcttccggcagatggacacaaatcgtgatggcaaactctctctggaggagtttatccgtggtgccaagtctgatccctctattgttaggctgctgcaatgtgacccttcatctgctggacagttctag

SEQ ID NO: 197006 - DNA, 582 bp, synthetic construct
  misc_feature 1..582: note = Description of Artificial Sequence: Synthetic coding sequence
  source 1..582: mol_type = other DNA
atgggcaagcagaacagcaagctgcggcccgaggtgatgcaggacctgctggagagtaccgatttcacggagcacgagatccaggagtggtacaaaggcttcctccgagattgccctagtggacacctgtccatggaagagttcaaaaaaatctatggaaacttctttccatacggggatgcatctaagttcgctgaacatgtgttccggaccttcgacgcaaatggagacggcaccatcgattttcgcgagttcattatcgccctgtccgtgacatctcgcgggaagctagagcagaaactgaagtgggcattttctatgtatgacttggacggtaatgggtatattagcaaagccgagatgttggaaatcgttcaagctatttataagatggtgagtagcgtgatgaaaatgcccgaagatgagtctactccagagaaacggactgaaaagatcttcaggcagatggacacgaatagggacggaaaactgagtctcgaagagttcatcagaggagctaagagcgatcccagcatcgttaggctgctccagtgcgacccttcgtcggcagggcagttctag

SEQ ID NO: 197007 - DNA, 582 bp, synthetic construct
  misc_feature 1..582: note = Description of Artificial Sequence: Synthetic coding sequence
  source 1..582: mol_type = other DNA
atgggcaagcagaacagcaagctgcggcccgaggtgatgcaggacctgctggaaagcaccgacttcaccgaacatgagattcaagagtggtacaagggcttcctgagagactgtccgtcgggacatctctctatggaggaatttaaaaagatttacggaaatttcttcccctatggcgacgccagcaagttcgccgagcacgtgttcaggacatttgacgccaacggcgacgggacaatcgacttcagagagttcattattgcactctccgtgacgagcagaggaaagctggagcaaaagcttaagtgggccttctcgatgtacgatctagatggcaacggctacattagtaaagccgagatgctggagatcgtgcaggccatttacaagatggtatccagtgtcatgaaaatgcctgaggacgaatccactcccgagaagcgtaccgagaagatctttcgacagatggacacgaacagggatggtaaactctcacttgaagagttcattcggggcgcaaagtcagatccatcaattgtgagacttctgcaatgtgacccctcctctgcggggcagttctag

SEQ ID NO: 197008 - DNA, 3966 bp, synthetic construct
  misc_feature 1..3966: note = Description of Artificial Sequence: Synthetic coding sequence
  source 1..3966: mol_type = other DNA
atgggcgcccccttcgtgtgggccctgggcctgctgatgctgcagatgctgttgtttgtggctggcgaacaggggacccaggacatcaccgacgcctcggagcgaggcttgcatatgcagaaattaggatcagggtccgtgcaggccgcccttgctgaattggttgccttgccgtgtctgtttacactccagcctcgcccaagtgcagcacgcgacgcacctagaatcaagtggacaaaagttcgtactgcttccggccagaggcaggatctgccaattctggtggcgaaggacaacgtggtgcgcgtggctaaaagctggcaggggagagtttcgctgccgtcctatcccaggcggagggctaacgctacccttctcttgggccccctgagggcctcagactctggcctgtatcgttgccaagttgtacggggaatcgaagatgagcaagatctggtcccactggaggttacaggcgttgtgttccactatcgatccgctcgcgaccgctacgctttgacgtttgccgaagctcaggaggcatgcagactctcctccgctattatagcggcacccagacacttacaggctgcctttgaggatgggtttgataattgcgacgctggctggctgtcagacagaacggtgcggtaccctataactcaatccaggcctggctgctatggcgacagatcgtcactgcccggagtaagatcctacgggagaaggaaccctcaggagctttacgatgtttattgcttcgctagagaactgggtggggaggtgttttatgtaggccctgctcgaaggctcaccttggcgggcgcccgggctcagtgcaggcgccaaggtgctgcccttgcttccgtgggacagctgcatcttgcatggcatgaaggcctggatcagtgcgatcctggctggctggccgacggctcagtgcgctaccctatccagacacctagaagacgttgcggaggccccgcaccaggcgtacgaactgtctataggtttgctaatcgtacaggatttccctccccagctgagcgatttgatgcctactgctttagagctcatcaccctacatcccaacatggcgacctggagaccccaagcagcggcgatgagggcgagattctgtcggctgaaggaccccccgtgcgggaacttgaaccaaccctcgaagaggaagaggtagttaccccagacttccaagagccacttgtatctagcggagaggaagaaactctcatcttggaggagaaacaagagagccagcagacattgtcaccaacacctggagaccccatgctggcttcctggccaactggagaagtgtggctcagcactgtcgcaccttctccatctgacatgggggctggaactgctgcctctagccacacagaagtagctcctacggatcctatgcctcgacgccggggacgcttcaaagggctgaatggtaggtatttccaacagcaggaacccgaaccaggactccaaggaggaatggaggcctccgcacagccccccaccagcgaagccgctgtgaaccagatggagcctcctttagcaatggctgttactgaaatgttagggtcgggacagagccggtcgccttgggccgacctgaccaatgaggtcgatatgcccggagcaggcagtgccggaggcaagtcttcccccgaaccatggctctggcctcccaccatggtgccgccatcaatctctggccattcaagagcgccggttttggaactagagaaagctgagggacctagtgcacgcccggctactcctgatctcttttggtctcccctggaggcaaccgtttctgcccctagtcctgcgccatgggaggccttcccagtggccacttcgccagatctccctatgatggctatgctcaggggacccaaggaatggatgctgcctcatcctacacctatatctaccgaggcaaaccgggttgaggcccacggggaagccactgcaacagctccacccagccctgcggccgaaaccaaggtatacagtctccctctgtcactgaccccgaccggacaagggggagaggcgatgcctacgactcctgagtcacccagggcggatttcagagagactggtgaaacgagccccgctcaagtgaataaggctgaacattcttccagtagtccttggccttccgtgaatcgaaacgtggctgtaggatttgttcccactgagaccgccacagagccaacggggctgcgcggcatacccggctcagaaagtggagttttcgacactgctgaatcccctacctccggtctgcaggcgacagtggacgaggtccaggatccctggccctccgtgtactctaaggggctggatgcaagcagcccatccgctcctctggggtcccctggggttttcctcgtacccaaggtcactccgaacctggaaccatgggttgcaactgacgaaggacccaccgtaaacccgatggactctacggtgacccccgcaccttcagacgcgtcaggcatttgggaaccagggagccaggtttttgaagaggcagaatcaaccactctcagcccacaggtagctcttgatacaagtatcgtgactcccttgacaaccctcgagcaaggagataaggtgggagtacccgccatgagcaccctcgggtcgtccagttcacagccccatccagaacctgaagaccaggtggagacccagggcaccagcggcgcctccgtgcccccccaccagtcaagccctctcggaaaacccgccgttccaccaggtacaccaactgccgcatcagtgggagaaagcgcatcagtgtccagcggcgagcctacagtcccctgggacccaagctccacactgctacccgttaccctcgggatcgaggacttcgagttagaggtgcttgccgggagccctggcgtggagtctttttgggaagaagtggccagcggcgaggaacccgccctgccaggcaccccgatgaatgcgggggcggaggaagtgcattccgacccttgcgagaacaatccatgcctgcacggggggacatgcaacgcaaacgggactatgtacggctgtagctgtgaccagggttttgctggtgagaattgcgagatagacatagatgactgcctctgctccccgtgcgagaacggaggtacctgtattgatgaggtgaacggcttcgtatgtttatgcctgcctagttacggtggaagtttctgcgagaaggatacggaaggttgcgaccgcggatggcacaaattccaaggccattgctaccgctacttcgcgcaccgacgcgcttgggaagatgctgagaaggattgccgccgacgctccgggcacttaacttctgttcattcccccgaggagcacagctttattaatagtttcggccacgagaatacctggattggcctcaatgatagaatcgtcgaacgggattttcagtggaccgacaacactggcctgcaatttgagaactggagagagaaccagcccgacaacttcttcgccgggggcgaagactgcgttgtcatggtggctcacgagagtggcaggtggaacgacgtgccctgcaattataacctaccctatgtgtgtaaaaagggcaccgtcctttgtggacccccacccgctgttgagaatgcgagcctgataggagcaagaaaagctaagtataatgtccacgctacagtccgctaccagtgcaatgaagggtttgcccagcatcacgtcgcgacaatccgatgcagatccaatggcaagtgggatcggccccaaatcgtttgcactaagccacggcggagtcatcgaatgagaagacaccaccaccaccatcagcaccatcatcagcaccaccatcataaaagtcgaaaggaacgcagaaaacacaagaagcaccccactgaagattgggagaaggatgagggcaacttctgctag

SEQ ID NO: 197009 - DNA, 2319 bp, synthetic construct
  misc_feature 1..2319: note = Description of Artificial Sequence: Synthetic coding sequence
  source 1..2319: mol_type = other DNA
atgcccggcgccggcagcgccggcggcaagagcagccccgagccctggctctggccacccaccatggtccctccatctatctctgggcattcgcgggctcctgtgctcgaattggagaaggctgagggtccttcggctcgtccggccacccctgatttgttctggtcacctttggaggccacagtgtccgccccatcccccgccccctgggaggcattcccggtggcgacttctccggacttgccaatgatggccatgctgcgcggacctaaagaatggatgttgccccacccaacacccatatctactgaggccaatagggttgaggcgcatggcgaggcgactgctactgcccctccgtcccctgctgcggaaacaaaagtctactccttaccactgtcattaacacctactggtcaaggaggagaagctatgcctaccactccagaatccccccgcgccgacttcagggagacgggtgagacctctccagctcaggtgaataaggccgagcacagctccagcagtccttggcccagtgtgaatcggaacgttgccgtgggattcgttccaaccgaaacggcgactgagccaaccggccttcgtggaatccctggttcagagtcaggagtgtttgacaccgctgaatcccctacctctgggttgcaggccaccgtcgatgaagttcaggacccttggcctagcgtgtacagtaagggactggacgcctcaagtcctagcgccccactcggttcacctggcgtgttccttgtgcccaaagtgacgcctaacttggaaccttgggtcgccacggacgaggggccaaccgtcaaccccatggactcaacagtcacacccgcgcctagtgacgcgagcggaatctgggagcctggcagccaggtgtttgaggaggcggaatccacaacgcttagcccccaggtagctcttgatacaagcattgtgacaccccttactactctagagcaaggtgacaaagttggagtcccagcgatgagtacccttggctccagtagctctcagccacaccctgagccggaagaccaggtggagactcaggggaccagtggggcctccgtacccccgcaccagtcatcacctctcggaaaaccagccgtgcctcctggaacccccactgcggccagcgtcggagaatccgccagtgtatcaagcggggagccaacggtgccctgggacccatcttcgacactattgcctgtgactctgggtattgaagacttcgagctggaagtgctggcagggagccctggcgtggaatccttctgggaggaggtggcgtccggagaagagccagccttaccggggactcccatgaatgccggagccgaggaggtccattctgacccatgtgagaataatccttgtctgcatggcgggacatgtaacgccaatgggacgatgtacggctgcagttgcgatcagggctttgccggcgagaactgtgagattgacatagacgattgcctttgcagcccctgcgaaaacggcggcacttgcatagacgaagtcaacggtttcgtatgcttgtgcctgcccagttacggagggtcattttgcgaaaaagacaccgagggctgcgatcgggggtggcacaagttccagggacactgttaccggtattttgcccacagaagagcttgggaggatgcagaaaaggattgcagaagaagaagcggccatcttacatccgtccactcccccgaagaacattccttcattaacagctttggacacgaaaacacatggattggccttaatgacagaattgtagagcgcgactttcagtggaccgacaatacgggcctgcagttcgagaattggagggagaatcagccagacaacttcttcgctggtggcgaggattgcgtggttatggtagcccatgagtcaggtcgctggaacgatgtgccctgtaactataatctaccctacgtctgcaaaaagggcacagtcctctgtgggccgccccccgccgtggagaacgccagcctgattggtgctaggaaggcaaaatataacgtgcacgccactgttcgttatcagtgcaatgaagggttcgcccagcatcatgtggcaaccattcggtgcagatctaacggcaaatgggatcgcccgcagattgtgtgtaccaagcctcggcgctcccatagaatgagaaggcatcaccatcatcaccagcaccaccaccagcaccatcatcacaaatctcgcaaggagagaagaaagcacaaaaagcacccgaccgaagactgggagaaggatgagggcaacttttgttag

SEQ ID NO: 197010 - DNA, 4008 bp, synthetic construct
  misc_feature 1..4008: note = Description of Artificial Sequence: Synthetic coding sequence
  source 1..4008: mol_type = other DNA
cggcccccccgggacgccagcgagctgggcgcccggagccggatgggtgcccctttcgtgtgggcattgggcctgctcatgctccagatgctattatttgtggccggagaacaggggacccaggatattacagacgcctccgaacggggccttcacatgcagaaactggggagtggctctgttcaggcggccctggctgagctggttgccttgccgtgtctgttcacccttcagcccagaccatctgctgctcgggatgcaccacggattaagtggactaaggtgcggactgcctccggacagaggcaggacctgcctatcctggtggccaaagataatgtcgtacgggtggctaagtcctggcaggggagggtatctctaccttcttacccccgaaggcgagccaacgctactctgctgctggggccactccgcgccagcgacagtggtctttatcgctgccaggttgtacgagggatcgaggacgaacaggaccttgtgcccttagaagtgaccggcgtcgtgttccattaccggtcggcccgcgatcgctacgccttgacttttgctgaggcccaagaggcttgtaggcttagttccgcaatcatcgcagcgcctcggcacctgcaagccgccttcgaggatggattcgataattgcgacgccgggtggctttcagaccgtaccgtgaggtaccctataacacagagtcgccccggctgttatggtgatcgtagctcgttgccgggggttagatcttacgggcgaagaaacccacaggagctttacgacgtgtactgttttgcccgggaactgggcggcgaggttttttacgtcgggccggcaagaaggttaactctagccggtgcaagagcccagtgtcggcggcagggcgccgctctagcttcagtgggtcagctccaccttgcctggcacgagggcttggaccagtgcgaccctggctggctcgctgatggctctgtaaggtacccaattcagaccccgcgccggagatgcgggggccctgcccccggtgtgagaaccgtttatcgatttgcaaacaggacaggatttccgtctcctgccgagagatttgacgcatactgctttcgggcacaccatcctaccagtcagcacggagatctagagacgcctagctcaggggatgagggagagatactgtctgcagaaggacctcctgtgcgcgaactcgaacccaccctggaggaagaagaggtggtcacccccgactttcaggagcctttagtaagctcaggggaggaggaaacattgatcttggaagagaaacaggaaagccagcagacattgtcacccacaccgggagatcccatgctcgctagttggcccacaggcgaggtgtggctgtctaccgtggcaccgagtccgagtgacatgggggctggtaccgcagcaagttctcacactgaggtggcgcccaccgatcctatgccaaggagacggggcaggttcaaaggcctaaacgggcgctattttcagcaacaagagccggaacctggcctccagggaggaatggaagcaagcgcccaaccgcctacgtcagaggccgcagtcaatcagatggagccaccactggccatggccgtgactgagatgctcggcagcggccaatccaggtccccttgggcagacctgacaaatgaagtcgatatgcctggggcaggctccgcaggaggtaaaagtagtcctgaaccttggttgtggccacctaccatggtccctccgagcatttcaggtcattcacgagcacctgttctggagctcgagaaagccgaggggccgagtgcacgtcccgcaactccagatttattctggagccctcttgaggcaaccgtgtccgcgccgagccccgctccctgggaggcattccccgttgctacgtcccccgacctcccaatgatggccatgctgagaggtcctaaggaatggatgctgccccatcctacccccatttcaactgaggcaaatcgagtagaagctcatggagaggccaccgcaacggctcccccatcccccgccgcagagacaaaggtttattccctgcctcttagtctcacccctaccggccagggaggtgaggcgatgccaacgactccagaatctccgcgcgcagattttagagaaactggggagacgtcaccagctcaggtgaataaggccgaacatagcagctcctctccatggccatccgtaaataggaacgtggcagtgggattcgtcccaaccgagacggcaacagaaccgacaggcctcagaggtatccccggaagcgaaagtggggtgttcgataccgcagagtctccaacatccggtctccaggctactgtcgatgaagtccaggacccctggcccagtgtctactcgaaggggctggatgcatctagtcctagcgccccactagggtccccgggcgtcttcctggtcccaaaagttacacctaacctcgaaccttgggttgccacggacgaaggaccaactgtgaaccccatggattctacagtgacccctgccccaagcgatgctagcgggatctgggagcccgggtctcaagtattcgaggaagcagaatctacaacattgtctccccaggtggctctggacacctcgattgtgaccccactgacaaccctagagcagggtgacaaggtgggggttcccgccatgagcacactcgggagctcctccagccagcctcatcctgagcccgaagaccaggtggaaacccaggggactagcggcgccagcgtgcctccgcatcagtcgtctcccctggggaagccagccgtaccccccggaacgccaacagctgcttccgtaggcgagtctgctagtgtcagctctggtgaacctactgtcccatgggacccgtcaagcactctgttgccggtgaccttggggattgaagatttcgagctagaggtgctggcaggatcccccggggtagaaagcttttgggaggaggtggcctccggggaagagcctgcgctgccaggcacacccatgaatgcaggagcagaggaagtgcactctgatccgtgcgagaacaatccctgtcttcatggcggcacttgcaacgcaaatgggacaatgtatgggtgctcttgcgatcaaggctttgcgggggaaaactgcgagattgatatcgacgactgcctctgcagtccttgtgagaacgggggtacttgcatcgacgaggtgaatggtttcgtttgcctttgccttccaagctatggcgggagcttttgtgagaaagataccgagggctgtgacaggggatggcataagtttcagggtcattgttaccgatattttgcccacaggagagcctgggaagacgctgagaaggattgcaggaggcgctcagggcacctcacctccgtacacagcccagaagagcactcattcatcaactcttttggccatgagaacacatggatcgggctgaacgatagaatcgttgagagagattttcaatggacagacaatactggcctccagtttgagaattggcgggaaaaccaacccgataatttcttcgcaggtggagaggactgcgttgtgatggtagcacacgagtccggaaggtggaacgatgtgccatgcaactataacttgccttatgtatgtaagaaaggcaccgtgctgtgcggcccgcctcccgctgtcgagaacgcgagtctcattggggctagaaaagctaaatacaatgtgcatgctacagtgaggtatcaatgcaatgagggatttgctcaacaccacgtcgctacaatacgctgtaggagtaacggcaaatgggacagacctcagatcgtttgcaccaaacctagaagatcgcacaggatgaggcgccatcatcaccatcaccaacatcatcaccaacatcaccatcacaagtctagaaaggaacggcggaagcataagaaacacccaactgaggactgggaaaaagacgaaggcaacttctgctag

SEQ ID NO: 197011 - DNA, 2190 bp, synthetic construct
  misc_feature 1..2190: note = Description of Artificial Sequence: Synthetic coding sequence
  source 1..2190: mol_type = other DNA
atgagctgctgcgacctggccgccgccggccagctgggcaaggcctctataatggcctcagattgcgagccggcccttaatcaggcggaagggcgcaatcctaccctcgagaggtatctgggcgcgttgcgggaagccaagaacgacagtgagcagtttgccgctctactgttagtgacaaaagccgtgaaggcaggtgacatcgacgctaagaccaggagacgcatctttgatgccgtaggttttacatttcctaaccggctcctcaccactaaagaagctcctgatggatgtcctgaccacgtcctccgcgccctcggcgtggccctactggcttgcttttgctctgacccagagttagccgcccatccacaggtcctgaataagatcccaatactatctacatttttgactgccagaggcgacccagatgacgcagcccgaaggagcatgatagacgacacctatcagtgtctgacggcagtggcaggcacccctagggggccccgccatctgatcgcaggggggaccgtttcagccctgtgccaggcatacttaggacatggctatggatttgatcaggctctcgctcttctggttgggctgctggcggcagccgagacccagtgctggaaggaggctgagcctgacctgctagcagtgctgagaggactgagtgaagattttcagaaagcggaagatgcttccaagttcgagctctgtcagcttctgcctctgtttttgccgccaactactgtgcctcctgagtgttaccgtgatcttcaagcggggctggcgcgcattcttggtagcaaactgagctcatggcagcgaaacccagcccttaagctggctgcccgtttggctcatgcatgtggatccgattggatacccgccggatccagcgggtcaaaatttctagccctcttagtgaatctcgcctgcgtagaggtgagactggctttagaggagactggcaccgaagtgaaagaagatgttgtaacagcttgttatgcactcatggagctcgggatccaggagtgtactcggtgtgaacaaagtttgctgaaggaacctcagaaggttcagctggtgagtgtaatgaaagaggctattggggccgtgattcattatcttctgcaggtcggctccgaaaaacaaaaagagccttttgtgtttgctagcgtcagaattctgggcgcatggcttgcggaggagacatctagccttaggaaagaggtctgtcagcttctccctttcttggtgcgatatgctaagactttgtacgaggaagccgaggaggcaaacgaccttagtcagcaggtagcgaatctggccatctcgcccacaacacccggccctacatggcccggcgatgccctgcgtcttctgctgcctggttggtgccacctgactgtggaagacgggccccgggagatactcataaaggaaggcgctccgagcctgctctgtaaatatttcctgcaacaatgggagctgacctcacccggtcacgacactagcgtgcttccagacagtgtggagattgggcttcagacctgctgtcacatttttctcaacttggtcgtgactgctcctgggttaatcaaaagagacgcctgcttcacttctctcatgaatactctgatgacctccctccctgccctcgtacagcagcagggccgcctgttgcttgcagcaaacgtagccaccctgggtttgttaatggctcgcttgcttagcacctccccagcccttcaggggacaccagcctccagaggctttttcgccgcagcaatactgtttctttcccagagccacgtggcccgggccacgccaggaagtgatcaggcagttctcgcgctgagtcccgaatacgaaggcatatgggcagatctgcaggagctgtggttcctcgggatgcaggccttcacaggatgtgtgcccttactaccatggctggcgccagctgccttgaggagtaggtggccgcaggaactcctgcagttgctcggcagcgtttccccgaactccgtgaaacctgaaatggtggccgcctaccagggcgtgctagtggagctcgctcgtgccaaccggctgtgtcgcgaagcgatgaggttgcaggccggggaagaaaccgcctcacattacaggatggcagctctggaacagtgtctgtctgagccgtag

SEQ ID NO: 197012 - DNA, 2190 bp, synthetic construct
  misc_feature 1..2190: note = Description of Artificial Sequence: Synthetic coding sequence
  source 1..2190: mol_type = other DNA
atgagctgctgcgacctggccgccgccggccagctgggcaaggcctctatcatggcaagcgactgcgaacccgccttgaaccaggcagaaggacggaaccctaccctggagaggtacctcggtgctctgcgggaagctaaaaatgattcagaacagttcgccgccctcctcctcgtgaccaaggccgtgaaggccggggacatcgatgctaagaccagaagacgcatatttgatgcagttggattcacattcccaaaccggctgcttacgaccaaggaggccccagacggctgtcccgatcatgtgctgcgcgcgctgggggtggctctgctagcctgtttctgttcagacccagaactcgccgcacatccgcaggtgctaaacaaaatacctatcttgagtacgttcttgacagctcggggggaccccgatgacgcagcccggcggtccatgattgatgacacctatcagtgcctgacagccgtggctgggactcccaggggcccccgacacctcatcgccggggggacggtttccgctttgtgccaggcttacctgggtcatggctatggctttgaccaagctctggccttgctcgtgggccttctggccgcggctgagacccagtgctggaaggaagcagagcctgatctgcttgccgtgctgagaggcttgtcagaggactttcaaaaagccgaggatgcctctaagtttgaactctgtcagcttttgcccttatttttaccccccacgactgtaccacctgagtgctatagggacctgcaagccggccttgcacgcattttggggagcaagctttccagttggcagcggaatccagctcttaagctggccgcccggcttgctcacgcgtgtggttctgactggattccagccgggagcagcggcagtaaatttttagccctgctggtaaacctggcttgcgtggaggtccgcctggccttggaagaaactggtaccgaagttaaagaagatgtggtcacagcttgttacgcactgatggagctgggaatacaggaatgtacacggtgcgaacaatcattacttaaagagcctcaaaaagtgcagttggtaagcgtgatgaaggaggccatcggggcagtcatccattaccttctccaggtgggcagcgaaaaacaaaaggagccatttgtctttgcgtcggtccggatattgggggcttggctggcggaggaaacgtcaagccttcggaaagaggtgtgtcagttgctgccttttctcgtgcgctatgctaaaacgttgtacgaggaagctgaggaggctaacgacctctcacagcaagtcgccaatctagctatcagccctaccactcctggccctacctggccaggagacgccctgcggttacttctgccgggctggtgtcacctgacggtggaggacggtccaagagagattctgataaaggagggagccccaagcctattgtgcaagtacttcctccagcagtgggagctcaccagcccagggcatgatacatcagtcctcccagatagtgtggaaattgggcttcagacatgctgccacatcttcttgaacttggtggtcaccgcccccggcttgatcaaaagagacgcttgttttacttctctcatgaacaccctgatgactagcctgccagcactggtccagcagcagggaaggcttcttctcgccgccaatgtggccaccctcggcctgttgatggcccgcctcctctccacatcccccgctctgcaagggacaccagcttctagaggcttctttgcagctgctatactgtttctgagccagtcacatgttgcccgggccacccctggtagcgaccaggcagtgctggcactgtcaccagaatacgagggcatctgggcagatctccaggaactctggtttcttggcatgcaggcctttaccgggtgcgtcccgcttctcccatggctcgcccctgcggctttgcgctctcgctggcctcaggaactactccagctcctcggttccgtcagccccaacagtgttaaacccgaaatggtggccgcttaccagggcgtgcttgtggaactggcaagagccaatagactctgtcgcgaggcaatgagactccaagccggcgaagagactgccagccactaccgcatggccgctttggaacagtgtctatccgagccttag

SEQ ID NO: 197013 - DNA, 2139 bp, synthetic construct
  misc_feature 1..2139: note = Description of Artificial Sequence: Synthetic coding sequence
  source 1..2139: mol_type = other DNA
atggccagcgactgcgagcccgccctgaaccaggccgagggccggaaccccaccttggagcggtacctgggggctctccgcgaagctaaaaacgactccgagcaattcgcggccctgctcctagtcacaaaagccgtgaaggcgggggacatagacgccaagactagacgcagaatatttgacgccgtgggttttacctttcctaaccgtctgctgaccaccaaagaggcccctgacggctgtccagatcatgtgctccgggcattgggagtggcactgctcgcatgtttctgtagcgatcctgagctggctgctcacccacaggtgttgaacaaaataccaattctgtctaccttcttaacggcacgcggcgaccctgatgatgccgctcgacgctccatgattgatgatacataccaatgcctgactgcagtggcagggactcctcggggcccaagacatctgattgcagggggaactgtgagtgccctgtgccaggcttacctgggccacgggtacggattcgaccaggctttggccttgctggtaggcttacttgctgccgctgaaactcagtgctggaaggaggcggagccagacttactcgctgtactgcgcggcctctcagaggattttcaaaaagccgaggatgccagtaagttcgagctctgccaactgcttcctctgttcctgcctcctaccactgttccacctgaatgttatagggatttacaggccggcctggctcgcattctggggtcgaagctcagctcctggcaaaggaaccccgctctgaagctcgcagcccgcctcgctcacgcctgcggcagtgactggattcctgctggatccagcggttctaagttccttgccctcctcgtaaatctcgcgtgtgtggaagtgaggctggcccttgaggagacagggacagaagtgaaggaggacgtcgtgaccgcctgttacgctctcatggaattgggaatccaggagtgtacacgctgtgaacaaagtctgttgaaggaacctcagaaggttcagctagtttcagtgatgaaagaggcaatcggagctgtgattcattatctgctgcaagttggcagcgagaagcagaaagagccttttgtcttcgcatcggtgcgcatcctcggagcctggctcgccgaggagacttccagtctgcggaaggaagtgtgtcagctgctccccttcctggtccgctatgctaaaacactttacgaggaggctgaagaagcaaatgatctatctcagcaggtagccaatttggcaataagccccaccactccagggccgacatggccgggtgatgccctgaggctgctgctccctggttggtgccacctcacggttgaagacgggccaagagagatactcattaaagagggcgctccctctctgttgtgcaaatactttctgcagcagtgggagctaacgtcccctgggcacgacacaagtgtgctgcctgattctgtggagataggcttgcagacctgctgccacatcttcctgaatctggtcgtcacagcgccaggactcataaagagagatgcctgtttcaccagtctgatgaatacgctgatgacttcgctaccagccctggtacagcagcagggaagacttttactggccgcgaacgtggccaccctgggtctccttatggcccgtctgctttcgacaagccctgccttgcagggcacgccggccagtaggggtttcttcgccgcagccatcctctttctgtcccagtctcatgtggccagggccactccaggttcagaccaggccgtacttgcactgagccctgaatatgagggtatctgggccgacctccaagaactgtggttcttgggcatgcaggcctttaccggttgcgttccactgcttccatggctggcgcccgctgcactccgttctcggtggccccaggaacttctccagttgctgggttccgtgtctcccaatagcgttaagcccgagatggtcgcagcctaccagggagtcctggttgagttagcgagagcaaataggttgtgcagagaggccatgcgtctgcaggctggagaagaaacagccagtcactataggatggcggccctcgagcagtgcttgtctgaaccctag

SEQ ID NO: 197014 - DNA, 531 bp, synthetic construct
  misc_feature 1..531: note = Description of Artificial Sequence: Synthetic coding sequence
  source 1..531: mol_type = other DNA
atgccccacagcttccggtacctggccgccctgcagggcacccccgctagccgaggtttcttcgcagcagccattctgtttctgtctcagagccacgtggctcgtgctacacccgggagcgaccaggcagtactggctctgtcccctgagtatgagggcatatgggccgatcttcaggaattgtggtttctaggcatgcaggccttcaccggctgcgtccctctgcttccttggctggcccctgccgcccttagatctcgctggcctcaagaactgctccagttgctgggttctcaacctcagttatgccaggcccgagacgggggacgcctgagtggatgtcccgggggggctggagccggccagcccgctgtgccaggcggtcacgaagccgccggagggaggggagatgggcagccactgccccatggctgtctcggcgcagtgccggttcgggctctgagaggagtacaccgtgggcagacccagggacgtgcagaaagggaggggggtagacggcatctcccatag

SEQ ID NO: 197015 - DNA, 582 bp, synthetic construct
  misc_feature 1..582: note = Description of Artificial Sequence: Synthetic coding sequence
  source 1..582: mol_type = other DNA
tgaagcagcctgcggaaggaggtgtgccagctgctgcccttcctggttaggtacgctaagacattgtacgaggaagcagaagaggccaacgacctgagtcagcaagttgcaaacttggctatctccccgacaaccccaggaccaacgtggcctggagacgctttgagactgctgctgcctggctggtgccacctgactgtggaagatggcccgagggaaatactgattaaggagggggctccgtctcttctctgtaagtactttctgcagcagtgggagctgacatccccgggacatgataccagcgttttacccgactccgttgagatcggtctccagacctgttgtcacattttcctgaacttagtcgtgacggctcccggactgattaaaagggatgcttgcttcacttctctcatgaataccctgatgacctcactgcctgcactcgtgcagcaacagggcagactgctgctggctgccaacgtggctacgctaggtctgctgatggcccgcttgctgtccacctcccctggctccatatctagccagcttcccggtgccgagcatatgccatgttag

SEQ ID NO: 197016 - DNA, 735 bp, synthetic construct
  misc_feature 1..735: note = Description of Artificial Sequence: Synthetic coding sequence
  source 1..735: mol_type = other DNA
atggccagcgactgcgagcccgccctgaaccaggccgagggccggaatccgacactggaacgttatctaggcgccctccgggaggccaagaatgattctgagcagtttgccgctctgctgctggtcaccaaagctgttaaggccggcgatatcgacgctaagacccgcagaagaatttttgacgccgtgggcttcacatttcccaaccgtctgttgaccactaaggaggcaccagacggctgcccagatcatgtcctgcgcgccttaggagtggctctgctcgcctgtttttgtagcgacccagagcttgccgcacatcctcaagtgttgaacaagattccaatactgtccactttcctgaccgctagaggagacccagacgacgctgcccgccgatccatgatcgacgatacttatcaatgtttgacggcagtcgccggaacccctagaggaccccgccatctgatcgctggagggacagtgagcgcgctctgtcaggcctatctgggtcatggctatggcttcgaccaagcgctggcactactcgtgggcttgctcgctgcagccgagacacagtgttggaaagaggccgaaccggatctgctggccgtgcttaggggactgtccgaagattttcagaaggccgaagatgcctccaagttcgaactgtgccagcttctgccactgtttctgcccccaaccacagtacctcctgaatgttaccgcgacctgtag

SEQ ID NO: 197017 - DNA, 1791 bp, synthetic construct
  misc_feature 1..1791: note = Description of Artificial Sequence: Synthetic coding sequence
  source 1..1791: mol_type = other DNA
atggagcccgagctggccgcccagaagcagccccggccccggcggagatctaggagggccagcggactgtccactgagggtgctaccggtccctccgctgatacatcaggctctgagttagatggccgatgctcacttcgcagaggctctagcttcacgttcttgacccctggccccaactgggacttcacattgaagaggaagcgtagggagaaagacgatgatgtcgtttccctgagctcgctggatttgaaggagccttctaacaagcgtgtccggcctcttgcacgtgtgacctctctggcaaatctgatctcaccagtccggaacggagccgtgcgtcgctttgggcagacaatacagagtttcaccctgcgcggcgaccaccgtagccctgcaagtgcccagaaattttcctctcgatctaccgttcccactcccgccaaaagaaggagtagcgcgctttggtccgaaatgctggacatcacaatgaaggaaagcctgaccactcgtgaaatacggaggcaggaggccatctacgagatgagcaggggggaacaggatctgatcgaagatctgaagctagctaggaaggcttatcacgaccccatgctaaaactaagcattatgagcgaggaagagcttacacacatcttcggcgacctcgatagttatatccctctgcatgaggacctcctgactagaataggtgaggcaaccaagcctgacgggacggtggaacaaattggccacattctggtcagttggttacctcggctgaatgcatatcgcggttactgctcgaatcagctggctgcaaaggccctactcgatcagaagaaacaggacccacgggtgcaggacttcctgcagcgatgcctggagagcccttttagtcggaaactggacctgtggtcattcctcgatatccccaggtcccgattggtgaaatatccactgctgctcaaggagatattgaaacacacccccaaagagcaccctgacgtgcagctcctggaggacgcgattcttatcatccaaggtgtgttgtccgatatcaacctgaagaaaggggagagtgagtgccagtattacattgataaattagaatatctggatgagaagcagagggatcctagaatcgaagcatctaaggtgctgttgtgccatggggaactgcggtctaagagtggccacaaactttacatcttcctgttccaggacatccttgtgcttacacgccccgtgactaggaacgagcggcattcttaccaggtgtatagacagcccattcccgtgcaggaactggttctcgaggaccttcaggatggagacgtcagaatgggcgggagttttaggggagcattctccaacagtgaaaaggcaaagaacatcttcaggattcgctttcacgaccccagccctgcccaatcccatacactgcaagctaatgacgtttttcacaaacagcagtggtttaattgcatccgggccgctatcgcaccatttcaatcggctggttccccccctgagttgcaaggtctacccgaactgcacgaggagtgcgaaggtaaccacccttcagcgagaaaattaacagcgcagcggagagcgtctaccgtctcttccgtaacccaggtggaggttgacgagaatgcctatcggtgtggatcagggatgcaaatggccgaagactctaaatcactaaagacccatcagacacagcccggtatcaggagagctagggacaaggctttgtccggcggaaaacgcaaggagactctggtgtag

SEQ ID NO: 197018 - DNA, 483 bp, synthetic construct
  misc_feature 1..483: note = Description of Artificial Sequence: Synthetic coding sequence
  source 1..483: mol_type = other DNA
atggtggcccacgacgagaccggcggcctgctgcccatcaagcggactattagggtgctggacgtcaacaaccagtcctttcgggaacaggaggaactcacacatatttttggtgacctggactcatacattccgttgcatgaggacctcctgactcgtatcggcgaggctacaaagcctgacggaacagtggagcaaatagggcatattctagttagctggttgccaagactcaatgcgtatcgagggtattgctcaaaccagctcgcggctaaggctctgctggatcagaagaagcaagacccacgggtgcaggactttctacaacggtgtctagaaagcccatttagtcgcaaacttgacctgtggtctttcttggatatccccaggagcagattggtgaagtatccgctgctgcttaaagaaatcctaaagcacacgccaaaggaacatccagacgtgcaattgctggaggacgcctag

SEQ ID NO: 197019 - DNA, 1629 bp, synthetic construct
  misc_feature 1..1629: note = Description of Artificial Sequence: Synthetic coding sequence
  source 1..1629: mol_type = other DNA
atggtggcccacgacgagaccggcggcctgctgcccatcaagcggactattcgtgttctcgatgtcaataaccagagtttccgggagcaggaagagccatctaataagagggtgagacctctggcgagggtcacatctctggctaatctgatctcgcctgtgagaaacggtgccgtgcgccgattcggtcagacaatccagtccttcacattgagaggagaccaccggtcaccggcgagcgcccagaaattttcttcccgctcaactgttccaacccccgctaaacggagatcctcggccctctggagtgagatgctcgacatcaccatgaaagaatccctgacaactcgcgagattcggcgacaggaggccatctacgaaatgtcccgaggcgagcaggatcttatcgaggatcttaagctggccaggaaggcttatcatgatccgatgcttaagctgtctatcatgagcgaggaggaattaacacatatatttggtgatcttgacagctatatcccacttcatgaagacctgctgactcgcattggtgaagcaaccaagccagacggcacagtcgaacagatcgggcacatccttgttagttggctgccaaggttgaatgcttatagagggtactgcagcaatcagctcgctgccaaggcgctgctggaccaaaaaaaacaggaccctcgcgtacaggatttcctgcaaaggtgcttggagagcccatttagtagaaagctcgatctctggtccttccttgatatccccaggtcaagactcgtcaagtacccacttcttctgaaagaaatcctgaagcacacccccaaggaacacccggacgtgcaacttttagaggacgctatcctgatcatccaaggggttctatcagatattaatctcaagaaaggggagtccgagtgtcaatactatatcgacaagctagaatacttagacgagaagcagcgggaccctaggatagaggcttcaaaagtgttgctctgccacggtgagctaaggagcaaaagtgggcacaaactctacatatttctgttccaggatatccttgtgctgacgcgcccagtaacaaggaacgagagacacagttatcaggtgtacagacagccaatacctgtgcaggaattagttcttgaagatcttcaagatggagacgtcaggatggggggatcttttagaggagctttcagtaactccgagaaggccaaaaatatttttaggatccgttttcatgaccccagtcctgcccagtcccacacattgcaggctaacgatgttttccataaacaacagtggttcaactgtattcgcgctgcaatcgctccttttcaaagtgctggtagtccccctgaactgcaaggtctgccagagctgcacgaagaatgtgagggcaaccaccccagcgcaagaaaactaaccgcgcagcggagggctagcactgtttcctcagtaactcaggtggaagttgacgagaacgcctatagatgtggctccggcatgcaaatggcagaggattccaagagcctgaaaacgcaccaaacccagcctggtattaggcgtgcaagggacaaggctttgtctggcggtaagagaaaagagaccttggtctag

SEQ ID NO: 197020 - DNA, 483 bp, synthetic construct
  misc_feature 1..483: note = Description of Artificial Sequence: Synthetic coding sequence
  source 1..483: mol_type = other DNA
atggtggcccacgacgagaccggcggcctgctgcccatcaagcggacaataagagtcttggacgttaacaatcaaagctttagggagcaagaggagttaacccacatcttcggagatctggacagctatatacccctacacgaagatctcttgactagaattggggaagctaccaagccagatggcacagtcgaacagatcggacacatacttgtgtcctggttgcctcgtctgaacgcgtacagagggtattgttctaatcagcttgctgcaaaggccttgctggaccagaagaaacaggacccacgagttcaagattttctgcagagatgtttggagagcccattctcacgcaagctcgatttgtggagcttcctcgacatccctaggtcccgccttgtgaagtaccccctgcttctgaaggagatcttgaagcatacgccgaaagaacatcctgacgtgcaactgctggaggatgcatag

SEQ ID NO: 197021 - DNA, 1248 bp, synthetic construct
  misc_feature 1..1248: note = Description of Artificial Sequence: Synthetic coding sequence
  source 1..1248: mol_type = other DNA
atgagccggggcgagcaggacctgatcgaggacctgaagctggccagaaaagcttaccatgaccccatgctcaaactgtctatcatgtcagaagaggagctgacacacatctttggggatctggacagctacattccacttcacgaagacctgctgacgagaataggagaagccacaaagcccgacgggactgtagagcagatcggccatatcctcgttagctggctgccacgactcaacgcttaccggggctattgcagcaatcagctagccgcaaaagccttactcgatcaaaagaagcaggacccaagagttcaggatttcctgcagagatgcctggagtctccttttagccggaaattagacttgtggtcgttcttagacatacctaggtcccgcctggtcaagtatccccttctgctgaaggagatcctaaaacacaccccaaaggagcatccagatgtgcaattgctggaggacgcgatccttattattcagggagtcctctctgacatcaacttaaaaaagggtgaaagtgaatgccaatactatatcgacaagctcgagtacctcgacgagaaacaaagagaccctcgcatcgaggcctctaaggtcctgctctgccatggagaactgagatctaaaagtggacataaattgtacatttttttgtttcaggacatcctcgtgctcacccgtccagttaccagaaacgaacgacattcttatcaagtctatcgtcaacctattccagtccaagagctagtcttagaggacctgcaggacggagatgtccgtatgggcggatcatttcgcggggcttttagtaactctgagaaggcaaagaacatcttccgtatccgctttcacgaccctagccctgcccagagccacaccctacaggccaatgacgtgtttcataaacagcaatggtttaattgcattcgggctgccattgctccctttcaatccgccggaagtccacccgaacttcagggcctccccgagctccacgaggaatgtgagggcaaccacccgagtgctaggaaactcaccgcacagagacgcgcgtcaactgtatcctccgtcacacaagttgaagtggatgaaaacgcttaccggtgcggatctggaatgcagatggctgaggacagcaaatccttgaagactcatcagacgcagccagggatcaggcgcgcgcgcgacaaagctctcagcgggggaaaacgaaaggagacactcgtgtag

SEQ ID NO: 197022 - DNA, 3063 bp, synthetic construct
  misc_feature 1..3063: note = Description of Artificial Sequence: Synthetic coding sequence
  source 1..3063: mol_type = other DNA
atgatgagcttcggcggcgccgacgccctgctgggcgcccccttcgctcccttgcatggcgggggaagtcttcattatgccctggcgaggaaagggggggcaggcggcacacgctcagctgcaggcagctctagcgggtttcactcctggacacgtactagcgtatctagcgtgagcgcaagccctagtcggttcaggggcgccggagcggcttcctcgaccgattctctcgacaccttgagtaatggaccagaagggtgcatggtcgcggtcgcgacctcccgctccgaaaaggagcaactccaggctcttaacgaccggttcgccggttacatcgataaggtgcggcagcttgaggcccacaacagatcactggaaggtgaggcggctgcccttcgacagcaacaagccggacggtcagccatgggagaactgtatgaaagggaagtgagagaaatgagaggagccgtgttacgactgggggccgccaggggccagctgcgactggaacaggagcacctcttggaggacatcgcacacgtgcgtcagagactggacgacgaagctcgccaacgtgaggaggctgaggcagcggccagggcactggctagatttgctcaggaagccgaggctgccagggttgacctacagaaaaaagctcaggccctgcaggaagagtgtgggtacctgcgccgacatcaccaggaagaggtcggggagctgctgggccagatacagggttcaggggccgctcaggctcagatgcaagctgaaacgcgggatgctctcaagtgtgacgtcacctcagcgctgcgtgagataagagcccagcttgagggacacgccgtccaatctactttgcagtcagaagaatggttccgggtacggctggacaggctatctgaggcagctaaagtgaatacagacgcaatgcgctcagcacaggaggaaatcacagagtatcgcagacaattgcaggccagaaccactgagttggaagctctgaagtcaacgaaagacagtctggagaggcaaagatctgagctggaggaccggcaccaggccgacattgcctcctaccaggaagccatccagcaacttgacgcagagctcagaaacactaaatgggagatggccgcacagctgcgagagtaccaagacctgcttaatgttaagatggccctcgacatcgagatagctgcatatcggaaactgcttgagggtgaagaatgccggatagggttcggacctataccgtttagtctgccagaaggccttcctaaaattccctcagtaagcacacatattaaggttaagagcgaggagaaaattaaggtggtggagaagtctgaaaaagagacagttattgtcgaagagcaaaccgaagaaacccaggtgaccgaggaggtgacagaggaggaggagaaggaagctaaggaagaagaaggcaaagaggaggaaggcggcgaagaggaggaagctgaaggcggggaagaggagaccaagtcccctcccgccgaggaggccgcctcacctgaaaaagaggcaaaatccccagtaaaagaggaggctaagagccccgccgaagccaagtcgccagagaaggaggaggcaaagagccctgccgaagttaagagtcctgaaaaggcgaagtccccagcaaaggaggaagccaagtccccgccggaagctaagagtcccgaaaaggaagaggcaaagtctcctgccgaagtgaagtccccggagaaggcaaagtcccccgccaaagaggaggccaagagccctgcagaagccaaatcccccgagaaagccaaaagccccgtcaaagaagaggcgaagtcccccgcggaggctaagtcacctgtgaaagaggaagccaagagccccgccgaggtcaagtccccggaaaaggcaaagtcccccacaaaggaggaggctaaatcccccgagaaggctaaaagccctgagaaggaggaggctaaaagcccggagaaagccaaatctccggtcaaggccgaggcaaagagcccagaaaaagccaagagcccggtgaaggctgaagctaaatcacctgagaaagctaaatctcccgttaaggaggaggcgaaatctccagaaaaagcgaaatctcctgttaaagaagaagcaaaatcacccgagaaggccaagtctcccgtgaaagaagaggccaagaccccagagaaggccaaatctccagtgaaggaggaggcaaaatcccctgaaaaggccaaatctcccgaaaaggctaagacactcgacgtcaagagcccagaagccaaaacaccagccaaggaggaggctcgttctcccgcagacaaattccccgagaaagccaagagtccagtcaaagaagaagttaagtctcccgagaaagcaaagtcaccgctgaaggaagacgccaaggcccctgaaaaagagatccccaagaaagaggaggtgaagtctcctgttaaggaggaggagaagccccaggaagtcaaagtgaaagaaccccccaaaaaagccgaggaggagaaggcgcctgcgacacctaagacagaagagaaaaaggatagcaagaaagaagaagccccgaagaaagaagcccccaaacccaaagtggaggagaaaaaagagcctgctgtggagaagccaaaggaatcgaaggtggaagcgaaaaaagaggaagctgaagacaaaaagaaagtgcccacaccggagaaagaagccccggcgaaggtcgaggtcaaggaggacgctaaacccaaggagaagacggaagttgccaaaaaagaaccagacgatgccaaagctaaagaaccaagcaaacccgccgagaaaaaagaagccgccccagagaagaaggacactaaggaggaaaaggccaagaagcctgaggaaaagcctaagactgaagccaaagctaaagaagacgacaaaaccctctccaaagagccatctaagcctaaagccgagaaggcagaaaagagcagcagtacagaccagaaggactctaaacctcctgagaaggctacggaagacaaagctgctaagggcaaatag

SEQ ID NO: 197023 - DNA, 2916 bp, synthetic construct
  misc_feature 1..2916: note = Description of Artificial Sequence: Synthetic coding sequence
  source 1..2916: mol_type = other DNA
atgatgagcttcggcggcgccgacgccctgctgggcgcccccttcgctcccctccatggagggggatcactccactatgcacttgctaggaaaggcggtgctggtgggaccagaagcgccgcaggctcgtccagcgggttccactcttggacaaggacctccgtctcctccgtcagtgcctccccgtctcgttttcgaggcgctggagctgcctcttcaactgactccctggataccctgtccaacggacctgagggctgcatggttgcagtcgcgacgtcgcgaagcgaaaaggaacagctgcaggctttaaacgatcgatttgctggatacattgataaggtgaggcagctggaggcccataatcgatctctggagggtgaagcggccgcactccgacagcagcaggctggaaggagtgccatgggggaactgtacgaacgagaggtgagagaaatgcgcggagccgtcttgcggctaggggccgccagagggcagttacggctggagcaagaacacctcttggaggatatcgcgcacgtacggcagagactggacgacgaggcccggcaaagggaagaggcggaggccgcagccagagcactggccagattcgcacaggaggccgaagctgcaagagtcgatctgcagaagaaggcccaggccctgcaagaggagtgcggatatcttcgaagacatcaccaggaagaggtcggcgaactccttggacaaattcaggggtctggcgctgcccaagcccagatgcaggccgagacgcgagatgcacttaaatgcgatgtgacttccgctctgcgggagatacgggcccagttggagggccatgcagtccagtcgactttgcagagcgaggaatggttcagggttaggcttgatagactgtctgaagcagctaaggtgaacactgacgccatgcggtccgctcaggaggaaattacagagtatcgcagacaactccaggcacgcaccactgagcttgaggccctgaagagcactaaggattctctggaaagacaaaggagcgaactagaagaccggcatcaggcggatatcgcaagttatcaggaagccatccagcaactggatgccgaacttcgaaacaccaaatgggaaatggctgcccaactgagagagtaccaagatctcctgaacgtgaaaatggctcttgacattgaaattgccgcctaccggaagttactcgagggcgaagagtgtaggatcgggttcggccccatacctttcagcctgcctgaggggttgcccaaaataccatccgtcagtacccatatcaaggtcaagtcagaggaaaagatcaaggttgtggaaaaatctgagaaagagacagttattgtggaggagcagacagaagaaacacaggtgacagaggaggtgactgaggaggaggagaaagaagctaaggaagaggagggtaaagaagaggagggaggcgaagaagaggaagcagaagggggtgaggaggagactaaatcccctcccgccgaagaagctgcatcccccgagaaagaggcgaaatcacccgtgaaagaggaggccaaaagccccgcggaagcaaaatcccccgaaaaggaggaggccaaaagcccagcagaagtgaagtcgcccgaaaaggctaagagtcctgctaaagaggaggccaaatcccctccggaggcaaaatcccctgagaaggaggaagccaaatctcccgcagaggtcaaaagccctgaaaaggccaaaagccccgcaaaggaagaggccaagtccccagcagaggctaagtccccggagaaagctaagtcgccagttaaggaagaagctaaaagtcccgcggaggcaaagagtcccgttaaagaggaagctaagagtccggcggaagttaaaagccccgagaaagcaaagagccccaccaaagaagaagctaagagtccggaaaaagccaagtctcctgagaaggaggaagccaaatcccctgaaaaagccaagtcacctgttaaggccgaagccaagtctccagagaaagctaaatcacccgtaaaggcagaagccaaaagccctgaaaaggccaaatccccagtgaaggaagaagcaaaatcacctgaaaaagctaagagcccagttaaggaagaggcaaagagtcccgaaaaagctaaaagtcctgttaaggaggaagcgaagactccagagaaagcaaagagtccagtgaaggaagaagccaaatcgccagagaaggccaaatcaccgttgaaagaggatgccaaagccccagaaaaggaaattcctaaaaaagaggaagtgaagagccctgtgaaggaagaagaaaagccacaggaagtgaaggtgaaggagcctccgaaaaaggcggaggaagagaaggcacctgccacacctaagacagaggaaaaaaaggactccaagaaagaagaagctcctaaaaaggaggcccccaaaccaaaggttgaggaaaagaaggagcccgctgtcgagaaacctaaagaatctaaggtagaggcaaagaaagaagaggcagaggacaagaaaaaagtacctacgcccgaaaaggaggcccctgcaaaggtggaagtgaaggaggatgccaaacctaaggaaaaaaccgaggttgcaaaaaaagagcccgatgatgccaaagccaaggaacctagtaaacccgccgagaagaaggaggccgccccagaaaaaaaggatactaaagaggagaaggccaaaaaaccagaagagaagccaaagaccgaggccaaagccaaggaagacgacaaaacactctcaaaagagcctagcaaacccaaagccgaaaaggccgagaaatctagcagcaccgaccagaaggattccaagccccctgagaaggcaactgaagacaaggccgctaaaggtaagtag

SEQ ID NO: 197024 - DNA, 930 bp, synthetic construct
  misc_feature 1..930: note = Description of Artificial Sequence: Synthetic coding sequence
  source 1..930: mol_type = other DNA
atggacgacaaggccttcaccaaggagctggaccagtgggtggagcagctcaatgagtgtaaacagctcaacgagaatcaagtacgcacactgtgtgaaaaagctaaggaaatattgaccaaggagagtaatgtgcaggaggtcaggtgtccagtgacagtttgtggggacgtgcatggtcagttccacgatctgatggaactattcaggatcggcggtaagagccccgatacgaactacttattcatgggcgactacgtggataggggttactacagcgtcgagacagtgacactcctcgtggcactgaaagtgaggtaccccgaaagaatcactattcttaggggaaaccacgagtctcgccaaattactcaggtgtatggattctacgacgaatgcttaagaaagtacggcaatgcaaatgtgtggaaatactttactgacctgttcgactatttgccactaacggcactggtggacggtcagatcttctgtctgcacggcggtctgtccccctccattgacacgctggaccacatcagagctctcgacagattgcaggaggtgccccatgaggggcccatgtgtgacctactctggagcgaccctgacgaccgaggtgggtggggtatcagtcctagaggggccggatacactttcggacaggatatatcggaaactttcaaccatgcgaacggcctgacgctcgtgagtcgcgcccaccagctcgtcatggagggctataattggtgccatgaccgaaatgtggtcacgattttctccgcccctaattactgttatagatgcggtaaccaggcggccatcatggaactggacgacacactgaagtacagctttctgcagttcgatcccgcccccagacgcggcgaaccgcacgtgactagacgcacacccgattacttcctgtag

SEQ ID NO: 197025 - DNA, 1623 bp, synthetic construct
  misc_feature 1..1623: note = Description of Artificial Sequence: Synthetic coding sequence
  source 1..1623: mol_type = other DNA
atggcccggcacctgcgggagtaccaggacctgctgaacgtgaagatggctttagatattgagattgcggcttatcggaagttgctcgagggagaggagacaagatttagcacctttgctggctctataacaggtccattgtacacccaccgccccccaatcaccatttcctctaaaatacagaaacctaaagtggaagcccctaagctgaaagtgcaacataaatttgtggaggaaatcatcgaagagaccaaagtggaggatgaaaaatccgagatggaggaagccttgaccgctattaccgaagaacttgctgtgtccatgaaagaagagaaaaaagaagccgctgaggagaaggaggaggaacctgaagctgaagaggaggaggtggccgccaaaaagtctccagtgaaggctacagcgcccgaagtgaaggaagaagagggggagaaagaggaagaggaaggacaggaggaggaggaggaagaggacgagggcgccaagtctgaccaggcagaagagggaggatccgaaaaggagggttcgtccgagaaggaggagggagagcaggaagaaggcgaaactgaggcggaggcggagggagaggaagctgaggccaaggaagaaaagaaggttgaggaaaagagcgaagaagtggcaactaaggaagagctggtggctgacgctaaggtcgagaaacccgaaaaggccaaaagccctgttccaaagtcgcccgtggaagaaaaaggcaagtcaccagttcctaaatcgccagtggaagaaaaaggaaagtctcccgtgccaaagtctcctgtggaagaaaagggaaagagtcctgtgccaaaaagccccgtggaggagaaaggaaaaagcccagtgagcaaatcgccggtcgaagagaaggcaaaatcccctgtgccaaagagccctgtagaagaggctaagtcaaaggccgaggtcgggaaaggagagcagaaggaggaggaagaaaaagaagtcaaagaagctcccaaagaggagaaagttgagaaaaaagaagaaaagcccaaggacgtacctgaaaagaaaaaggcagagtctcccgtcaaagaggaggcagtggccgaggttgtcactataaccaaatccgttaaagtccacctcgagaaggaaaccaaagaggagggcaaaccgctccagcaagaaaaggagaaagagaaagcgggcggtgagggagggtctgaagaggaaggctcagacaagggcgcaaagggttctagaaaagaggacatcgcagtgaacggtgaggtagaaggcaaagaagaagtcgagcaggaaactaaagaaaagggttcagggcgggaggaagagaaaggcgtagttaccaacggcctcgatctgtcaccagccgacgaaaagaagggaggggacaagagcgaggagaaagtggtcgtgaccaagaccgtcgagaaaatcacttccgaaggcggtgacggagcgacaaaatacatcaccaaatccgtcacggttacgcagaaagtggaagagcacgaggagacattcgaagagaagttagtgtccaccaagaaagtcgagaaggtgacttcacacgctatcgtgaaggaagtgacacagtctgactag

SEQ ID NO: 197026 - DNA, 2634 bp, synthetic construct
  misc_feature 1..2634: note = Description of Artificial Sequence: Synthetic coding sequence
  source 1..2634: mol_type = other DNA
atgagctacaccctggacagcctgggcaaccccagcgcctaccggcgcgttaccgagacccgaagctccttcagtagagtgtcaggctccccaagcagtgggtttcgcagccagtcatggtctcgagggtcaccctccaccgtgtccagctcttacaagcgctcaatgctggcgccacggttagcctactcgtcagcgatgctgtccagtgccgagagctctctggacttctcacagagttcgtctctgctaaatggagggtcggggcctggcggcgattataagctgtctcgaagtaatgaaaaggaacaattacagggactcaacgaccggtttgcggggtacattgagaaagtgcactacctggagcagcagaacaaggagatcgaggcagaaattcaggccctacgccagaaacaggcaagccacgctcaattaggagatgcctatgaccaagaaatccgtgagctgcgggcgacgctcgaaatggttaatcatgaaaaggcacaggtgcagctcgactctgaccacctagaggaggacatacaccgattgaaagagcgtttcgaggaggaagcgaggcttcgggacgacacagaggctgccattcgtgctctcagaaaagacatcgaagaggctagccttgtgaaagtggagctggacaaaaaagttcagtcactccaggatgaagttgcctttctgaggtcgaaccatgaggaagaggttgccgacctgttagctcagatacaagctagccacattaccgtcgagcgaaaagattatcttaagacagatatctccacagcacttaaagagatccgaagccagctggaatcccactccgaccagaatatgcaccaggcagaggaatggtttaagtgcagatatgccaagttgaccgaagctgccgagcaaaacaaggaagccatcaggagtgctaaagaagagattgccgaatacaggagacagctgcagtccaagtccatagagcttgaaagcgtgcggggtacaaaggagagcttggaacgccaactgtccgacatcgaggaacgccacaatcacgatctcagttcgtatcaggacacaatccaacagctcgaaaacgagctccgtggcacgaaatgggaaatggcccgacatctacgggagtaccaggacttattgaatgtgaagatggctctggatatcgagattgcagcttatcggaagctgctagagggcgaggaaaccaggttctccacttttgcaggatctatcaccggtcccctgtacacacataggccgcctataaccatctcgtcgaaaattcagaaacccaaggtcgaagccccgaagctgaaagtgcagcacaagttcgttgaagaaatcattgaggagactaaggtggaagatgaaaagtccgagatggaagaggccttaaccgccatcaccgaggagctggcagtgtccatgaaagaggagaagaaggaggcagccgaggagaaggaggaggaaccagaagccgaagaggaggaggtggccgccaaaaagagtccggtcaaggcaacggcccccgaggtgaaggaggaggagggagaaaaagaagaagaggaaggtcaggaggaggaggaagaggaagatgagggagccaagtcagaccaggctgaagaggggggcagcgaaaaggagggatccagcgagaaagaggagggggagcaggaggaaggcgagaccgaggccgaggccgagggagaagaggcggaggcaaaggaggagaagaaggtggaggaaaagtcagaagaggttgctacaaaggaggagttggtagccgacgccaaagttgagaaacctgaaaaggcaaaatcacctgtgcccaagtctcctgtagaggagaaaggcaagtcccctgtgagtaagtctccggtagaagagaaagccaagtccccagttcccaagtcacccgtcgaagaagctaaatctaaggctgaagtaggcaaaggtgaacagaaggaagaagaggaaaaggaagtgaaggaagctcctaaggaggaaaaagtcgaaaaaaaggaggagaagcccaaagatgtccccgaaaagaaaaaggctgagagcccggttaaggaagaggcagttgccgaagtcgtcacaataacaaagagtgtgaaggtgcaccttgagaaagagacgaaggaagagggaaaaccactgcagcaggaaaaagagaaggagaaagccggaggggaaggggggtctgaggaagaaggatcagacaaaggggctaagggatcaagaaaagaggatattgcggtgaacggggaagtcgagggcaaggaagaggtcgaacaggagactaaagagaaaggctccggacgcgaggaagaaaagggagtcgtgacaaacggactggacttgagtcctgcagacgaaaaaaagggcggcgataagtctgaggaaaaggtggtagttaccaaaacagtggagaaaattacttcagagggcggcgacggcgccaccaagtacatcaccaagtcggtgaccgtaactcagaaggtggaggagcatgaggagacgttcgaggagaaactggtatcgaccaaaaaagtagagaaagttacttctcatgctatcgtaaaagaggtaactcagtcagattag

SEQ ID NO: 197027 - DNA, 1071 bp, synthetic construct
  misc_feature 1..1071: note = Description of Artificial Sequence: Synthetic coding sequence
  source 1..1071: mol_type = other DNA
atgaccaagagctacagcgagagcggcctgatgggcgagccccagccacagggtcctccatcttggaccgatgagtgcctgtcgagtcaggacgaggaacacgaggccgacaaaaaggaagatgatctagaaaccatgaacgccgaagaggattcactgagaaatggcggagaagaggaagacgaggacgaggacctagaggaagaggaggaagaggaggaggaagacgacgatcaaaagcccaagagacgaggccccaagaagaagaaaatgaccaaagccaggctcgagcgatttaaattgaggcgcatgaaagcaaatgctagagagcgcaacaggatgcacggtttaaacgctgccttggacaatcttaggaaagtggtgccttgctacagtaaaacccagaagttatccaagattgaaacccttcgcctagccaagaattacatatgggcactgtccgaaatcctccggagtggcaagtctcctgacctggtgagttttgttcagaccctctgcaaaggactgtcccagcccacaaccaatctcgtcgccggttgcttgcaactgaatccccgaacgtttctcccggaacagaatcaggatatgcctccccatctacctaccgcatctgcgtctttccccgtgcatccatatagctaccagtctcccggccttccgagcccaccgtacgggactatggacagttcgcatgtctttcacgtcaaaccccctccacatgcctacagtgccgctctggaaccgttctttgaaagcccattaacggattgcacttctccctccttcgatggtcccctaagtccaccacttagcatcaacgggaacttttcatttaagcacgagccgagtgcagagtttgagaagaactacgcattcaccatgcactaccctgccgctaccctggccggtgcccagtcgcacggttccattttcagcggcaccgctgctccccgatgcgagatcccaattgacaacataatgagctttgattctcattcccaccacgaaagagtgatgtctgctcagctgaatgcaatcttccacgattag

SEQ ID NO: 197028 - DNA, 1149 bp, synthetic construct
  misc_feature 1..1149: note = Description of Artificial Sequence: Synthetic coding sequence
  source 1..1149: mol_type = other DNA
atgctgacccggctgttcagcgagcccggcctgctgagcgacgtgccaaagttcgcttcttggggcgatggagaagacgatgagccccgttccgataaaggcgatgccccgccgcctcctcctcccgcgcctggccccggagcacctggtcctgccagggccgcaaagccggtgcccttacgtggagaggagggaactgaggccactctagccgaggtaaaggaggagggcgagctcggaggcgaagaggaagaggaggaagaggaggaagagggcttggacgaggctgagggagagcgaccgaaaaagcgcggccccaagaagaggaaaatgacaaaagcccgccttgaacggagtaagctaaggcgtcaaaaagctaatgccagggagcgcaaccgaatgcacgacctgaatgcagctttagataatctcagaaaggtggtgccatgttacagtaagacccagaaattgtcgaagatcgaaacccttcgcctggcaaagaattatatttgggctctgtccgaaatcctccgctcgggaaagcggcccgatctggtcagttatgtgcagactctttgcaaggggctcagccagcccaccacgaaccttgtggccgggtgtctgcaactgaacagccgtaactttttgacagagcagggcgcagatggcgcgggaagatttcacggctcaggcggtccgtttgccatgcacccttatccttatccatgctcgcgcctggctggggcgcagtgtcaggccgctggaggtttaggcgggggcgcagctcatgccctcaggacccacggctactgcgcggcatatgagaccctgtatgctgccgccggcggagggggggcctcaccggactacaacagtagcgagtatgagggacctctgtccccccccctgtgtctcaacgggaatttcagcctgaaacaagactcttcacctgatcacgaaaagtcttatcactacagcatgcactatagcgccctgcctggctctaggccaacagggcacggactagtcttcggatctagcgctgtgcgcggcggagtacatagtgagaacctcctgagttacgatatgcacctgcatcacgacaggggtcctatgtacgaagagctgaatgcatttttccacaactag

SEQ ID NO: 197029 - DNA, 996 bp, synthetic construct
  misc_feature 1..996: note = Description of Artificial Sequence: Synthetic coding sequence
  source 1..996: mol_type = other DNA
atgagcaagaccttcgtgaagagcaaggagatgggcgagctggtgaacaccccaagctggatggacaagggccttggcagccagaatgaagtgaaagaggaggaatcacgacccggcacctacgggatgctttcttcactgaccgaagagcatgattctatcgaggaagaagaggaagaggaggaagatggtgagaaacccaaaagacgggggcctaaaaagaaaaaaatgaccaaggctagattggagcgattccgagcccggcgcgtgaaagctaacgctcgcgaacggacccggatgcacggtctgaacgacgccctggataacctgcgaagggttatgccatgttacagcaaaacccaaaagctctccaaaatagaaacactccggctggcgaggaattatatttgggccctcagtgaagtgctcgagacaggacagactcccgaaggtaagggatttgtggagatgctctgcaaaggcctgtcccagcctaccagcaacctggtggctggctgtctccaattgggtccgcagtctgtgctccttgagaaacacgaagataaatcccccatttgtgatagcgctatctctgtgcataattttaactatcaatccccgggacttccctctcctccatacggacacatggaaacccacctgctgcacctaaagccccaggtctttaagtctctgggagagtcctctttcggtagtcacctgcctgactgctcaacgcccccctatgaaggcccactaactcctcctctgagtatcagcgggaatttttcgctcaaacaagacggaagtcctgacctcgaaaagtcttattccttcatgccacactacccatccagctctttgtcgtcaggtcacgtccatagcacaccattccaagccggcacccctcgctatgatgtgcctatcgatatgtcttatgactcatatccccaccacggaatagggacacagcttaataccgtatttacggaatag

SEQ ID NO: 197030 - DNA, 1014 bp, synthetic construct
  misc_feature 1..1014: note = Description of Artificial Sequence: Synthetic coding sequence
  source 1..1014: mol_type = other DNA
atgctgaccctgcccttcgacgagagcgtggtgatgcccgagagccagatgtgcaggaagttctctagggagtgcgaagaccaaaagcagatcaaaaagccggaatcgttttcaaagcagatagtcctgagaggtaagtccatcaaaagggcacctggcgaggaaacagaaaaggaggaggaagaggaggatagggaagaggaagatgagaacgggcttcctagaaggcgaggactccggaagaaaaagacaaccaagctgaggttagaaagggtgaagtttaggagacaagaggctaatgctcgagaaaggaacagaatgcacggactgaacgatgccctggacaacctgagaaaagtggttccatgctattccaagactcagaagctgtcaaaaatagaaaccctcagactggcaaagaattacatctgggccttgagcgaaatactgaggatcggcaagcggccggacttgcttacctttgtccagaacctctgtaagggactgtcacagcctactactaatctcgtggcgggatgcctccaattgaatgctcggagctttcttatgggtcaagggggggaggccgcccatcatacacgttcaccctattccacattctaccctccctatcacagccccgagctgaccaccccccccggccatgggaccctggacaattccaagtctatgaaaccgtacaactattgctccgcatatgagtctttttacgagtcgacttcaccagaatgcgcttcaccccagttcgaaggtcctctgtcccctccacctatcaactataacgggattttctccctgaagcaggaagagacacttgactacggaaagaactataactacggcatgcattattgcgctgtgccgcccagaggccctctcggacagggggctatgttcagactaccaactgattcacactttccctatgatctacacttgcgcagccagagtctgaccatgcaagatgagttgaacgctgttttccataactag

SEQ ID NO: 197031 - DNA, 714 bp, synthetic construct
  misc_feature 1..714: note = Description of Artificial Sequence: Synthetic coding sequence
  source 1..714: mol_type = other DNA
atgcccgcccggctggagacctgcatcagcgacctggactgcgcctcttcaagtggaagcgacttgtctgggttcctgactgatgaagaggattgcgctcggcttcaacaggccgcttcagcttccgggcctcctgcccctgcaagacgcggagctccaaatatctcgcgggcatcagaggtgcctggggctcaggatgacgagcaagaacgccgacgccgccggggtagaacacgggttagatccgaagctctgctgcactcccttaggcggtcgaggagggtaaaggccaacgatagggaacggaaccggatgcataacctgaatgctgctctcgacgctctcagaagcgtattgcccagtttccccgatgacacaaagctcacaaaaatcgaaaccctgaggttcgcgtacaactacatctgggcattggccgaaaccctcaggctcgccgatcaggggttacccggaggtggtgctcgtgagagactgttgccaccgcaatgcgtaccctgccttcccgggccaccaagcccagcaagcgacgctgagagctggggcagcggagctgctgccgccagtcccctgagtgacccctcctcccccgctgcctcagaggattttacctacaggcctggggaccccgttttttcatttccaagtctccctaaagatctgctacacacaacgccgtgtttcatcccataccactag

SEQ ID NO: 197032 - DNA, 645 bp, synthetic construct
  misc_feature 1..645: note = Description of Artificial Sequence: Synthetic coding sequence
  source 1..645: mol_type = other DNA
atgaccccccagcccagcggcgcccccaccgtgcaggtgacccgggagaccgagaggtcttttccccgtgcctcagaagacgaagtcacctgccccacctctgctcctcctagcccaaccagaactcgtggtaactgcgctgaggcagaggagggcggctgcagaggagcacctaggaagctaagagccaggcgcggcggtcggtctcggcccaaatccgagctggctctcagcaagcagcgccgaagccgccggaaaaaagctaacgatcgcgagcgcaatcgcatgcataatctcaattccgcactggacgcgctcaggggagttctccccaccttccctgacgacgccaagctgactaaaatcgaaacgttgcgtttcgctcacaactatatctgggctctgacccagaccctccgtatcgctgaccacagcttatacgctctcgaaccaccagccccccattgcggtgagctggggtcccctggcggcagtcccggggattggggctcgttgtattcacctgtgtcccaggctgggtcactgtcgcccgcagcatccttagaagagcgacccgggcttttgggagctactttcagcgcttgtctgagccccgggtcactggcattcagcgactttctatag

SEQ ID NO: 197033 - DNA, 456 bp, synthetic construct
  misc_feature 1..456: note = Description of Artificial Sequence: Synthetic coding sequence
  source 1..456: mol_type = other DNA
atggagcggcccgagcccgagctgatccggcagagctggcgggccgttagccgttctcctctggaacatggcacggtgctgttcgctcgcctgtttgcgcttgagccggacctgttgcctctgttccagtataattgcagacagttttccagcccagaggactgcctctcttcacctgagtttttggaccatatacgcaaggtaatgttggttatagatgccgctgtgaccaacgtggaagatttgtcatcattagaagagtatcttgctagcctggggaggaaacatcgggctgtgggggtgaaactgtcttccttcagcacagtgggtgaatctttgttgtacatgctggaaaaatgcctggggcccgcctttactcctgccactcgtgccgcctggtcacaactgtatggcgctgttgtgcaagcaatgtccagaggctgggatggagagtag

SEQ ID NO: 197034 - DNA, 237 bp, synthetic construct
  misc_feature 1..237: note = Description of Artificial Sequence: Synthetic coding sequence
  source 1..237: mol_type = other DNA
atggactgctgcaccgagaacgcctgcagcaagcccgacgacgacatcttggatatccccctcgacgatcctggagcaaacgccgctgccgccaaaatccaggcctcattccgtggacatatggcccggaagaaaatcaaatcaggagagaggggaaggaaaggccctggacctggaggaccagggggcgccggtgtggctaggggcggtgcgggggggggcccgagtggggactag

SEQ ID NO: 197035 - DNA, 237 bp, synthetic construct
  misc_feature 1..237: note = Description of Artificial Sequence: Synthetic coding sequence
  source 1..237: mol_type = other DNA
atggactgctgcaccgagaacgcctgcagcaagcccgacgacgacatccttgatattcctctagatgaccccggggccaacgctgcggctgctaagatccaggcttctttcaggggccacatggcgaggaaaaagatcaaaagtggagagcgcgggcgaaagggaccagggcccggaggacctggcggcgctggcgttgcccgcggaggcgccggtggaggccctagtggagactag

SEQ ID NO: 197036 - DNA, 237 bp, synthetic construct
  misc_feature 1..237: note = Description of Artificial Sequence: Synthetic coding sequence
  source 1..237: mol_type = other DNA
atggactgctgcaccgagaacgcctgcagcaagcccgacgacgacatcctggacattcctttggatgatccaggagcgaacgccgcggccgctaaaattcaagcctctttccggggtcacatggcccggaagaagattaagagcggcgagcggggaagaaagggccccggaccagggggccccggaggagctggcgtcgctagaggaggcgctgggggcggaccatcaggcgattag

SEQ ID NO: 197037 - DNA, 936 bp, synthetic construct
  misc_feature 1..936: note = Description of Artificial Sequence: Synthetic coding sequence
  source 1..936: mol_type = other DNA
atggccgccctgggcgtgctggagagcgacctgcccagcgccgtgacactcctcaagaatttacaggaacaggttatggctgtgaccgcacaggtgaagtccttaacccagaaggtacaggcgggggcgtacccaaccgagaaaggtctgagctttctagaggttaaggaccagctcttgctgatgtatctgatggatctgacgcacctcatcctggataaagcgtctgggggctcgctgcaggggcacgacgccgtgctgagattggtcgagattagaaccgtccttgaaaagctacggcctttggaccagaagttgaagtaccaaatcgacaagctgattaaaaccgccgtgaccggctccctgtccgagaacgacccattacgattcaaaccacatccttcaaatatgatgagtaaactgagttccgaggatgaagaggaagatgaagcggaggacgaccaatccgaagcctcaggcaaaaaatctgtcaagggagtttccaagaaatatgtgcctcctaggctcgttcctgtccactacgacgagacagaggctgaacgcgaaaagaagcggctggaacgcgctaagcggcgagccctgtcatcgtctgttattagagaattgaaggaacaatatagcgatgcaccagaggaaatccgcgatgcaagacatccacatgttacgagacagtcccaagaggaccagcatcgaattaactacgaagaaagcatgatggtgcggctttcggtgagcaaacgagagaagggtaggaggaaacgagctaacgtaatgagctcccagctacattcattgacacactttagcgatataagcgccctgaccggaggaacagtccatctggacgaggaccagaatcctatcaagaagcgcaaaaagattccccagaaaggccggaagaaaaagggtcaatag

SEQ ID NO: 197038 - DNA, 948 bp, synthetic construct
  misc_feature 1..948: note = Description of Artificial Sequence: Synthetic coding sequence
  source 1..948: mol_type = other DNA
atggccgccctgggcgtgctggagagcgacctgcccagcgccgtgacattactcaagaacctgcaggagcaggtgatggccgtaacagcccaggttaagagtctaactcagaaagtgcaggccggagcttacccaacagaaaaaggcctgagtttcctcgaggtgaaggaccagctgctgctaatgtatctcatggacctgacccacctcatcctggacaaggccagtggaggctcgctacagggccatgatgctgtgttgaggttagtcgaaattcggaccgtgctggaaaagctaaggcccctcgaccagaaattgaaataccagatcgataagcttattaaaactgccgttactgggtccttgagcgagaatgatcctctgaggtttaaacctcacccatccaatatgatgtctaaactgtcgtctgaagacgaagaggaggatgaggccgaggacgaccagtccgaggcgagcggcaaaaagagtgttaagggtgtgagcaagaagtacgtgcctccacgcctggttcctgtccactatgacgaaactgaggcggagagggagaagaagcgcctagaacgagcgaaacgacgcgccctgtcaagtagcgttattagggaattgaaagagcagtattcagacgcaccagaggagatacgtgatgcccgacaccctcatgtgacacgacagagccaggaggatcaacatcgtatcaattacgaggagtcaatgatggtgaggcttagcgtgtctaagagagagaagggccgccgtaagagagccaatgtcatgagcagccagctgcactctttgactcacttttcagatataagcgcacttactggagggaccgtgcacctagacgaagaccagaatccaatcaagaaacgaaagaagattcctcagaaaggccgtaagaagaagggcttccggagaaggcgctag

SEQ ID NO: 197039 - DNA, 2472 bp, synthetic construct
  misc_feature 1..2472: note = Description of Artificial Sequence: Synthetic coding sequence
  source 1..2472: mol_type = other DNA
atggccctgccccggtgcacctggcccaactacgtgtggcgggccgtcatggcatgcttggttcacagagggctcggtgcccccctgactctgtgtatgctgggatgtcttttgcaagcgggacacgtcttatcccagaagctggacgatgtcgatccactggttgctacaaattttggcaaaatccgaggcatcaaaaaggaactcaacaacgagattctggggccagtgattcagtttcttggagtcccctacgccgctccaccgactggagaaagaagattccagcctccagagcctccctccccttggagcgatatccgcaatgccacacagttcgcgccagtttgcccgcagaatatcatcgacgggcgcctccccgaggtcatgctgccggtgtggtttaccaacaacctcgatgtagtgagttcctatgttcaggaccaatcagaagattgtctgtacctgaatatctatgttcccactgaggatgatattagagactcaggaggacccaaaccagtgatggtgtacatccacggcgggtcatatatggagggaacggggaacctgtacgatggtagtgtcttggccagttacgggaatgttatcgtgatcaccgtcaactacagactgggtgtgttggggttcttgagcaccggggaccaggccgctaaaggtaattacgggctgttggaccttattcaggctctgcgttggacatccgaaaatatcggatttttcggtggtgacccccttcgaatcaccgtgttcgggtccggggcaggaggctcttgtgtcaacctccttacgttgtctcactattccgagggcaacaggtggtctaattcaaccaagggcctgttccaaagagcaatcgctcaatctggtacagcgctgtccagctgggctgtatcttttcagccagccaaatacgcgcgaatgctggcaacaaaggtcgggtgcaatgtgagcgatactgtcgagctcgtggagtgtttgcaaaaaaaaccttataaggagttagttgatcaggatattcaacctgctcggtaccatatcgcattcggaccagtgattgatggcgacgtcatccccgacgacccccagattcttatggaacagggtgaatttctgaactacgatattatgctcggcgtcaaccagggtgagggcttgaaattcgtcgagaatattgtggactccgacgatggaatttcagcgagcgattttgactttgccgtatccaattttgtcgataacctatacggctatcctgagggaaaagacgtgttgagggagactataaaattcatgtacaccgactgggcagatagacataatcctgaaacccgacgcaaaactctcctggcccttttcactgaccaccaatgggtagcccctgccgtggccaccgcagacttgcattctaattttgggtcaccaacgtacttctacgcattttatcaccattgccagacagatcaagtcccagcgtgggctgacgccgcacatggtgatgaggtgccttacgtgctgggaattcccatgatcggacccacagaattgttcccatgtaacttctccaagaacgacgtcatgctcagtgcagtggtgatgacatactggaccaactttgctaaaacgggtgacccaaatcagcccgttccccaggatacgaagttcattcacacaaagccaaatcggttcgaggaagttgcctggaccaggtattcccagaaagaccagctttacctgcacatcggtctcaagccacgcgtgaaagagcactacagggccaacaaagtgaatctctggctcgaactcgtcccgcatctgcacaatttaaacgacatcagtcaatataccagtacaaccaccaaggttccctctaccgatattacctttcggccaacgcgcaaaaatagcgtgccagtcactagcgcttttccaacggcaaagcaagatgaccctaaacagcaaccctcccctttttccgtggaccagcgggactatagcaccgaactttctgtcaccattgccgtgggcgctagtcttctcttcctcaatatccttgctttcgctgccttatattacaaaaaggacaaacgtagacacgacgtgcatagacggtgttcaccacaacggacgactaccaatgatctgacccatgcccaggaagaggagatcatgtcactgcagatgaaacacacagatctagatcatgagtgcgagtcaatccaccctcacgaggttgtccttagaacagcatgtcctcctgattatactttggcgatgaggaggtctcctgacgatgtacccctgatgactccgaacacaatcactatgatcccaaataccattcccggaatacagcctctgcatacctttaatacatttactggagggcagaacaacacattaccacacccacatcctcacccccactctcactccacgacaagagtgtag

SEQ ID NO: 197040 - DNA, 2592 bp, synthetic construct
  misc_feature 1..2592: note = Description of Artificial Sequence: Synthetic coding sequence
  source 1..2592: mol_type = other DNA
atggccctgccccggtgcacctggcccaactacgtgtggcgggccgttatggcatgtcttgtccacagggggctaggagctcctctgacactttgtatgctgggatgcctgctccaagccgggcacgtgctgtcccagaaactcgatgacgtggaccccctcgtggctaccaactttggcaagattcgagggataaagaaggagcttaataatgagatcctcgggcccgtgattcagttcctgggagtgccttatgccgccccccccacaggagaacggagattccagcctcctgagcctccctccccttggtctgatatccgcaacgctacccagtttgctcccgtgtgtccgcagaacatcatagatgggcgactccctgaagttatgttgcctgtgtggttcacaaacaatctggacgtggtgtctagttacgtgcaggaccagtccgaggattgtctgtatctcaatatttacgtgcctacggaggatgtaaagcggatatcaaaagaatgtgcaagaaagcccgggaagaagatatgccggaaaggtgggcccttaacgaaaaagcagacggacgacctcggagataatgatggcgctgaagacgaggacattcgcgacagtggtggaccaaaacctgtgatggtctatatccacggcggatcatacatggagggcaccggaaatttatatgacggatcggtgcttgcctcttatggcaacgtaatagtaatcaccgtcaactaccggcttggggtgctgggctttctgtctacaggcgatcaggcagccaaaggcaattatggactgcttgatcttattcaagccctgcgctggacttcggaaaacattggatttttcggcggagatccgctcagaattacggtattcggcagcggggccggagggagctgtgtgaacctgctgacactgtctcactactcagaaggaaaccggtggtccaattccacaaaaggtttatttcagcgggccattgctcagtccggcacggccctgagttcatgggctgtgtcattccaaccagccaaatacgctaggatgttagccaccaaggtgggctgcaacgtgtcagacacagtggagctggtagaatgtcttcagaagaagccatacaaggagctggtagatcaggatatccagccagccagataccacattgcgtttggccccgttatcgatggagacgtaatacccgatgaccctcaaatcctaatggagcagggagaatttctgaattacgacattatgctaggtgtcaatcagggagaaggactaaagtttgtggagaatattgttgattccgacgacggcatatcagcgtcagatttcgacttcgccgtgtctaatttcgttgacaatttatacgggtatccagagggaaaggatgtgctacgggaaaccattaaatttatgtacacagactgggccgatcggcataaccccgagacgcggaggaagacactcctagctctcttcacggaccaccagtgggtcgctcccgcagtcgccacggcagacctgcacagcaattttgggagcccaacctacttctacgcattttaccaccattgccaaactgaccaggtccccgcatgggctgatgcggcgcacggggacgaagtgccttacgtgctgggcattccgatgatcggccctactgaactgttcccttgcaactttagtaagaacgacgtcatgttgagtgccgttgtgatgacttattggacaaattttgcaaaaactggtgatccaaatcagccagtgccccaagatacaaagtttatccataccaaaccaaaccgcttcgaagaagtcgcctggactcggtatagtcagaaagaccagctgtacttacacatcggcctgaaaccccgcgtaaaggagcattatagggctaacaaggtcaacctatggctggagctggtaccacaccttcacaacttgaatgacattagtcagtatacgtccacgaccacaaaggtgccctccactgacatcacattcagacccacacggaagaattcagtacccgtgacttcagcctttccaacagctaagcaggatgaccctaaacagcagccaagtccattctctgtggatcagcgagattactccaccgaactgagtgtgactatcgctgttggcgcctccttgctctttctcaacattcttgcattcgccgcactgtattataaaaaagacaagaggcgccacgatgttcaccgaagatgctcgccccagagaacaacaacgaatgatctcactcatgcacaggaggaagagatcatgtctttacagatgaaacatacagatctggaccatgagtgtgagtccattcatccacatgaagtggtgctgcgtacggcatgtccccccgattatactctcgcaatgaggcgatcaccagacgatgtgccattgatgacacccaacactatcaccatgatccctaacaccattcccgggatacagccgctgcacactttcaatacattcactggagggcagaataacactctcccccatcctcacccccaccctcattcgcattctacaacaagagtgtag

SEQ ID NO: 197041 - DNA, 33 bp, synthetic construct
  misc_feature 1..33: note = Description of Artificial Sequence: Synthetic coding sequence
  source 1..33: mol_type = other DNA
atggccctgccccggtgcacctggcccaactag

SEQ ID NO: 197042 - DNA, 42 bp, synthetic construct
  misc_feature 1..42: note = Description of Artificial Sequence: Synthetic coding sequence
  source 1..42: mol_type = other DNA
atggccctgccccggtgcacctggcccaactacgtgtggtag

SEQ ID NO: 197043 - DNA, 2472 bp, synthetic construct
  misc_feature 1..2472: note = Description of Artificial Sequence: Synthetic coding sequence
  source 1..2472: mol_type = other DNA
atggccctgccccggtgcacctggcccaactacgtgtggcgggccgtgatggcgtgcctggtccatagaggtctgggggcaccattgaccctgtgtatgttgggatgtttacttcaggcgggccacgtgttatcacaaaaacttgatgacgtcgatcccctggtggcaacgaacttcgggaagattaggggtataaagaaagaattaaataacgaaattctcggtcctgtgatccagttcctgggggttccctacgccgctcctccaactggcgagcggcgatttcagccccccgaaccaccttccccctggtccgatatacgcaacgcaacgcagttcgcacccgtgtgcccacagaatattattgatggcagactgccagaggtgatgttacccgtgtggttcacgaacaacttggatgtggtgtcttcctacgtgcaggaccagagcgaggattgcctgtacctcaacatctatgtgcctacagaggacgatatcagggatagcggcggtccaaaacctgttatggtctatattcacggtggcagctacatggagggcaccggaaatctctatgacggaagtgtgcttgcctcctatggcaacgtgatagtaattaccgtgaattaccgccttggcgtcttaggattcctcagcacaggtgatcaagcggcaaagggtaactacgggctgttagatctaatccaagccctccgctggacaagtgaaaacattggattcttcggcggagacccactgagaataacagtctttggcagtggcgctggtggatcttgtgtgaacctactgacactgagccactacagtgagggaaacagatggagtaattccacgaaggggttgttccaaagggccatcgcccagagcgggaccgcactgtcttcttgggccgtgtcatttcaacccgctaagtacgctcgcatgcttgccaccaaagtcggttgcaacgtctccgataccgtggagctggttgagtgtctccagaaaaagccatacaaggagctcgtggatcaggacattcagccagctaggtaccacatagctttcggccccgttattgatggagatgtgattccagacgatccccagatcttaatggagcagggtgaattcctgaactatgatatcatgctaggcgtcaaccagggagaggggctcaagttcgttgagaacatagtggacagcgatgatggcatttctgcctcggattttgattttgcggtctcaaattttgtggataacttatatggttaccccgaaggcaaagacgtgttgcgcgagactatcaagttcatgtacaccgattgggcggacaggcataatccagagaccagacgcaagactctgctcgccttgtttactgatcaccaatgggttgcccccgcagtggccaccgccgatctgcatagcaacttcgggtcccccacctacttctacgctttctaccaccactgccagactgatcaagtgcccgcttgggcagacgccgcacatggagacgaggttccatacgtgttggggatccctatgattggtcctactgagctcttcccttgtaacttctcaaaaaacgatgtgatgttatccgccgtcgtcatgacttattggaccaatttcgcgaagacaggcgacccaaaccagccagtgccacaggacacaaagtttatacatactaagccgaaccgctttgaggaggtggcatggactaggtacagccagaaggatcagctgtatcttcatataggactgaagccacgagtgaaggagcactatcgcgctaacaaagtgaacctttggctggagctggtgccccacctgcacaatctgaatgacattagccagtacaccagcacaacgaccaaagtgccaagcacagacattacgtttaggccgaccagaaagaattctgttcccgtgaccagcgcatttccgacagccaagcaagatgaccccaaacagcagccaagccccttcagcgtggatcagcgggattacagcactgagctgagcgttacaatcgcagtcggggcgtccctgctgttcctgaacattttagcctttgccgcgctgtattacaagaaggataaacgaagacacgatgtgcacaggagatgcagtccacaaaggacaacgactaatgatctgacccatgcccaggaggaagaaatcatgagcctgcagatgaagcacacagatctcgaccacgaatgcgaaagcattcatccccacgaagtggtgcttcgaaccgcctgcccacccgattacaccttggcaatgcgcaggtctccggacgacgtcccactcatgacaccaaatacaattacaatgattcccaataccatccctggaattcagccattacacacttttaatacattcacagggggccagaacaatacgctaccccacccccacccgcacccgcacagtcatagtactacacgggtgtag

SEQ ID NO: 197044 - DNA, 2472 bp, synthetic construct
  misc_feature 1..2472: note = Description of Artificial Sequence: Synthetic coding sequence
  source 1..2472: mol_type = other DNA
atggccctgccccggtgcacctggcccaactacgtgtggcgggccgtcatggcgtgcctggttcaccggggactgggtgctccactcactctttgcatgctgggctgtcttctccaagcaggacacgtgcttagccagaaactggacgatgtggacccactggtcgcaacgaatttcggaaaaataagaggaataaagaaagagttaaataacgagatactgggacctgtaattcaattcctgggtgtgccttacgccgcacctccaacaggggagcgccggttccagccaccggaacccccatctccttggagtgacatccggaatgctacacagttcgcccccgtgtgtccacaaaacattatcgacggacgcctgccagaggttatgttacctgtttggtttaccaacaacttagacgtggtttcctcctacgtgcaagaccagagtgaggattgtttgtacctcaacatttacgtgccaaccgaggatgacatcagagactctggggggccaaaaccagtgatggtgtacattcatggaggctcttatatggaagggaccgggaacctttatgacgggtccgtgttagccagttatgggaacgtgatagtcatcaccgtcaactaccggctcggtgtgctcggtttcctgtctactggtgatcaggccgcaaagggtaactatggtcttctcgaccttatacaggcactccggtggacatcggagaacattgggttcttcgggggcgaccctctgcgcataactgtgtttggttccggggcagggggatcctgtgtgaacttgctcacactgtcccattattcagagggcaatagatggtcaaattccacgaaaggattgttccaaagagccatcgcacagtctggaactgctctgtctagctgggctgtttcattccagccggccaaatacgctcgtatgctggcgactaaggttggatgcaatgttagcgatacagtggagctggtcgaatgcctgcagaagaaaccgtacaaagagctggtggaccaagatatacagccggctcgataccacatagccttcggccccgtgatcgacggagacgttatccctgacgacccccagatcctaatggaacagggggagtttttgaactatgatatcatgctaggagtcaatcagggcgagggcctgaaatttgtcgagaatattgtcgacagtgacgacggtatttctgcaagcgactttgattttgctgtgagtaactttgttgataatctctacggatacccggaagggaaggatgtactgcgagaaacgattaaatttatgtacacagactgggccgacagacataatccagaaacacggcgcaagacactgctggccctgtttaccgaccaccagtgggttgcaccagcagttgctacagccgatctccattcgaactttggctctccgacctacttttacgcattctaccatcactgtcagacagatcaagtgcccgcctgggctgacgccgcacacggagatgaggtgccttacgtcctcgggatcccaatgatagggcccaccgagttattcccatgtaatttctccaagaacgatgtcatgctgtctgcggtcgttatgacatattggaccaatttcgctaaaacaggcgatcccaaccagcctgtaccgcaggacaccaaattcatccacaccaagcccaaccggtttgaggaagtggcttggactcgttactcacaaaaggatcaactgtacttgcatatcggcttaaagcctcgggtaaaggaacattatcgggcaaacaaggtaaacctgtggttggagttggtcccacatctacacaacctaaacgatatatcccagtacacttccacgaccaccaaggtgccgagcaccgatataacattcaggccaaccagaaaaaatagcgttccagtgacttccgcatttccaaccgccaaacaggacgaccccaagcagcagccaagcccgttctccgtggatcagcgcgactactctacagaattgtccgtcacaatagcagtgggagcgtccctgctgttcctgaacatactggccttcgccgcactctattataagaaagacaaacgaaggcatgatgttcacagacggtgttctcctcagcgaaccactactaatgacctgacacacgcccaagaggaggagatcatgagcttgcagatgaagcacacagacctagatcacgagtgcgaatcgatccatccgcatgaagtggtgttgagaactgcgtgccctccagattatacactcgccatgcgacggagtcccgatgacgttcctctgatgacccctaatactattaccatgatccctaacactatccctggaatccagcctctgcatactttcaatacctttacaggaggccagaacaatacactgcctcacccacacccacaccctcactcacattcaacaacccgcgtttag

SEQ ID NO: 197045 - DNA, 2508 bp, synthetic construct
  misc_feature 1..2508: note = Description of Artificial Sequence: Synthetic coding sequence
  source 1..2508: mol_type = other DNA
atgtggctgctggccctgtgcctggtgggcctggccggcgcccagagaggaggcggggggcccgggggtggtgcgcccgggggaccgggcctcggcttggggtcattgggggaggaacgattccctgtggtcaataccgcctatggtagagtgcgaggggtcaggagggaactcaacaacgaaatcctgggccctgttgtacagttcctgggcgtgccctatgccacaccaccactcggggcccgtcggtttcagccgcctgaggctccagcttcctggcccggcgtgcgcaacgccactaccctccctcctgcatgccctcagaacttgcacggcgccctccccgccatcatgctgcctgtgtggttcacggacaatctggaagccgcagcaacctatgttcagaatcagtcggaggactgtttgtacctaaacttatacgttcccacagaggatggacccttgaccaagaaacgcgacgaagccacactgaacccaccggacacagatatcagagacccagggaagaagcctgttatgcttttcctccacggcggcagttacatggagggaacagggaatatgtttgacggttctgtcttggctgcgtacgggaacgtgattgtggccaccctgaattacaggttaggcgttctcgggtttctatccacaggggatcaggccgcgaaaggaaactatggactgttggaccagatccaagccctcagatggctgtcagagaacattgcacacttcggcggcgacccggaacggataacaatctttgggtccggggcaggcgccagttgtgtgaatttgctcatactctcacaccactcagagggcttgttccagaaggccattgcccaatcggggacggcgatatcaagctggagtgtgaactaccagccgttgaaatacactaggctattagcagcgaaagtaggctgcgacagggaagactctgccgaggcggtcgagtgccttcgtcggaaaccttcgagagagctggtagaccaggacgtacaacctgcccgataccacatcgcctttggcccagtcgtcgatggcgatgtagttcctgatgatccagaaattctgatgcagcaaggggaattcctgaactatgacatgctgattggcgtcaatcaaggagagggcctgaaatttgttgaggacagcgcggaatccgaggacggagtcagtgcatctgcattcgatttcaccgtgagcaactttgtagataacctgtatggttaccctgaaggcaaggatgtgcttcgggagactatcaagttcatgtacaccgattgggcagatcgcgacaatggcgagatgaggcggaagaccctcctcgccctgtttacggaccaccagtgggtggcccctgccgtggccacagccaagctccatgcagactaccagtcacctgtatatttttataccttctatcatcactgccaggccgagggccggccagaatgggccgatgctgcccacggcgacgagcttccatacgttttcggcgtgcccatggtgggcgccacagacctgttcccttgcaacttcagcaagaacgatgtgatgctcagtgcggtggtgatgacctactggaccaactttgcaaagaccggcgatccaaatcaacctgtgccacaggatactaagttcatccataccaagcctaaccgtttcgaggaggtcgtgtggtccaaattcaactcaaaagagaaacagtacctgcacatcggcctcaaaccaagagtgcgggacaattatcgcgctaacaaggtagctttttggttagaactggttccacacttgcataacttgcatactgagctctttaccactaccactcggctgccaccatatgccaccaggtggcctccacggcctcccgccggcgccccaggaacaagaagaccgcctcccccagccaccttgccaccagaaccggagccggagcctgggccgcgagcttatgacagattccctggcgattccagggattacagtactgaactgagtgtaactgttgctgtgggtgcctccctcctctttctgaatatccttgctttcgccgctctgtactataagcgcgacagacgccaggaactgagatgtcgaagactcagtccacccggcggatctggtagtggcgtacctgggggcggaccactgttaccagcagcaggtcgggaactgcctcctgaagaggaactcgtgtctcttcagttaaagagaggtggcggagttggggccgatccagcagaagctctgcggcccgcctgtccccctgactacacattagcgctgagaagagcccccgacgatgtgccactactggcgcccggtgctctcaccctcttgccttctggtttgggaccaccgccacctcctcctcccccgagtctacaccccttcgggccgttccccccaccaccacctactgcaacttcccacaacaatactttgccccaccctcactctacaacccgagtctag

SEQ ID NO: 197046 - DNA, 2547 bp, synthetic construct
  misc_feature 1..2547: note = Description of Artificial Sequence: Synthetic coding sequence
  source 1..2547: mol_type = other DNA
atgtggctgcggctgggcccccccagcctgagcctgagccccaagccgacagtcggccggagtttgtgcctgaccttgtggtttctgagcctagccctgcgtgcctcaacccaagcaccagcgccaacagtcaacacacactttgggaagttgcggggcgcccgggttcctttaccaagcgagattctaggccctgtggatcaatacctgggcgtcccctatgccgcgccccccattggggagaaacgcttcctcccgccagagcctcccccttcatggagcggcatccgcaacgccacccacttcccccccgtttgcccccagaacatccacactgcagtgcccgaggttatgcttccggtgtggtttaccgctaacctggatatcgtcgccacatatatccaggaaccaaacgaggattgtctgtatctaaacgtgtacgtgccaacagaggatgtgaaacgtatctctaaggagtgcgcccgcaagcccaataaaaaaatttgcaggaaaggcggatcaggggccaaaaaacaaggtgaggatctcgcagataacgatggcgacgaggacgaggatattcgagacagcggcgccaagccagtcatggtgtacatccatggtggaagctatatggagggaactgggaacatgatcgacgggtcaatcctggcctcttatgggaacgttatagttatcactctcaactaccgagtgggggtgttgggattcctttctacaggcgaccaagccgcgaaaggaaattacggcctgttggaccaaatccaagccctcaggtgggttagcgaaaacatcgcttttttcggcggggatccacggcgtattacggtctttggatcaggcataggagcatcttgcgtgagcctgcttacgctgtctcatcatagtgaagggttgttccaacgcgccatcattcagtctggaagtgcactgagttcttgggcggttaactaccagccggtgaaatatacctccctgttggcggacaaggtgggatgcaatgttctggacacagtggatatggtggactgcctccgccagaagtccgccaaagaattggttgagcaggacattcagccagccagatatcacgtcgccttcgggcccgtgatagatggggacgttattccggacgaccccgagatcctcatggagcagggggagttcctcaactacgacatcatgctgggcgttaatcagggagagggtttaaaattcgtggagggtgtggtcgatccagaagacggagtgtccggtacagactttgattacagcgtgtccaattttgtcgataacttgtatggctatcctgaaggcaaggatacccttcgtgagaccattaaattcatgtacacagattgggccgatcgtgataaccctgaaacccggagaaagacattggtagccctgttcactgatcatcaatgggtggaaccaagtgttgtcacagcagatcttcatgcacgctacggctctcccacatatttctacgccttctaccatcattgccaaagccttatgaaaccagcttggtctgatgcagcccacggagacgaggtgccctacgtctttggggtacccatggtcgggcccactgatctgttcccatgcaattttagcaagaacgacgtgatgctcagcgccgtggtgatgacctactggaccaacttcgccaaaacaggggatccaaacaaaccagtgcctcaggacacaaagtttatccatacaaaggccaaccgctttgaagaggtcgcctggtctaagtataatccaagagatcagctgtacctgcacattggcctgaagccacgcgtgcgcgatcattaccgtgccaccaaggtcgcattttggaaacacctcgtcccccacttgtataacctacacgacatgttccactatacctccacaaccacaaaggtccctcctcctgataccactcattcatctcacatcactaggcgaccaaacggaaagacatggagcactaagcggccagctatatcccccgcatattctaatgagaatgcacagggaagctggaatggtgaccaagatgcgggccccctcctggttgaaaaccccagggattattctacagagctctcagtgacgattgctgtgggggcctctcttctatttctgaacgtcctcgccttcgctgctctatactaccggaaggacaagaggcggcaggaacccctgcgtcagccttctccacaaaggggtgcaggggctccagagcttggtgctgccccagaagaagagcttgctgctctgcagctcgggccaacgcatcacgagtgtgaggccggcccgccccatgacaccctgcgtttgactgccctgccagactacacactgaccttgcgacgaagcccagacgacattcccctaatgacccctaacacgataactatgatccccaactctctcgtagggctgcagaccttgcacccttacaatactttcgctgccggatttaattctaccggtctcccacacagtcattcaaccacaagagtgtag

SEQ ID NO: 197047 - DNA, 2487 bp, synthetic construct
  misc_feature 1..2487: note = Description of Artificial Sequence: Synthetic coding sequence
  source 1..2487: mol_type = other DNA
atgtggctgcggctgggcccccccagcctgagcctgagccccaagcccaccgtcgggagaagtctctgtcttaccttgtggttcttgagtttagcgttgcgagcctctacacaggcacctgcaccaaccgtgaacacacacttcggtaaattgcgtggagccagggtccctctgccgtcagagattttggggcccgtggatcagtacctgggcgtgccttacgctgccccacccattggtgagaaacggtttcttcccccagagccgcctccttcttggagtggcattagaaacgccacccacttcccccccgtctgtccgcagaatattcatacagcagtgccagaggtaatgctgccagtttggtttacagcaaacctggacatagtggctacctatatccaggagcccaacgaagactgcctgtaccttaatgtgtacgtccctacggaggacggttctggcgcgaagaagcagggagaggacctggcagataatgatggagatgaggatgaggatattagggacagcggggctaaacccgtgatggtgtacattcacggtggatcctacatggagggtacgggtaacatgatcgacggaagcattctcgccagctacggaaacgtcatcgtaatcaccctcaactaccgtgtgggtgtgctggggtttttgtccacgggcgaccaggctgccaagggtaactatgggctgctggatcagatccaggcgctgcgctgggtgtctgaaaacattgctttctttgggggtgatcctcgccggattaccgtgttcggctcaggcatcggagcatcatgtgtgtctctcctgactctctctcaccactcagaaggcctgttccagcgcgctatcattcagagcggttctgccctaagttcctgggcggtgaactatcagcccgtcaaatacacctctttgctcgctgacaaggtggggtgcaacgtactcgatacagtggatatggttgattgtctgcgccagaagtcagcaaaggagctggtggaacaagacatacagcccgctagataccacgtggccttcggtccagtgattgacggtgatgtgatcccagacgacccagagatcctgatggaacaaggagagttcttgaattatgacatcatgctgggggtaaatcagggcgaaggcctcaaattcgtcgaaggagtggtggatcccgaggacggagtgtcaggaacggacttcgactactccgtgtcgaatttcgtggataacctgtatggatatcccgaggggaaggacacgttgcgcgaaaccattaaatttatgtacactgattgggctgatcgggataatcctgagacacggagaaagactttggtggctttattcaccgatcatcagtgggtcgagccctctgttgtaactgcagatctacacgcacgttatggatcccccacctatttttatgccttctaccaccactgccagagcctcatgaaaccagcttggtctgacgcagcccacggggatgaggtgccgtacgtctttggcgtcccgatggtgggacccacagatctatttccctgtaatttttcgaagaacgacgtgatgctgagtgcggtggtgatgacatattggaccaatttcgcaaagactggggaccctaataaaccggtccctcaagacaccaaatttatccataccaaggcgaaccgcttcgaggaagtggcctggagtaagtacaaccccagagaccagctgtatttgcacattggactcaaaccccgcgtcagagaccactatcgggcaaccaaggtagcgttttggaagcacctcgttccacacctttacaatctccacgatatgttccactacactagtacgaccacaaaggtgccaccaccagataccacacactcttcacatatcactcggagaccaaacggtaaaacgtggtctacaaaacggcctgctatctcacccgcatattcaaacgagaacgcgcagggctcttggaacggagaccaagacgccggtcccctcctggtcgaaaatccgagggactactccaccgagctgagcgtgacgatagccgtgggggcgagccttttgttcctaaatgtgcttgctttcgcagcactgtattaccggaaggacaagcggagacaagaacctctgcgccagccatcccctcagcggggtgcaggggcaccagaattaggtgccgctcccgaagaggagctggcagccctccaacttggccccacccaccacgagtgtgaggctgggcctccacacgatacgctgcgcttgacggctctccctgattacacgttaactctcagaaggtcacccgatgatatccccctaatgacacccaataccatcaccatgatccccaattctctcgtaggtttacagactctgcatccttataacactttcgctgctggatttaactccaccggcctgcctcactcacactctaccactcgggtgtag

SEQ ID NO: 197048 - DNA, 1542 bp, synthetic construct
  misc_feature 1..1542: note = Description of Artificial Sequence: Synthetic coding sequence
  source 1..1542: mol_type = other DNA
atgtggctgcggctgggcccccccagcctgagcctgagccccaagcccaccgtcggtcgaagtctgtgcttaacgttgtggttcctgagtctggcgcttagagcaagcacccaggcccccgccccaaccgtgaacacccactttgggaaactgaggggagccagagtccccctgcctagcgaaatattgggtccagtggaccagtatctcggagtaccctatgcggccccgcccatcggggaaaagcgctttctgcccccagaacctcctccaagctggagtgggattagaaacgccactcactttccccccgtctgcccacagaatatccacacagccgtgcccgaagttatgctacccgtttggtttactgccaacctggatatcgtagcgacatatatccaggaacccaacgaagactgcctttacctcaatgtgtacgtcccaaccgaagatgacataagggactctggggccaaaccggtgatggtctacatccacggtgggagctacatggagggaacaggaaatatgatagatggaagtatccttgcaagttacggtaatgtgatcgtgataacccttaactacagagtgggagtgttaggatttctgagtacaggggatcaagccgcaaaaggaaactacgggctgctggatcagattcaggccttgagatgggtgtcagaaaatattgcgttcttcggcggcgatcctaggagaataacagtttttggctctggcataggggcatcctgtgtcagtttacttactctgtctcatcactccgagggcctgttccaacgtgcaatcattcagtccggcagcgctcttagttcatgggcagtgaattaccagcctgtcaaatacacatccctgctggcggataaagtgggctgcaatgtgttggacaccgtggatatggtggactgtctccggcagaaaagcgctaaggagctcgtcgaacaggatattcagccagcccgttaccacgtggctttcggaccagtgatcgatggtgacgtcataccagatgatcccgagatcctgatggaacagggcgagtttttaaactatgacattatgctgggcgtgaaccagggtgaagggctgaaattcgtcgagggcgtcgtggatcccgaggatggcgtaagcggcacggactttgactattctgttagtaactttgtggataatctgtatggctatcccgaaggtaaggacacattacgggagacaatcaagtttatgtataccgattgggccgatagggataatcctgaaacccgcaggaaaaccctcgtcgccctgttcacagatcatcagtgggtggagccgagcgtagtaaccgccgacctgcacgcccgatatggcagtcctacctatttctatgcattttatcatcattgtcaaagcctcatgaagccagcttggagcgatgcagcacatggcgacgaagtgccttacgtcttcggagtgcccatggttggacctaccgatcttttcccgtgtaattttagcaagaacgatgtgatgctgtag

SEQ ID NO: 197049 - DNA, 2427 bp, synthetic construct
  misc_feature 1..2427: note = Description of Artificial Sequence: Synthetic coding sequence
  source 1..2427: mol_type = other DNA
atgtggctgcggctgggcccccccagcctgagcctgagccccaagccaaccgttgggcgaagcttgtgtctcactctgtggttcctaagcctagcccttcgtgccagcacgcaggctcctgcacccacagtcaacacacattttggcaagctgcggggggctagagtccctcttccttcagagatactcggacccgtggaccagtatctaggggtgccatacgctgccccgcctatcggggaaaagagattcctccctcccgagccccctccgagttggagcggcatccgaaatgctacgcatttcccacccgtgtgtcctcagaatattcataccgcagtccctgaggtgatgctcccggtgtggttcacagctaacttggacatcgtcgccacctacattcaggaaccaaacgaagactgtctttacctgaatgtctacgttccaactgaagatgacatacgggattccggagcgaaacccgtcatggtgtatatccacggcgggtcatatatggaggggaccggcaacatgatcgacggcagcatcctcgcctcttatggcaacgtaatcgtgatcactctaaactacagagtcggcgtgttgggcttcctgtccactggggatcaggctgcaaaggggaattatgggctgctggatcagatccaggccctaaggtgggtttctgagaacatcgcctttttcggcggagacccccggcgaatcaccgtgtttgggtccggaatcggtgcctcatgcgtgtctttactgaccctgagtcaccactccgagggactctttcagcgcgctattatccaaagtggcagcgcattgtctagctgggctgtcaattaccagcctgtcaaatacacctccctgttggctgacaaggtgggctgcaatgtcctggacaccgtcgacatggttgactgtttaaggcagaagagtgctaaagagcttgtcgagcaggacatccagccagcccggtaccacgtggccttcggccccgttatcgatggcgacgtcattccagatgatccggaaatcctcatggaacagggggaattcttaaactatgatattatgctgggtgtgaaccagggcgaagggctcaagttcgtggagggagtcgtggaccccgaggatggagtttctggcacagactttgattatagtgtctccaatttcgttgataacctgtacggttaccctgagggcaaggacactttgagagaaacaataaagtttatgtataccgactgggcagaccgcgacaaccccgaaacacggcgaaagaccttagtcgcattgtttacggaccatcagtgggtcgaaccatccgtagtgaccgctgatctgcacgccaggtacggcagccccacttacttctacgccttctatcatcactgtcaatctctgatgaagcctgcctggtccgatgcagcccacggagatgaggtgccgtatgtcttcggtgtcccaatggtcggacccacggacttgtttccctgtaatttttccaaaaatgacgtaatgttgagtgcagtggtaatgacatactggactaatttcgccaagacaggcgaccccaacaaacccgtacctcaggatactaaattcatccatactaaggctaatcggttcgaggaggtagcgtggtccaaatataaccccagagaccagctctatctgcacatcgggctcaaaccccgggtccgggatcactatcgagccaccaaggtggcgttctggaagcacctagttcctcatctttacaacttacatgacatgttccattacacctccacaacaacaaaagtcccacccccggacactacacactcatctcacataactcggcgtcctaacgggaaaacatggtcgactaagcgcccagccatctccccagcatatagtaatgaaaatgctcagggttcatggaacggggaccaggacgccggacctctgcttgtcgaaaaccccagggattattccacggagctaagcgtcaccatcgccgttggtgcctctttgctcttccttaacgtccttgctttcgccgccctctactaccggaaagacaagagaaggcaagaaccccttagacagccttctccgcagaggggagccggcgcgcccgagctgggcgccgctcccgaggaggagttagctgcacttcagcttgggcctacgcatcacgaatgtgaagcaggcccaccccacgacaccctacgcctcactgcgctgcctgattatactctcacccttagacgcagccccgacgatattccacttatgacaccaaatacgattaccatgatccccaattcattggtgggtttacagacgctccacccctataacacatttgctgcggggtttaacagcaccgggttacctcactcccactcgacgacacgagtgtag

SEQ ID NO: 197050 - DNA, 1056 bp, synthetic construct
  misc_feature 1..1056: note = Description of Artificial Sequence: Synthetic coding sequence
  source 1..1056: mol_type = other DNA
atgctgcccgtgtggttcaccgccaacctggacatcgtggccacctatatccaggaaccgaacgaggactgtctgtatttaaacgtgtacgtgccgacagaggatggctccggagcgaagaaacagggggaggatctggccgataacgatggcgatgaagacgaggatatccgggattctggagccaagcccgtgatggtttacattcatggagggtcatacatggaaggcactgggaacatgatcgatgggtctattctcgccagctatggcaacgtgattgtgatcactctgaactatcgggttggtgtgctcggatttctctccaccggagatcaggccgccaaggggaactacgggttgctggatcaaatccaagcattgagatgggtaagcgagaacatcgcgttttttggcggagatcctcgacgaatcacagtcttcggttccggcataggggccagctgtgtgagtcttctgaccctcagccaccacagcgagggattatttcagagagccattatacagtccggtagcgcacttagctcctgggctgtgaactaccagcctgttaaatatacaagtttgctagccgacaaagtgggttgcaatgtgcttgacaccgtagacatggttgactgtctgcggcagaaatctgcgaaggagttagtcgagcaagacatacagcccgcccgttatcacgtagccttcggccccgtgatcgacggcgatgtgatacccgacgatccagagatcctgatggaacagggcgagttcctcaactatgatatcatgcttggcgtcaaccagggggagggactgaagtttgtggaaggagtggtggaccctgaggatggggtttcaggtaccgactttgattatagcgtgtctattctatggacgatttgtatggcaattttgagagtacgcactccatgcgagagaccttcctcaagctgtattcagacaggccagactgttaccaccctacgtcctgcagtgaagcactggtggcacagctcgcttacaaccagtggatggagcccacagtggtag

SEQ ID NO: 197051 - DNA, 771 bp, synthetic construct
  misc_feature 1..771: note = Description of Artificial Sequence: Synthetic coding sequence
  source 1..771: mol_type = other DNA
atgctgcggccccagggcctgctgtggctgcccctgctgttcacctccgtgtgcgtgatgctgaatagtaacgtccttctgtggattactgctctggcaatcaagttcacactcatcgactcacaggctcaatatccggtggtgaatactaactacggcaagattcagggcttgaggaccccactgcccagcgagatcctgggcccagtggagcagtacctgggagtgccctatgcttcaccgcccaccggagaacgccgctttcagccgcccgagtccccttcctcgtggaccggaattcgcaatgccacgcagttcagtgctgtgtgtccacagcacctcgacgagaggttcctgctgcacgacatgctccccatttggtttaccacttcactcgacactctgatgacgtacgtccaagaccaaaatgaagactgcctgtatctgaatatatatgtccccatggaagatgggactaatatcaaacgaaatgcagatgatatcacgtctaacgaccacggggaagataaggacattcacgagcagaattccaaaaaacccgtgatggtatatattcacggggggtcttatatggaaggcacgggcaatatgatcgatggttccatccttgccagctacggtaatgtcattgtgatcacaatcaattatcggttaggcatcctggggatgcaggaggcacgcctgtgtgggagctccaaaatgttcaactattttaagtctccctttacaaacctgatcaacttcttttag

SEQ ID NO: 197052 - DNA, 2451 bp, synthetic construct
  misc_feature 1..2451: note = Description of Artificial Sequence: Synthetic coding sequence
  source 1..2451: mol_type = other DNA
atgctgcggccccagggcctgctgtggctgcccctgctgttcaccagcgtgtgtgttatgcttaactctaatgttctgttatggatcactgcactcgccatcaagtttactttaatcgacagtcaagcccagtacccggtggttaacacgaactacggcaagatccaaggcctccgaacaccactcccgtctgaaatcctggggccggtggaacagtaccttggagtgccttacgcttccccaccaaccggagaaaggaggtttcagcctcccgaatcgccatctagctggactggcattagaaacgcaacccaattttcagctgtgtgtccacaacacctggacgaacggttcctgctgcacgatatgctgcctatctggtttaccacatcactcgacacattaatgacatacgtccaagatcagaacgaagactgcctgtatctgaatatctacgtcccgatggaggacgatatacatgagcagaacagcaaaaaacccgtgatggtgtatattcacggtgggagttacatggaaggtacaggcaacatgattgatggctcaatcttggccagttatgggaatgtcattgttataaccattaattatcgactgggaatattgggttttctttctaccggcgaccaagctgcaaaaggaaactacgggctgctcgaccagatccaggcattgcgctggattgaagaaaatgtaggggccttcggcggcgaccctaaacgcgttacaatcttcggaagtggcgccggcgccagttgtgtcagcctcctgactttgtcgcattatagcgaaggactcttccagaaggccattatccagagtggaactgcactctccagctgggccgtgaattaccaacccgccaagtataccagaatcctagctgacaaagtagggtgcaatatgctcgatacaacagacatggtggagtgcctcaaaaacaagaactataaggaacttattcagcaaacaatcacgccagcaacgtaccacattgcctttggacccgtgatcgatggtgatgttatcccagatgaccctcagattctcatggaacagggcgaattccttaactatgacattatgttgggagtcaaccaaggagagggtcttaagttcgttgatgggatcgtcgataatgaggacggggtgacccctaatgatttcgacttcagcgtgagcaattttgtggataatctgtacgggtatccagaaggcaaggacactctgcgggagaccattaagtttatgtacactgattgggccgacaaggagaaccctgagacacgtcggaagactctggttgccttgtttaccgaccatcaatgggtcgcacctgcggtggccaccgctgatttgcacgcccagtatggtagccctacctacttctatgctttctaccaccactgtcagtcagagatgaagccaagttgggctgattcagcgcatggcgatgaggtaccttatgtcttcggaattccaatgatcggccccaccgagttgtttagctgcaacttttccaaaaacgacgtgatgctgagcgccgtggtgatgacatattggaccaacttcgcgaaaaccggggatccaaatcagccggtacctcaggacaccaagtttatccacacgaagcctaacagatttgaagaggtcgcctggtcaaaatacaatcccaaagatcagctgtacctgcatattggcctgaaacctcgcgtacgcgatcactatagagctactaaggtagccttctggctggagctggtccctcatttacacaatcttaatgagattttccagtatgtgagcacaaccaccaaggtgcctcctccggatatgaccagtttcccttatggcactcgccggtctccagccaagatttggcccaccacaaagcggccagccataactccggctaataatccaaagcactccaaggacccacacaaaacaggccccgaagacaccacagttctcatcgaaaccaagagagactattcaaccgaactcagtgtgacaatcgccgtgggcgccagtctactgtttctgaacattttggcttttgctgccctttattataaaaaagataagcgacggcatgagactcacagacaccccagtccgcaacggaacacgactaatgacataacccacatccaaaacgaagagatcatgtcattacagatgaagcagctcgagcatgatcacgagtgtgagtctctgcaggctcatgacacgctccgcctcacctgtcctccggactacactctgactttacggaggagtccagacgatatccctttcatgaccccgaatactatcaccatgatccccaatacgctcatgggaatgcagcccctacacaccttcaaaaccttcagcggcggccagaattcaacaaacttgccacacgggcattcgactacccgcgtgtag

SEQ ID NO: 197053 - DNA, 2451 bp, synthetic construct
  misc_feature 1..2451: note = Description of Artificial Sequence: Synthetic coding sequence
  source 1..2451: mol_type = other DNA
atgctgcggccccagggcctgctgtggctgcccctgctgttcacctccgtttgcgtcatgctgaatagtaatgtgctgctttggattaccgcgcttgcaataaaattcaccctgatcgattcgcaagcccaatatcctgtggtgaatacaaattacgggaagatacaggggcttagaactcctctaccctccgaaattctgggccctgttgaacagtaccttggggttccatatgcaagcccccctactggagaaagaagatttcaacccccagaaagtcctagtagctggactggcataagaaatgcaacccagtttagcgcagtgtgccctcaacacctggatgaacggtttctgcttcacgatatgttgccaatatggttcaccacttctcttgataccctaatgacctacgtgcaggaccagaatgaggattgcctttacctgaatatatacgtacccatggaagacgatatccacgaacagaatagtaagaaaccggtgatggtatacattcatggcggctcctacatggagggcacaggtaatatgattgatggcagcatcctggctagctatggcaatgtcatcgtgattactatcaattatcgcctgggtatcctggggttcctttctacgggagatcaagcagccaaagggaattatggactgcttgaccaaatccaggccctgagatggatcgaagagaacgtgggtgcatttgggggggatcctaaaagagtgactattttcggatccggagctggggcctcatgtgtttcgctgttgacgctgagtcactatagcgagggcctctttcagaaggcaataattcagtcgggtaccgccttgtcttcctgggctgtaaactatcaaccagccaaatatacaagaatcttagccgataaggttggttgtaatatgctcgacacaaccgatatggtggaatgcttaaagaataaaaactacaaggagctcatacagcaaacgatcacaccagctacctaccacattgcatttgggcccgtcatcgacggggatgttattccagacgacccgcagattctgatggaacagggggagtttctaaactatgacatcatgttgggagtgaaccagggtgaaggcctgaaattcgttgacggtatcgtggataatgaagacggagttactccaaatgacttcgatttttccgtctctaacttcgttgacaacctatatggctatccagagggcaaggacactctgagggagaccatcaagttcatgtatactgactgggccgacaaggaaaatcccgaaacccgaaggaagaccctcgttgctctgttcactgatcaccaatgggtcgcccctgctgtggccaccgctgacttgcacgcacagtacggcagtcctacctatttctatgcattctatcaccattgtcagtctgagatgaagccgtcttgggcagattcagcacacggagatgaggtgccatatgtcttcgggatccctatgataggaccaaccgaattattctcatgtaatttcagcaagaatgatgttatgctgtcagccgtggtcatgacgtactggacaaactttgccaagacaggagatcctaaccagcccgtgccacaagatacaaaattcatccatactaagcctaatcgctttgaggaggtggcctggagcaaatacaatcctaaggatcaactttatcttcacatcggactgaagcctcgggtgagggatcactatcgagctactaaggtggccttttggttggagctggtgccccatctccacaacttaaacgagattttccaatacgtctccactaccacaaaggtgcctccacctgacatgacctcgtttccatacgggacccgcaggtctcctgcgaaaatctggccaacaaccaaaagacctgctatcacgcctgcaaataaccctaagcactctaaggaccctcacaagaccggtccagaggacacgaccgtcttaatcgaaacgaagagagattattccacagagctgagtgttactattgcagtcggtgctagccttctcttcctgaatatactggcctttgccgcactgtactacaagaaagataaaaggcgtcacgaaactcatagacaccccagcccccaaaggaacaccactaacgatataactcatatccaaaatgaggagattatgagccttcagatgaaacagctagagcacgaccatgagtgtgaaagcttgcaggcgcacgatactcttagattaacctgccctcccgactatacccttacactgcggagatccccggatgatataccctttatgacaccgaacacaatcacaatgatccccaacaccctgatgggtatgcagcccctccacacatttaaaacgttttctgggggacaaaactctaccaacctcccacacggacattccacaacacgagtgtag

SEQ ID NO: 197054 - DNA, 2622 bp, synthetic construct
  misc_feature 1..2622: note = Description of Artificial Sequence: Synthetic coding sequence
  source 1..2622: mol_type = other DNA
atgctgcggccccagggcctgctgtggctgcccctgctgttcacctctgtgtgcgtgatgctgaattcaaacgtgttgctgtggatcaccgccctggctatcaaattcacactgattgattcgcaggcccaatatccggtggtcaacaccaattacggcaagatacagggcctccgcacaccgcttcctagcgagatcctggggcccgtagagcagtacctgggtgtgccttatgcatctccacccaccggtgaaagaagatttcaaccacctgagagtcctagctcatggactgggataaggaacgcaacccaattttcagctgtttgtccacaacacctagatgaacgctttctactccacgacatgctaccaatctggttcaccacctcactggacaccctcatgacgtatgtgcaggaccagaatgaggactgcctgtatctgaacatctacgtccccatggaagacggcaccaacataaagcggaatgctgatgacatcacatccaacgatcacggtgaggacaaagatatccacgaacagaattccaaaaaacctgtaatggtgtacatccatgggggaagctatatggaaggaactggcaatatgattgacggcagtatcctggctagctacggcaacgtgatcgtgattacaattaattatcggttggggattttagcccagaatacattggcccacggaaactgtaagcatcggtgtcagcttcatctgcaggctccaagagattgcaaatcagcttatcccttcagaaacgaggacgaaattcgcggatttctttcaaccggtgatcaggccgctaaaggaaactacgggctgctggatcaaattcaggctctccgctggatcgaggagaacgtgggcgccttcggtggcgatcctaagcgggtgaccatctttggttccggcgctggggcctcctgtgtgtctctgcttactctatctcactattcagaggggctgtttcagaaagctatcattcagagtggaacggcattaagctcatgggcagttaactatcagcccgctaagtatacacgtatactggctgacaaggtgggttgcaacatgctggacaccactgacatggtagaatgccttaagaataagaactataaggaactcatccagcagaccatcacacctgctacataccacatcgcttttggcccagtcatcgatggggatgtaatcccggacgatccacagatattaatggaacagggcgagtttctgaattatgatataatgctcggagtgaaccaaggcgaaggtctgaagttcgtcgacgggattgtggataacgaagatggtgtcactcctaatgactttgacttctctgtctccaacttcgtagacaacctctacggctacccagaaggcaaagacactcttagagaaaccatcaaatttatgtacacagattgggcggataaggagaaccctgagactcgcaggaagacactggtcgcccttttcactgaccaccagtgggtggctcctgccgtggcaactgccgaccttcacgcccagtatggctcacccacgtatttttacgcattttaccaccactgtcaatcagagatgaaaccttcttgggctgatagcgcccacggcgatgaggtgccttatgtgttcggaatccccatgattggcccaacagagctgttcagctgcaacttttcaaaaaatgacgtcatgctttctgcagtcgtgatgacctactggactaactttgcaaaaaccggagatcctaaccagcccgtaccccaggacactaagtttatccacacgaaacccaaccggtttgaggaagtggcttggtccaaatataacccgaaagatcaactctatttacacatagggttgaaaccgagggtgagggatcattacagagccaccaaggtcgctttctggctagagctggtgccacacttacacaatctcaacgaaatttttcagtatgtgagcactaccactaaggtcccgccccctgacatgacttcatttccatacggtactagaaggagccccgctaagatctggcctacaaccaaaaggcccgcgattactcccgcaaataatcccaagcattccaaagacccgcacaaaaccggaccggaagacactacagtactgattgaaacaaaacgtgattactctactgaactatcagtaacaatagccgtgggcgcttcccttttgtttctaaacatcctggccttcgccgccttgtactataagaaagataaaagacgccacgagactcaccgccacccaagccctcaacggaataccacaaacgacatcacccatatacaaaacgaggaaattatgtctctgcaaatgaagcagttagaacacgaccatgaatgtgaaagtttgcaggctcacgatactctcaggctcacctgcccccctgattacacgctcacactgaggcgctcccccgatgacatacctttcatgacacctaacaccatcacgatgatacctaatacactgatgggaatgcagcctctgcacacttttaagacatttagcggcggtcaaaattccactaatctgcctcacgggcacagtacaacaagagtgtag

SEQ ID NO: 197055 - DNA, 1947 bp, synthetic construct
  misc_feature 1..1947: note = Description of Artificial Sequence: Synthetic coding sequence
  source 1..1947: mol_type = other DNA
atggtgtacatccacggcggcagctacatggagggcaccggcaacatgatcgatggctcaattctcgcctcttacggcaacgtgatcgtaataacgattaactacaggctgggaattctggggttcttaagcaccggtgatcaggctgccaaaggaaattatgggcttttggaccagattcaggcgctccggtggattgaggaaaacgtgggcgccttcgggggcgatcccaaacgtgtaactatattcgggtcgggggccggtgctagctgtgtgtcactgttgactctgagtcactacagcgagggtttgtttcagaaggctataattcagtctggaacagcactcagtagctgggctgtcaattaccagcccgcaaaatacacccgcatcctcgctgacaaggtggggtgtaatatgctcgacacgactgacatggtggagtgcctgaaaaacaaaaattacaaagagcttatccagcaaactattactcctgccacgtaccatatcgcttttggcccagtgattgatggagacgtaatcccggatgacccacagatcttgatggagcagggcgaattcctgaactatgacattatgttaggtgtgaatcaaggtgaaggactcaaatttgttgacggaatcgtcgacaacgaggacggcgtcacgccgaatgatttcgacttcagcgtgtcaaacttcgtcgataatctgtacggctacccagagggaaaagacacactccgcgagaccatcaagttcatgtatacagactgggccgataaggagaatcctgagacgagaagaaaaaccctggttgcgctgtttaccgaccatcagtgggtggcacccgctgttgccaccgctgacctgcacgctcagtacggatctcccacctatttttatgcgttctatcaccactgtcaatcggagatgaagccttcctgggccgactcagcccacggggacgaggttccttacgtcttcggcatcccaatgataggcccgacagaactgttctcatgcaacttctccaagaacgacgtaatgctgtcagccgttgtaatgacatattggacaaatttcgctaagacaggggatcctaaccagccagtaccccaggacacgaaattcatccataccaaaccgaacagattcgaagaagttgcttggagcaagtataatccaaaggatcagctttacttgcacattgggctgaagcctagggtccgcgatcattacagggccactaaagtggctttttggttggaactggtgccccaccttcacaatctgaacgaaatcttccagtacgtgagcaccacgaccaaggtgcccccccctgacatgacaagctttccgtatggaacccgcaggagccccgctaagatctggccgactacaaagcgcccagcgatcaccccagctaacaacccgaaacacagcaaggatccacataagactggtccagaggacactacggttctcattgaaacaaagagggactacagcacagaactatccgtgacgatagcagtgggagcctctctgttatttctgaatatcctcgcgtttgctgctctgtattataagaaagacaagcggcgtcacgagacccaccgccaccctagtccccagagaaataccacaaatgacataactcatatccagaacgaggagattatgtctctccaaatgaagcagctggaacacgatcatgaatgtgagagtctacaagcacacgacacactccgactgacctgcccccccgactacacactcactctgcggcggagcccggacgatatcccctttatgacaccaaatactatcactatgatccccaacacgctgatgggaatgcagccactgcacacttttaagaccttctcaggtggtcagaatagcaccaatctgcctcatgggcatagtactaccagggtctag

SEQ ID NO: 197056 - DNA, 711 bp, synthetic construct
  misc_feature 1..711: note = Description of Artificial Sequence: Synthetic coding sequence
  source 1..711: mol_type = other DNA
tgaaacagcaacgtgctgctgtggatcaccgccctggccatcaagttcaccctcattgatagccaggcccagtatccagttgtaaacaccaattacggcaaaatacagggtcttcggactcctctgccttctgaaattttaggccctgtggagcagtacttaggagtgccctacgcaagccccccaaccggcgaaaggagatttcagccccctgagtccccatccagttggacaggcatccgaaacgccactcagtttagtgcggtctgtccgcagcatctggatgagcgttttctgctgcatgatatgctccccatctggttcaccacgtctctggacaccctgatgacttatgtgcaagaccagaacgaagactgtctttacttgaacatctatgtgccaatggaggatggaacgaatattaaacgcaatgccgatgacatcacctccaacgatcacggggaagataaggatattcacgaacagaattctaagaagcccgtgatggtatatattcatggcggctcctacatggaaggaacaggcaacatgattgatgggagcattttagccagctacggcaatgtgatcgtgattacaataaattaccgcttaggcatattgggaatgcaggaagcccggctgtgcggatcttcaaagatgttcaactactttaagtctccattcacaaacctgattaactttttctag

SEQ ID NO: 197057 - DNA, 2511 bp, synthetic construct
  misc_feature 1..2511: note = Description of Artificial Sequence: Synthetic coding sequence
  source 1..2511: mol_type = other DNA
atgctgcggccccagggcctgctgtggctgcccctgctgttcaccagtgtctgcgtgatgttgaattcgaacgtgctgctgtggataacagcccttgccattaaattcaccctgatcgattcccaggcccagtatcctgtcgttaacacaaattacgggaaaatccagggcctacgcacccctttgcccagtgagattttaggtcctgtcgagcagtacttgggcgtcccatatgcctcacccccgacgggcgagagacgcttccaaccccccgagtctccttcctcctggacaggtattcgtaacgccactcagtttagcgcagtctgtccacagcacttagatgagagattcctgttgcatgatatgctgcctatatggtttactacaagcctggacaccctgatgacgtatgtgcaggatcaaaatgaagactgcttatacctgaacatctatgtgcctatggaggatggtaccaacattaaaaggaatgccgatgatatcacctctaacgaccacggggaagacaaagacattcacgagcagaatagtaaaaagcccgtgatggtgtatatccacgggggttcatatatggaggggactggcaacatgatcgatggatccatcctggcatcatacgggaacgtgatcgtcatcaccatcaattatcgtctgggcattctgggtttcctttccaccggcgaccaggccgccaaaggaaattatggcctgctggatcagattcaagctctccgatggatcgaagaaaatgtgggggccttcggaggagatcctaagagggtgaccatttttggcagtggcgcgggcgccagttgtgtttcactgctgaccctgtcccactacagtgagggacttttccaaaaagccataatccagagcgggaccgcgctgagctcttgggccgtgaactaccagccagctaagtatacccggatccttgccgacaaggtggggtgcaacatgttggatacaaccgatatggtggagtgcctcaagaacaagaactacaaagagttgatccagcagaccattacacctgccacctaccacattgccttcggacccgtgattgacggcgatgtgatcccggacgacccgcaaatactcatggaacagggggagttcctcaattatgatatcatgctgggcgtcaaccaaggggagggactgaagttcgtcgatggcatagtggacaacgaggacggtgtcacacccaatgatttcgacttcagtgtgagtaactttgtggacaacctttacggatatccagaggggaaggacacactcagggagaccattaagtttatgtacacggattgggccgacaaggaaaatcccgaaacaaggcgcaaaacattggtcgctttatttacggatcaccagtgggtggcacctgctgtggccaccgccgacctgcatgcgcagtatggatctcctacctatttttacgcattctatcatcactgtcagagtgagatgaaaccctcctgggcagactcagcccacggagatgaggtaccatacgtttttggcatacccatgatcggtccaaccgaattgtttagctgcaacttttcaaagaacgatgtgatgctgagtgcagtcgtcatgacctactggacaaacttcgcaaaaactggagatcctaaccagcccgtcccacaggataccaaattcattcataccaaacccaataggtttgaagaagtggcttggagcaagtacaatcctaaagatcagctgtatttacacatcggtctgaaaccgcgagtaagagaccattatcgcgctaccaaggtggctttttggctggagttggtgccccatttacataacctgaacgagatatttcagtatgtgtcgacaacgactaaggtcccacctccagatatgacttcgttcccatacggtacgaggagatcccctgccaaaatctggccaacgacaaagcgtcccgccataacgccggccaacaatccaaaacactctaaagatccccataagactggccccgaagacacaactgttttgattgagacaaagcgcgactattccactgaactgagcgtgaccattgccgtgggtgcgtctctgttgttcctgaacatcctcgcattcgctgccctgtactacaagaaggacaagaggagacacgagacacatcggcaccctagcccacagagaaataccaccaatgatataacccatatacagaacgaggagataatgagcctgcagatgaaacaactggaacacgatcacgagtgcgaaagtctgcaggcccacgacacactccgtttgacttgccccccagactatacgctgacactgaggcgctcaccagatgatatcccattcatgaccccgaatacgatcacaatgatccccaacactttaatgggtatgcagccactgcacaccttcaaaaccttcagcggcggtcagaactcaacaaatctcccccatggccactccacgaccagggtttag

SEQ ID NO: 197058 - DNA, 1824 bp, synthetic construct
  misc_feature 1..1824: note = Description of Artificial Sequence: Synthetic coding sequence
  source 1..1824: mol_type = other DNA
atgatcgcccggtgcctgctggccgtgcggagcctgcggcgggtgggtgggagtcggattctgctgcgaatgactctcgggcgagaggtaatgagcccactgcaggcgatgtcctcttacactgtcgccggccgcaacgtgctgcggtgggatctctcaccggagcagattaagacacggaccgaggagcttattgtccagaccaagcaagtgtatgatgctgtcggcatgttgggaattgaggaagtaacctatgagaactgcctgcaagctctcgctgacgtcgaggtgaaatatattgtggagcggacaatgttagactttccacagcacgtctcctcggacaaagaggtaagagccgcctccaccgaggccgacaagaggcttagtagattcgacatcgaaatgagcatgaggggagacatatttgaacggatagtacatttgcaggaaacgtgcgacctgggtaagataaagcccgaggccagacggtacctcgaaaagagcattaagatgggtaagcggaacggactccatctacccgagcaggtgcagaacgaaatcaaaagtatgaagaaacgaatgagtgagctttgcatagactttaacaagaatctgaatgaggacgacaccttcctcgtttttagtaaggctgaattgggagcattgcccgatgactttatcgattctctggaaaaaaccgatgacgacaagtacaagatcaccctcaagtaccctcattactttcctgtgatgaagaaatgttgtattccagaaacccggagacgtatggagatggccttcaatacacggtgtaaagaggagaatacaatcatcttgcagcagttgctcccactgagaacaaaggttgcaaagttgcttggatattcaacccatgctgattttgtcctggagatgaataccgctaagagcacctccagagtaactgccttcctcgacgacctttcacaaaagctgaaaccactcggagaggcagagcgggagttcattttgaacctgaagaaaaaagagtgtaaggatagaggatttgaatatgacggaaagatcaacgcctgggatctctattactacatgacccagactgaggagttgaaatattctattgatcaagaattcctgaaggaatacttccctatagaggtcgtgaccgaggggctactcaacacctatcaggagctactaggtctgtcgtttgaacagatgactgatgctcacgtctggaacaaatccgttacactctatactgtaaaggacaaagccaccggagaggtgctggggcagttctatctggacctttatccccgagaggggaagtacaatcatgccgcatgtttcggtctccagcctgggtgcctccttccagacggatcacgcatgatggccgtggcagccctggtcgtgaactttagccagcctgtggcagggcggccgtcgttactccggcatgacgaagtgcgcacctattttcatgagtttgggcatgtgatgcaccagatttgtgcccagaccgacttcgcccggtttagcgggaccaacgtcgaaacggactttgtggaggtcccctctcagatgttagaaaattgggtgtgggacgtagactctctccgaagactgtctaagcactataaagatggatcccctatcgctgacgatctcctcgagaagctcgtggcatcaagattagtgaataccggcttgctgacactcagacaaattgtcctctccaaggtggatcagtcccttcacactaacacaagtctggacgctgcttctaatatgccaaacactgcacagaaatactag

SEQ ID NO: 197059 - DNA, 2115 bp, synthetic construct
  misc_feature 1..2115: note = Description of Artificial Sequence: Synthetic coding sequence
  source 1..2115: mol_type = other DNA
atgatcgcccggtgcctgctggccgtgcggagcctgcggcgggtgggcggttcccgcattctcctgcgcatgacactgggcagagaagtgatgtccccactgcaagcgatgagcagctatacggtggccggccggaacgtgctccgctgggacttatcaccggaacagattaagacaaggacagaggagctgatcgtgcagacaaagcaggtgtacgacgcggtaggaatgttaggtattgaagaggttacatacgagaattgcttacaggcacttgcagatgtggaggtgaaatacatcgtagagaggacaatgctagatttcccacaacatgtgagttccgacaaagaagtgcgcgcagctagcaccgaggctgacaagcggctgtccagatttgacatcgaaatgagtatgcgaggcgacatatttgaacggatcgtacatcttcaggaaacatgtgaccttggcaaaataaaacccgaggctcggaggtacttagaaaaatccatcaaaatgggaaagagaaatggattacatctccctgaacaggtacagaacgaaatcaagagcatgaagaagcggatgagcgagctgtgcattgactttaacaaaaatttaaatgaggacgatacatttctggttttcagcaaagctgaactgggtgctctgcctgatgacttcattgacagcttggagaaaaccgacgacgataagtacaaaatcactctcaaatatccccactattttccagtgatgaagaagtgctgcataccagaaactaggcggaggatggaaatggcttttaacactcgctgcaaagaggagaacaccatcatcctacaacagctgttgccacttaggaccaaagtggctaagttgctgggatacagtacccacgcagactttgtgctggaaatgaatactgcaaagtccacttccagagtgaccgccttcctggatgacttgagtcagaaactaaagccattgggcgaagccgagcgggaattcatcctcaatttaaaaaaaaaggaatgcaaggacagggggtttgagtatgacggtaaaattaatgcctgggacctgtactattacatgactcagaccgaggagctcaagtactcaatcgatcaggagttcctcaaggaatacttcccaatcgaagttgtaacggaagggctgctaaacacataccaagagctgctgggcctgtcgtttgaacagatgacggatgcccacgtatggaacaagtctgtcactttgtatactgtaaaggacaaggcaactggcgaagtcctaggacaattttatctggacttgtatcccagggaaggtaagtacaatcatgctgcatgcttcggtctccagccaggatgcctgttgccagacggcagtcgtatgatggcggtcgccgcattagtggtgaacttttcccagccggtggcagggaggccctccttgctgagacatgatgaggtgaggacctacttccatgaatttggccatgttatgcaccagatttgcgcccagaccgacttcgcaaggttctctggtacaaatgttgaaaccgacttcgtggaagtcccatcacagatgctggagaactgggtatgggacgtggacagcctgcgcagactctcgaaacactacaaggatggatcacccatagcagatgacctgcttgagaagctggtggctagtaggctcgtgaatacaggcctcctaactctgcgtcagatagtcctgtccaaagtagatcaatctctccatacaaatacctcactcgacgcagcgagcgaatacgctaagtattgcagtgaaatccttggcgtggcggctacacctgggaccaatatgcctgcgaccttcggtcacctggccggtggctatgatggacagtactacggctacctgtggagcgaggtctttagtatggacatgttctatagctgtttcaaaaaggaagggattatgaaccccgaggttggcatgaagtaccggaacctcatcctaaagccaggtggcagtttggatggcatggacatgctgcataatttcctgaagcgagagcccaaccagaaggccttcctgatgtcaagaggcctgcatgctccatag

SEQ ID NO: 197060 - DNA, 1803 bp, synthetic construct
  misc_feature 1..1803: note = Description of Artificial Sequence: Synthetic coding sequence
  source 1..1803: mol_type = other DNA
atgctggacttcccccagcacgtgagcagcgacaaggaggtgcgggccgcctccacagaagcggacaagagactctcgaggttcgacatcgaaatgagcatgcgcggagacatttttgaacgtatcgttcacttgcaggagacttgcgatctaggcaaaatcaaaccagaggctcggaggtacctcgagaagtcaattaagatggggaagcgtaacggcctgcatctgcccgagcaagttcagaacgaaatcaagtccatgaaaaaacgcatgtcagaactatgtatcgatttcaataagaacctcaacgaggacgacacatttctggtctttagtaaagccgagctgggagccttaccagacgacttcatcgacagtctggagaagacagatgatgacaagtataaaattacacttaaataccctcattacttccccgtgatgaaaaagtgctgtattcccgaaacacgacggcgcatggaaatggctttcaacacaaggtgcaaggaagaaaatactataattttacagcagcttctgccccttcgcactaaggtggctaaactccttggctattcaacacacgccgacttcgttcttgaaatgaatactgccaagagcacttctcgagtgactgctttccttgacgacttgtcacagaagctgaaacccctgggagaggctgagagagagtttattctgaatctgaaaaaaaaagagtgtaaagatagaggatttgagtacgatggcaaaatcaacgcctgggatctttattattatatgacccagacagaggagctcaagtactctatcgatcaagaatttctaaaagaatatttccccattgaggttgtcaccgaagggctgttaaacacatatcaggagttgctaggactgtcatttgagcagatgacggatgctcatgtgtggaataagagtgtgacgctctataccgtgaaggacaaggccacaggggaggtcctcggccagttttatctggacctgtacccaagggagggaaagtataatcacgctgcgtgtttcggtctgcagcctggatgtttgttgcccgatggttcacgcatgatggcagtggcggcactcgtagtcaattttagccaaccggtggccgggcgtccgagtctccttcgccatgatgaagtaagaacctatttccatgagttcggacatgtgatgcatcaaatctgtgcccagacggacttcgcaaggttctcaggcacaaatgtggaaactgatttcgtagaagtgcctagccaaatgctggagaattgggtttgggatgtcgattcactcagaaggctaagcaaacactataaagatggatctccaattgctgatgatctcctggaaaaactcgttgcttcaagactagtgaacactggtttgcttaccctgagacagatcgtattatccaaagttgatcagtccctccatactaacaccagcttggacgcagccagtgagtacgcgaagtattgctccgaaatcctcggggtggcagccacacccggcaccaacatgccagcaacattcggtcatctcgccggcgggtatgatggccagtactatggatacctgtggagcgaggttttcagtatggacatgttttattcctgttttaaaaaggaaggtatcatgaaccctgaagtgggtatgaagtacaggaacctaatcctgaaaccgggcggaagtctggatggcatggatatgctccacaactttctgaagcgggaaccaaaccagaaggcgttcctcatgtccaggggcctccatgccccatag

SEQ ID NO: 197061 - DNA, 366 bp, synthetic construct
  misc_feature 1..366: note = Description of Artificial Sequence: Synthetic coding sequence
  source 1..366: mol_type = other DNA
atggcccggcgggccggcggcgcccggatgttcggcagcctgctgctgttcgctctcctcgctgccggagtggcaccactgagctgggacctccctgaaccccgaagccgcgcatccaaaatccgcgttcactccagaggcaatctctgggctactggacactttatgggcaaaaaatctctggagccaagttctccgtcccccctcggcacagccccacacacgagcctccgcgaccagcggttacagctctcccatgacctgctaggcatactgctgttgaagaaggctctgggcgtttctctctctagacccgccccccagatccagtatcgccgcttactggttcagattctgcagaagtag

SEQ ID NO: 197062 - DNA, 465 bp, synthetic construct
  misc_feature 1..465: note = Description of Artificial Sequence: Synthetic coding sequence
  source 1..465: mol_type = other DNA
atggcccggcgggccggcggcgcccggatgttcggcagcctgctgctgtttgctctccttgcggccggtgtggccccactgtcatgggatctgcccgaacctcgtagtcgtgccagtaagattcgcgtccacagccgcggaaacctctgggccacgggccactttatgggtaagaagagtctggaaccttcttcacctagccccctcggcactgcaccccatacgtcgctgcgggatcagcgattgcagctgtcgcatgacttgctggggatcctacttctgaagaaagccctcggcgtatccctgtctcggcctgccccccaaatccaggaggccgccggaacgaatactgccgaaatgactccgatcatgggccagacccagcaaaggggcctggattgtgcacacccaggaaaagttctcaacggcactctgctgatggcacctagcggatgcaagagctag

SEQ ID NO: 197063 - DNA, 1173 bp, synthetic construct
  misc_feature 1..1173: note = Description of Artificial Sequence: Synthetic coding sequence
  source 1..1173: mol_type = other DNA
atgcccagcaagagcctgagcaacctgagcgtgaccaccggcgccaatgagagtgggagcgttcccgaaggatgggagcgggattttctgccagccagcgatggaactaccactgagctcgtgatcaggtgcgtgataccgtccctatatctattgataatcacagtaggactgttggggaatatcatgctcgtaaaaatctttatcaccaactcagcgatgagaagcgttcccaacatatttatcagtaatttggctgctggagatctcctcctcctcctgacgtgtgtccccgtggatgcctccagatactttttcgatgagtggatgttcggcaaggtcggctgtaaactgataccggtgatccagctgacctctgtcggagtgtccgtcttcaccctgaccgcactctctgctgaccggtaccgcgcaatcgtaaatccgatggacatgcaaacttcaggagcactgctgagaacatgtgttaaggcaatgggcatctgggttgtgagcgtgctgctggccgttccggaagccgtgttcagcgaggtggcccggatcagtagtctggataattctagcttcacagcttgcatcccatacccccaaaccgacgagcttcatcctaagatacactctgtgttgatatttctggtgtatttccttatcccgttggccattatctccatatattactaccacatagcaaaaaccctgatcaaatccgcgcataatctgccaggcgagtacaacgagcacactaaaaaacaaatggagacgcgcaaaagactggcaaaaatcgtgctagtttttgttggatgtttcatcttctgctggttccccaaccatatcttgtatatgtaccgcagctttaactacaacgagattgacccctccctagggcacatgatagtgaccctcgtggcgagagtgctcagcttcggaaattcttgtgttaacccctttgccttgtacctgctgagtgaatccttcaggaggcacttcaatagccagctgtgttgcggtcgcaaaagctaccaagagagaggcacctcatatctactgagcagcagcgccgtgaggatgacaagtctgaaatccaacgccaagaacatggtgaccaattcagtacttctcaacggacactccatgaagcaagagatggctctgtag

SEQ ID NO: 197064 - DNA, 1281 bp, synthetic construct
  misc_feature 1..1281: note = Description of Artificial Sequence: Synthetic coding sequence
  source 1..1281: mol_type = other DNA
atgacccccctgtgcctgaactgcagcgtgctgcccggcgacctgtacccagggggggctaggaaccccatggcctgtaacggctcagctgcacgagggcattttgaccctgaggatctgaatctcactgacgaagccctgaggttgaaatacctgggtccacagcagacagaactgtttatgccgatttgcgccacctacttgctaatttttgtggtgggggccgtaggaaacggattaacatgcctagtgatcctgagacataaagccatgagaacacctacaaattactacttgttttctctcgccgtgagcgaccttctcgtcctgctggtggggttgcccctcgagctgtatgagatgtggcacaactacccatttcttttgggcgtgggcggctgttactttcgaactctcctgttcgagatggtctgtttagccagtgttttgaatgttacagccctatctgtggaaagatacgtggctgtcgttcatcccctccaggcaaggtctatggtgacccgggcccacgtacgtcgagtgttaggcgcagtctggggactggctatgttatgcagcctgcccaacacaagtctgcacgggattcgtcagctgcatgtcccatgccgggggccagtgcctgactccgcagtatgtatgctggtgagaccacgagctctttacaacatggttgtgcagaccacagcgttgctcttcttctgcctgcccatggcgatcatgtctgtgctctatctgcttataggcctgagactgcgtagggagcgtctgctccttatgcaggaagctaaaggaagaggcagcgctgcggcacgaagcagatacacatgtcggcttcaacagcacgatcgggggcggaggcaggtcaccaaaatgctgttcgtcctggtcgtggtctttgggatctgctgggctccttttcacgctgatagggttatgtggtccgtggtcagtcaatggaccgatggactgcacctggcttttcagcacgtgcacgttatctcagggattttcttttatctggggtccgccgcgaaccctgttctgtacagtctcatgagctctagattcagggaaaccttccaggaagctctgtgcttaggcgcatgttgtcaccgtttgcgacctcgtcatagcagccactcactgtcaagaatgactacgggaagcactttgtgcgatgtgggaagcttagggtcttgggtgcaccctctggcgggtaacgacggacctgaagctcaacaggagacagacccatcctag

SEQ ID NO: 197065 - DNA, 1248 bp, synthetic construct
  misc_feature 1..1248: note = Description of Artificial Sequence: Synthetic coding sequence
  source 1..1248: mol_type = other DNA
atgagcggcatggagaagctgcagaacgccagctggatctaccagcaaaaattagaagatcccttccagaaacatttgaattctactgaggaatacctggcctttctgtgtggaccacgacggagtcatttcttcctcccggtttccgtcgtctacgtgccaatcttcgttgtgggtgtgataggcaatgttctggtatgtctcgtaatcctgcagcatcaagcaatgaagacccctacgaattactaccttttcagcttagcagtctcagatttacttgtattgctcttgggcatgcctctggaagtttatgaaatgtggagaaactatccattcttgtttggcccagttggttgctacttcaaaacagccctgttcgaaacagtatgctttgctagcatcctgtctatcaccactgttagcgtcgaaaggtatgtggcaattttgcatccttttcgggccaagctgcaatccacaagacgtcgagcgctaagaatcctgggtatcgtatggggcttttctgtgttgtttagcttgcctaataccagcatacacggcattaaattccactactttcctaatggctccctcgtgcccggctcagcaacctgcacagttatcaagcctatgtggatctataacttcattattcaggtgacgagctttcttttttaccttctgcccatgacagtgatttctgtgctctactatctgatggccctacgcctgaaaaaggataaatccctcgaagcagacgaggggaacgccaatatccaacggccctgcaggaaatcagtcaacaagatgctttttgtcttagtattagtatttgccatctgttgggcaccattccacatcgacaggctgtttttttctttcgtggaagagtggtctgagagcctggccgctgtgtttaatctggtgcacgtagtttccggcgttttcttttacctttcttccgcagtgaatcccatcatttataacctcctgagtcgcagattccaggctgccttccagaacgtcatctcaagttttcataaacaatggcatagtcagcacgatcctcagctgcctcccgcacagaggaacatctttcttacagagtgtcactttgtcgaactaacagaggatattggaccgcagttcccatgccagagttctatgcataattcacatttgccagcagctttgtcatcagagcagatgtcccggaccaactaccagtctttccactttaataagacatag

SEQ ID NO: 197066 - DNA, 5625 bp, synthetic construct
  misc_feature 1..5625: note = Description of Artificial Sequence: Synthetic coding sequence
  source 1..5625: mol_type = other DNA
atgctgggcagcagcgtgaagagcgtgcagcccgaggtggagctgagcagcgggggaggtgatgaaggcgcagatgaaccccgcggcgccggacgaaaggctgcagccgcagacggacgcggcatgctgccaaagcgtgctaaagcgccgggcggcggcggtgggatggcaaaagcatctgctgccgagctgaaagtgtttaagagcggttccgttgattcgagagtgcccggaggaccacccgcctccaatctccgcaagcagaagtccttgactaatttatcttttctgacagattccgagaagaaactccagctgtatgagccagaatggtcagacgacatggccaaagcacccaagggacttgggaaggttggttctaaggggcgggaggcccccctcatgtccaagactctttccaaaagtgagcactctcttttccaggccaagggttccccggccggaggcgccaagacaccgcttgcccctctggctccaaacttgggcaagccatctcgtattcctcgggggccttacgccgaagtcaaaccattgtcgaaagcccctgaggccgctgtgtccgaagacggcaagtctgacgatgagttactgtccagcaaggcaaaggctcagaaatcctctgggccagttcctagcgccaaagggcaggaagaaagagcgttcttgaaagtggacccggagctggtggtaacagttctgggagacctcgaacaacttttatttagtcagatgttggaccccgaaagccagcgtaaaagaaccgtgcagaatgtactggatctgagacagaatctcgaagaaaccatgagttctctccgtgggtcacaggtgactcatagctccctcgagatgacttgctacgattcagatgacgccaatccccgctcagtatcatcccttagtaacagaagctccccactctcgtggaggtatggccagtcttctccaagactacaggcaggagatgctccgtccgtggggggttcatgtcgctcggaaggcacgccagcctggtacatgcatggtgagcgtgcccattacagccatactatgccgatgaggtcccctagcaagctgtcccacatctctcgactggagctggtggagagtctggatagcgatgaagtcgacttgaaatccggctatatgagtgactccgacctgatgggaaaaacaatgactgaagacgacgatatcacaacaggttgggacgagtcaagctccatttcgagtggtctgtctgatgcctccgataacctttcctccgaggaattcaatgccagcagcagccttaacagcctcccctccaccccgacagcctctcggcggaatagcacaattgtcctacgcaccgattctgaaaaaaggagtttagccgagagcggtctgtcatggttcagcgagagcgaggaaaaagctcccaagaagctggaatatgacagcggttccctgaaaatggaacccggcacaagcaaatggagaagggaaagaccggagagctgcgacgattcttccaaagggggtgagctcaagaaacccatctcacttggacatccaggatcgcttaagaaaggcaagacaccaccggtcgctgtgacctcccctattactcacaccgctcagtctgcattaaaggttgcaggaaagccagagggaaaggccaccgacaagggtaaactggcagtaaaaaacaccggactgcagcggagcagcagcgacgccgggagagaccgcctttccgacgcaaaaaaaccaccgagcggcattgcaagacccagtacttccggctcctttggttacaagaagcctccaccggccaccggtacagccaccgtgatgcaaaccggaggcagcgctacactttcgaaaatccagaagtcatctggcatccctgtgaagcccgttaatggacgtaaaacttccctagatgtgagcaactcagcggaaccggggtttctcgcccccggagctagatctaacatacaatacagatctctcccaaggccagctaagagcagctcgatgtcagtgacaggtgggagaggcggcccaagaccagtttctagcagtatcgacccatctctattatccaccaagcagggggggcttacaccctcccgcttgaaagagcccacaaaagtggcctcaggaagaacaacgccggcccccgttaaccagactgatcgcgagaaggaaaaggcgaaagcaaaggctgtggcactggactctgacaatatctccctgaagtccatcgggagccccgagtccaccccgaaaaaccaagcctctcaccccaccgccacaaagctggccgagctgcctccgaccccgctgcgcgcaacagctaagagcttcgtgaagcccccctcgctcgcaaacctagacaaggtcaactcaaacagtctcgatctcccttcctcctccgataccacacacgcctcgaaagtccccgatcttcatgccactagctccgcaagcggtggtccactgccaagctgcttcacacctagcccagctcctatcctgaatatcaactccgcctcctttagccaagggctggaactcatgtcaggattcagcgtgcccaaagagactcgcatgtacccgaagctctcaggcctccaccggtcaatggagagcctgcagatgccaatgagtttaccgtccgcatttccctctagcacaccagtgccaacccctcccgcaccaccagccgcccctacggaggaggagaccgaggaactaacctggtcgggcagtccaagggccggacagctggatagcaatcagcgggacaggaacaccttgcctaagaagggcctgcggtatcaattacaaagccaagaggaaaccaaagaaagacgccattcccacactatcgggggactccctgaaagcgatgaccaatccgagctccctagtccccctgcgcttccgatgtcactgagtgctaaggggcagctcacgaacatcgtctcaccaaccgccgctacaacccctagaataaccagatctaacagcatccccactcacgaagccgcctttgagctctactcaggctcacagatgggctccacactctctcttgctgaacggccaaaggggatgatcagatccggctcctttagagatcccaccgacgatgtgcacggctccgttctgtctttggcgagtagtgcttccagcacttacagctccgccgaggagaggatgcaatcggagcaaatccggaagctgaggcgagagctggagtcatcacaggaaaaggttgccacattaacctctcagctgagcgctaacgcaaacctggtggcagccttcgagcaatccctggttaatatgacaagtagactcagacatctggcagagaccgccgaggaaaaggacaccgagctgctggatctgcgtgaaacaattgattttctgaagaagaaaaacagcgaagctcaggcggtcatccagggcgctctgaacgcctccgaaacaacacccaaggagcttaggataaaacgccagaacagctcggactccattagttctctgaactcaattactagccattcctcgattggatcatcaaaagacgctgatgcgaaaaagaagaagaagaaatcatggctgcggtccagttttaacaaagcattctctattaagaaaggacccaaatcagcctcctcctattccgacatagaggagatcgccacacccgatagctccgccccgtcttcccctaaactgcagcatggttcaaccgagacagcctccccatccatcaagtcaagtactagctcgtcagtgggtactgatgtgactgaaggtcctgcacatcctgcaccacataccaggctgtttcatgcaaatgaggaagaggagcctgaaaagaaggaggtgtcagagcttcgatccgagctgtgggaaaaggaaatgaagctcaccgatataaggctggaagcccttaattcagcccaccagctggatcagcttcgcgagactatgcataacatgcaactggaagtcgatttacttaaggctgagaacgatcggctgaaggtcgccccagggccgagctctggttccactcccggccaggtgccaggatcatcggcactctcctcgcccagaagatctctggggctggccctcacccactcttttgggccgtctctggcagataccgatttgtcccccatggacggtatctccacctgtggacctaaagaagaggtaacactgcgcgtggtagtcaggatgcctccacagcacattatcaagggtgatctgaaacagcaggaattctttcttggctgcagcaaggtctcaggtaaggttgactggaaaatgctcgatgaggctgtcttccaggtattcaaggactacatttcgaagatggatcctgcttcaaccctcgggctgtcaactgaaagtatccacggctattccattagtcacgttaagcgcgttctggacgccgagccacccgagatgcccccatgtagaaggggcgtcaataatatttctgtgtcgctgaaggggcttaaggaaaagtgcgtagacagccttgtcttcgaaacccttatccccaagcccatgatgcagcactatattagtctgcttctcaagcatagaagacttgtcctctctggaccttctggcacaggtaagacttacctgacaaatcggctcgccgaatatttggtggaacggtcaggccgcgaggtgactgagggtatcgtttccacttttaacatgcatcaacagtcatgtaaggacctacagctgtacctgtccaatctggccaatcagatcgatcgtgaaacggggatcggtgatgtccctctggtgatcttacttgatgatctgagtgaggcaggtagcatcagcgaactggtgaatggtgctttaacctgtaagtatcacaagtgcccttacattatcgggacaacaaaccaaccggttaagatgacacccaaccacggactgcacttatcattccggatgctcaccttctccaataatgtggaacccgctaatggcttcctcgtgagatacctccggcggaagctagtggagtccgattctgatatcaatgccaataaagaggaattgttacgggtgctggattgggtgcctaagttatggtaccatctgcacacgtttctcgagaagcacagtacctctgactttttgattgggccatgctttttcttgagttgcccaatcggcatcgaggacttccggacatggttcattgacctgtggaacaactcaataatcccttatctccaggaaggagccaaagatggaatcaaagttcacggccagaaggccgcctgggaagaccctgtggagtgggtaagagatactttaccgtggccaagtgcacagcaagatcagtcaaaattgtaccacttgcctccaccaactgtgggtccccatagcattgccagcccacccgaggacaggacagtgaaagacagtactccatcatcactggattctgacccactgatggctatgctgttaaagttgcaggaggctgctaactacattgagtcccccgacagagagacgatcttggacccaaacctgcaggcaactttatag

SEQ ID NO: 197067 - DNA, 5634 bp, synthetic construct
  misc_feature 1..5634: note = Description of Artificial Sequence: Synthetic coding sequence
  source 1..5634: mol_type = other DNA
atgctgggcagcagcgtgaagagcgtgcagcccgaggtggagctgtctagcggcggcggagacgaaggagccgatgaaccgcgcggtgcggggcgcaaggctgccgcagcagatggacgtggaatgctcccaaagcgcgcaaaagcgcctggaggaggcggcggaatggctaaagcgtctgctgcagaactaaaggttttcaaaagcggcagtgtggactctagagtacctggggggcctcctgctagcaatctgagaaaacaaaaatctctcactaatctgtcgtttttgacagattctgagaaaaagttacaactgtatgagcccgagtggtcggacgatatggccaaggcgccgaaaggactcgggaaagtcggaagcaagggccgcgaggccccgctcatgagtaagacgctctcaaaatctgagcacagtctgttccaggcgaaagggtctcccgctggtggggccaaaacacccctggcccccctagctcctaaccttggtaaaccgagccgcatccctagagggccttatgctgaagtgaaaccactgtccaaggcccccgaggctgccgtttcagaggatggcaaaagcgatgatgagctcctgagcagtaaggcgaaagcacagaaaagctccgggcccgttccctccgccaaggggcaagaggagcgtgccttcttgaaagtggatccggagctggttgtgactgtgctgggtgacctggaacagctgctcttcagccagatgttagaccctgagtcccaacgcaagaggaccgttcagaacgtattagacctaagacagaatctggaggagacaatgtcctccctgaggggatcccaggtaacgcactcttcattggaaatgacctgctacgattctgacgatgccaacccgcggtctgtcagctctctgtccaacagatcctctcctctcagttggagatatggacagtcaagccctaggctccaggctggtgatgccccttccgtcggtggctcatgcaggagcgaggggacgccagcctggtatatgcacggggagcgggctcattactctcatacaatgccgatgcgctctccgtccaagctatcccatatctccagattggaactggtcgagtctctagattccgatgaagtggatctgaagtcggggtatatgagcgattctgatctgatgggcaaaaccatgaccgaggacgatgacatcactaccggttgggacgaatcttcttctataagctctggcctgtccgatgctagtgacaacttgtcaagcgaagaatttaacgcaagttcaagcctaaacagtcttccaagcactcccacagcttcccgacgcaatagcacaatcgtgcttcggactgacagcgagaagaggtcactggcagaatccgggcttagttggtttagcgaatcagaagagaaggcccccaagaagctggaatatgacagcggctccttaaagatggagcccggcacttcaaagtggaggcgggagcggcctgagtcatgtgatgactcctctaaaggcggcgaacttaaaaaaccaatctctttaggacatcctggtagccttaagaagggcaagacaccccctgtggccgtgacttcacctatcacccataccgcccaatccgctctgaaggtggccggaaaacccgaaggaaaagccaccgataaaggtaagttggccgtcaagaacacaggtttacaaagatcctcctcagacgcgggtcgcgatcggttatctgacgctaaaaagccgccaagcggcattgcccggccttctaccagcggctcttttgggtacaagaaaccacccccggcaaccgggacggcaactgttatgcagaccgggggcagcgccaccctctctaagatccagaaatcttccggaattcccgtcaaacccgtgaatggccgcaagacgagcctcgacgtgtcaaattccgctgagccaggctttctggccccaggtgcaaggagcaatatccagtatagaagcctgccacgtccggctaaatctagcagcatgtcagttacgggtggccgaggaggacctaggcctgtgtctagctccattgacccatctctgctctcaaccaaacagggtggcctcacccctagtcgtttgaaggagccaacaaaagttgcctccggcaggaccaccccagcacctgtaaatcagacagaccgggagaaggaaaaagcgaaggctaaggctgtggccctcgacagtgataatatctctcttaaatctatagggagtccggagagcacgccgaaaaatcaggcatcacaccccaccgccacaaagcttgctgagcttcctcctactcccttaagagccacagccaaatcttttgtgaagcccccttctttggccaatctggataaggtgaattcaaattccctggacctcccctcttcttctgataccacccatgccagcaaagtgccagacctacacgccacgtctagcgcatcaggggggcccctgccaagctgttttacccctagcccagctccgatccttaacataaattccgccagcttcagtcagggccttgagctgatgtctggtttttctgtgccaaaggaaacacgcatgtatcccaaactgtccgggctgcaccgatcaatggaatcactccagatgcccatgtctcttccaagtgcatttccatccagtactccagtgcctacaccacctgcaccccccgcggctcctaccgaggaggagactgaggagctcacttggtcgggaagcccgagggccggccaacttgactccaaccagagggacaggaatactctccccaaaaaaggccttcggtatcagctgcagtcccaggaggagacaaaggaacggagacattctcataccattggaggactgcctgaaagtgacgatcagtcggagttaccatcgccacccgccctgcccatgagtttgtcagccaagggacagctgacgaatatcgtctcacctacagctgccacaactccgcgcatcacccggagcaatagtatccccacccacgaagccgcgttcgaactgtactcgggctcccaaatgggctccaccctgtccctggctgaaaggccgaaaggtatgatccgcagcgggagttttcgggaccctacggatgacgttcacggatccgtgctgtcactagcgagttcagcaagctccacatatagctctgcagaagaacgtatgcagtccgagcaaatcagaaaattaagacgggagctggagagttcccaagagaaggtggcaacactcacgtcccagctgtccgcaaatgccaacctggtggctgctttcgaacagtctctggtgaacatgacctcccgactacgccacctggcagagaccgccgaggaaaaagataccgaactgctggacctgcgcgagaccattgactttctgaaaaagaaaaactccgaggcccaggctgtgatccagggagctttgaacgcctcggagacgacaccaaaggagctgcgcataaagcgccaaaactcctcagattctatctctagcttgaattccattacgtcccatagctcaatcggatccagcaaggatgccgacgctaaaaagaaaaagaagaagtcatgggtgtatgaactgcgttcttctttcaacaaggcatttagtattaagaaaggaccaaagtctgcttctagctactcggacattgaagagatcgccacccctgattctagcgcacccagttcacctaagttgcagcacggcagcaccgaaacagcgtccccaagtatcaaatcgagcacctcttctagtgtgggcaccgatgtaacagaaggaccagctcaccccgccccgcacactaggctgtttcatgcaaacgaggaagaagaacccgagaagaaagaagtttccgagctgagaagcgagctgtgggagaaagaaatgaagcttaccgacatcagattagaagccctgaatagtgcccaccaactagatcagttgcgtgaaacaatgcacaacatgcaactggaggtagatctcctcaaagccgagaacgataggctgaaggtggcacctgggccgtctagtggcagtacgcctggtcaggtgccgggatctagcgctctgtctagcccacgcaggagcctcggccttgctctcacacactcttttggcccttcactggccgacaccgacctgtcaccaatggacgggatctccacatgcgggccaaaggaggaggtcaccctgagagtggttgtgcggatgccaccccagcatatcattaagggcgatcttaaacaacaggagtttttcctgggatgcagtaaagtctcagggaaagtcgattggaagatgcttgatgaggcagtgttccaggtattcaaggactacatctctaagatggacccagccagtaccctaggactgagcaccgagtccattcacggatacagcataagccatgtgaagcgggtcctggatgcagagccccccgaaatgccgccctgtaggcgaggagtcaataacataagtgtctcgttgaagggcctaaaggagaagtgtgtcgactctctcgtgtttgagacactcattcctaaacccatgatgcagcactacatcagcctgcttctgaagcatcgccggctggtactctctgggccatcaggcacaggcaagacttacctgactaaccggctcgccgagtacctcgtggaaagatccggcagggaagtgaccgaggggatcgtgagtacgttcaacatgcatcaacagagctgcaaggatctccagctgtacctgagtaatctcgctaatcagattgatagggagactggaataggggatgtcccgttggtgatccttctggacgacctctctgaagccggttccatctctgagctcgtgaacggggctctgacctgtaaatatcataagtgcccttatattatcggcaccacaaaccagcccgttaagatgacccctaaccacgggctgcatcttagcttccgtatgctgactttttctaacaacgttgagccagcgaacggattcttagtgcgatatctgaggagaaagctcgtggagagtgatagtgacatcaatgccaataaagaagaactgctgcgtgtcttagactgggtcccgaagctctggtaccacctccacaccttcctcgagaagcactccacatccgacttcctgatcggtccctgcttctttctgagctgtcccatcggcattgaggactttcgaacctggttcatcgacctctggaataacagtattataccttaccttcaagaaggggcaaaggatgggatcaaggtccatgggcaaaaggccgcgtgggaggacccggtagagtgggtgcgagatacacttccgtggccctcagcacagcaggaccagtccaagctgtatcacctccctccacccacagtcggcccacatagcatcgcctccccccctgaagaccggaccgtgaaggactccaccccatcaagtctcgacagtgatccattaatggccatgctactcaagctgcaggaagcggcaaattatatagagtctcctgacagagaaaccatcctcgaccctaatctccaggcgacactttag

SEQ ID NO: 197068 - DNA, 5610 bp, synthetic construct
  misc_feature 1..5610: note = Description of Artificial Sequence: Synthetic coding sequence
  source 1..5610: mol_type = other DNA
atgctgggcagcagcgtgaagagcgtgcagcccgaggtggagctgtcatctgggggcggagacgaaggagccgacgagcccagaggcgcagggcgcaaggctgcggcagccgatgggcgcggtatgctgcccaagcgagcgaaagctccggggggaggtggcggaatggcaaaggcttcggccgcggaacttaaagtgtttaagagcggatccgtggactctagggtgcccggcggtccccctgccagcaatctgagaaagcagaaatccctcaccaacctgagttttctgactgactccgagaagaagctccagctgtacgaacctgagtggtccgacgatatggccaaggccccaaagggactggggaaggtgggcagtaaggggagggaggctccactgatgtccaaaaccctttccaagagcgagcattcactctttcaggctaagggctcacccgcagggggagcaaaaacacctctcgcacccctcgcaccaaacttgggaaagcctagtcggatacctcggggtccttatgccgaagttaaacctctgagcaaagcccctgaggctgcggtgtctgaagatggcaagtccgatgacgaactgctaagctcaaaggctaaggctcaaaaaagttcaggcccagttccatcagctaaaggtcaggaagagagagcatttctgaaggtcgatcccgagctggtggttactgttctgggcgatctggaacaactcttgttttctcagatgctcgacccagaaagccagcgaaaacgcaccgttcaaaacgtgttggacctgcggcagaacttggaggagaccatgtcttccctaaggggctcccaagttacacattcatctctcgagatgacatgctatgatagtgacgacgctaacccgagatccgtgagcagcctgagcaatcggtcttcacctctttcctggcgatacgggcagagtagtcctcggttacaggccggcgatgctcccagcgttggaggatcttgcaggtccgagggaacgcctgcctggtacatgcacggcgagagggcccactacagtcacaccatgcctatgcgttctccaagcaaattgagccacataagtaggctggaactggtagagtctttagactcggatgaggtcgacctgaagagcggctatatgtcagacagcgacttaatggggaaaacgatgaccgaggatgatgatatcacgacggggtgggacgaatcctcttccatttcgagcgggcttagcgatgccagcgataacctatcctcagaggagtttaatgcttctagttcgctcaactcacttccctccaccccaacagccagcaggagaaacagcactatcgttctgagaaccgactccgagaaacggtctttagctgagtctgggctttcatggttctccgagtcggaagagaaggcgcctaaaaaactcgagtatgattctggctctcttaagatggaaccgggcactagcaagtggaggagggagcgccccgaaagctgtgatgacagctccaaaggcggggaacttaaaaagcccatctcattggggcatccgggcagcctaaagaagggcaagacgccccccgtggccgtgacttccccaattacccacaccgcgcagagcgccctgaaggtcgccggtaaaccggagggcaaggcaactgacaaaggcaaactagccgtaaagaatactggtttgcagaggagttcttcagatgcaggaagagaccggctgagtgatgccaagaaacccccgtccggtattgcccggccgagcacatccgggagctttgggtacaaaaaacccccccccgctaccgggactgcgactgttatgcagaccggaggctctgccacattatctaaaatacagaagtcctctggaataccagtgaaacctgtgaacggccggaaaacatctctcgacgtgtccaactctgcagaaccaggattcctcgcccctggggcgcggtctaacatccaatacagatctttaccaagacctgctaaaagttcatccatgtccgtgaccgggggacgaggggggccaaggcccgttagctccagcatcgacccaagcctgctgtccaccaagcagggtggcctgaccccatcacgcctaaaggaacctacaaaagtggcttcaggaagaacgacacccgctccggtgaaccagacggacagggagaaagagaaggccaaggctaaggcggttgccctggattctgacaatattagtctgaaaagcattggctctccggaaagcacccctaagaatcaggcctcacaccctactgcaaccaagcttgcggagctaccaccaacgccactgcgggctaccgctaagagcttcgtaaagcccccatcgctggctaacctggacaaagtgaactcaaatagcctggatctgccttcaagttcagatactacgcacgcttcgaaagtacccgaccttcatgcgacgagctccgccagtggcggcccattgccatcttgtttcacccccagtccggcacccattctgaatattaatagcgcatctttctcccaaggcctggagctgatgtcagggttcagtgtgcctaaagaaaccaggatgtatcccaagttgtctggcctgcacaggagcatggaaagcttgcaaatgcctatgtcacttccatccgcatttccttcttcaacccccgtgcccacgccgccagctccaccagcagcacccacggaagaagaaacggaggaactgacatggtccgggagcccgagagctggacagttagattccaatcaacgtgatagaaatactcttcccaaaaaaggattaaggtatcagctccagagtcaggaggagaccaaagaacgtaggcattcgcacactatcggcggccttcctgaaagcgacgaccaaagcgaactcccatccccacccgcactacctatgtctttaagtgctaaaggccagcttactaatattgtaagtccaactgccgcaacaacaccacgcatcactcgcagcaatagcatacctactcacgaggccgctttcgagctatactcaggctctcagatgggatctaccctgtcactggcagaaagacccaaaggtatgatacgtagcgggagctttagagacccaacagatgacgttcacggatccgttctcagtctggccagttctgccagctcaacatactctagtcaaattcggaagctgcggagggagctggagtcctctcaagaaaaggtcgccaccttgaccagccagctgagcgccaatgccaacttggtggccgcgttcgagcaaagcctcgtgaatatgaccagtcgcctaagacacctggctgaaacagcagaagaaaaggatacagagttattggacctcagagaaactatagattttctgaagaaaaaaaattcagaagcacaggccgttatccaaggggctctgaatgctagcgagacaacgccaaaggagctcagaattaagagacagaactctagtgattccattagctcccttaatagtatcacgtcccactcctccatcggatccagtaaggatgccgacgccaagaaaaaaaagaaaaagtcctgggtgtatgagctcaggtcctcatttaataaagcgttttcaattaaaaagggcccgaagtccgcgagctcatatagcgatattgaagagattgccacacccgattcaagcgctccaagctcaccaaagttgcaacatggctccacggagactgccagcccttctataaagtccagtacaagctcttcggttggaaccgacgtgaccgaaggcccagctcaccctgccccccacacaaggctgttccacgccaacgaagaagaggaacccgagaagaaagaggtttcagaattgcggtctgaactttgggagaaggagatgaagcttactgatattcgcctcgaagctctgaacagcgcccaccaactggatcagctgagggagacgatgcataacatgcagctcgaggttgacctgttgaaggccgaaaacgacagactgaaagtggcaccaggcccttcctctgggtctacgcccggacaagttcctggttcctccgccctcagcagtcctaggaggtctctcgggctggccctgactcatagtttcggcccgagcttggccgatacagatcttagcccgatggacggcatttccacctgcggcccaaaggaggaggtgaccctgcgggtagtggtaaggatgcccccacagcacattattaagggagacctgaagcaacaggagttcttcctgggctgttcaaaagtttccgggaaggtggactggaagatgctagatgaagcggtcttccaggtcttcaaggactacatcagtaagatggatcctgcaagcaccctgggcctgagcacagagtcgatccacggttacagtatctctcatgttaagcgcgtgctcgacgccgagccacccgagatgccaccctgtcggagaggcgttaacaatatcagtgtatccttgaagggacttaaagagaaatgtgtggacagcctcgtcttcgaaactttgatacccaaacctatgatgcagcactatatttctctgctcctgaagcataggaggctagtactgtccggccctagcggaaccggaaaaacgtatttaaccaataggctcgctgaatatcttgttgaaagaagcggacgcgaagttacagagggcattgtctctacctttaacatgcatcagcagagctgtaaggatctgcagctatatctctccaatttggcaaaccaaatcgaccgtgaaactggaatcggggatgtgcccttggttatcttgctcgatgatctgtccgaagccggatcaatcagcgaactcgtgaacggggctttgacttgcaagtatcataaatgcccttacattattgggacaactaaccagcccgttaaaatgaccccaaatcacgggctgcacctcagcttccggatgctgactttctccaacaatgtagagcctgctaatggcttcctggtgagatacctccgccggaaactcgtcgagagcgactccgacattaatgcaaataaggaagaactgctacgggtcctggattgggtcccaaagctgtggtatcacttgcacacctttctggagaagcattctacgagcgatttcttaatcggcccctgcttttttctgagctgccccattggtatcgaagattttcgcacatggttcatcgatctgtggaataactcgataattccatacctccaggagggagctaaagatggtataaaggtccacggccagaaggccgcctgggaagacccagtagagtgggtgagggataccctgccatggccgtcagctcaacaggatcagtcaaagttgtatcacctgccccctcctaccgtggggcctcactctatcgcctcccctcctgaggatcggactgtcaaagactctacaccatctagtctggatagcgatccactgatggccatgctacttaaactgcaggaagctgctaattatatagaatcccccgatcgcgaaaccattcttgacccaaatctacaagctacactgtag

SEQ ID NO: 197069 - DNA, 5454 bp, synthetic construct
  misc_feature 1..5454: note = Description of Artificial Sequence: Synthetic coding sequence
  source 1..5454: mol_type = other DNA
atgctgggcagcagcgtgaagagcgtgcagcccgaggtggagctgtcctccggagggggagacgagggcgcagacgagccgcggggagcgggccggaaggccgcagcagccgacggccgcggaatgctgcccaagcgggccaaagcaccaggtggggggggagggatggccaaggccagcgcagctgagcttaaggtttttaagtccggaagtgtggactcccgggttccgggggggccccccgccagtaatctgagaaagcagaagtctctgaccaatctgtcattcctaacggattcagagaaaaagttgcaactgtacgaaccagagtggagcgatgacatggctaaggcgcccaaaggcctcggcaaggtgggctctaaaggaagagaggctcccctgatgagcaaaacactctcaaagagtgaacattccctgtttcaagccaaaggaagccccgctggcggagcaaagacgcccctcgctcccttggccccgaaccttggaaagccctcgcgcattcctaggggaccctatgccgaggttaaaccactgagcaaggctcccgaggccgctgtcagcgaggacggcaaatccgacgacgagctgctctcaagtaaggccaaagcccagaagtcaagtggaccagtgcctagtgcaaaggggcaggaggaaagagccttcctcaaggttgacccggagctcgtggtaacagtattaggggatctggagcagcttctgtttagccagatgttagaccccgaaagccagcgcaaacgcacagttcagaacgtcttggacctcaggcaaaacttggaggagacaatgtcctccttaaggggctcccaagtgacacatagctcactcgaaatgacgtgctatgatagtgacgacgccaacccccgaagtgtgtctagcctctccaaccgaagctcacccctctcctggcggtatggccagagtagcccacggcttcaggctggggatgccccatctgtgggcggctcttgcaggtccgagggtacacccgcgtggtacatgcatggagagagagctcactactcccatacgatgccgatgagaagccccagtaagctgtctcatatctcaaggttagagctggtcgagtcccttgatagtgatgaggtcgacctaaaatcgggatatatgtctgattctgatcttatggggaaaactatgaccgaagacgacgacatcactactggctgggacgaatcttcaagcatttcttccggcctgtcggatgccagcgacaacttgagcagtgaagaatttaacgccagcagcagcctgaatagccttcctagcacacccactgcgtcgagacgcaacagcactattgtgctccgcacagacagcgagaagaggtcactggcagaatctggcctgtcctggtttagtgagtccgaagagaaagctccaaagaagctggaatatgatagtggctctctaaagatggagccgggtacctccaagtggcgccgagagaggcctgagtcatgcgacgacagttcaaaagggggtgagttgaagaagcctatcagcttgggacaccccggctccctgaagaagggtaagaccccacctgtggccgttacaagccctattacacacactgcccagtccgctctgaaggtggctggcaagcctgagggcaaagctactgataaaggaaaacttgcggtgaaaaataccggactgcagcggtcctccagcgatgctggcagagaccgactatctgacgccaaaaagcccccatccggcatcgcccggcctagtacatcaggatccttcgggtacaagaaaccaccacctgccaccggaaccgccaccgttatgcagaccggcggcagtgcaaccctctcaaaaatacagaagtcctctggcattcccgtcaagcctgtcaacggccgcaaaacatccctggacgtttcaaactctgcagaacctgggtttctggctcctggcgccagatctaacatccagtataggtctctgccacggcccgctaagtcttcttccatgtctgttaccggcggccgtggtggcccccgccctgtgagtagttcaattgacccatccttgctctcaactaaacagggcggactgactccttctagacttaaagagccaactaaagtggcaagcggccgcacaacacccgcgcctgtgaaccagacggatagggagaaggagaaagctaaagccaaagccgtcgctctcgattctgataatataagcctaaaatctatcggcagtcccgagtctactcctaagaatcaggcatcccacccaactgccacgaagttggcagagctgccaccaacgcccctccgcgctaccgccaagtcgttcgtgaaacctcccagcctggccaatctggacaaagtgaattccaattctttggaccttccatcatcatccgacaccacacacgcatctaaagtgccagacctccacgccacgtcaagcgcgagcgggggcccacttccatcctgttttactccttcacctgcgccaatcttgaatatcaacagtgcttcgttcagccagggcctcgaactgatgagtggattttccgttcccaaggagacccgaatgtatccaaagctttcaggcctacatagaagtatggagagcttacaaatgcccatgtctctcccaagtgcattcccatcgagcactcccgtacctactccaccggccccacccgccgcaccgactgaggaagaaacagaagagctcacctggtcaggcagtcccagggcagggcagctggattctaaccaaagggaccgcaatactctgccaaagaaaggcctgcgctaccaactccagtcacaggaggagaccaaagaaagaaggcatagccacaccatcggaggcctgccagagtccgacgatcagtcagaacttccttcacctccggccttgccaatgtcactctcagccaaagggcagcttacgaacatagtgcacggcagcgtgctgtccttggcatcctcagcctctagtacatattcctctgctgaagagagaatgcagagcgagcaaattcgcaaacttcgacgcgaactcgagtccagccaggaaaaagttgctacactgacaagccagctctccgctaatgccaacctagtggccgctttcgagcagtccctggttaatatgacaagcagactcagacatctggctgaaactgctgaagaaaaagacactgagctgttggatttacgcgagactatcgattttctgaagaagaagaattctgaagctcaggcagtcatccagggcgcgctaaatgcttcagagaccacccccaaggaactcagaatcaagcggcaaaactcctctgactctatcagctctcttaatagtataacatctcactcgagcatagggtcaagcaaagatgccgatgcaaaaaagaaaaagaaaaagtcatggttacggagttcatttaacaaggctttttccatcaagaagggcccgaaatctgcatcctcctactctgatatagaagaaatcgctaccccagattcatcagcaccaagcagccccaagctgcagcatggatcgacggaaacagctagtccaagcattaaaagttccacatcctcttcagttggaaccgatgtgacagagggaccggcccatccggccccgcacaccagactgttccacgctaatgaagaggaggagcccgagaaaaaagaggtgagcgagctgaggtctgagctctgggaaaaggagatgaagctcacagacattcgtctcgaggccctgaactcggcccaccagctagatcagttgcgcgaaacaatgcacaacatgcaactcgaagtggatctgctgaaggccgagaatgacaggcttaaagtggccccaggcccatcctccggatctacccccggccaagtacccggcagcagcgctttgtcttctccacgacgatccctcggcctcgcactgacacacagcttcggaccctccctggccgacaccgatttgtcaccgatggacggtataagtacatgtggtccgaaggaggaggtgacacttcgggtggtcgtgaggatgccaccccagcacatcattaagggtgatctgaagcagcaggaatttttcttgggttgtagtaaggtttctggtaaggtggattggaagatgctggacgaggccgttttccaggtgtttaaggactacatcagtaaaatggacccagccagcacccttgggctcagcacagaatcaatccacgggtactctatctcccacgttaaaagggtcctggatgcagaacccccagaaatgcccccttgcaggagaggggtcaacaacatcagcgtgagtcttaagggattgaaagaaaagtgtgtcgactcactcgttttcgagacgctgattcccaagccaatgatgcagcactacatctccttgctgctgaagcaccgaaggcttgttttatcaggcccctcggggacaggtaaaacatacttgaccaatagactggcagaatacctagtagagaggagcggtagagaagtgaccgagggcatcgtgagtacatttaatatgcatcaacaaagctgcaaggatctgcaactctatttgtctaacctcgccaaccagatcgatcgcgagaccggtataggagatgtgcctttggtcatactgcttgacgatttgtccgaagcaggctcaatcagcgagttggtgaatggagccttgacttgtaagtatcataaatgcccatacattattggcacaaccaatcaaccagtgaaaatgacaccaaatcatggtcttcatctcagtttcaggatgctgacgttcagcaacaatgttgagccagcgaacggatttctggttcggtatctgagacgaaagctcgtggagagtgatagcgatatcaacgcaaacaaggaagagttacttcgcgtgctagactgggtgccaaagttatggtatcacctccacacgtttcttgagaaacactctacgtcagacttcctgattggtccctgtttctttttaagctgtcctattggcattgaggacttccgtacctggtttattgacttgtggaataacagtattattccctatctgcaggagggagccaaggacggaattaaggttcacggacagaaagctgcctgggaagacccggtggagtgggtcagggatacactgccatggccctctgctcagcaggaccagagcaagctgtatcacctcccacctccaacagtcggaccccattcaattgcctcaccaccagaagaccgtacggtgaaggactccacccccagctctctggactctgaccccctgatggccatgctgttgaaactgcaggaagctgcaaactacattgagtctcccgaccgagagacaatactggacccaaacctgcaagccacactctag

SEQ ID NO: 197070 - DNA, 783 bp, synthetic construct
  misc_feature 1..783: note = Description of Artificial Sequence: Synthetic coding sequence
  source 1..783: mol_type = other DNA
atgcaccagcagagctgcaaggacctgcagctgtacctgagcaacctcgctaaccagatagatcgggaaacaggaatcggagatgtcccattagtgatcctgctcgacgatctcagtgaggcggggagcatttcagaactcgtaaatggagcactgacctgtaaataccataaatgtccttacatcattggcacaacaaatcagccagtgaagatgaccccaaaccatgggctccatctgagtttctctagaatgctgacatttagtaataacgtcgagccggccaatgggtttctcgtcaggtacctccgcaggaagctggtcgaatcggactcagacatcaacgccaataaagaggaacttctgagagtgcttgactgggtgcctaaactgtggtaccacttgcatacatttctggaaaagcactccacctctgatttcctcatcgggagtccgtgtttcttcctatcttgtccaatcggcatcgaagatttcagaacctggttcattgacttgtggaataatagcatcataccctacctgcaagagggtgcaaaagatgggatcaaagtgcacggtcagaaagctgcctgggaagaccctgtggagtgggtccgagatactctcccatggccttccgcacagcaggatgattctaccccgagttccctggactctgacccgttgatggctatgctactcaagttgcaggaagcagccaactatatcgagtcaccggatagagagaccatcctggacccgaacctccaggcaaccctgtag

SEQ ID NO: 197071 - DNA, 2193 bp, synthetic construct
  misc_feature 1..2193: note = Description of Artificial Sequence: Synthetic coding sequence
  source 1..2193: mol_type = other DNA
atggagcccggcaccagcaagtggcggcgggagcggcccgagagctgtgacgacagttctaagggcggggagctgaagaaaccaatttcattggggcaccctggaagtttaaagaaaggaaaaacaccccctgtggcggtgacgagcccaatcacgcacactgcgcagagtgccctgaaggtcgcaggcaaacccgaagggaaagccacggacaagggcaaactcgccgtgaaaaacaccggcctccagcgctccagctctgatgccggtcgcgaccggttatcggatgctaagaaaccaccctccggcattgctcgtccctcaaccagcggcagcttcggttacaaaaaaccacctcccgccaccggaaccgctaccgtgatgcaaactggtgggtcagcgactttaagcaaaatacaaaaatcttctgggataccagtgaagcccgtcaacggtcgcaagacgagcctggacgtcagcaatagcgcggagccgggattcctggcgccgggggcccgttccaatatacagtaccgcagcttgcctcgccctgcaaaaagctctagtatgtccgttacaggcggaagaggaggcccaagacccgtaagctcaagtatcgacccctcactgctcagtaccaagcaggggggtctcaccccctcgcgcctgaaagagcctaccaaggtggccagtgggagaaccacaccagcccccgttaaccagaccgatagggaaaaggagaaagctaaggccaaggctgttgctctcgactctgacaacatatccctgaagtcgattggctctccagagtccacacctaagaaccaggccagccaccctacagctacaaagctggcggaactgccacccaccccgctcagagcgactgcaaaatcttttgtgaagccaccatctctcgccaacctcgataaggtgaatagcaactcgctggacttaccatctagtagtgataccactcacgcatcaaaagttccagacctgcacgctacgagcagcgccagcgggggtcctttaccctcctgttttacacctagtcctgcccctattctgaacattaacagcgcctccttttcccagggactggaactcatgtcgggcttctctgttcctaaagaaaccaggatgtatccaaaactgagcgggttgcacagaagcatggaatcgctgcagatgcccatgagccttccgtccgcctttcccagttccacacctgtaccaacccctccagcaccgcccgccgccccaactgaggaggaaacagaagagctgacatggtccgggtcccctcgcgccggacagctggactcaaaccagcgggatcggaacacattacccaaaaaaggcctccgctatcagttgcagtcccaggaagagacaaaggagcgccgccactcacacactatcggtgggcttccagaatccgacgaccagagtgagctcccgtccccccccgcactgcccatgagcctgagcgcgaagggccagctaacaaacatagtgagcccgactgccgctacgaccccaagaattacccggtcaaactccattcccacccatgaagcagcctttgagctgtactccggatctcagatggggtccacactatcgctggctgagcggccgaaaggcatgatcaggtccggctccttcagggaccccacagacgatgtgcatgggtcggtgctgagtctggcgagctcagctagctcaacctatagctcccagattcgtaaattacgccgagaactggagagcagccaagaaaaagttgcaacgttgacttcacagctgtctgctaacgccaaccttgtagcagcatttgagcagagcctggtaaacatgacatctaggttgagacatctcgcggagactgccgaggagaagatggaatttcgatcatgccatcctgggtggtccgccctggccaggtcctggctgacagctaactctgcttcacaggacactgagctgctagacctccgcgagacgattgacttcctcaagaagaagaactccgaagcccaggcggtgatccaaggggcgctgaatgcgtccgaaactaccccgaaggagctccgcatcaaacgacaaaactctagcgattcaatatcttccctaaactcgattacctcccactctagtatcggctcttctaaggatgccgatgcttag

SEQ ID NO: 197072 - DNA, 4452 bp, synthetic construct
  misc_feature 1..4452: note = Description of Artificial Sequence: Synthetic coding sequence
  source 1..4452: mol_type = other DNA
atgctgcacctgcccctgccccggagcggccggaccgtgaacttccccagatcctgggatgagtctagtagcattagtagtggactttctgacgcctccgacaatctgtcatccgaagaatttaacgcctcttcctccctgaacagtctgccatccacacccaccgcatcaagacgtaattcaacaatcgtccttcggactgactctgaaaaaagaagcctcgctgagtctggactgtcatggttttcagagagcgaggagaaggccccaaaaaagctggagtatgacagtgggtccctgaagatggagcccggcacgtcaaagtggcgtcgggaacggccagagtcgtgtgatgattccagcaagggcggagaactgaagaaaccaatctccttgggacatccagggagtttgaagaagggcaaaactcctccagttgccgtcacctctccaattactcacacggctcaaagcgccctgaaggtcgccggaaaacctgagggcaaagcgaccgacaagggaaaactggctgtgaaaaatacagggctgcaaagatcttctagtgacgcagggagagatagactcagtgacgccaaaaagcccccatctggtattgcgcgccccagtacatcaggctcctttggttacaaaaaacctccccccgcaacgggaactgccactgtcatgcagacaggtggttccgcaacactgtccaagatccagaagtcttcagggatcccagtcaagcccgtgaatggacggaaaacatcattagatgttagtaactccgctgaaccaggattcttggctcctggtgctaggtctaacattcagtaccggtccctcccaagacctgccaagtcatccagcatgagtgtgactgggggtaggggtgggcctcgcccagtgtcttccagcatagatccgtctttactctctacaaagcaggggggtctgacccccagccgactcaaggaacctaccaaggtggcctctggaagaacgacgccggcccctgtgaaccagaccgaccgggagaaggagaaagctaaggctaaggcagtcgccttggattccgacaacattagtctgaagagtatcggatccccagagtccaccccaaagaaccaggcatcgcaccctaccgcgactaagctggctgagttacccccaaccccgcttcgcgccacagctaaaagtttcgttaagccaccatcattagccaaccttgacaaagtgaattcaaattccttagacctgccaagctcatccgatacaacccacgcttctaaagttcccgacctgcatgccacctcttccgccagcggtgggcccctgcccagttgcttcaccccatcaccggcccccatcttaaatattaattcagcctctttctcccaggggctggagctgatgtctggattcagcgtgcctaaggaaacaagaatgtacccaaaattgtctggcctccaccggagcatggagagtctgcagatgcccatgtcacttccatctgcgtttccaagctccacccccgtccctactccacccgctccccccgctgcccccaccgaggaagagacagaggaactgacatggagcggaagcccacgggccggccagttagattcaaatcaacgcgacagaaatacccttcctaagaaagggctgcggtatcagctgcagtcccaggaagaaacaaaagaacggcgccattcccatactattggtgggctaccagaatcggatgatcagtcagagctgccttcaccccctgccctgcctatgagcctgagcgccaaggggcaactgactaatatcgtctctccaaccgccgcgacgacgcctcggattacccggagcaacagtatcccgacccacgaagccgcgtttgagctgtattctggcagccagatgggaagcaccttaagcctggcagagaggccaaaaggcatgattcggagcggctcattcagggaccccaccgatgacgtccatgggagcgtattgtccttagcctcgagtgcatcaagtacctattctagtgcagaagaacgtatgcagtcggagcagatcaggaagttgaggcgcgagctagagtctagccaggagaaggtcgccacactgaccagccagcttagcgctaacgcaaacctggttgccgcattcgaacagagcctcgtgaacatgacgtctcggttacgccaccttgcagaaacagccgaagagaaagatacagaactgcttgatctcagagagaccatcgactttttgaagaaaaagaattctgaagcccaggcagtcatccagggcgcactgaacgccagcgagactacaccaaaagagctacgcatcaaaaggcagaattctagtgatagtatttcctccctgaatagcattacctcccacagcagtattggcagtagtaaggacgccgacgccaaaaagaagaagaagaagagctggttaagatccagctttaataaagccttctctatcaaaaaaggcccgaaaagtgcaagctcctatagcgatatcgaggagatcgcaactcccgatagttctgccccgtcttccccgaagctgcagcacggctcaacagaaaccgcgagtcccagcatcaaatcatctacatcaagttctgtcggtacggatgtgacagaaggccctgcccatcctgccccacacactcgtttgtttcacgccaatgaggaagaggagcccgaaaagaaagaagttagtgagctgcggtcagaactctgggaaaaggagatgaaactgaccgacattcgccttgaagccctgaactccgctcatcagctggatcagctgagggagaccatgcacaatatgcagctggaagtcgacctcctgaaggccgagaatgatcgcctgaaggtagcccccggcccgtcgtcagggagtacccccggacaggttcccggcagcagcgctctaagctcccctcggaggtcactcggtctcgcattgacacattcgttcggcccttcactcgctgatacggacttaagtcctatggacggtatctcaacttgcggcccaaaagaggaggtcacattgcgtgttgtggtgaggatgcctccgcagcacataattaagggggatcttaagcagcaggaattttttttaggttgcagtaaagtatccggcaaggtcgattggaagatgctagacgaggcagtctttcaggtgttcaaggattacatttccaagatggatcctgcatccaccttgggtctttctacagagagtatccatgggtatagtatcagtcacgtgaaaagagtgctcgacgctgagccgcccgagatgcccccatgtaggaggggcgtgaacaacattagtgtcagcctaaagggtctcaaggagaagtgcgtggactccttggtattcgaaactcttattccaaaacccatgatgcaacactacattagcttactgctcaaacaccgccgcttggtcctgtccggtccttctgggaccgggaagacctatctgacgaaccgcctggccgagtatctagtggagcgcagtggccgggaagtcacagaaggcattgtgtccaccttcaatatgcatcagcagtcctgtaaggaccttcaactatacctctcaaacctagctaaccaaattgatagagagactggaatcggagatgtgccattagtgatactgctggatgatctctccgaggctggtagcatttcagagctggtgaacggggctcttacatgcaagtatcacaaatgcccctatatcatagggaccactaaccagcctgttaagatgactccaaatcacggactgcatctatcttttaggatgctgacatttagcaacaacgtggagcctgccaacggttttttggtgagatatctgcggcggaaactggttgagtctgactccgacatcaatgctaacaaggaagagcttcttcgagtgctggactgggtacccaagctctggtaccacctgcatacctttctggaaaaacattccacatctgacttcttaattgggccatgttttttcctcagctgtccaattggtattgaggacttccgaacatggttcattgatctttggaacaatagtattattccgtacctccaggagggcgctaaagacggcatcaaggtacacggtcagaaagcggcttgggaggatccggtggagtgggtgcgcgataccctgccatggcctagcgctcagcaggaccagtctaaactgtaccacctgccacctccaaccgtcggcccgcacagcatcgcttctccccctgaggaccgaaccgtgaaagactccaccccttcatccctggacagcgatcctctgatggcgatgcttctgaagctgcaggaggctgccaattatatcgaatcacctgaccgtgaaacaatattggacccaaatttgcaagcaacgctatag

SEQ ID NO: 197073 - DNA, 4482 bp, synthetic construct
  misc_feature 1..4482: note = Description of Artificial Sequence: Synthetic coding sequence
  source 1..4482: mol_type = other DNA
atgctgtggccccggaacctgaccagctgggacgacagcagcagcgtgagctctggcatcagcgatacaattgacaacttaagtactgatgacataaacactagctcctccatcagtagttacgctaatacaccggcttcaagccggaagaacctggacgtacagacggacgctgagaagcactcacaggttgaaaggaactcactgtggagtggcgatgatgtcaagaaaagtgatgggggcagtgacagcggaattaagatggaaccaggcagtaagtggcggagaaacccctccgacgtgtctgatgagtcagataaatcaacctcaggaaaaaaaaaccccgtcatcagccagaccggcagctggcggcgcggcatgacagcccaggtcgggataactatgccaaggacaaagccctctgcgccagctggagctctcaaaacgcccgggaccggtaaaaccgatgacgccaaagtgtccgagaaaggcagactcagccccaaagcttctcaggtcaaacgtagcccatccgatgcgggaaggtcttccggggatgaatctaagaagcctctgccatcctcttcaaggacgcctacagccaatgcaaactcgtttgggtttaaaaaacagagcggaagtgctgccggattggctatgatcactgcgagcggtgtcacagttacatcccgatcagccacccttggaaagattcctaaaagcagcgcgctggtgagcaggagtgctggacgtaagagcagcatggatggggcacagaaccaggacgatggatacctggctttaagcagcaggaccaacttgcagtacagatcattgcccagaccctcaaagagcaattcccgaaatggcgcaggcaatcgctcttctacttcatccatcgattccaatattagcagcaagagcgccggcttgccggtacccaagctgcgcgagccgagcaaaaccgcactcggctctagccttcccggcttggtcaatcagactgataaggaaaagggcatctcttctgataacgagagtgttgcgtcctgcaattctgttaaagtgaaccctgcggctcagcccgtatcgtcccccgcccagactagcttacagccaggtgcaaaataccctgatgtcgcctctccaaccctgcggcgtctatttggggggaagccaaccaagcaggtgcccatcgcaactgccgaaaacatgaagaattccgtggtcatttccaatcctcacgctactatgacccagcagggtaaccttgacagcccttcgggatccggcgtgctatccagcggcagcagttcgccactgtactcgaaaaacgtcgacttaaatcaatcgccgctcgcctcaagcccatccagtgcacattccgccccttcaaacagtctaacctgggggaccaacgccagttcatccagtgccgtatccaaggatgggctcgggttccagtcagtatcttcactgcacaccagctgtgagtcaattgatatctctctctcttccgggggtgtcccttctcacaatagcagtacaggactcattgccagcagcaaggatgactccttgactccatttgtgcgtacaaacagcgtgaagacaactttgagtgaatctgatccacatctcgacagaaacactctccctaagaaaggtctgcgctacacaccgacgtcgcagctcaggacccaggaggacgctaaggagtggctgagatcgcatagcgctggcggtctgcaagataccgccgccaattccccattttcttcaggctcctctgttacaagtccctctggaacccgctttaattttagccaacttgcctctccaacaactgtcacgcagatgtccttatctaaccctactatgctgcggacccactcactgtccaatgcagatggacagtacgacccttatacggactctaggtttcgaaattcttcaatgtcactcgacgaaaagtcacgaaccatgagccgctctggcagcttccgtgatgggttcgaggaagtgcacggcagttcactgtctcttgtgtccagtacttccagcgtgtacagcacacccgaagaaaaatgccaatcagaaataagaaagctgcgacgggaactggatgcctcccaggagaaggttagcgccctgaccacccaactgacagctaatgcccatctagtggcagccttcgagcagtccctcggcaatatgacgatcaggttacagtcgctgaccatgacggccgaacagaaggactcggagctaaatgaacttaggaagaccattgagctcctgaaaaagcaaaacgctgcggcccaggctgccatcaatggcgttatcaatactccagagttgaattgcaagggcaatggaacagcccagagcgctgacttacggatcaggagacaacacagcagcgattccgtgagctccatcaactctgcgacttcacattctagtgtggggtccaacattgaatcagacagcaaaaagaagaagcgcaagaactggctgaggagctcttttaagcaggcctttggaaaaaaaaaaagcccaaagagtgcaagttcacacagcgacatagaggaaatgacagacagcagcctgccttcatctcccaagctgccacataatggaagcaccggaagcacccctctccttagaaacagccacagcaatagtttgatatccgaatgcatggactccgaggccgaaacggtcatgcagcttcgcaacgagctccgtgacaaagaaatgaagctgacagatataaggctggaggccctctctagtgcacaccagctggaccagctgagggaagccatgaaccgcatgcaaagcgaaatagagaagttaaaagctgagaatgaccggttgaagtccgagtcccaggggtcaggatgctcaagagctccttcccaggtctcaatctcggcctcaccacgtcaaagcatgggactgagtcagcacagcctaaacctgaccgaatctacatcactggacatgctgctggatgatacgggcgaatgcagcgcccgcaaggaaggtggtagacacgttaaaatagttgtgtcttttcaggaagaaatgaaatggaaggaggactccagacctcatttatttctgatcgggtgcataggggtgtctgggaagaccaaatgggatgtgttagatggtgtagtaagaagattatttaaagagtacataatccatgtcgatcctgtgtcccagctgggccttaattccgactccgtgctgggttactccatcggtgaaattaagaggagcaatacaagtgaaactcctgagctcctgccatgcggatacctggtgggtgagaacacgacaatttcagtcaccgtcaaaggacttgcagaaaactccctggactctctcgtcttcgaatccctgattcctaagccaatcctgcagcggtacgtgagcctcctcatagagcaccggagaattatactgtccggcccttcaggaaccggaaagacgtacctagccaatcgtttgtccgagtacatcgtgctgcgcgaaggtagggagctcaccgacggggtgattgctactttcaacgtggaccataagagttccaaggaattacgacaatacttatcgaatctcgctgatcagtgtaattccgaaaataacgccgtggacatgccgctggttatcattctggacaaccttcaccatgtgtcaagcctgggagagatcttcaacgggctgctgaattgcaagtaccataaatgcccctacattataggcaccatgaaccaggctacatccagcacacctaatctgcaactgcaccataactttaggtgggtactttgcgctaaccacacggaaccggtaaagggctttctggggaggttcctgaggagaaagttgatggaaaccgaaatctccggtcgagttcgaaatatggaactagttaagatcattgattggatacctaaggtctggcatcacctcaaccggttcctagaggcccacagtagctcagacgttacaatcggaccacgcctcttcctttcctgccccatcgatgtcgacgggtctagagtttggtttacagacttatggaactatagcattatcccctaccttctggaggccgtgcgtgagggattacagctgtatggccgacgcgctccctgggaagatccagctaaatgggtgatggatacttacccttgggcagcttcgccacagcagcacgaatggccccccttgctccagcttcgcccagaggatgtcggctttgacggctattcaatgcccagggaaggaagcacttctaagcagatgcctccttctgacgcagagggggaccccctgatgaatatgctgatgaggctgcaggaggcagccaattatagcagtccccagagttacgatagtgatagcaattctaactcacatcacgatgatatactggactcttcactggagagcaccctttag

SEQ ID NO: 197074 - DNA, 7290 bp, synthetic construct
  misc_feature 1..7290: note = Description of Artificial Sequence: Synthetic coding sequence
  source 1..7290: mol_type = other DNA
atgcccgccatcctggtggccagcaagatgaagagcggcctgcccaaaccagtccactcagccgctccaattttgcatgtcccaccggccagagctggaccccagccatgttacctgaagctgggctccaaggtcgaggtgtcaaagaccacgtaccccagtcaaatcccgctgaagagccaggtcctgcaaggtttgcaagaacctgccggggaaggcctgcccctcagaaagagcggttctgtggaaaacggctttgacacacagatatacacggattgggctaaccactaccttgctaaatcaggccataagcggcttattagggacttgcagcaggatgtgaccgacggagtgctgctcgcccagatcattcaagtggtggctaacgagaaaatagaggatattaatgggtgtccaaagaaccggagccagatgatcgaaaatatcgatgcatgcctaaatttcctggctgcgaaaggcattaacattcagggcctaagtgccgaagaaatcaggaacggcaacctgaaggcaatcctggggctattcttcagcctgtcgcgctataaacagcagcagcagcaaccgcagaaacagcacctcagctctcccctgccgccagcagtgagccaggtggctggcgcaccttctcagtgccaggccggcaccccccagcagcaagtccccgtgaccccccaggccccttgccagccccaccaaccagccccgcaccagcaatccaaggcacaggctgaaatgcagtcaagactgcccggaccgaccgcacgcgtgtcagctgccggatcagaggccaagacacgaggcggctctactaccgctaacaatagaagaagtcaatcctttaacaattacgataaatccaaacccgttacatcccccccgcctcctccgtcttcccacgagaaggaaccccttgcatcatcagcctccagccacccgggtatgagcgacaacgcccctgcatctctggaatctggctcctcctctacccctaccaattgttcaacatcttcagctattccacagcctggggccgccacaaaaccttggcggagcaagagcctttcagtgaaacattcggcgactgtgtccatgctgtctgtaaaaccacccgggcccgaagcccctcgtcccacacccgaagccatgaagccggcacccaataaccaaaaatccatgctggagaaactgaagctatttaattccaaaggtggttcaaaggccggtgagggccctgggtctcgggacacttcctgtgaacgtctagagacgctgccgtctttcgaagaaagcgaggagttggaagccgcttcaaggatgctgactaccgtggggcctgcatcctcttcccctaagattgccttgaaaggaattgctcagcgtacattcagtagggctcttaccaacaagaaaagctctctgaaaggcaacgagaaggaaaaggagaaacaacaacgcgagaaggacaaggaaaagagtaaagatctcgcaaagagggcctctgtgaccgagagactggatcttaaagaagagcctaaagaagaccctagtggcgcggcagtccccgaaatgcccaagaagtctagcaaaatcgccagctttatacctaaagggggcaagctcaatagtgcaaaaaaggagccgatggctccttcgcactcaggaatccccaaacctgggatgaagagtatgcctggcaagagccccagcgcccccgccccttctaaagaaggagagcggtctcggtcaggtaagctttcaagcggcctgcctcaacagaagccacaactagacggccggcattcctcaagtagttccagtttagcctccagcgagggcaaaggcccaggtggtacaacgctgaaccattctatatcttcccagacagtgagcgggagcgtgggcacgacccagactaccggctccaacactgtgagcgtccaactgccccaaccccagcagcagtacaatcaccccaacactgccaccgtagcaccattcctgtacagatcacagactgatacagaggggaatgtgacggcagagtcgtcttcaacgggagtatcagttgaaccatcccacttcactaaaacaggacagccagccctcgaggagctgaccggagaagacccagaagcgcgacggttgagaacggtcaagaatattgccgacctccgacagaacctggaggagaccatgagcagccttaggggtactcaagtcacgcattcgactctcgaaacaaccttcgataccaacgttactacagagatgagcggacggagtattttaagcctcaccggacgaccaacacctctgtcgtggagactcgggcagagttctcctcgcctgcaggcgggcgatgctccatcaatgggtaacggatatcctccaagagcgaacgcgtcacggtttattaatacagaaagtggcaggtacgtctactcggcccccctgaggcgacaactggcatcccgtggctcttctgtttgtcacgtggacgtaagtgataaagctggcgatgagatggatctggagggaatttctatggacgcacccggatacatgtctgacggcgacgtgctgtctaagaatattcggactgacgacatcaccagcggatacatgacagacggggggctgggactgtacacacgtcggctgaatcgattgccggatggcatggcagtggtgcgagaaacgttacaacgaaatactagtctggggcttggagacgcggattcctgggatgattcctccagtgtgagctccgggatcagcgacaccattgataaccttagcacagacgatattaatacgtcttcttcaattagctcttacgccaacacccccgcttcgtcacgcaaaaacttggatgtccaaaccgatgccgaaaaacactctcaggtggaaagaaactcactgtggagcggcgatgatgtcaaaaagagcgatggtgggagtgacagcggaatcaagatggaacccggtagtaaatggaggcgtaaccctagtgatgtgagcgatgagagcgacaagtccacctccgggaagaagaatccagtcatttcccagacaggaagctggcgtcggggtatgacagcacaggttggaatcacaatgcctcgaactaagccgtctgcaccagccggggccctgaaaactccaggaacgggaaaaactgacgatgctaaagtttcggaaaaaggaaggctcagcccgaaggctagtcaggtcaaaagaagcccctctgacgccgggcggtcaagcggcgatgagagcaaaaagccgctcccctcaagctccaggacacctaccgctaatgctaactcttttggttttaagaagcagtctggaagcgcagcaggactggcgatgatcactgcttccggggttacagtaacgtctagatcggccacactcggtaaaatacctaaaagcagtgccctggtgagtaggagcgcaggccgcaagtctagcatggacggcgcccagaatcaggacgatggttatctggccttatccagtaggaccaatcttcagtatcgctccctacccaggccatctaaaagtaactctcggaatggagctgggaacaggagtagcacctctagcattgatagtaacatcagttcaaaaagcgcaggcctgcctgtccccaaattgcgagagccgtccaagaccgcgttgggaagctcactgcccggactcgttaaccagaccgataaagaaaagggcatctcgtcagacaacgaatccgtggcctcctgtaacagcgtgaaagtcaaccctgcagcccaacctgtgtcaagtcctgcacagaccagcttgcagccaggggcgaagtacccggacgtagcatctcccaccctgagaagactgttcggggggaagcctaccaagcaggtccctattgcaaccgctgaaaatatgaagaactctgtggtaatatcaaacccacacgccacaatgacacaacaaggaaatctggatagcccctcaggtagcggtgtgctctcctcaggctcatcctcaccactgtattccaaaaatgtcgacctgaaccagagccccctcgcctcctccccttcttccgcccatagcgccccgagcaatagcctcacttgggggaccaacgcgtccagcagcagcgccgtttccaaagatggactgggcttccaatcagtgagtagtcttcacacctcttgcgaatcaatcgacattagcctgtcctccggaggagttccgtcacacaacagctccacaggcctgatcgccagcagcaaagacgactccctgacgcctttcgttcggaccaattctgtaaaaactactctgtctgaatcccccctgagctctccagccgcctctcctaaattttgtcggtccacgcttcccaggaagcaagattctgacccccacttagataggaacaccctgcctaaaaaggggctgcggtatacccctacctcccagctgaggacacaggaagatgccaaggagtggctgcgcagccattccgcgggcggattacaggacacagccgctaactccccgttttctagcggcagctctgtaacctctccttcagggactagattcaactttagccagttggcgagtcctaccactgttactcagatgagcctgtcaaatccgacaatgctgcgcacccactcgttgagcaatgcagatggccagtatgatccatacaccgactcgaggtttcgtaactcttccatgagcctggacgaaaagagtaggacaatgtcgaggagtggcagttttagagacggtttcgaggaggtgcatggctcaagcttgtcactggtgagttccacttcctcagtgtactctacacctgaggaaaagtgccagtccgagatccgaaaactgcggcgggagctggacgctagccaggagaaagtttcagccctcaccacacagcttacggcaaacgcgcatctggtggccgctttcgaacagtcacttgggaacatgacaatcaggttgcaatccttgactatgactgctgagcaaaaggatagcgagctgaatgaattacgaaagaccatagaactattaaagaagcagaacgcagccgcgcaggcggctatcaatggcgtgattaatacccctgaattaaactgtaaggggaacggcactgcgcagtcagctgatcttaggatacggagacagcatagttctgacagcgttagctctattaattcagcaacttctcactctagtgtgggttcaaacattgaaagtgattccaagaaaaagaagcgaaaaaactggttaagaagcagtttcaagcaggcattcggtaagaagaaaagcccaaagtctgcctcaagtcactcagatatcgaggaaatgactgactcgagcctgcccagtagcccaaagctcccccacaacggctcaacaggtagcaccccccttctacggaatagtcactcgaactcactgatttcagaatgcatggatagcgaggcagagactgtcatgcagctgcgtaatgaactgcgtgataaagaaatgaaattgaccgatatccgcttagaagctctgtcgtcggcacaccagctcgatcaattgagggaagccatgaacagaatgcaaagtgaaattgagaaactgaaagctgagaacgacagactgaagtccgagagtcagggctcgggctgttcgagagctcctagccaggttagtatttctgcctctcctcggcagagcatgggcctctcccagcattctcttaatctgactgaatcgacttcactcgatatgttactcgacgacaccggtgagtgtagcgcacgtaaggaagggggaaggcatgttaaaatcgttgtgagctttcaggaggaaatgaagtggaaggaggattccagaccccacctgttcctgatcgggtgcatcggggtttccggaaagaccaagtgggatgtcctagacggcgtggttcggagactgttcaaggagtacattatacatgtcgatccggtgtcacaactgggtctgaattcggacagcgtgcttggttattcaattggggagataaaaaggtccaacacctcagaaacccctgagctactcccttgtggctatttagttggcgaaaacacaaccatctccgtgactgtgaagggcttggctgagaactctctggatagcctggtatttgagagcctgatcccaaaacctatcctccagcggtacgtcagcctgcttattgagcacagacggattattctttccggcccatctggaactggcaagacgtaccttgccaaccgtctgagtgagtacatcgtgttacgtgaggggcgtgagctgaccgatggggtgatcgccacatttaacgtggatcataaatctagtaaagagctgcgccagtatctgtctaatctcgccgaccagtgtaactccgagaacaatgccgtggacatgccgctcgtcattatcctggataatctacaccacgtgtcttccctgggagaaatcttcaatgggttactgaactgcaaataccataaatgcccctacattatcggtacaatgaaccaggcaacctctagcacgcctaaccttcagcttcatcataatttcagatgggtactctgcgccaatcacactgaacctgtcaaaggctttctcggacgatttctgagacgaaaattgatggagacagagatctctgggcgagtacggaacatggagctcgtcaaaattatcgattggatacccaaagtttggcaccacctgaaccggtttctggaagcacacagctcttcagacgtgaccatcggaccgcggctcttcctatcatgtcccatcgacgtcgacgggtcccgcgtctggtttacagacctctggaactattccatcatcccgtacctgctcgaggccgtgagagaaggactccagctctacggaaggcgtgctccctgggaagaccccgcgaagtgggtgatggatacctatccatgggcagcttccccacagcagcacgagtggccacccctcctgcagctgagaccagaagatgttggttttgatggctactccatgccacgggaggggtcaactagcaagcaaatgcccccttccgacgccgaaggtgacccgttaatgaacatgctgatgcgcttgcaggaagctgccaactattcttcacctcagtcctacgactcggatagcaattccaattcacaccatgacgacatactagatagcagtctagaaagtaccctgtag

SEQ ID NO: 197075 - DNA, 7299 bp, synthetic construct
  misc_feature 1..7299: note = Description of Artificial Sequence: Synthetic coding sequence
  source 1..7299: mol_type = other DNA
atgcccgccatcctggtggccagcaagatgaagagcggcctgcccaaacctgttcactccgctgcccccatcttacatgtgccccctgcacgggccggtccccagccttgctatttgaagctcggaagtaaagtagaagtgtctaagaccacatacccatcccagatccctctcaagagccaagtgcttcagggtctgcaggagcccgcaggtgaggggcttccactacggaaaagtgggagtgtcgaaaacggtttcgacacccaaatatacaccgactgggccaatcactaccttgccaaaagtgggcacaagagactgatccgtgacctccagcaagatgtgacggatggagtcctgctcgcccaaattattcaggtcgtggccaatgaaaaaattgaggacatcaatgggtgcccaaagaacagaagccaaatgatcgaaaacatagatgcttgcctgaactttctcgccgccaaggggattaatatccagggcttgagtgcagaggagataaggaatgggaatctcaaagctattctgggactctttttctcactgagtcgatacaaacagcaacagcagcagccccaaaaacagcatctctccagcccactgcctccagccgtttctcaggtggctggggctccaagtcaatgtcaagctgggacgccacaacagcaggtcccggttacgcctcaggctccctgccaacctcaccaacctgcgcctcaccaacagtctaaagcgcaggccgagatgcagagccggctgcctggcccaaccgctagagtgagtgctgcagggagtgaggccaaaacccgggggggctctactaccgccaacaataggcgaagtcagtccttcaataactatgataagtccaagccagtgacaagtccccctccccccccttctagtcacgaaaaagagccactcgcgtccagcgcatcctcccaccctgggatgtccgacaatgccccggcctccttggaaagcggttcctctagcacccccacgaattgttccactagttcggctataccgcaacccggtgctgcaacaaaaccttggaggagtaaatccctctctgtgaagcactcagcaacagtctcaatgctatcagtgaagccccccggccctgaagctccacgccccaccccagaggccatgaaaccggccccaaacaaccagaagagtatgcttgagaagctgaaattattcaatagcaaggggggatcaaaggccggcgaaggtccaggcagcagagacactagttgtgagaggctggaaacgctcccctcttttgaagagagcgaggaactggaggctgcttcacgaatgctgacaaccgtcggacccgctagctccagccccaagatagccctaaaaggcattgcccagcgaacgttctctagagccctgaccaacaagaagtcaagcctcaaggggaatgagaaggaaaaagagaagcagcagcgggaaaaggataaggaaaagtccaaggatctcgcaaaaagagcctccgtgacagagaggctcgacttgaaagaggaacctaaggaggaccctagcggggccgccgtgccagaaatgcccaagaaaagtagcaaaatcgcatctttcattccaaaaggcggcaagttaaactccgctaagaaggaacctatggcccctagccacagtggaatccctaagcctggaatgaaatcaatgcctgggaaaagcccctccgcccctgcacctagcaaggagggggagagatcccgctctggcaaactttcatccggtctgcctcaacagaagccccagcttgatgggcggcacagtagttcatcatcatcactggcttccagcgaagggaagggacctggtggcactaccctgaatcactctatcagcagccagacagtgagcggctcggtgggcacaacccaaactaccggctccaacactgtctctgttcagttgcctcagccccagcagcaatacaaccaccctaatacagcaacagtggccccctttctgtatcggtcccagactgacaccgagggcaatgtgactgctgagagcagctctaccggcgtctctgtcgagcctagccattttacaaaaaccggacagccggcacttgaggaactcaccggagaggatccggaagctcgtaggctgaggaccgttaagaacatcgccgatctgaggcagaacttggaggagaccatgtctagcttgcggggaacacaggtaacgcactccacactggaaaccacctttgacaccaacgtaacaacggaaatgagtggcaggagtattctctcactgaccggtcggcctacacccttgtcttggcgcctgggtcagagcagtccgcgtttgcaagccggagacgcgccttccatgggtaatggttacccaccacgcgccaacgcgtcgcggttcataaataccgaatccgggcgttacgtctattctgcacctctccggagacagctggcgagcagagggtcatcagtgtgtcatgtcgatgtgagtgacaaggctggggatgagatggatctcgaggggatcagcatggatgccccaggttacatgtcagatggcgatgtcctgagcaaaaacatccggacagatgatatcacaagtggctatatgacagacgggggcttggggttatacacacggcggctgaataggctaccagatggcatggccgtagtacgtgaaactttgcagaggaacacatccctcggtttaggcgacgcagacagttgggacgatagttcgtccgtctcaagcgggatttccgacaccatcgacaacctgtccacagatgatattaacacgtctagttcaatttcatcctacgccaatactcccgcctctagccgtaagaacctcgatgtgcagaccgatgcagagaagcatagccaggttgaacggaattccttatggtctggcgatgacgtcaagaagtcggatggaggtagcgattcaggcatcaagatggaacctggctctaagtggcgccgcaacccatccgatgtgtcggacgaaagtgacaagtctacctccggaaaaaaaaacccagttatttctcagacggggagttggcggcggggcatgactgctcaggtgggaattaccatgcccagaacgaagccctcagcccctgctggtgctctgaaaacaccaggcacaggaaagactgatgacgccaaggtgtctgaaaaaggtcggctgtctcctaaagcttctcaggtgaaaaggagcccgtcagacgcaggacgttcgtccggagacgagagcaagaagccactgccttcttcttcaagaaccccaactgccaatgccaactcctttgggttcaagaaacagtccggtagtgccgccggcctggccatgatcaccgccagtggcgttactgtgacttctcggtccgctaccctggggaaaattcccaagagcagcgctctggtgagtaggagcgcaggaagaaaaagcagcatggacggggcacagaaccaagacgacggatatctggccctgagtagcaggaccaacctacagtacaggagtctgccccgtccctcaaagagcaacagccgcaatggagcagggaacaggtctagcacttccagcattgactcaaacatatccagtaaaagtgccggactccccgtccctaagctgcgcgaacccagcaagaccgccctgggatcttccctgcccggcctcgtgaaccagacagacaaagaaaaaggaatttcgtctgataacgaaagtgtggctagttgtaacagcgtgaaggtgaaccccgccgcccagcctgtttctagccccgcacaaacgagcctccagcccggagcgaaataccccgatgttgcctcccctacgctgcgacgcctatttggcggcaaacccaccaaacaagtccccatagccacagcagagaacatgaaaaattcagttgtcattagtaatccccatgccaccatgacccaacagggcaatctcgactctcccagtggcagtggtgttttgagttctggatctagcagcccactgtacagtaaaaacgtggatctgaaccagtccccacttgcaagctcaccatcgtccgcacactcagccccctctaacagcctgacatggggaacaaacgcaagttcgtcaagtgccgttagcaaagatggactgggcttccagtctgtgtcttctctacatacttcttgcgaatccatcgatatttctctttccagtggtggcgtccccagtcataacagtagcaccggcctcattgccagttctaaagacgactctctgaccccattcgtccggactaactcagtaaagacaaccctgagcgagtctcctctcagttcacctgctgcttctcctaagttctgccgttctaccctgccacgaaaacaggatagtgatccacaccttgatcgcaacaccctgccaaagaaagggttgaggtacacgccaacatctcagctgcgcacccaggaagacgccaaggaatggctgagaagccattccgcggggggcctacaagatactgccgctaattctccatttagcagtggctcgagtgtgaccagcccatcgggaacccggtttaacttctctcagctcgccagcccgactactgttacacagatgagtctctcaaaccccaccatgctgcggacacattcactgtcaaatgctgatggtcagtacgatccatataccgatagtcggttccggaacagtagtatgtccctagatgagaagagcagaactatgtcccgatccgggtcattcagggatgggtttgaggaagtgcacggatcgtctctgtccctcgtcagttctaccagctcggtgtactccacgcctgaggagaaatgtcaatctgaaattcggaaactcaggcgcgagctggacgcctcccaggagaaggtctctgctctgaccacccagttgaccgctaacgcccacctggtggcagctttcgagcagtccctggggaacatgacaattcggctgcagtctcttacaatgacagccgagcagaaagactcagagctcaacgagttacgaaaaactattgagctcttgaagaaacagaatgctgctgcgcaggctgccatcaacggcgtgataaatacccctgagctcaattgtaagggtaacggtaccgcccagtcagcagatctccggatccgcagacagcactcctcagacagcgtgtcaagcatcaattcagcaacgtcccattccagtgtcgggagcaatattgagtcggattctaagaagaaaaagcgaaagaactgggtcaatgagctacggagctctttcaaacaagccttcggcaaaaaaaaaagcccaaagtccgcttccagtcatagtgatatcgaagagatgactgatagcagcttgccgtcgtcgcccaagctgccccacaatgggtccaccggatctactccacttctccggaattcacacagcaattcccttattagtgaatgcatggactcggaggcagagaccgtgatgcagctgagaaatgagctgagagataaggagatgaaactaactgacattcggctggaagcgctctcttcagcacaccagctggatcagttgcgcgaggccatgaaccgtatgcagtctgaaatagaaaaattgaaggccgagaatgaccgccttaagtctgagtcgcagggcagtgggtgcagcagagcaccttctcaggtgagtattagtgctagtccacggcagtcgatggggctcagtcagcattcgctgaacttgacggaaagtacctcattggacatgttattagacgatactggggagtgctcagctaggaaggagggcggcagacatgtgaagatcgttgtttcattccaggaggagatgaagtggaaggaggacagtcgccctcacctgtttctgattggctgcataggtgtgtcagggaagaccaaatgggacgtgttggatggtgtggttcgccgactttttaaggaatacatcatccatgtggatcccgttagccagctgggattaaattctgacagtgtgctcggttatagtataggcgagattaaacgctccaatacaagtgagactccggagctgctgccttgcgggtatctggttggcgagaataccactatctccgtcactgtgaaggggctcgccgagaatagtctggacagcctggtttttgaatcgctgataccaaagcctatcctccaaaggtacgtgagcctgctaatcgaacacaggcggattatcctctctggcccctcaggaactggaaagacttacttagctaaccgactttcggagtacatcgtactccgagagggccgcgaactaacggatggagttatcgcaacctttaacgttgatcacaagtcctccaaagagctcaggcagtacctctccaacctggccgatcaatgtaacagtgagaacaatgccgtcgacatgcccctggtcatcatcctcgacaatctgcatcacgtgtcttctctcggggaaatttttaacggattgcttaactgcaaatatcataagtgcccatatatcataggtactatgaatcaggccacatcaagcacccccaacctgcagctccaccataatttccgatgggtcctatgcgccaatcacacagagcctgtgaaaggttttctgggtcggttcctccgaaggaaactcatggaaactgaaatttctggacgcgtgcgtaacatggaactagtgaagattatcgactggatccccaaggtctggcatcaccttaaccgctttcttgaggctcattcttcttccgacgttacaatcgggccccgcttatttctcagttgccctattgacgtagatggttcacgcgtctggttcactgacttatggaattatagcatcatcccttacctgctcgaggctgttcgggaaggcctccagttgtatggacgtagggctccctgggaggatcctgccaaatgggtgatggacacttacccttgggccgctagcccccagcagcacgagtggccaccgcttctccaactacggcccgaggacgtgggcttcgatggatatagcatgccacgcgaaggatcaacaagtaaacaaatgcccccgtctgatgcagaaggagatccattgatgaatatgctcatgcgattacaggaggccgcgaactactcatcccctcagtcatacgactctgatagtaatagcaatagccaccacgacgatatcctcgattctagtttagaatccacactgtag

SEQ ID NO: 197076 - DNA, 7467 bp, synthetic construct
  misc_feature 1..7467: note = Description of Artificial Sequence: Synthetic coding sequence
  source 1..7467: mol_type = other DNA
atgcccgccatcctggtggccagcaagatgaagagcggcctgcccaaacccgtgcacagtgctgccccgatccttcatgttccccccgctcgggccggtccacagccttgctatcttaagctcggctcgaaagtggaggtatctaaaaccacatacccgagccagatcccacttaaatcccaggtgttacagggcctacaggagcctgctggtgaagggctccccctccggaagtcagggtcagtagagaacggctttgacacccagatttacaccgattgggctaatcattacctcgccaagtcaggtcacaagcgcctcatcagagacttgcagcaagatgtaacggacggagtactgttggcacagatcatccaggtggtggcgaatgagaaaattgaggacataaatgggtgccccaagaacaggagccaaatgattgaaaacatcgacgcttgcctgaacttcctggcagccaaaggcataaatatacagggcttgagcgccgaagagataaggaatggcaatctcaaagccatactgggcctgttcttctcgcttagcaggtataaacagcagcagcagcagccccagaaacaacacttgagttctcctctcccacccgcagtttcacaagtggccggcgctccttcccaatgccaagcaggcaccccgcagcagcaagtgcccgttacaccacaagctccatgccagccacaccagcccgccccccaccagcagagcaaagcacaggccgaaatgcagtcaagcgccagctccaaagactcctctcagagcaaaattattaggtttacgctgggtcaaaagaagattagcagactgccagggcctactgcccgggtctctgccgctggctctgaggctaaaacaagaggcggtagcacaacagctaacaacagacggtctcagtcctttaacaactatgacaagagcaaacccgtcacctcaccgcctccaccaccttcaagtcatgagaaggagcctctggcatcttccgccagctcacatcccggcatgtctgataacgcaccagcttcactggagagcgggagtagcagcacaccaaccaattgcagcacctcatccgccataccccagccaggcgccgcaacaaaaccttggcggagtaagagtctcagcgtgaagcactccgccaccgtttcaatgctttccgtgaaacccccaggaccagaggctcctcgccctactcctgaggctatgaaaccagccccgaacaaccaaaaaagcatgctggaaaagctaaaactgtttaattctaaaggtggcagcaaagctggggaaggtccaggttctagggacaccagctgcgagaggttagagacattgccaagttttgaggagagcgaggaactggaggccgctagtcgtatgctgactacagtgggcccagccagctcatccccaaagattgcactgaaggggatcgcacaaaggactttctcacgggcactcacaaacaaaaagtcgagcctgaagggtaatgagaaggagaaagagaaacaacagcgagaaaaggataaggagaagagcaaggaccttgccaagcgtgccagcgtgactgaacgcctggacctgaaagaagaacccaaggaagacccttctggcgcagccgtgcctgagatgcctaaaaaaagcagtaaaatagctagttttatccctaagggtggtaagttaaactctgcaaagaaggaacccatggcaccctctcacagtgggattcctaaacccgggatgaagagtatgcctgggaagtctccgtcagcccccgccccatccaaagaaggagaacgctcacggtcaggcaaactgtcctccggtctcccacagcagaagcctcagttagacggccggcattccagttcttccagctccttagcgagctctgaaggaaaaggtcccggggggacaacactcaatcattccatttcttcccaaacagtgtccgggtctgtgggaacgacccagacaaccgggtctaatacggtgtctgtgcaactgcctcaaccccagcagcagtacaaccaccctaacaccgctacagttgctccattcctctaccgatcgcagaccgataccgaggggaacgtgaccgctgagagttcaagtacaggcgtgagtgtagaaccgtcccatttcaccaagacagggcagcctgccctggaggagctgactggagaagaccctgaggccaggaggttgaggaccgtgaagaatatcgcagatctgcgacagaacctggaggagaccatgagctcactgagggggacacaggtcacgcactccactctggagaccacctttgacactaacgtcactactgaaatgtctggccgcagcatcctctccctgaccggccggcctacacccctgtcttggcgtctgggccagtctagtccgcgactgcaggctggcgacgctccatccatgggcaatggatacccaccccgcgccaatgctagcagatttattaatacagaatcaggacgctatgtctattctgcaccactgagacgccaactcgcatcacgcggatcaagtgtgtgccatgtcgacgtgagtgataaggcgggagatgaaatggaccttgagggaatttccatggatgccccaggatacatgtcagatggggatgtactcagtaagaatatcagaactgatgatatcaccagcggctatatgactgacggcgggctgggcctatatactagaaggttgaaccggctgcctgacggcatggccgtggtaagagagaccttgcaacgaaacacttcactgggacttggtgatgcagattcctgggatgattcgtcctccgtttcctctggaatctctgacactatagataatttgtccactgacgacattaatacgtcatctagtatctcctcttacgcaaacacgcccgcaagctcccgcaagaatctcgatgtgcagacagacgctgagaaacattcacaggtggagcggaactcgttatggagcggagatgatgtgaagaaatcagacggtggcagcgatagtgggatcaagatggagcccggcagcaaatggcggcgaaatccgtccgacgtctccgatgagagcgacaaaagcacaagtggaaagaagaatccggtgataagccaaacaggatcttggagacggggcatgacggctcaggtggggataactatgcctagaacgaagccatcagcaccggccggcgctctgaagacgccagggaccggtaagacagacgacgctaaggtgtctgagaagggacggctgtcacctaaggcctcccaggtgaaacggagccccagcgatgctggtcggagcagtggggacgaatctaaaaagcccctccccagttcctctaggacccccactgccaatgcaaactcctttggttttaaaaaacagtccggatcagcagctggccttgctatgatcactgcttccggcgttacagttacctcccgctcagcgactcttggcaagatccccaagagttcggctctagtgagcagatctgctggccggaaatcttcaatggatggtgcccagaaccaagacgacggctacttggcgctatcttcacgaaccaatttgcaatacagatctcttccgagacctagcaagtcaaacagccgaaatggggctggtaaccgcagctccacttcgtctattgacagcaacatctcatctaaaagtgcagggcttcccgtccccaagctgcgggagccaagtaagactgcgttgggttcaagcttgcccggcctggtgaatcagaccgacaaggagaaagggatctcaagcgataatgagtcagtggcctcatgcaactctgtgaaagtcaaccccgcagcacagccagtctcatctcctgctcagaccagcctgcagcccggggcaaaatacccggacgtggcttcgccgaccctgcgaagactgttcggcgggaaacccacgaaacaggtccctattgctaccgcagaaaacatgaagaattccgtggttataagcaatccccatgctacaatgacacagcagggaaatttagactctccatctggttctggggtgctgtcatccggatcatcctcacctttgtacagcaagaatgtcgacctgaaccaaagtccacttgcttcttccccctcctcagcccacagtgcaccgagcaactcactgacctggggtacaaatgcaagctccagctccgccgtttcaaaggacggcctcggattccagtcggtgtcgtcgctccacacatcctgcgaatccatcgacatatctctgtccagcggcggcgtgccaagccacaattcgtctacgggcttgatcgccagctctaaggacgacagcctcactccgttcgtgagaaccaacagcgtgaagacaactctgagtgagtcccctctgagcagtcccgctgcctcacccaaattttgcaggtccacgctcccacggaagcaggactctgatccccacctagacagaaataccctccccaaaaaaggtctgcgctataccccaacatcccaactgcgaactcaggaggatgcgaaagaatggctcagaagccattcggcggggggtctgcaggatacagccgccaactctcccttctccagtggttccagcgtgacttcccctagcggcacccggttcaatttttcccagcttgcaagtcctaccaccgtcacccagatgtctttgagcaaccctaccatgttacggactcacagcctgtccaatgccgacggacaatatgacccttacaccgatagccgtttcagaaacagctccatgtccctggatgagaagtcgcgcacgatgtccagaagcggaagcttccgggatgggtttgaagaggaatcatgggaaaaaagcagcgtggataatttcgtcagcagacttcattcatccctgcacttttctctccccttattccaccacgctaggtatgaactggtccatggaagtagtctttcactggttagcagcacctcgagcgtttattcaacccccgaggagaagtgccagtctgagatcaggaagttacggcgcgagttagacgcttctcaggaaaaggtcagtgccctgacgacccagctgaccgccaatgcgcacctggtggcagcttttgaacagagtttgggaaacatgactatccgactgcagagcctgactatgactgccgaacagaaagactctgagctcaatgagttgagaaagacgatagaactcctgaaaaaacaaaacgcagccgctcaggccgcaataaacggtgtgatcaacactcccgaactgaactgtaaaggaaatgggactgcacaatctgccgacctccgtatcagaagacagcactctagtgactctgtatctagtataaactccgcgacttctcatagcagtgttggttcaaatatcgagagtgactccaagaaaaaaaagcgtaaaaactgggttaatgaattgcgcagttcctttaaacaggctttcggcaaaaagaaatctcccaaatctgcctcaagtcacagtgatattgaagagatgacagatagctctctgccctcttcccccaagctcccccacaacggcagtaccggttcaactcctctactgcgaaattcgcatagcaactccctcatctccgaatgtatggactcggaggcagagaccgtcatgcagctgcgcaatgaacttagagataaagagatgaaacttacggacatacgactggaggctctttcctctgcccaccaactggaccagctgcgggaagccatgaaccgaatgcagagtgagattgagaaactcaaggccgaaaacgatagattaaaaagcgaatcccagggctctggctgctcacgtgctccatcacaggtcagcatttcagcttcaccccggcagagtatggggctgtcccagcattctctgaacctgacggagtctaccagcttagacatgctccttgacgataccggggagtgtagtgcgcgcaaggagggtgggcgccatgtgaagattgtcgtaagctttcaggaagaaatgaagtggaaagaggattcccggccgcacctattcctgatagggtgtatcggggtgtctggaaagaccaagtgggatgtcctggatggagtggttcgcaggctgttcaaagagtatattattcatgtcgatcccgtctcccagctgggtctaaattctgatagcgtcttaggctactccattggcgagatcaagcgctctaacacgagcgagacacccgaactgctcccctgcggctatctggtgggcgagaataccaccatctcagtgaccgtgaagggtttagctgagaattccttggatagcctggtgttcgagagcctgattcctaaacccattctgcaacgttatgtaagcctgctcatagaacacagacgcattatcttgtctggcccaagtgggacagggaagacctaccttgctaaccggcttagcgaatacattgtgctgagggaaggacgggaactgacagatggtgttatcgctacctttaatgtagaccacaaatcttcaaaagagcttcgccaatacttgtccaacctggctgatcagtgtaactcggaaaacaacgctgtggacatgcctctcgtgattattcttgacaatcttcatcacgtgtctagtctaggcgagatctttaacgggctcctcaattgtaagtatcacaaatgtccatatatcattgggactatgaaccaggccacatccagcacccccaatctgcagcttcaccataatttcagatgggttctatgcgctaatcacactgaaccggtcaaagggttcctgggaagattcctacggcgtaaactcatggaaaccgagataagcgggcgcgtcagaaacatggagctggtcaaaatcatcgattggattcccaaggtgtggcaccatttaaacaggtttctggaggcccactcctccagcgacgtcacaattggtcctcgcctcttcctgtcctgccctattgatgttgatggatcaagagtctggttcacagatctttggaactattccatcatcccctacctgctggaggcagtaagagagggactccagctctacggtcggcgcgccccgtgggaggaccctgctaagtgggtcatggacacttacccctgggccgctagcccccagcaacacgaatggccccctttattacagctgagaccggaagatgttggattcgatggatactctatgccgagggagggatccacctccaaacagatgcctccctctgatgctgagggtgatcctcttatgaacatgctcatgcgactgcaggaggcagccaattatagtagtccacagagctatgattcagatagtaactctaattctcaccatgatgacatccttgatagcagcctcgagtctacgttatag

SEQ ID NO: 197077 - DNA, 7254 bp, synthetic construct
  misc_feature 1..7254: note = Description of Artificial Sequence: Synthetic coding sequence
  source 1..7254: mol_type = other DNA
atgagcgtgatgctgtggcggtgggagcagaacaacaccaccatgaagctccaaatctacactgactgggcaaatcactacttggccaaaagtggccacaaacggttgattcgggatttgcagcaggatgtgaccgatggggtgttgcttgctcagatcattcaggttgtcgccaacgaaaagatcgaagacattaatgggtgtcccaaaaacaggtcacagatgatcgagaacattgatgcgtgtctgaatttcctagctgctaagggcataaacattcagggactgtcagcagaagaaatccgcaacggaaatttgaaagccattcttggcttgtttttctcgttaagccggtacaaacaacagcagcagcagccacagaagcagcacctgtcgtctcccttgcctccagccgtgtcacaggtagctggggcgccatctcagtgccaggccggtacccctcagcagcaggttccggtgacaccccaggcaccctgtcagccacatcagcccgcccctcaccagcagtcaaaagcccaagccgaaatgcagagctcagcctcttccaaagattcctctcagtccaagatcatacgtttcactcttgggcagaagaaaatctctcgtcttccaggccctacagccagggtttcagccgccggctcagaggctaaaacacgcgggggttccacaacagctaataaccgcagatcacagtccttcaacaactacgacaaatccaagcctgtcaccagccccccgcctcccccatcttcacacgagaaggagccactggcctcctctgcttcctctcaccctgggatgtccgacaatgcaccagcctcattagagagcgggtcgagcagcactcccacgaattgttcaactagctccgctattccacaaccaggagccgcaacaaaaccctggaggagcaaaagcctgtcagtgaagcatagtgctactgttagcatgctgtcggtcaagccacctgggccagaggcaccacgaccaacccccgaggccatgaagccagcgccaaataatcaaaagtcaatgctggagaaactcaagttgttcaatagcaagggcggctctaaggccggcgaagggcccggatcccgagatacttcttgtgagaggttggaaaccttgccgtccttcgaggaatctgaagaactcgaagccgcttctagaatgctgactactgtcggcccggcctcctcatcacctaaaattgctttgaagggcattgctcaacgcacattttccagggcgctgacaaataaaaagagcagtctcaagggcaacgaaaaggaaaaagagaagcaacagcgagagaaagacaaagagaagagtaaggatttagctaagcgggcctctgtaaccgaacgcttagacttgaaggaagagccgaaggaagatcccagtggcgcagcggtcccagaaatgccaaagaaaagctcaaagatcgcctcttttattccaaaaggcggaaagctgaactccgcaaagaaggagcccatggcaccgtctcacagcggtattccaaaaccggggatgaaatccatgcccggcaagtcccccagcgcccctgccccttctaaggagggtgagcggtcacgctccgggaagctaagctccggcctgcctcaacagaaaccccagctagatggtcggcactctagctccagttccagtttggcaagcagtgagggcaagggcccaggcggcacaacactgaatcatagtataagttctcagacagtgtcaggttccgtcggaaccacacagaccaccgggagcaacacggttagcgttcagctgcctcagcctcaacagcagtacaaccacccaaacaccgcaacagtggcacccttcctctacagatcccagactgatacagagggtaatgtgaccgcagaaagctccagcaccggagtctctgtggaaccaagccacttcacaaagactggtcagccagcacttgaggagctcacaggcgaggaccccgaagcaagaagactccgcaccgtgaaaaatattgccgacctgcgacagaaccttgaagagacgatgtcctctctgaggggcacccaggtgacacacagcactttggaaaccacttttgacacaaacgtgactactgaaatgagcggtaggtctatcctgtctcttacgggccggccaactccattatcttggcgtctaggacagtcaagtcctcgcctccaggccggagacgctccttcaatgggcaatgggtatccaccacgcgcaaacgcctctagatttattaatactgagtcgggaagatacgtgtacagtgcccccctgagaaggcaactcgcatccaggggaagtagtgtctgccatgtggatgtcagcgacaaggccggcgacgagatggatctagaaggcatttccatggatgccccgggttatatgtcagatggcgacgtcctgagtaagaatatcagaacagacgatattactagcggctacatgaccgatgggggtctggggctgtacacacgccgactgaaccggctgcctgatggcatggcagtggtccgcgaaaccctgcagcgcaataccagtttgggacttggggacgccgacagctgggatgattcaagttctgtatcttccgggatctcagacaccattgataatctctctaccgacgatatcaacacatcttcaagcatcagcagctatgccaacacccctgcttcttcaagaaagaaccttgacgtccagactgacgccgagaagcactcccaagtggagcggaattccctctggtccggcgacgacgtcaaaaagtcagacggcggctccgactcagggatcaaaatggagccaggctctaagtggaggaggaacccaagcgacgtgagcgacgaatcagacaaaagcacttctgggaagaagaaccccgtgattagccaaactggttcatggaggcgaggaatgaccgcacaggtaggcatcaccatgcctaggaccaaacccagcgcccccgccggagctttaaagacccccggaacaggcaagaccgacgacgcaaaggtcagcgaaaaaggtaggttatccccaaaggcatcccaggtgaagcgatctccaagcgacgcgggacgctcatccggggacgagagcaaaaagcctctccccagttcatcccgcacccccacagctaatgctaacagtttcggcttcaagaaacaaagcggctcagccgcgggcctggccatgattacagcttcgggggttaccgtgacctccaggtcggccacgctgggaaaaataccaaagagttccgccctcgtctcacgatcagcaggccgtaaaagctctatggacggtgcccagaaccaggatgacggatatctggctctgagcagccgcaccaacctccagtatcgctcactcccccggccttcaaaatccaattcgagaaacggggccggcaaccgttcctccacgtcttcaatcgacagcaacatcagcagcaagagcgccggtctgcctgtccccaaactgagggagccgtcgaaaactgccctcggctcaagtctgccaggcctggtcaatcaaaccgacaaggaaaaagggatcagtagtgacaacgagtcagtggctagctgcaactccgtgaaggtaaaccccgccgctcagcctgtgagttctcccgcccagacctctctgcagccaggggccaaatatccagacgtggcgtccccaaccttgcggaggctcttcggtggaaagcctactaaacaggtgcccatagccacagcagagaacatgaagaatagcgtcgtgatctctaatccacacgcgaccatgacccaacaaggcaacctggactctccttccggatcaggtgtcctttcatccggatcttcatcccccctatattcaaagaatgtggacctgaatcagtctcctcttgccagttcaccctctagtgcccactctgcccctagcaatagtttgacctggggaaccaatgcttcgagctcatccgccgtctctaaagatgggttggggttccagtctgtgagtagcctgcacaccagctgcgagtctattgatattagtcttagctccggcggagtcccatcacacaattcttcaacaggcctaatcgcttcaagcaaggatgactcgctgaccccattcgtgagaacgaactcagtgaagacaactctatcggagtctcctctgagtagcccggccgcgagtccgaagttttgccgtagtaccttgcctcgcaagcaagacagcgatccccatctggatagaaatacactgccgaagaagggattgcggtacacgcccacatctcagctgcgaacccaagaagacgcgaaagagtggctgcgatcacatagtgctggtggtctacaagatacggccgctaatagcccgttcagctctgggagctccgtaacatctccatctgggactaggttcaacttttcacaattagcctctcctacgaccgtgacacagatgtctctgtccaatcccaccatgcttcgaacccatagcctgtcgaacgcggacgggcagtatgacccttatacagactcccggtttagaaactcctccatgagcctggacgagaagagtcgcactatgtcccgaagcggttcttttagagatggcttcgaggaggagtcttgggaaaagagctctgtagataactttgttagtagactgcatagctcgctgcacttttctctgccattattccatcacgccaggtacgaacttgtgcacggatctagtctatctctggtgtcatctacttcatcagtgtacagcacccccgaagaaaagtgccagagcgagataaggaagctaagacgggagctggatgcctcacaggaaaaagtctcagctctgactacacaactgaccgctaacgcacacctcgtcgccgcattcgaacagtcacttggaaacatgaccatccgtttgcaatccttgaccatgaccgctgaacaaaaagattccgaactgaacgagctcaggaagacaatcgagttgctaaagaagcagaatgccgcagcccaggccgcaatcaacggcgtgatcaatacccctgagcttaattgcaaagggaatggcactgctcaaagcgccgacctgagaatacgccgccaacactccagcgattcggtgtcctctataaatagcgccacgagtcactccagtgtagggtctaacatcgaatcagactcaaagaagaagaaacgtaaaaattgggtgaacgagctcagatccagcttcaagcaggcttttggcaaaaaaaagtcacccaaatccgcttccagccatagtgatatcgaagagatgaccgattcatcgctgcccagctcacccaagctgccacacaatgggagcacgggttccaccccccttctcagaaacagtcactccaattccctaatcagcgagtgtatggattcagaggctgagacagtaatgcaactccgaaatgagttgcgagataaggagatgaagctcactgatattcgcctcgaggcactttctagcgcacatcagctggatcaacttcgggaggctatgaacaggatgcagagtgaaatcgaaaagctgaaggcagagaatgataggctgaagtccgaatctcaagggagcggttgctccagggccccttctcaggtatctattagtgcttcacctagacagtccatgggacttagtcagcattccctgaaccttactgagtctacatctttggatatgctactggacgataccggcgagtgttctgctcgcaaggagggaggccgacatgttaagatagtggtatcttttcaagaggagatgaaatggaaggaggactcgcggccgcaccttttcctgattggctgtatcggggtgtccggcaagacaaagtgggatgtgttagatggagtcgtgagacggctgttcaaagagtacatcatacatgttgacccagtgagccaattgggtttgaacagcgacagcgtcttgggctattctattggtgaaataaagaggtcgaacaccagtgaaacacccgagctccttccatgtggatatctggttggagagaatacaaccatttccgtcacagtgaaaggactggcggagaattcacttgattccctggtgtttgagtcactgatacctaagccgattcttcagcgttacgtgtccttgctgattgagcatcgccgaattattctcagtggcccaagcggaaccggcaagacttacctagctaatcgactatccgaatacatagtgcttagggaggggcgcgagctgacagacggggtcatcgctacctttaacgtcgaccacaagtcctctaaggaattgcggcagtacttgagcaatctcgccgaccagtgtaactctgagaacaatgcagtagacatgccgctggtgatcatccttgataatctgcatcatgtctcaagcctcggggaaattttcaacgggcttctgaactgtaagtatcataaatgtccttatatcatcggtacaatgaaccaagccacgagctctactccaaatctgcagctccatcataactttcggtgggtgctgtgtgctaaccacactgagccagttaaaggcttcctcggtcgcttcttgcggcgcaagctcatggaaacggaaatctccggacgggtacggaacatggaattagtcaaaattatcgactggatccccaaggtgtggcaccacctcaatcggtttttggaagctcatagcagctctgacgtgaccattggcccacggctgttcctcagttgtccgatcgacgtggacggctccagagtttggtttactgatctttggaactactcaattattccttacctccttgaggcggttagggaaggattgcagctttacggtaggcgcgctccttgggaggatccagcaaaatgggtcatggatacatacccctgggccgcgtctccgcagcagcacgaatggccacctctccttcagctgagaccagaagacgttggttttgacggatactcaatgcctagggagggttcaacttcaaaacagatgcctccttcggatgccgagggggaccctctcatgaatatgcttatgcgtctgcaggaagccgccaattacagtagtccccagtcttatgatagcgactccaatagcaactcacaccacgatgacatacttgattcctcgctggagtccacactttag

SEQ ID NO: 197078 - DNA, 4482 bp, synthetic construct
  misc_feature 1..4482: note = Description of Artificial Sequence: Synthetic coding sequence
  source 1..4482: mol_type = other DNA
atgctgtggccccggaacctgaccagctgggacgacagcagcagcgtgagctccggaatttcagataccatcgacaatctctcaaccgatgacattaacacttcctcttcaatttccagctacgccaacacccccgcctcttccagaaaaaacctggatgtccagacggacgccgaaaaacacagccaggtggagcgcaatagcctgtggtccggagatgacgtgaaaaagtccgatgggggctctgatagtggaatcaaaatggaacccggctctaagtggcgaagaaatccatcagatgtcagcgacgagtctgataagagtacaagtgggaagaagaaccccgtgatctcacagacaggttcatggaggcgcgggatgacagcccaggttggaatcaccatgcctagaaccaaacccagtgcgcctgctggtgctctgaaaactccagggacaggaaagactgacgacgccaaggtgtccgaaaaggggagacttagtcccaaagcctcccaggtcaagaggtctccttcagatgctggacgctccagcggcgatgagtccaagaagcctttgccaagttctagcagaacacctaccgcgaacgccaactctttcggtttcaaaaaacagtccggatcagccgctggactggccatgatcacagcgagcggtgtaacagttacctctcggtctgcgacactaggaaaaattcccaagtcatcagctctcgtgagtcggtcagcaggaaggaagtcctccatggacggtgcccagaatcaggacgatgggtatctggctctgtcttcccgcacaaaccttcaatatagatctctgccacggccctccaagagtaattctcgaaatggagccgggaatcgctctagtacatcatctattgattccaatattagttctaaatctgcagggctcccggtgccgaagttacgcgagccttcaaagacagcccttggaagctctctgccaggcttggtgaatcagactgataaagagaaaggcatctcgtctgacaacgaatccgtcgctagttgcaactccgtcaaagtcaatcccgccgcccagccggtcagctcgccagcccagacgtccttacaacccggcgccaaataccccgacgtggcatcacctactctgcggcggttatttggaggcaagcctacgaaacaggtcccaatcgcaacagcggaaaatatgaagaattcagtcgtgatttccaacccccacgctaccatgacgcagcagggcaatttggactctccatctgggtcgggcgtgttgtcctctgggagttccagccctctgtactcgaagaacgtggacctcaatcagagcccgctcgccagcagtccctccagcgctcactctgctcccagcaattctttgacatgggggacaaatgcctcaagttccagtgccgtgtcaaaggacggcctgggattccagtcagtgtcgagtctacacactagctgtgagagtatcgacatctcacttagctctgggggggtgccgagccacaacagctcaacagggctcatcgcctcctcaaaagacgatagcctgactccattcgtgagaaccaactccgttaagaccacactgtctgaatcagatccccatctggatcgcaatactttaccaaagaagggcctgagatacacccccacgtcccagctcagaacacaggaagatgccaaggaatggctacgatcccactcggccggcggactgcaggataccgctgccaattcccccttctctagcggatcctctgttacaagtcccagcggtaccaggttcaatttttcccagcttgcttctccaacaaccgtcacccagatgtccttaagtaaccccaccatgcttcgcacccactcgctttctaacgcggacggccagtacgacccctacacagattcccgctttcggaatagctctatgagccttgatgaaaaaagtagaacgatgtcacggagcggaagtttccgtgatggcttcgaggaggttcatggatcatcactctcgttggtgagctcaacaagctccgtgtactccacccctgaggagaagtgccagtctgagatccggaagctgcgacgagagttggatgcttctcaggagaaggtctcagccctcaccacccagctgactgcgaacgcgcatttggtagctgcgttcgaacaatccctggggaacatgactattcggttgcagagcttgaccatgactgcagaacagaaagatagcgaattgaatgagctccggaaaacaattgagctgcttaaaaagcagaacgctgcggcccaagctgcaattaatggtgtgataaatacccctgagttgaattgtaagggcaatggcacggcccagtcggctgaccttcgcattagaaggcagcactcatcagactccgtatcctccataaattccgcgacctcgcacagcagcgtgggctccaatatcgagtcagattctaagaaaaaaaaaaggaaaaactggctgcgcagtagctttaagcaagcattcggaaagaagaagagcccgaaatccgcctcctcacacagcgatatcgaggagatgactgacagtagtttgccctcaagccccaagctgccccacaacggctctacggggtcaacccccctcctcagaaattcacatagtaactcccttatatcggagtgtatggatagcgaggcagagacggttatgcagcttaggaacgagttaagggacaaggaaatgaaactgaccgacatcagactggaggctttgtcttcagcccaccagctcgaccagctcagagaggccatgaacaggatgcaaagcgagatagagaagctgaaagcggaaaatgatagactgaaatctgaatcccagggatccggctgtagcagagctccgtcgcaggtgtccataagtgcatccccaaggcagtcaatggggctttcccaacactctctcaatctcacagaatcaacatctctagacatgctcctcgacgacaccggggagtgcagcgctagaaaggaaggggggcgccacgtgaaaatcgtggtcagctttcaagaagaaatgaagtggaaggaggacagtagacctcacctctttcttatcggctgtattggagtgagtggcaaaacgaagtgggacgttctggatggggtggtgcgacgcctctttaaggagtacatcattcacgttgaccccgtgtcccagttagggcttaattccgattccgtcctgggatacagcatcggcgaaatcaagagatcaaacacatcagagaccccagaactgctgccttgtggatatcttgtaggcgagaatacaactattagcgttactgtcaaaggacttgctgagaattccctcgattccttggtatttgagagtcttatccccaaacctattctgcagaggtatgtgagtctgcttatagaacatcgtagaattattctgtccgggccatccggaacaggtaaaacctatctagccaaccgtttgtccgagtacatagttttaagggaggggcgagagctgactgatggggtcattgcaacatttaacgtcgaccacaagagctccaaggagctccgccaatatctaagcaatttagcggaccagtgcaattctgaaaataacgctgtggatatgcctctggtgataattctggataatctgcatcacgtgagctcgctcggtgaaatctttaatgggttattaaactgcaaataccataagtgtccctacattattggcacgatgaatcaagccacaagttccacccccaacttacagctgcatcacaatttccgatgggtgctttgcgcaaaccataccgagcccgttaagggctttcttggacgttttctgcggcgcaagttgatggagaccgaaatttcaggacgcgtgcggaatatggaactggtaaaaatcattgattggatcccgaaggtgtggcaccacctgaacaggttcctggaagcccacagcagcagtgatgtcactatcggtccacggctgtttctttcctgcccaatcgacgtcgatgggtctagagtatggttcactgatttgtggaactattccatcatcccttaccttctcgaggctgtgagagaagggctacagctgtacggacgaagagctccttgggaagacccagcgaagtgggtcatggacacctatccatgggcagcctcaccacagcagcacgagtggccacctctgctccaactcaggcctgaggatgtcggatttgacggatactccatgccacgcgaagggagcacatctaagcaaatgcccccctccgacgccgagggtgatccactgatgaatatgctcatgagactccaagaggctgccaattacagctctccacaaagctatgactccgactccaattctaattcccaccacgacgatatccttgatagttccctggaatctactttatag

SEQ ID NO: 197079 - DNA, 2451 bp, synthetic construct
  misc_feature 1..2451: note = Description of Artificial Sequence: Synthetic coding sequence
  source 1..2451: mol_type = other DNA
atgctgtggccccggaacctgaccagctgggacgacagcagcagcgtatcatctggtatcagtgatacaatcgacaatttgtccacagacgacatcaatacatcatccagtatttcctcctatgcaaacacccccgcttcttcacgaaaaaacctggacgtccagactgacgccgaaaagcatagtcaggtcgaaaggaactctctgtggtctggagatgacgttaagaagtctgacggcgggtcagatagcggaataaagatggagcccggcagcaagtggcgacgcaatccctcagacgtatctgatgaatctgataaatctaccagcggcaagaaaaatccggtaatcagtcagacagggagctggagacgggggatgaccgctcaggtgggcatcaccatgccgaggacgaaacccagtgctcccgcaggcgctttgaagacaccggggaccggaaaaactgatgatgccaaagtttccgagaaggggcggttgagcccaaaagcgtcacaggtgaaaaggtcaccatcagatgcagggcggtcttctggcgatgagagtaagaagcccctgccttcctcaagccggaccccaacggcaaatgcgaattcctttggattcaaaaagcagagcggtagtgccgccgggctggctatgataacagcgagtggcgttactgtcacatcaaggagcgccaccctcgggaagatccccaagtcatccgccctagttagccgatccgctggacgaaagtcctccatggacggagcacagaatcaggacgatgggtacctcgcgctgtcctcaagaacgaatcttcagtatagatctcttccccggccctccaaaagcaatagtcgtaacggagcgggaaaccggagcagtacatccagcattgattctaacatctctagcaaatccgccgggctcccagtccctaagctaagagaacccagcaaaaccgccctcggctcctcacttccgggacttgtcaaccaaactgacaaggagaaagggatatctagcgataacgagagtgtggcttcttgcaacagcgtgaaggtaaaccccgcagcccagccagtaagcagccctgcgcagactagcctgcaacccggggcaaaatatcctgatgtagcatctccaacacttaggcgactgtttggcggcaaaccaactaaacaggttccgattgctacagccgagaatatgaaaaattcagtcgttatttccaacccacatgcgaccatgactcaacaggggaacctcgactcaccgtcggggagcggtgtactgtcgagtggatcctcctcgccactctacagcaagaatgtggaccttaatcagtctcccctggcgtctagcccctcctcagctcactccgctccatctaattctctgacctgggggaccaacgcttcttcctccagtgctgtgagtaaagatggcctgggttttcagagcgtgtcttccctccacacctcctgtgaatcaatcgacataagcctcagtagcgggggagtgccctcccacaattcgtcaacgggtctgattgcatcctctaaggacgatagtctcaccccttttgtgcgtactaattccgttaagacgaccttatcggagcgttatactccaacatctcagctccgcacccaggaagacgccaaggagtggctacgcagccattccgcaggaggactgcaggacaccgctgccaactctcccttcagttcaggcagctctgttacttcaccatctggcacgcggttcaatttttctcagctcgctagtcccacgacagttactcaaatgtccctttctaaccctacaatgcttcgcactcactctctctccaacgctgatggtcagtatgatccgtacaccgacagccggtttcgaaacagctccatgtctctagacgagaagtccaggacaatgagccggtctggatccttcagagacgggtttgaggaagtgcatggctcttccctgtcgctggtgagcagcacatcgagcgtgtactcaaccccagaggaaaaatgccagagtgaaataagaaaactccgaagagagctggacgctagtcaagagaaggtatctgccctgactacgcaactgactgccaacgcccacttagtagccgcctttgagcagagcctgggtaacatgacgatccgattgcaaagtctcaccatgacggcagaacaaaaggattccgaactaaatgaactgcggaagaccatcgagctcttgaagaagcagaatgcagcagcacaggcggccattaacggggtgatcaacacacctgagctcaactgtaaaggcaacggtaccgcacagtcagctgaccttaggattcgcaggcagcacagctccgactcagtcagcagcatcaacagcgcgacctctcattctagtgtgggcagtaacattgagtccgacagctag

SEQ ID NO: 197080 - DNA, 7260 bp, synthetic construct
  misc_feature 1..7260: note = Description of Artificial Sequence: Synthetic coding sequence
  source 1..7260: mol_type = other DNA
atggccatcgacctgtactgcggcctggcctgcctgtggggcatccacgagcctcggcaaatatataccgactgggctaaccactatctcgcgaaaagtggtcataagaggctcatcagggacctgcagcaagatgtgacagatggggtgttactggcacagatcatccaagtggtcgctaacgaaaaaattgaggacataaatggctgccctaagaaccgcagccaaatgattgaaaacatagacgcgtgtctgaactttcttgccgccaagggaatcaatatccaaggccttagtgcggaggagattcgaaatgggaatctgaaagctatcttaggtttgtttttctctctgtccaggtacaagcaacagcagcagcagcctcagaagcaacacctgagttcccctctgcctcccgctgttagccaggttgccggcgctcccagccagtgccaggcaggcactccacagcagcaggtgccggtgacccctcaggctccttgccaaccccatcaaccagccccacaccagcagagcaaagcgcaagccgagatgcaatctagcgcttcctcaaaggattcttcccaatcaaagataattaggtttaccctcggccagaagaagatcagccggctgcccgggcctaccgcaagggtgagcgcggcagggtctgaagctaagacgcgggggggttctacaacagcaaacaacagaaggagccaatccttcaataattatgacaaatccaagccagtgacctccccacctcctcctccctcttcccatgagaaggaaccgcttgcaagttccgcatcctcccatcctgggatgtctgacaatgcgccggcgagcctggaatccggctcctcttccacccccactaattgcagcacatcctcagccataccccagcccggtgcagcaactaagccctggagaagcaaaagcttgagcgtgaagcatagtgctacggtgtcgatgctcagcgtcaagccccccgggcccgaagccccgaggccaacccctgaggccatgaagcctgcacccaataatcagaagtcaatgttggaaaagctgaagctatttaactctaaaggtggaagtaaagctggagaaggacccgggtcaagagatacatcttgcgagaggttggagactctgccatctttcgaagaatctgaagaactggaagctgcatcaaggatgctgacaacggtaggccctgctagctcgagcccaaaaattgcgctgaaaggaatagcccaaagaacctttagccgggcgctgactaacaaaaagagctctctgaagggaaacgagaaagagaaggaaaaacagcagagagaaaaggacaaagagaagtcaaaggacctcgccaaaagagccagcgtaacagaaagattggatctcaaggaagaaccgaaggaggatccgtcgggcgcagctgtcccagagatgcctaagaaatcatccaagatagcttctttcattcctaagggcggcaagcttaatagcgcgaagaaggagccgatggcaccatctcattctggtatccctaaacccggcatgaaaagcatgcctggaaaatccccctccgcacctgcacccagtaaagaaggggaacgttctcgcagcggcaaactctcctctgggctgcctcaacagaaacctcaactggacggacgacacagctctagctccagcagtcttgctagcagcgagggcaagggtcctggaggcacaactctcaatcactccatctcttcccagaccgtttctggctctgttggaaccactcagacaacagggagtaacacagtttcagtacagctccctcagccgcaacagcagtataatcacccgaataccgctactgtggctcctttcctctaccgatcgcagactgacacagagggaaacgtgactgccgagtcttcttctacaggcgtaagcgtggaaccgagccattttacaaagactggccagcccgcactcgaggagctgactggtgaagacccagaggcgaggcgcctgaggaccgtaaagaacatcgccgacctgagacagaacctggaagagaccatgtcaagcttgagaggcacgcaggttacgcatagcacactagaaacgacgtttgatactaatgttaccactgaaatgtcaggccggagtattctgtcacttactggccggccaactcctctgtcctggcgcctgggacagtccagccctcggttgcaagctggagatgccccaagtatgggcaacggttatcctcctcgggcaaacgccagccgcttcatcaacacggagtcaggtcgctacgtctactccgcccctctgcggcgccagctggcgtctcgtggctcctcagtgtgtcacgtagacgtctctgataaagcaggtgatgagatggatttagagggaatctccatggacgctccagggtacatgagcgatggtgacgtactgtcaaagaatattcggacagatgacataacatctgggtacatgactgacggcggcctgggcctctacactcggcgtctcaaccgccttccggacggcatggctgttgttcgtgagacactgcagagaaacacttccctgggattgggcgacgccgattcctgggacgatagttcctccgtgagcagcggtatcagcgatacaattgataatttgtccaccgacgatatcaatacatcgtcgagtatttcctcatacgccaacacgcctgcatccagcaggaaaaacttagatgtgcaaactgatgcagagaaacactctcaggtcgaacggaacagtttgtggtctggcgatgacgtgaaaaaatctgacggcgggtccgattcaggaattaaaatggaacctgggtcaaaatggcggcgaaatcctagcgacgttagtgacgaatccgacaagtctacgagtggcaagaaaaacccggttataagccagaccggttcctggagaagaggcatgaccgcccaggtgggaatcacaatgccaagaaccaagccaagcgcgcccgcaggcgctctgaagaccccagggacaggcaagacagacgatgccaaggtgtccgagaagggtaggctaagccctaaggcttcccaggtgaagagatcgcccagtgacgcgggacggtcaagtggagacgaatccaagaaaccactgccttcatcgagccggacgcctacggcaaatgcaaattccttcggattcaagaaacagtctggtagcgctgcgggattagcaatgatcactgccagcggggttactgtcactagcagaagtgctaccctcggcaagatacctaagtcatccgccttagtgagcaggtccgccggccggaagtctagtatggacggagcccaaaaccaggacgacggctacctggccctgtcttcccggaccaatctccaatatcggtccctgcctagacccagtaagtctaacagcaggaatggcgcaggcaatagatccagtacaagcagcatcgattccaatatctccagtaagtctgctggccttcccgtgcccaagttgagagagccatccaaaacggcacttggcagtagcctccccggcctcgtcaaccagacggacaaagagaagggaatctccagcgacaatgagtccgtggcttcatgcaattcggtgaaggtgaacccagcagcccaaccagtttccagccctgcccagacgtctctccaaccaggagctaaatatccagacgtcgcaagccccactctcagaaggctgttcggggggaaacccaccaagcaggtgccgatagcaacagccgagaacatgaagaatagcgtagtgatcagcaatcctcacgcaactatgacacaacagggaaatcttgacagcccctccggtagcggggtgttgtcctctggaagctcttcccccttatactccaagaacgtggaccttaaccagtccccactcgcttcaagccctagctccgctcattcagccccaagtaactctttgacatgggggacaaatgcttcgagctcctccgctgttagtaaggacggtcttggcttccaatcagtgtcttccctgcataccagttgtgagagtatcgatatttctcttagctcgggaggcgtacccagccataactcgagtacaggcctgatcgctagtagcaaggatgacagcctgacaccatttgtccgcaccaactccgtgaagacaaccctttcagaatcacccttgagctctccagccgctagccccaaattttgcagaagcaccctgccaagaaaacaggacagcgaccctcacctcgatagaaataccctgccgaagaaaggcctgcggtacacgcctacatcccagttgagaacccaagaagacgcgaaagaatggttaagatctcatagcgccggaggccttcaggatactgcagctaactccccattcagcagcggcagttccgtcacgagcccatccggaaccagatttaacttcagccaactcgccagcccaacgaccgtaactcagatgagtctttcaaaccctacaatgctacggacccattcgttgtccaacgctgatggacaatacgacccttacactgactctagatttaggaattcatccatgtcattggatgagaagtcgaggaccatgagccgatctgggtcattcagagacggtttcgaggaagagtcttgggaaaagagcagcgtggataattttgtctcccggcttcactcatccttgcatttctccctcccacttttccatcacgccaggtatgaactggttcacggctccagtctgagtcttgtctccagtacctccagcgtgtactctactcctgaggaaaaatgtcagagcgaaatccggaagctgcgaagggagttggacgcctcccaggaaaaggtgtccgccctcactacacaattaaccgctaacgcacacctcgtggctgcctttgaacaatccctcggtaatatgactatcagacttcagtctttgacaatgactgccgagcagaaagattcagaactaaatgagctgcgcaaaacgatcgagctcttgaaaaaacaaaatgccgctgcacaggctgctattaacggggtgatcaatacacccgagttgaactgtaaaggcaatggcaccgctcagtcagccgatctccgtataaggcgacaacacagttctgattccgtttccagtatcaattccgcgacctcccatagttcagtcggcagtaatattgagtctgactcaaaaaaaaaaaagcgcaaaaactgggtgaacgagttacgctctagttttaaacaagcattcggaaagaaaaaatctccgaagtcagcctcgtctcattcagacatagaagagatgaccgattctagtctgcctagctcaccaaaattgccccacaacgggtccacaggcagtactcctcttctccgaaattcacactccaatagccttataagtgagtgtatggacagcgaggctgagactgtcatgcagctgagaaatgagctgcgtgataaagaaatgaagctgacagacatcaggcttgaagccctgtccagcgcccaccagcttgaccaactccgagaagctatgaatagaatgcagtctgagatagagaaacttaaagccgaaaacgacagactgaagagcgaaagtcaaggcagcggttgttcccgggcaccaagccaagtctccatctccgcatcccctcgccagtcaatgggactgtcccaacatagtctcaatctcacagaatctacatctttggatatgctcctggatgacacaggggagtgttctgcacggaaagagggcggcagacatgttaagatcgtggtgagctttcaggaagagatgaaatggaaagaggactctaggcctcacttatttctcattggttgcatcggcgtcagtgggaaaactaagtgggacgtgctggatggcgtggtgcggcgcctctttaaagaatatatcattcatgtcgacccagtctcacagctggggctcaatagcgatagtgtcctgggctattcaattggcgaaattaagcgaagcaacacctcagagacacctgagctcctcccctgcggctacctggtgggcgaaaatactacaatcagcgtgacagtcaagggcctggccgaaaattctctggactcacttgtgttcgagtccctcatcccgaaacccatcttgcagagatacgtatccttgctgatagaacatcgccgcatcatcctctctggaccctctggcactggtaagacctatcttgccaatcgcctgagcgaatatatcgtcctccgcgaggggcgggagctgacagacggcgtgatcgccacctttaacgtcgatcacaagagttccaaagagttaaggcagtacttgtcgaatctggcagaccagtgcaactccgaaaacaatgcagtcgatatgcccttagtgattattctcgacaatcttcaccacgtttcctcactgggtgaaatcttcaacgggctcctaaattgtaaataccataagtgtccctacattattggcaccatgaaccaagccacctcctcgactcccaacctgcagctccatcataactttcgatgggtgctgtgcgccaaccatacagaacccgtgaaaggctttctcggccggttcctgaggcgaaagcttatggagaccgaaatatccggcagagtgcgtaacatggagcttgttaagatcatcgattggattcctaaggtgtggcaccacctcaaccggttccttgaagcccacagtagttcagatgtaaccatcggccctcggctgtttctgtcatgccctatagacgtcgatggcagccgcgtctggtttaccgacctgtggaactactctattattccttacttactggaagctgtgcgcgagggattacagttgtacgggcgtagggccccatgggaggacccggcaaagtgggttatggatacatacccctgggcggcctcacctcagcagcacgagtggcctcccctgcttcaattgcggcctgaggatgttgggtttgacggctactcaatgccaagagaggggagcacaagcaaacagatgcccccctctgacgcggagggcgatccgctgatgaacatgctaatgcgtttacaagaagccgctaattactcaagcccccagtcctatgactctgattcaaactcaaactctcatcatgatgacatcctggattcttccttagagtcaaccctgtag

SEQ ID NO: 197081 - DNA, 7098 bp, synthetic construct
  misc_feature 1..7098: note = Description of Artificial Sequence: Synthetic coding sequence
  source 1..7098: mol_type = other DNA
atggagagcgtgagcgagagcagccagcagcagaagcggaagcccgtgatacatggcttagaagaccaaaagcggatctacactgattgggctaaccactatctggcgaaatccggccataagcgactgattcgcgatctgcaacaagatgtgaccgacggagttctgttagctcagataatccaagtcgttgcaaacgagaaaattgaagacatcaacggctgccctaagaatagatctcagatgatcgagaatatcgatgcttgcctgaactttctggctgcaaaaggcatcaacatccagggtctatccgcagaggagattcgtaacggaaacctgaaggcaatactggggctgtttttttctctatccagatacaagcaacagcagcagcagcctcaaaagcagcacctgagttcgcctctaccccccgcagtgtctcaggttgctggggccccttcccagtgtcaggccgggaccccacagcagcaggttcccgtaacacctcaggccccttgccaacctcaccagcctgcgcctcatcaacagagcaaggcacaggctgagatgcagagccggctgccaggacccaccgcccgggtatccgccgctggaagcgaggctaagacacggggcggaagcaccactgcgaacaatcgaaggtctcaatcgtttaataattatgacaagtccaaacccgtgaccagccccccacccccaccatctagccatgagaaagagccacttgcgagctcagcgagctcccaccccggtatgtcagataatgcccctgcatcattggagtcaggcagttcaagcactcctaccaattgcagcacatctagcgccataccccagcccggggccgcaacaaagccatggaggagcaagtctctgagtgttaagcactccgctaccgtcagtatgctgagcgtcaagcccccggggcctgaggctccccggccgactcctgaagcaatgaagcctgcccccaataaccagaagtcaatgctggagaagttgaagctgttcaactccaagggcgggtcgaaggctggcgagggccctgggtcccgcgataccagctgcgagaggctggagactctccccagttttgaggaatcagaggagctggaagccgcttcacggatgctgactacagtgggccccgcctctagctcaccaaagattgcactgaagggcattgcacagagaaccttctctcgagcccttaccaacaagaagagctcccttaaaggtaatgaaaaagagaaagaaaaacagcagcgcgaaaaagacaaggaaaaatccaaggacctcgcgaagagggcgtctgtgacggagagactggacttgaaggaggagcccaaagaggacccatccggggccgccgtccccgagatgcccaaaaaatcctcaaagatcgcgtccttcattcccaaagggggaaagctcaatagcgccaaaaaggaacctatggccccgagccacagtgggattcccaaacccggaatgaagtccatgcctggaaagtcaccttcagctccagcccccagcaaggaaggtgagaggtctcggtcggggaagctttcctccgggctgcctcaacaaaaaccccaattggatgggcgacactcatccagcagctcaagtctggcgtcttcagagggaaaagggcctgggggtacaaccttgaatcacagtattagttcacagactgtgtcaggaagtgtgggaacaactcagacaacagggtctaataccgtgagcgttcagctcccacaaccccagcaacagtacaaccacccgaacacagctacagtggctcctttcctctaccggtcacagactgacaccgagggaaacgtgaccgccgaaagctcctccactggggtgagcgtggagccaagccatttcacgaaaacgggacaaccagcgctggaggagcttacaggcgaggatccagaggcccgacggctgaggaccgtcaaaaatatcgccgatcttagacagaaccttgaagaaaccatgtcttccctccggggaacacaagtaacacacagcactctggagactacattcgatacgaatgttacaaccgagatgtcaggccgcagcattctgtctctgactgggcggcctacacctctctcatggcggcttggtcaatcgagccccaggctgcaggcgggcgatgctccctcgatgggaaatggctatcccccacgggcaaacgcgagccgttttatcaacaccgagagcggacgctacgtttattccgcacctctgcggcggcaattggcttctcgtggttcaagcgtctgccacgtcgacgtctctgataaggcgggggatgagatggacctcgagggtatttctatggatgccccaggttatatgtctgacggagacgttcttagcaaaaatattagaactgacgatataacttctggatacatgacagatgggggcctgggactctatacaaggcggttaaataggctgcctgatgggatggctgtggtcagggaaactctccagcggaataccagcctcggactgggagacgctgatagctgggatgatagcagttccgtatcctcaggtattagcgatactatcgacaacttatcaaccgacgacatcaacactagctcgagcatctcaagctatgccaatacacctgcttcttctcggaagaacctagatgtgcagactgatgccgagaaacattcccaggttgaaaggaacagcctttggagtggagacgatgttaagaaatccgacgggggcagtgattccgggataaaaatggaaccaggatcgaagtggcgcaggaaccctagcgatgtgagcgacgaaagtgataaaagcaccagtggaaaaaagaacccagtgatctctcagaccggctcgtggcggagaggcatgaccgctcaagttggtattacgatgccacggaccaagcctagcgcaccagcaggagcattgaagacccctggaactggaaagacagatgacgctaaggtgtcagaaaaaggccgtctctcaccaaaggcatctcaagttaagcgctctccaagcgacgctggacgctctagtggcgatgaatcaaaaaagcctctcccttcgagcagccggacgccaaccgccaatgctaacagcttcggattcaagaagcagtcaggcagcgccgccggcctggccatgatcactgcctctggagtcactgtgaccagccgctctgctactctcggaaagatccccaaaagcagcgcattagtgtcccgcagcgccggccgcaaatcctctatggacggcgcgcagaaccaggacgatggatacctggccctcagttccaggactaacctccaatatagatcattacccaggccttccaagtcaaacagccggaacggcgctggtaatcggtcctctacctcgtctatcgactcaaacataagctcaaagagcgcaggattgcccgtcccaaaactgagggagccgagcaagactgccctggggtcatcgctgcctggtttggtgaaccagacggacaaagagaaaggtatctccagtgacaatgagagtgttgcaagctgtaactcagtaaaagtgaatccagctgctcagccagtcagctccccggcgcagacttccctccagcctggggcgaaatacccggatgtggcatctccaacattacgtaggttgtttggaggtaaacctaccaagcaagtccccattgccacagccgaaaacatgaaaaattcagtggttatctcgaatccacacgcaaccatgacccagcaaggaaaccttgactcacctagcggctccggggtcctgagctctggcagtagctcacctctgtactccaagaacgtggacctgaatcaaagtcccctagccagcagcccctctagcgcacatagtgcgccaagtaattccctaacctggggcaccaatgcctctagctcaagcgctgtttctaaggatggactcggttttcaaagtgtcagcagtcttcacacgagttgcgaaagcattgacatttcactaagcagcggcggtgtgccaagtcacaacagttcaacaggtctcatagccagttcaaaggatgattctctgacacccttcgtgcgtactaactctgtaaagacaacactgagcgagtcaccactgtcttcacccgccgcctctccaaaattctgtcgcagcacactacctcggaaacaggattcggaccctcacttagaccgcaacacccttccaaagaaaggcttacggtatactcctacctcacagttgcgtacccaggaggacgctaaagaatggctgcgcagccactctgccggcggcttgcaggatactgctgcaaattcccccttttcttcaggatcgtccgtgacttctccttccggcactcgctttaatttttctcagctggcctcacctactactgtcacccagatgtccctatctaacccaactatgttgcgcacacactctctcagcaacgctgatggacaatacgacccatacacagactcgcgcttccgcaattcgagcatgagcctcgatgaaaaatcacgcaccatgtcccggagtggtagtttcagagatggttttgaggaagtgcatggttcctctctaagcttggtgtctagcacatcgtcagtgtattcaactcctgaagaaaaatgtcagagtgagattaggaagttaagaagagagctggatgcctctcaggaaaaggtcagtgccctaacaacacagctgacagctaacgcccatctcgtggctgcgtttgagcaatctctggggaatatgacaattaggttacagtctctcaccatgactgccgagcaaaaggactccgagctcaacgaactcaggaagactatcgagttgctcaagaagcagaacgctgccgcccaggccgccatcaatggggtgattaatacaccagagctgaactgcaagggcaatggcacagcacagtctgccgacctaagaatacgacgccaacacagcagcgattccgtctcctccattaacagcgccacatcccactcctctgttgggtcaaacatcgaaagtgattctaaaaaaaagaagcgcaagaactggctgcgaagcagcttcaagcaggcttttgggaagaaaaaatcccctaaatcagcttctagccactccgatatagaagagatgactgattcatcattgccaagcagtccaaaactcccacataacggctcaacaggcagcactcccctgctacgcaactcccactctaactcacttatctctgaatgcatggacagtgaagcggagacagttatgcagttacggaatgagctacgggacaaggagatgaagttgacagatatccgattggaggctctatctagcgctcaccagttggaccagctgcgtgaagccatgaataggatgcagagtgaaattgagaaactgaaagcggaaaatgatcgcctcaagagcgagagtcaaggttctggttgttccagagccccaagtcaggtatcaatctccgctagccctcgccagtcaatgggcttatcacaacactcactcaatctcactgagtcgacaagcttggatatgctgcttgatgacactggcgagtgttcagcccggaaagagggcggtcgccacgtgaagatcgtggtaagcttccaggaagagatgaagtggaaagaagacagccggcctcacctttttcttatcggctgcatcggggtcagtgggaagacaaaatgggatgttctagatggcgtggtccgccggctgttcaaggagtatattattcatgtggatcccgtgtcacagctgggactgaacagcgatagcgtgcttggctactctataggtgagataaaaagatccaatacgtccgaaacccctgaacttctgccctgcggctacttggtcggagaaaacacaacgattagcgtcacagtgaaaggcttagctgaaaactccctggattccctcgtcttcgagtcgttgatacctaagcccattctccagagatacgtgagccttctgatagagcaccgtagaatcattttatcgggacctagtggaacaggcaaaacttacctcgctaatcgactgagcgaatacatcgtgctgcgggagggacgcgagctgactgacggggttatagcaactttcaacgtagatcataagagctccaaagagctgcgccagtatctatccaacctggctgatcagtgcaactccgagaacaacgcagtcgacatgcccctggtaattatcctggataatctgcatcacgtgtccagtctgggcgagatcttcaacgggctgctgaactgcaaataccacaagtgcccatacatcattggcacaatgaaccaggccacatcaagcaccccaaacctccagctacatcacaactttagatgggttctttgtgcaaatcacactgagccagtgaaaggattcctcggaaggttcctgaggaggaaattgatggaaaccgagatcagtgggcgcgtgaggaacatggaacttgtcaaaatcattgattggattcctaaagtgtggcatcacctcaaccgcttcctcgaagctcactcatcttcggatgtcacaatcggcccacggcttttcctgtcatgccctattgacgtagacggtagccgcgtgtggtttactgatctgtggaattactccatcatcccatacctgctcgaagccgtgcgtgaggggctccagctgtacggccgacgcgcgccatgggaggacccagctaagtgggtgatggatacctatccttgggcagcatcccctcaacagcatgaatggccccctcttctgcaattgcggccagaggacgtaggctttgatggttactccatgccacgcgaaggcagtaccagtaagcaaatgccaccaagcgacgcagaaggggaccctctgatgaatatgcttatgcgtctgcaggaagccgccaactattcatctccccagtcatacgactctgactcaaactccaactcccaccatgatgacatcttggactcaagcctagagagtacattgtag

SEQ ID NO: 197082 - DNA, 1089 bp, synthetic construct
  misc_feature 1..1089: note = Description of Artificial Sequence: Synthetic coding sequence
  source 1..1089: mol_type = other DNA
atgttcagcagcgtggcccacctggcccgggccaaccccttcaacaccccccatctccaattagtgcacgatgggctcggtgatcttagatcaagcagcccgggccctactggccagcctcgccggccgaggaatttagccgccgccgctgtggaggaacaatacagctgcgactatgggagcggacgcttttttatcctctgcggactcggaggcatcatctcctgtggcactacacatactgccttagtgccactcgacctcgttaaatgccgcatgcaggtcgacccccagaaatacaaaggaatcttcaatggctttagtgttactctgaaggaggatggtgtgcgcggactggctaagggttgggccccaactttccttgggtactccatgcaaggcctgtgtaagtttggtttctatgaggtatttaaggtgctgtactccaacatgctgggggaggaaaacacatacttgtggcgtacaagcctatacctggctgcctccgcaagtgccgaattttttgccgacattgccttagccccgatggaggctgctaaggttagaattcagacccagcccggctacgctaataccctgagagacgctgcacccaagatgtataaggaagaaggcctgaaggccttttataagggcgtggctcctctctggatgagacagattccctacactatgatgaagtttgcctgcttcgaaagaacagttgaagcgctttacaaattcgtggtccccaagccccgttccgaatgctctaagcccgagcagctcgttgttactttcgtcgcaggctatatagccggcgttttttgcgctattgtgagccacccagcagactccgtggtgtccgtgttaaacaaggagaaagggtcaagcgcctctttggtgctcaagcggctgggcttcaagggggtctggaaaggcctgttcgctagaataataatgatcggtacactaaccgccctccagtggttcatctacgactcagtgaaggtatacttccgactgcccaggccgccaccccccgaaatgcctgaatccctcaagaagaagcttgggttaacacagtag

SEQ ID NO: 197083 - DNA, 6561 bp, synthetic construct
  misc_feature 1..6561: note = Description of Artificial Sequence: Synthetic coding sequence
  source 1..6561: mol_type = other DNA
atgcccgtgctgggcgtggccagcaagctgcggcagcccgccgtggggagcaaaccagtgcataccgcccttccaattccaaatttggggaccactggctctcagcattgctctagcagacctttagagctgaccgagaccgaatcgtccatgctttcctgccagctagctctgaagagcacatgtgagttcggggagaaaaaaccacttcaaggcaaagctaaggagaaagaggacagtaagatctacacagactgggccaaccattacctggctaagtccggccacaaaagactgatcaaagacttgcagcaggacatcgccgatggcgtgcttctagccgagataatccagatcatcgcgaacgagaaggtggaagatattaacggatgtccaagaagccagtcccagatgattgaaaacgtggatgtgtgcctcagctttctcgccgctagaggggtcaacgtgcaaggcttgagcgctgaagagatccggaacggcaacctgaaagctatcctggggctgttcttctcgctgtctagatataagcagcagcagcaccaccagcaacagtattaccagtctctggtcgagcttcaacagagggtaacacatgcaagccccccttccgaggcgagccaggctaagactcagcaggacatgcagagctctttggctgcgcgctacgctacacagagtaatcattctggcattgccaccagtcagaagaagccgactcgactccccggcccatcaagagtgccagccgctggcagctcaagtaaagtccaaggggcttctaatctgaatagacggagccagtcttttaactctatcgataaaaacaagccaccaaattacgcaaatggcaatgaaaaagacagcagcaaaggtccccaatcatcatctggggtgaacggtaacgtacagccgccttcaacagccggtcagcctcctgcttcagctatacccagcccaagtgcttcaaaaccttggcggtccaagtctatgaacgtgaaacacagcgctactagtaccatgttgactgtgaaacaatctagtacggccacaagccctacccctagtagcgatagactgaagcctccggtttctgaaggcgtaaaaaccgcccccagtgggcagaaaagcatgttagagaaattcaaactagtgaacgcccggaccgctctacggcctcctcagcctcctagtagtgggccttcagatggaggaaaagatgatgatgcgttttcagaatctggggaaatggagggcttcaacagtggtcttaacagtggagggagtaccaactcatcccctaaggtgtctccaaagctggcaccaccaaaggctggcagtaaaaatctcagcaataagaaatcccttctccaaccaaaagagaaagaagaaaaaaatcgtgataagaacaaggtgtgtaccgaaaaacctgtaaaagaggaaaaggatcaggtcacggagatggcacccaaaaagacctccaagattgcctctttaatcccaaaaggctcgaagacaacggcagctaaaaaagaaagcttgatccctagtagttccggcatccccaaacctggttcaaaagttcccacagttaagcagacaattagcccagggtctaccgcaagcaaggagtcagagaaatttagaaccaccaaaggttcccccagccagagtctctcaaaaccgatcactatggagaaggctagcgcctcctcctgtcctgcccccctggagggtcgtgaggctggccaagcttctccgagcgggtcatgtaccatgaccgttgctcagagttctgggcagagcaccggcaatggggctgtccagctcccgcagcagcagcagcacagccatccaaataccgcaaccgtcgccccattcatttacagggcgcacagcgagaatgaggggacagctctcccctccgctgactcatgcacttctccgacgaagatggatctgtcctacagcaaaactgcgaaacagtgtttggaagaaatttcaggcgaagatccagagacccgccgtatgaggacagtgaagaatatcgccgatttgagacagaatctcgaggaaaccatgagttctctccgcggcacccaaatatcacatagcacgctggagactaccttcgactcaacagtgacaaccgaggtcaatggccggacgattccaaacctaacttcccggccaacgcccatgacctggagacttggacaggcatgtccaagactgcaggccggcgatgcaccaagtctgggtgccggctacccccggtcgggcacttctcggtttatccacactgatccttcccgcttcatgtataccacgcctctgcgaagggcagccgtcagccgccttggaaacatgtctcagatcgacatgagcgaaaaagcctcatccgatctcgacatgtccagtgaggtggacgtggggggttacatgagtgacggagacatattgggaaaaagtttgcggactgatgatatcaattccggatatatgaccgatgggggtctgaatctctacactcggtcactgaaccggataccagataccgctacttcccgtgacataatccaaagaggggtgcacgacgttaccgtggacgcggatagttgggacgactccagctcggtttccagcggcctgagcgataccctcgacaatattagtaccgatgatctgaacactacatcatcagtttcaagttacagtaacatcaccgtccctagccgcaaaaacacacagctgaggacggatagtgagaaaagatccactacagacgaaacttgggactcccctgaggagctgaagaagccggaggaggattttgattcccacggtgatgcaggggggaaatggaaaacggtcagctccggcttgccagaagacccagaaaaggcaggacaaaaggcatccctgtcagtgtcgcagaccggctcttggcgccgagggatgtctgcgcaaggcggagctccgtcccgacagaaggccggcacctccgccctgaaaaccccagggaaaactgacgatgcaaaagcctcagagaagggtaaagcaccattaaagggatccagcttgcaacgaagtccgtctgatgcggggaaaagtagtggggatgaagggaagaagccaccctccgggattggcagaagcaccgccacctcttcattcggttttaagaaacctagtggtgtgggctcatctgcgatgatcacatcttcgggtgctaccattacctctggctctgctaccctggggaagattccgaagtcagctgcgatcgggggaaagtcgaacgcgggacgaaagacaagcctcgacggaagccagaaccaggacgatgtggttctgcacgtgtctagtaaaacaaccttgcagtacagatctttgccgcggccaagcaagtcatctactagtggcatccctggtagaggcggccatcggagctcaactagtagcatcgactccaatgtgtcatccaaaagtgctggagctactacatctaaactgagagagccaactaagattggtagtgggcgttcctcccctgtaacagtgaatcagacggataaggaaaaggagaaggtggctgtatctgactccgagtccgtgagtttgtccggatcaccaaaatcatctcccacttcagctagcgcctgtggggcccaagggctccgacagcctgggagcaagtatcccgatattgcatcccctacgtttcgaagatacacacctagctcacggcaggccaaccaggaggaagggaaggaatggcttaggagccactctaccggcggacttcaggacaccgggaaccagtctcctttggtttccccctccgcgatgagttccagtgctgccggcaaataccatttttctaatctggtcagccccaccaacctgagccaattcaatctccctggcccaagtatgatgagatccaacagcataccagcccaggacagctcatttgatctctatgatgacagccagctgtgtggcagcgctacttcccttgaggagagaccacgagccatttcacacagcggatcctttagagactcaatggaggaggtgcacggttcttctctgtcactggtgagttctacatcttctctttattccacggccgaagccggtggctctttggaacagatccacaagctgcggagggaactggttgcttcccaggagaaagtggccacattgacctcccagctttctgccaatgcccatctcgtcgcggcttttgagaagtccctgggaaatatgactggccggctccagagcctcactatgaccgcagagcagaaggagtctgaacttatcgagttaagggagactattgagatgctgaaggctcagaattcagctgcccaagctgctatccagggggccctgaacgggccagaccatccaccaaaagatctgcgcataagacgccaacactctagtgaatctgtgagctcaattaactcagcgaccagtcacagctctataggctctgggaacgacgcagacagcaagaagaagaaaaagaaaaactgggttaactctcgcgggtctgagctgcgaagcagtttcaagcaggcattcgggaagaaaaaatctacaaagcctcccagtagccactctgacatcgaggagctgaccgactccagcctgcccgcgagtcctaaactgccccataacgcaggggattgtggctctgccagcatgaaaccaagtcaatcagctagtgctatttgcgagtgcaccgaagcagaggctgagattattctgcagctgaagagcgaactgcgggagaaggagctgaaactaactgatatacgcctcgaagccctctcaagcgcacaccacctggaccagattagggaagcgatgaacaggatgcagaacgaaattgagatcctaaaagctgagaacgacagacttaaggccgagacaggtaacacagcaaaacccacaaggccaccatccgagagctcctcttctacctccagctctagctcccgacagtctctgggcttgagcctgaacaatctaaacatcactgaggctgtgtccagcgacatcctcttagacgacgccggcgatgccacagggcataaagacgggaggagtgtcaaaattatcgtgtcaatctcaaaaggatatggccgcgccaaggatcagaaatcccaagcctacctcatcgggagtatcggagtatctggcaaaacaaagtgggacgtgctggatggtgtgatccgccgactgttcaaagaatatgtcttccggatcgatacatcaacctcactgggactgagcagcgactgcattgcgagttactgcattggagatctcatcaggtcacacaatttggaggtgcccgagctgctcccgtgcggatatctggtcggcgacaataacatcattacagtgaatcttaaaggagttgaagagaattcactggattctttcgttttcgacacactcatccctaaaccaatcactcagcggtacttcaatctcttgatggaacatcatcgaatcattctgtccgggccaagcgggactggcaagacctatctggccaataagctggctgaatacgttatcaccaaatcaggcagaaaaaaaaccgaggacgcaatagccacctttaacgtagatcacaagagttccaaagaactgcagcagtacctggccaacctggctgagcaatgtagcgccgacaataacggggtggaattgccagtggtgatcatactagataatctgcatcatgtgggctccctttctgatatatttaatggtttcctgaattgcaaatataataagtgcccatacatcatcgggacaatgaaccaaggcgtcagttcttcccccaacctggaactccaccataactttcggtgggtgctatgcgccaaccatactgagcctgtgaaaggctttctggggagatatcttcggaggaaactgatcgaaatagaaatagagagaaatatacgtaacaatgatctggtgaaaattatcgattggatccctaaaacttggcatcaccttaattcctttttggaaactcattcctcttcagatgtcacaatcggacccagactgtttctgccatgcccaatggacgtcgagggctcccgtgtctggttcatggacctctggaattattcgcttgtcccctatatcttggaggcggttagggaagggcttcagatgtacgggaaacgcaccccatgggaggatccgtccaaatgggtgctggatacgtacccctggtcttccgccacactgcctcaagaatctccggcactccttcaactgcgcccagaggatgtgggatacgagtcttgcacaagcaccaaggaagctaccacatccaaacatattccccagaccgacactgaaggggatccactcatgaacatgctgatgaagttacaggaggcagccaattacagcagtacccagtcatgcgattcagaaagtacttcacatcatgaggacatcctggattccagtctagaaagcactctgtag

SEQ ID NO: 197084 - DNA, 2376 bp, synthetic construct
  misc_feature 1..2376: note = Description of Artificial Sequence: Synthetic coding sequence
  source 1..2376: mol_type = other DNA
atgaccagcctgcacaccagcagcgagagcatcgacctgcccctgagtcatcatggttccctttccgggctcacaacaggcactcatgaggtgcaatctcttttaatgagaacaggcagtgtcaggtccaccctctcggaacgctacactccatcttcccggcaggctaatcaggaggagggtaaggagtggctgcggagccattccaccggaggactgcaggacacagggaaccaatccccactggtgtctccaagtgctatgtcatcttcagcggccggaaaataccatttttctaatcttgttagccccacaaacctaagccaattcaatctacccgggccatcaatgatgagaagcaattccatacccgcccaggactctagcttcgacctatatgatgattcccagctctgcggcagtgccacaagcctcgaggaaagacccagagctatttctcatagtggttctttcagagactcaatggaagaggtccatggctccagtctcagcctggtaagttccacttcctctctatactctaccgccatccagaaacctaatatacaacagattcataaattgcgcagagaattggtggctagccaggagaaggtagcaacactgactagtcaactgagtgctaacgcccatctcgtggccgctttcgagaaaagcttaggtaacatgacgggacgtctccagtccttgactatgactgccgaacagaaagaatccgagctaatcgaactacgagagacgattgagatgctcaaggcacagaattcggcagcacaggcagccatccagggggccctgaacgggcctgaccaccccccgaaagatctacgcattcggagacagcattcaagcgaatcggtcagtagtattaattccgctacttcacatagctccatagggtctgggaatgacgccgactctaaaaagaaaaagaagaagaactggctaaggtctagtttcaaacaggccttcgggaaaaaaaaaagcaccaagcctcctagttcccacagcgatatcgaagagctaactgattcctcactgccggccagcccaaaacttcctcacaatgcgggcgattgcggtagcgcatctatgaaacctagccagagtgcgagcgctatctgcgagtgtaccgaagcggaagccgagattatactccaactgaagtccgaactgagagaaaaagagctgaaacttaccgatattaggctcgaggcactgtccagcgctcaccatctggatcagatccgggaagccatgaataggatgcagaatgagattgaaatcctcaaggctgagaatgacagactgaaagccgaaacaggaaatacagcgaaacctacacggccaccgtccgaaagttcgagttcaacgtcatctagcagcagtagacaatctcttggccttagtttgaacaatctgaatattaccgaggctgtcagtagcgatatcctcctggacgatgctggagacgctaccggccataaagacggccgctcagtcaagattatcgtcagcatcagtaaggggtacggccgcgcaaaggatcagaagtcccaagcctacttaataggttctattggcgtgagtggcaaaaccaaatgggacgtgttggacggcgtgattaggagactgttcaaggagtacgtgttcaggattgacactagtacctctctgggcctaagcagtgattgtatcgcatcttactgcattggggatttgatcagaagccacaacttagaggtgcctgaactcttaccgtgcggatatctggtcggcgacaataatatcatcaccgttaatctcaaaggtgtcgaagaaaactctctcgattccttcgtgtttgacactctgattccgaagcccatcacacagcgctatttcaacctgctgatggaacatcatagaatcattctctcagggccaagcggcacggggaaaacataccttgccaataagctcgctgagtacgtgataaccaaaagtggacgcaaaaagaccgaagacgccattgccacattcaacgtcgaccacaagagctccaaagagcttcagcagtatctggcaaatctcgcagaacagtgctcagctgataacaatggcgtcgagctccctgtggtgattattctggacaacctgcatcatgttggttctctgagcgacatcttcaatggcttcttaaattgcaagtataataagtgcccgtacataattgggacaatgaaccagggggtgagctcctctccaaacctagagctgcaccataatttccggtgggttctgtgcgctaatcataccgaaccagtcaagggattcctcggtcggtatctacggaggaagctgattgagatctag

SEQ ID NO: 197085 - DNA, 7158 bp, synthetic construct
  misc_feature 1..7158: note = Description of Artificial Sequence: Synthetic coding sequence
  source 1..7158: mol_type = other DNA
atgcccgtgctgggcgtggccagcaagctgcggcagcccgccgtgggtagtaagcccgtgcacacagcgctgcctatccccaatctgggaacgaccggctctcagcattgctcttcacggccactggagctgactgaaactgagtctagtatgctgtcatgccaactcgccctgaaatcaacctgtgaattcggagaaaaaaagccactccagggaaaggcaaaggaaaaagaagattccaagatttacaccgactgggcaaatcactatttagccaaaagcggacacaagcggctgattaaagatctccaacaggacattgcagatggcgtgctgctggcagagattatccaaatcatcgcaaatgagaaggtagaggacattaacggctgtcctcgttctcaatctcagatgatcgaaaacgtagacgtatgtctctcctttctagctgcccggggcgttaatgtccaaggcctatcggctgaggaaatccggaatggtaacctgaaagccatactagggctgttcttcagcctatcccgatacaagcagcagcagcatcaccagcaacaatattaccaatccctcgtcgaactccagcagagggttactcacgcctctcctcccagcgaggcctctcaggcaaagacgcaacaggacatgcaatcatcgttggccgcaagatacgcaacacagagcaatcattccggtattgccacatcccaaaagaaacccactagactccccggacctagccgtgtccctgcggccggcagtagctccaaggtacaaggcgcatctaatttaaatcggcgctctcaaagcttcaatagtatcgacaagaacaagcctcccaattatgcaaatggcaatgaaaaagactcttccaaggggccacaatcaagcagtggcgtgaatggcaacgtccagcctccatcgactgcggggcagccacctgcttcagcaatccctagtcccagcgctagcaaaccctggcgttcaaagtccatgaatgttaagcactcagcaacttccacaatgctcactgtcaagcagtctagcaccgccaccagccccacgccgtcctctgatagactcaaacctcccgttagcgagggcgtgaagacagcacccagcggtcagaaatcgatgctcgaaaagtttaagctcgtcaacgcaaggacagctttgcgacctccacagcctccgtcctcaggtcctagcgatggcgggaaggatgatgacgccttcagcgaaagtggcgaaatggaaggatttaactcagggcttaattccggtggctccaccaatagctcgccaaaagtctctcccaagcttgcccctccgaaggctgggtccaaaaacctctccaataagaaaagcctgttacagcctaaggagaaagaagaaaagaatcgggacaaaaacaaggtgtgcacagagaagccagtgaaggaagaaaaagaccaagtcactgagatggcccccaaaaagaccagcaagatcgcttcactgattccaaagggaagtaaaactactgcagccaagaaagagtctctgattccctcttccagcggaatcccgaaacccgggagcaaagtgccaacggtcaagcagacaatatctccagggtccactgccagcaaggagtctgaaaaattcaggacaaccaagggctccccttcccaatccctgagcaagcccatcaccatggaaaaagccagcgccagttcctgtcctgccccgctggaaggccgcgaggccgggcaggctagcccttccggatcttgcactatgaccgtcgcgcagagcagcggccagagcactggcaacggcgccgtgcagctgccacaacagcaacagcacagccaccccaacaccgccacagtggcccccttcatttaccgggctcattccgagaatgaggggaccgccctgcctagtgcagattcctgtaccagccccaccaagatggatctctcctacagcaagacagcaaaacaatgcctcgaggagatttccggcgaggatcccgaaacaagacggatgaggacagtgaaaaatattgctgacctccgacaaaatttagaagaaacgatgtcgtccctgagaggcactcagatttctcattcaacattagagaccacattcgattctactgtgacaaccgaagttaatggtaggaccatcccaaatctgacctctaggccaactccaatgacgtggagactgggacaagcgtgccctaggctgcaggccggagatgccccgtcgctgggggccggatacccccggagtggcacctctcggttcattcatactgatcccagccggtttatgtacaccacacccctgcggcgggctgccgtgtccaggcttggcaatatgagccagatcgatatgtcggaaaaggcatcctccgatcttgatatgagttctgaagtagacgtgggtgggtacatgtcagacggcgacatcttggggaaaagtttgaggacagacgacattaattctgggtatatgacagatggcggactcaatctctatacccggtccctgaatcggattccagatactgccacttcacgggatattattcaacgcggggtacacgatgtcaccgttgacgccgatagctgggacgacagttccagcgtttcgagcgggttaagcgacactctcgataatatttctactgatgaccttaacacaacctcttcagtgagctcatatagcaacattacagtcccctcaaggaagaatacccagctgaggaccgatagtgaaaagcgctccaccacagacgagacatgggactcgcctgaggagctcaagaagcccgaagaggactttgatagtcacggcgacgcaggcgggaagtggaagacagtcagctctggtctgccggaggatcctgaaaaggccggccagaaagccagcctgtctgtctctcaaacaggctcttggcgccgcggaatgtctgctcagggaggcgcgccaagtcgccagaaagctggtacgtctgccctcaagactcctggtaaaaccgacgatgctaaggcaagtgaaaaggggaaagccccactgaaggggagctccttacaaaggagtcctagtgacgccgggaaatcatcgggggatgaggggaagaagcctccctccggcatcgggaggtcaacagccactagcagtttcgggtttaagaaacctagcggtgttgggagttccgcaatgatcacatcaagcggtgccacaattacttctggatcggccacactcgggaagatccctaaaagcgccgcaattgggggcaagagcaatgccggccgcaaaacatcgcttgacggaagccaaaaccaagacgacgtggtattgcacgtgtcaagtaagacaaccttgcagtaccgttccctccctcggccaagtaagtcaagcacgagtggaatcccaggacgaggtggtcaccgctcgtctacttcgagcattgatagcaacgtatcatccaagtcagccggagcaactacaagcaagctccgcgagcccactaagatcggcagtggaaggagttcccctgtgaccgttaaccagaccgataaggagaaggagaaagttgcagtgtccgactctgagagcgttagtctcagcggctcgcccaagtccagtccaactagcgctagcgcatgcggtgcccagggcctgcgccagccaggatcgaaatatccagacattgcaagccctactttccggcgtttgttcggggcaaaagcggggggcaaaagcgcaagtgccccaaatacagagggcgttaagtcctcctcagtgatgccgtcgccatccaccacacttgcccgccaaggctcccttgagagtccctcctctggaacaggaagcatgggcagcgctggtggactttctggaagctcaagcccgctgtttaataaaccatccgacctcacgactgatgttatctctctgagccactcgttagctagcagccctgccagcgttcacagcttcacaagtgggggattggtgtgggccgccaacatgtcctcttctagtgccgggtctaaggacacgccctcgtaccagtctatgacatccctccatacctcatccgaatccatcgacctgccactcagccatcacggctccctgtctggtctcactactggtacacatgaagtgcagtctctgttaatgcgcactggctcagtacggagtaccctttccgagtccatgcagctggatcgaaacaccctgcctaaaaaagggctaaggtacactcctagttcaagacaggcgaatcaggaagaggggaaggaatggctgcggtcacactctacagggggcctgcaagatactgggaatcaatcccctttagtgagcccatccgccatgtcctcctccgccgccggaaagtatcacttcagcaacctagttagtcccacgaacctcagccagtttaacctcccaggccccagtatgatgagatctaatagcatacccgctcaagattctagctttgatctttacgacgattcccagctgtgcggctccgcaactagcctggaggagaggccccgcgccatcagtcactcgggttcgtttcgagacagtatggaggaagtccatggttcttcgttgagtcttgtgtcgagcacctctagcctgtacagtacagcagaggaaaaagcccattcggagcagatccacaagctgaggcgcgagctggtagcctcccaggagaaagtggcgactctgactagccagctgtcggccaatgcccatctggtagccgcctttgaaaagtccctgggcaatatgaccggcagactgcagtctttgacgatgactgctgagcagaaagagtcagagctgatagagctaagagagacaattgagatgcttaaggcccagaattctgctgctcaggcggccattcagggcgcactcaacggtccagaccatccccccaaagacctgcgcataaggcgccaacactcatctgaaagtgtctctagcataaactcagccacttctcattccagtattggctcaggtaacgatgctgattccaagaaaaaaaaaaaaaaaaattgggtgaacagtcgggggtccgaactcaggtcatcgtttaagcaagcgttcggcaagaaaaagtccactaaaccacctagctcccatagcgatattgaagagctgacggatagcagtctacctgcttcacccaaacttccccataatgcaggcgattgcggcagtgcaagtatgaagccctcccagtccgcaagtgcctcacctctggtttggcctccaaagaagagacagaatggacctgtgatctacaaacacagatcacggatctgtgaatgtaccgaagctgaggctgaaatcatcctccagctcaaatcagaattgcgggagaaggagcttaaactgactgacatccggctggaggcgctgtcctctgcccaccacctggatcagatacgcgaggcgatgaatcggatgcagaatgagattgagatactgaaagccgagaatgaccgcctcaaggccgagacaggaaatactgcaaagcctacaagacccccatccgaatccagctcttccacgagctcgagcagttcacgccaaagcttgggcctctcacttaataatttaaatatcacagaggccgtttcaagtgatattcttcttgatgacgccggtgatgctaccgggcacaaagatggtcgatccgtcaaaataatcgtgtctatcagcaaggggtatggcagagccaaagatcagaagtcgcaggcgtacttaattgggagcattggtgtgagcgggaaaacaaagtgggatgtgttggacggggttatccgacggttgttcaaggagtatgtctttcggatagatacctctacttcactaggcctgtcgagtgattgtatcgctagctattgtattggcgatctaatacgttcccacaacctggaggtgcctgaactgctgccctgcgggtacttggtcggggataacaacattatcacggtaaaccttaaaggcgtcgaggagaactcgttggattcattcgtgttcgatactcttatccccaagcctatcacacaacgatacttcaacttattgatggaacaccatcgaattattctgtccggccccagtggtactggcaagacctacctcgccaataagctggccgaatacgtgattactaagagcggtcgcaaaaagactgaggatgctattgcaactttcaatgttgaccataaatcctctaaggaactgcagcagtaccttgccaacctggctgagcagtgctccgccgacaataacggggtggaacttcctgtcgtcattattttagacaacttgcatcacgtggggtcactgtctgatattttcaacggcttcctgaactgtaagtacaacaagtgcccctatatcattggtaccatgaaccagggcgtctcatcatctcctaacctggagttacatcataatttcaggtgggtgctctgcgcaaaccatacggaaccggtcaaagggtttctggggcgctacctgcggaggaaactaatcgagattgaaatcgagcggaatatcaggaataacgacctcgtgaaaatcatcgactggatcccaaaaacttggcaccacctgaactctttcttagagacacactcttctagcgacgtcacaataggaccgcggttatttcttccctgtcctatggatgtagagggatcaagggtctggttcatggacctgtggaattactccctcgttccttatatcctggaggccgtgcgggagggactgcagatgtacggaaagagaacaccttgggaggatccctccaagtgggtgttggacacttatccttggagctctgctactctgccccaagaaagtccagccctcttgcagctgcgccccgaggacgtgggatacgaatcatgtacaagcactaaggaggccaccacatctaaacacatcccccagacggacactgaaggtgacccccttatgaatatgttgatgaaattgcaagaggctgcaaactattcttcaacacagtcatgcgactcagagtctacgtcccaccatgaggacattctggacagcagccttgagtcaactctttag

SEQ ID NO: 197086 - DNA, 7092 bp, synthetic construct
  misc_feature 1..7092: note = Description of Artificial Sequence: Synthetic coding sequence
  source 1..7092: mol_type = other DNA
atgcccgtgctgggcgtggccagcaagctgcggcagcccgccgtggggtcaaagccggtccataccgccctgcctatcccgaacctgggaacaaccgggagccagcactgcagtagccggccattagagctgacagaaacagaatcatccatgttatcttgtcagcttgctctaaagagcacttgcgaattcggagaaaaaaagccgttgcagggcaaggctaaagagaaagaggattcaaagatctataccgattgggccaatcattacctcgcaaagagcgggcacaagcggctgatcaaggacttacaacaggacatcgcagatggagtcctcctggccgagataattcagatcatcgcgaatgaaaaagtggaagacattaatggatgccctagaagccaatctcagatgatcgaaaacgttgacgtgtgcctatcctttttggctgcacggggagtgaacgttcagggactgtccgcggaagaaattagaaacggcaatcttaaggccattctggggctctttttcagcttgagcagatacaaacagcagcagcaccaccagcagcagtattaccagtctctggtcgagttacagcagagagttacccacgcctctcctcctagtgaggcctcccaggctaagactcagcaagacatgcaatccagccttgccgcaaggtatgccactcaaagtaaccacagcggtatcgcgacttcgcaaaaaaaacccacacgtttaccgggtccctcacgcgtgcccgcagctgggtctagctcgaaagttcaaggcgcttccaacttgaatcgtcggtcccagagtttcaactccattgataagaataaaccgcctaactacgctaatgggaacgagaaggactcctctaagggcccccagtcttcctccggggtgaatggaaacgtgcagcctccctccaccgctggccagcccccagccagtgccattccgtccccgagcgccagtaagccctggagaagtaagagtatgaatgtcaagcattctgccacctccacgatgctgaccgtcaaacagtcatccacagctactagtcctactcccagcagtgatcgtctcaagcctcctgtgtccgagggagtaaaaaccgctccaagcgggcagaagtcgatgttagaaaaattcaagcttgtcaacgctcgcaccgcccttaggcccccccagcctccgtccagtggacctagcgacgggggaaaagacgacgacgccttctctgagtccggggagatggagggtttcaattctggcctgaactccggcggctcaactaactcaagccctaaggtgtcacctaagctggcgccacctaaagccgggtccaaaaacttatccaacaaaaagagcctcctgcagcctaaggaaaaagaggaaaagaatcgggacaagaataaggtttgcaccgaaaagccagtcaaggaagagaaggaccaggtgacagagatggcgccaaaaaagactagcaaaatagcttctctgattccaaaaggtagtaaaaccaccgccgccaaaaaggagagcctcatcccgagcagctctggaataccgaaaccaggtagcaaagtgcctacggtcaaacaaactatctccccaggatcaacagcctccaaagagagcgaaaagtttagaaccactaaaggttccccgtcacaatccttatccaaacctatcaccatggagaaggcatccgcttcatcctgtcctgccccattagagggacgggaagcgggccaagccagtccatccggttcgtgcaccatgaccgtggctcagagctctggacagtcaacagggaatggggccgtccagctacctcaacagcagcaacattcccatcctaacacagcaaccgttgcgccatttatttatcgcgcacactccgaaaatgagggtacggcgctcccctccgccgacagttgcacctctcccaccaaaatggacttaagctattctaagactgctaaacagtgcctggaggaaatctctggtgaagatccagagacacggcggatgcgaacagtgaagaatatagctgatttgagacaaaatttggaagagaccatgagctcattacgagggactcagatatcacacagtacgctcgagacgaccttcgatagcactgtgaccactgaggtgaacggtaggaccatcccaaatttaactagcaggccaacccccatgacgtggagactggggcaggcttgccctcgactgcaggctggagatgcgcccagtctgggcgcgggatacccacggtcgggcacatctagattcatccacacggacccttcacgattcatgtataccacacctctccgccgggccgccgtgtctcgactgggcaacatgtcccagatcgacatgtcggagaaggcctcctctgatctcgacatgagctctgaggtcgacgtcggcgggtatatgagtgacggggatatccttgggaagagccttagaactgatgatataaattccgggtacatgactgatggcgggctgaatctatatactcgctctcttaatagaatacccgatactgctaccagccgagatattattcagaggggtgttcacgatgtcaccgttgatgctgattcgtgggacgactctagttccgtctcctcgggtttaagtgacaccctggataacatctccacagatgacctgaataccacgtcaagcgtgtcttcatactccaacatcaccgttccaagccgaaaaaatacgcagttaaggaccgatagtgagaagcgatccacaacagacgagacctgggactcacccgaggagctgaagaagccggaggaggacttcgactctcacggcgacgccggaggcaaatggaagaccgtgtcatcgggcctccccgaggatccagagaaggcaggacagaaagcgagcttgagcgtgtcacaaactggttcctggcgccgtggaatgtcagcacaggggggtgcgccatcgaggcagaaggccgggacatcagccctgaagacccccggaaagaccgatgatgcaaaagcctccgaaaaggggaaggctcccctgaaggggtcttccctccagcgctcccctagcgacgcaggtaagagcagcggggacgaggggaagaagcccccgtccggcataggtagatccacagccacgtctagcttcggcttcaagaagccgagtggggtcggctcatcggccatgataacgtcgagtggcgccacaataaccagtgggtccgccacgcttgggaaaattcctaagtctgcggctatcggaggtaaaagcaacgccggtcggaagactagcctggacggctcacaaaatcaagacgacgtggtgctccacgtcagctcgaagacgaccctgcagtacaggtctttgccacggcccagcaaatccagtactagcggcattcccgggagaggaggtcaccgtagtagcactagttcaattgattcgaatgtatccagtaagagcgcaggagccaccacatctaaacttcgtgaaccgactaagataggctctggtagatccagtccggtcacagtcaatcaaaccgataaggagaaagaaaaggtagccgtatccgacagtgagtctgtgtcccttagcggctcccccaagtcatctcccactagcgcctccgcttgcggtgcccagggcctgcgacagccagggagcaagtatcctgacattgctagtccgactttccggaggctcttcggcgcaaaggcgggagggaagtcggccagcgccccaaatactgaaggcgtcaagtcttcctctgtgatgcccagcccctctactacacttgccagacaggggtctctggagtctcccagttcaggcactggaagcatgggcagcgccggaggtctttctggaagcagctcgcccctctttaataagccctcagatctcactactgacgtgatctccctgtcacactcactggcatcctcgcctgcctctgttcacagttttaccagtggaggccttgtgtgggcagccaacatgagctccagtagtgccggaagtaaagacacaccaagctatcaatccatgaccagcctgcacactagcagtgaaagtatcgatctgccactgagccatcacgggagcttgtccggcttgactacaggcacacatgaagtgcagtcgctgttgatgcggactggaagcgtgcgcagtacattgtccgagagcatgcaactcgatcgcaacacactgccaaaaaagggactgcggtacactccatcttcacggcaggctaatcaggaagaaggcaaagaatggctgcgctctcattccaccggcggtcttcaagacaccggaaatcaatctcccctcgtctcaccatctgccatgtcttcaagcgccgctggtaaataccacttcagtaacctcgtctccccgaccaatctatcacagtttaacctgccagggccatctatgatgagatcaaattccatccccgcccaggattcatcgtttgatctgtatgacgattcacagctatgcgggtccgccacatccctagaagaaaggccaagggctatatctcactccggctcatttagggactcaatggaagaagtacacgggtcctctctctctcttgtgagtagcaccagcagcctctactccacagcagaagaaaaagcacacagtgaacagattcataagctgaggcgggagctggtggcatcccaggaaaaggttgccaccctgacttcacagctgtccgcgaatgcacatttggtggccgctttcgagaagtcactcggtaatatgaccggccgcttgcagagtctgacaatgactgccgagcagaaggaatctgagctgatcgagcttcgcgagactatcgagatgctgaaagcacagaatagcgccgctcaggccgctatccagggtgccctcaatggaccggaccaccctcccaaagacctccgcattcgacgccagcactcgagtgagtcagtctcatctattaacagtgccaccagtcacagtagtattggctccgggaatgacgctgatagcaaaaaaaagaaaaaaaaaaactgggttaacagtcggggctctgaacttagatcctcctttaaacaggcattcgggaaaaaaaaatcaacgaagcctcctagcagtcactccgacatagaggagttgacagatagctcactcccagctagccccaagttgcctcataatgcaggggattgtggttctgcatccatgaagccatcccagtccgccagtgctatctgtgagtgcaccgaggccgaagccgagattatcctgcagctgaagagcgagctccgagaaaaagaactgaagttgaccgacatccgcctggaggcgctgtcgtctgcgcaccatttagaccagattcgcgaggctatgaaccgcatgcagaacgagatcgagattttgaaggccgaaaatgacaggctcaaggctgagacagggaacactgcaaagcccacccgcccgccctctgagtcttcatcatccaccagtagtagcagcagcagacagtccctgggcctgtccctcaataatctgaacatcactgaagcagtgagctctgacattctgctggacgacgcaggcgacgccacgggccacaaggatgggcggagtgtgaaaattatagtgtctatcagcaaagggtatgggagagctaaagatcaaaaaagccaagcctatctgataggctcaatcggcgtgtccggcaaaacaaaatgggacgtgcttgacggagtgatccgtcgtttgtttaaagagtatgtgttccgtattgacacttctacgtctctgggtctctcttctgattgtatagctagctattgtattggggaccttattagatcacacaacctagaggtgcctgagttgctgccatgtgggtacttggttggcgacaacaacattatcaccgtcaacctgaaaggggtggaggagaattccctggattcttttgtcttcgatactctgatacccaagcccattactcaacgttattttaatctgctcatggagcaccacagaataatcctgtcggggccttccgggaccggcaagacgtacctcgcaaacaagttggctgaatacgtgatcaccaagagcgggcggaagaaaacagaggatgctatagctaccttcaatgtggatcataagtcaagtaaggaactgcagcaatacttggccaacttagctgaacaatgtagcgcggacaacaacggcgtggagctgccagtcgtaattattctcgacaaccttcatcatgtgggctcactgtcagatatttttaatggtttcctgaactgcaagtacaataaatgtccatatatcataggaacgatgaatcagggcgtaagttcctctccaaaccttgagctgcaccataacttcagatgggttctgtgcgctaatcataccgaaccagtaaagggcttcctcgggaggtacttgagacggaaactaattgaaatcgagattgaaagaaacataaggaataatgatttagtcaagataatcgactggattcccaagacatggcatcacctgaattcttttctggagacccattctagctctgatgtgaccatcggcccacgcttatttcttccatgtcctatggacgttgaggggtcccgcgtctggtttatggatttgtggaattactccctcgtgccttatatcctggaggccgtacgagagggactgcagatgtatgggaaacgcaccccatgggaggatccatctaagtgggtgctggatacgtatccctggagctccgccacattgccacaggaaagccccgccttgctccagctgcggcctgaagacgttggctatgagtcctgcacgtcaacaaaagaagctacaactagcaaacacatcccacagaccgatacagagggagatccattgatgaatatgctcatgaagcttcaagaggccgcaaactatagcagcactcagtcttgcgactctgagtcaacaagccatcatgaggatattctggactccagtctcgagtccaccctgtag

SEQ ID NO: 197087 - DNA, 648 bp, synthetic construct
  misc_feature 1..648: note = Description of Artificial Sequence: Synthetic coding sequence
  source 1..648: mol_type = other DNA
atgaagcggtgggtgctgtgcgccaaccacaccgagcccgtgaaggggttcttgggaaggtacctgcgcaggaaattgattgagatagaaattgagcgcaatatccggaacaacgatctcgtaaagataattgactggattccaaagacatggcaccacttgaactcttttctcgagacccattcctccagtgacgtcaccataggacccaggctgttcctcccctgtcccatggacgtagagggctctagagtgtggtttatggacctatggaattattccctggtgccctatatcctggaagcagtgagagaagggctccagatgtacggaaagcggacaccctgggaggacccgtctaagtgggtcctagacacatatccgtggagctcagcaactctgccacaggaaagtcccgccctgttgcagctgcggcccgaggacgtaggttacgagagctgtaccagcacaaaagaagcgacaacatcaaaacatatcccacaaaccgataccgaaggggacccattgatgaacatgttgatgaagctgcaggaagcagccaattactcgagcacccaaagctgcgattccgagtctacctcacaccatgaggacatcttagattcatctcttgaatctacgctctag

SEQ ID NO: 197088 - DNA, 573 bp, synthetic construct
  misc_feature 1..573: note = Description of Artificial Sequence: Synthetic coding sequence
  source 1..573: mol_type = other DNA
atgggcaagagcaacagcaagctgaagcccgaggtggtggaggagctcacccgcaagacctacttcaccgaaaaggaagtgcagcagtggtacaagggctttatcaaggactgcccaagcggccaactggacgctgcgggattccaaaagatttacaaacaattcttcccgttcggggaccccacaaagttcgccacattcgtgttcaatgtgttcgacgagaataaagacggtcgcatcgagttttccgagtttattcaggccctgtcagtgacctctagaggcacactggacgaaaaactccggtgggccttcaagctctacgatctcgacaatgacgggtatattaccagaaacgaaatgctggatatcgttgacgccatctatcagatggtcggtaacacagtggaactgcccgaagaagagaacactccagagaagagagttgaccggatcttcgccatgatggataaaaatgccgacggaaagctcacactgcaggagtttcaagagggcagtaaagcggacccgtcaattgtgcaagccctgagtttgtatgatgggctggtctag

SEQ ID NO: 197089 - DNA, 519 bp, synthetic construct
  misc_feature 1..519: note = Description of Artificial Sequence: Synthetic coding sequence
  source 1..519: mol_type = other DNA
atggccaccatcaccgagaaggaggtgcagcagtggtacaagggctttatcaaagactgtccgagcggccagctggatgccgcaggattccaaaagatttataagcaatttttcccctttggcgacccgacaaagttcgccactttcgtgttcaacgtgttcgacgagaataaggatggtaggatcgaattctccgagttcattcaggcactgtctgtgaccagccggggcacactggacgaaaagctgcgttgggcattcaagctctatgacctggataacgacggatacattacccgcaatgaaatgctcgacatagtagatgctatctaccagatggtgggtaacactgtcgaactccccgaggaggagaacaccccagaaaaaagggtcgacaggattttcgcaatgatggacaaaaacgctgacggcaagttgacattgcaggagtttcaagagggttccaaggcagatccttcaatcgtccaagctctgagcttgtatgatggcctggtttag

SEQ ID NO: 197090 - DNA, 3552 bp, synthetic construct
  misc_feature 1..3552: note = Description of Artificial Sequence: Synthetic coding sequence
  source 1..3552: mol_type = other DNA
atgcagctgaagatcatgcccaagaagaagcggctgagcgccggcagggtgccgttgatcctgtttctgtgtcagatgatctctgccctggaggtgcccctggacttagttcagccgccaacgattacccaacagtcccctaaggattacatcatcgaccccagagaaaacattgtgatccaatgtgaggccaaggggaagcctcccccgtccttctcttggactcgaaatggaacacattttgacatcgacaaggatcctcttgtcaccatgaagccaggaacaggtactctaataattaacatcatgagtgaagggaaagctgagacctacgaaggtgtatatcagtgtacggccagaaatgagcgaggcgccgcagtctcaaataatatcgtggttcgaccttctcggtcgccgctttggacgaaagagaagctcgaaccaatcacactccagagcggccaatcgctcgtcctgccttgccgccctcctatcgggctcccaccgccaatcatcttctggatggacaactcattccagaggctgccgcagagcgaaagggtatcgcagggtttaaacggcgacctctacttttctaatgttctacccgaggatacaagagaggattacatctgttacgctaggttcaatcatactcagacgattcagcagaagcagccgattagtgtgaaagttatctcggttgatgagttgaacgatacaatagccgccaacttgagtgacacagaattctacggagccaaaagttcaagagaacggccccctacgttcctcaccccggagggaaacgcaagtaataaagaggaactgcgcggaaatgtgctgtctctcgagtgtatcgcagaaggtctgccaactccaattatttactgggccaaagaggatggaatgcttcctaagaatcggacagtgtataagaatttcgagaagacattgcagattatccacgtgtcagaagcggatagtggcaattaccaatgcattgccaagaatgcgctgggcgctatccatcatactatttcagtccgggttaaggcagcaccatactggatcacagcccctcaaaatttggtgctgtccccaggcgaggatggtacactgatatgtcgggcaaatgggaatcctaagccccggattagttggcttaccaatggcgtaccaatcgaaatcgcccccgacgacccatctcgtaagatcgacggagacactattatcttctccaatgtgcaagaaaggagcagtgccgtatatcagtgcaatgccagcaatgagtacgggtacctccttgccaatgccttcgtcaatgtccttgccgagcccccccgcatcctcacccccgctaacactttgtaccaggtcattgcaaacaggcctgctttactcgattgtgccttcttcggctccccactgcctactatcgaatggttcaagggcgcaaagggatccgcactgcatgaagacatctacgtccttcacgagaatggaacacttgaaattcccgtagctcaaaaagacagcaccgggacctatacatgtgtggccaggaataaattaggtatggccaagaatgaggtgcatctcgagatcaaagaccccacgtggatcgtgaaacaacctgagtacgcggtcgtgcagagaggtagcatggtctcctttgagtgtaaggtgaaacatgaccacactttgtccctgacagtattatggctcaaagacaatagagagctgccctctgatgagcgcttcacagtggacaaagaccatctggtggtggctgatgtcagcgatgacgacagcggaacttacacttgcgttgccaatacaaccctggattccgttagcgcatctgccgtcctgtctgttgtggacgtgccaaatccacctttcgatctcgaactgaccgatcagctggacaaatctgtgcaacttagctggacgccaggggatgataataattctcctatcacaaagttcattatcgagtacgaggacgcgatgcataagcccggcctctggcaccatcagactgaggtctcaggcacccagacgacagcccagttaaagctcagtccatatgtgaactattcctttagagttatggcggtcaattctattggcaaatctctcccatccgaggccagcgaacagtatttgacaaaagcaagtgagccagacaaaaatcctaccgccgtcgagggcttggggtctgagcccgataacttagtcataacctggaaaccgctgaatgggtttgagtcgaatggccccggcctacaatacaaggtcagctggcggcagaaggacggagacgatgaatggacatcagttgtcgtggcgaacgtttccaagtacattgttagcggaacaccgacattcgtgccatacctgataaaagtgcaggcattgaatgacatgggttttgcccctgagccggccgtcgtcatggggcacagcggggaggatctgccaatggtggcccccgggaacgtgagagtgaatgttgtgaactccaccctggccgaggttcactgggacccagtcccgctgaaatctattagaggccacctgcagggatacaggatttactactggaagacgcagtcgagcagcaagagaaatcgacggcatatcgaaaaaaagatactgacgtttcagggctctaaaacacatggtatgttaccaggcttggagccattctcccattataccctgaacgtaagagttgtgaacggtaaaggcgaagggcccgccagtccagacagagttttcaacactcccgaaggtgttccttcagcccccagcagcttgaaaatcgtaaacccaacactggatagtctgacattagagtgggatccaccctcacaccctaatggcatcttgaccgagtacactcttaagtatcagcccatcaatagtacccacgaacttgggcctttggtggatttgaagattccagccaataaaacacgatggacactcaaaaacctcaacttctctaccaggtataaattttacttctatgcgcagacatcagccgggtcaggatcacagattacagaagaagcagtgacaactgttgacgaggccatggcaagccgacaggtcgatattgcaacccagggctggttcatcggcctcatgtgtgctgtcgccttactcattttgattcttctgatcgtgtgcttcatccggagaaataagggcggcaagtatccggtgaaggagaaagaagatgctcacgccgacccagaaatacagccaatgaaggaagacgacggcacattcggggaatacagtgatgcggaagatcataaaccactgaagaaggggagtcgtacaccctctgatcgcactgttaaaaaggaggatagtgatgactctcttgtggattatggagaaggggttaatggacagtttaacgaagacgggtcattcattggccagtactcaggaaagaaggagaaagagccagccgagggaaacgaatcaagcgaggccccctcccccgtgaatgccatgaattccttcgtgtag

SEQ ID NO: 197091 - DNA, 3711 bp, synthetic construct
  misc_feature 1..3711: note = Description of Artificial Sequence: Synthetic coding sequence
  source 1..3711: mol_type = other DNA
atgcagctgaagatcatgcccaagaagaagcggctgagcgccggccgtgtccccctgatcttgtttctgtgccagatgatctccgccctggaagtgccactggaccagaagtcaactgaggtgatggtgcagcctccaaccataacacagcagtcccctaaggactatatcatagatccccgggaaaacattgtgatccagtgtgaggcaaaagggaagcctccaccttcattctcctggaccaggaatgggacgcatttcgacatcgataaagatcccctggtgacaatgaagcctgggaccgggactctgatcatcaatattatgagtgaagggaaagccgagacctatgagggagtgtaccagtgtacagcccggaatgagcgcggcgccgcagtgagtaacaatattgtggtgcgacctagccggagccctctttggacgaaggagaagctggaaccaatcaccctgcagtctggtcaaagtctggtcctgccttgtaggccaccaattggccttccacctcccatcatcttttggatggacaactcctttcaacgcttgcctcaatctgagcgggtgtcccagggcctgaatggcgatttgtatttcagcaacgtgctcccagaggatacgagagaagactacatctgctacgcccggttcaaccacactcagactatacagcagaaacaacccatctccgtcaaggtgattagcgtcgatgaactcaacgataccatagcagcaaacctgtcagacaccgagttctacggagccaaaagtagcagggagagaccacctaccttcctaacacccgaggggaacgcgagcaataaggaagaactgcgtggcaacgtgttatcattggaatgcattgccgaagggctcccaacacccatcatctattgggccaaagaggatgggatgctgcctaagaaccggactgtctacaagaatttcgagaagacccttcagatcatccacgttagcgaagccgacagtggaaattatcaatgcattgccaagaacgctctgggagcgatacatcacacaatttctgtccgtgtgaaagccgccccatactggataactgcgcctcagaacctggttttaagccctggtgaggacgggaccctcatctgccgggcaaatggaaacccaaaacccaggatctcctggttgaccaacggcgtaccaatcgagatagcgcctgacgacccatctcgcaagatagatggggatacaataattttctctaacgtacaggagcgaagcagcgcggtgtatcaatgcaatgcaagcaacgagtacgggtaccttcttgccaacgccttcgtgaatgtcctggcagagccacctcggatcttgaccccggccaataccctgtaccaggtgatagcaaacaggcctgcactgctggactgtgcctttttcggcagccctttaccaactattgaatggtttaagggagctaagggctctgccctgcacgaggatatttatgtcctgcatgaaaacgggacattggaaatcccggtggctcaaaaagacagcaccggtacatatacttgcgtagcccgcaataaactaggcatggcgaagaatgaggtgcaccttgaaatcaaggatccaacatggattgttaagcaaccagaatacgcggtggtgcagaggggaagtatggtgagctttgagtgcaaagtaaaacatgaccatactttgtctctcacggtgttgtggctcaaggacaaccgagagctgccatctgacgagaggtttacagtagacaaagatcatcttgtggtggccgacgtcagcgacgacgacagcggaacctacacttgcgtcgccaacacaactttagacagcgtatcagccagcgctgtgttatccgtggtggctccaacgccaactcctgcccccgtatatgacgtacctaatccgccctttgatctggagttgacagatcaactggataagtcagtgcagctctcatggacgccgggagatgataataacagccctattacaaagttcatcatcgagtacgaagatgccatgcacaagccaggcctgtggcaccaccagacagaagtatccgggacacaaacaaccgctcagctcaaactgtcaccctatgtcaattacagtttcagagttatggccgtgaatagcattgggaagagtctccccagcgaggcaagtgagcaatatctcactaaagccagcgaacccgacaaaaaccctaccgcggtggaagggcttggctccgagcctgacaacctggtcattacctggaagcccttgaacggctttgagtctaacggtccggggctgcagtataaggtatcgtggaggcagaaggacggggacgatgagtggacatccgtggtggtcgctaacgtctcgaaatacattgtttcgggtacaccgaccttcgtgccttaccttataaaagttcaggctcttaatgacatgggattcgcccccgagcccgccgttgtgatgggccattccggagaagacttgcctatggtggctcccggcaacgtccgggtgaatgtagtcaattcgacgctcgccgaggtgcactgggatcccgtgcccctaaaatccattcggggtcacctccagggatacagaatctactactggaaaacacagtcgtcttccaaaaggaatcgacggcatattgaaaagaaaatcctgacattccaggggtctaagacacacggcatgctgcccggactggaacccttctcccactatacactaaatgtccgggtggtgaatggaaagggtgaggggccagctagccccgatcgtgtgtttaacactcccgaaggggtgccatctgcgccgtccagcctgaaaatcgtgaaccctacactggatagcctaactctggagtgggatcctccctcccatccaaatggcatcctcactgagtacaccttaaagtaccagcccattaattcaacacatgaactgggcccgctggtagatctgaaaatccctgctaacaaaacacggtggacacttaaaaacttgaatttcagcacccgttataaattctacttctatgcacagacatccgctggcagcggctctcagataacagaagaggcagtgaccaccgtggatgaggcaggcatcctcccaccagatgtcggggcaggaaaggtccaagccgtgaatccccggattagcaacctgacagctgctgccgccgagacttacgccaacattagctgggagtacgagggtcctgagcacgtcaatttttacgtcgaatatggtgtcgcaggaagtaaggaggaatggagaaaagaaattgtcaacggctctcgttcctttttcggccttaagggattaatgcctggcacagcctataaggtcagagtgggagctgtgggtgattcaggatttgtatctagcgaagatgtctttgagactggcccagcaatggcttccaggcaggttgacatcgctactcagggatggtttattggccttatgtgcgcagtggcgctgctcatcctgattctgctgattgtatgctttataaggcgcaataagggaggaaagtaccccgtaaaagagaaggaggatgcccatgccgaccctgagatccaaccaatgaaagaagacgacggtacctttggcgagtatagactattttcattcgtctcctccgcaagcttttag

SEQ ID NO: 197092 - DNA, 3579 bp, synthetic construct
  misc_feature 1..3579: note = Description of Artificial Sequence: Synthetic coding sequence
  source 1..3579: mol_type = other DNA
atgcagctgaagatcatgcccaagaagaagcggctgagcgccggcagggtgcccctgattctatttctttgccaaatgatcagcgccctcgaagtcccactagaccccaagctgctggaggacctcgtacagccgccaactataacccagcaaagccccaaggactatatcattgatccccgcgaaaatatcgtgatccagtgtgaggccaagggtaagccgccgccctctttctcctggaccaggaatgggacccacttcgacattgacaaggatcctctagtcaccatgaaaccgggcacaggaacccttataattaacataatgtccgaaggaaaagccgaaacctatgaaggggtgtaccagtgtacagctcgtaacgaaaggggagccgctgtcagcaataacatagtcgtgcgcccttcacggagccctctgtggacaaaagagaagctggagcctattacccttcagtcggggcagtcactggtgctgccctgccgcccacccattggactgcctcctcccattatcttctggatggataactcttttcaacgactgccccagtctgagagggtaagtcaggggcttaatggcgacttgtatttctcaaatgttttaccagaagacacaagagaagattacatatgctatgccaggttcaatcacacccagactatacaacagaaacaacctatctccgtgaaggtgatcagtgctaagtcctcaagagaaagacctccaacatttctgactcctgaaggcaatgcatcaaataaggaggagctcagaggtaacgttctgtctctggagtgtattgctgagggcctgccgacacccatcatctattgggcgaaagaggacggaatgctgccaaaaaatcgtaccgtctacaagaatttcgagaagaccttacagatcattcacgtttccgaggccgactccggaaattaccagtgcatcgctaagaacgccctgggcgcaattcatcacactattagcgtgcgcgtaaaggctgcaccctattggatcactgccccacaaaacctggttttgtcccctggggaggacggtaccctcatctgcagggcaaacgggaatccaaaaccgaggatcagctggctcactaacggcgtccccattgagatcgctccggacgacccttcacggaagattgacggcgacactatcatctttagcaacgtgcaggagcggtcaagtgccgtgtaccaatgcaacgcttcaaacgagtacggatatctcctcgcaaatgcatttgtcaatgttttagcagagccccccagaatcttgacaccagctaacacattatatcaggtgattgccaacagaccggccctgctcgactgtgcgtttttcggctctcctctccccaccattgagtggtttaaaggagcaaaagggtctgcccttcacgaggatatctacgttttgcacgagaacggtaccctcgaaatacccgtagcgcagaaagattcaacgggaacctatacttgcgtagctaggaacaagttgggaatggctaaaaacgaagtgcacctggagatcaaggaccccacatggattgtgaagcagcccgaatatgccgtcgtccagcggggttccatggtgtccttcgagtgtaaagtcaagcatgatcacactctgtctctcaccgtcttgtggcttaaagacaatagggagcttccctcggacgaacgctttaccgtggacaaagaccacctggtggtcgctgatgttagcgacgatgattcgggaacgtacacctgcgtggcaaacacgacactggattctgtgtctgcaagcgctgtcctctcggtggttgctcccactcctacgccagcgccagtttatgacgtccctaatccaccgttcgaccttgaactgaccgaccagctcgataaatccgtccaattgtcttggactcccggggatgataacaatagtccaatcacgaaatttatcattgaatacgaagacgccatgcataagcctggcctctggcaccatcaaacagaagttagtggcacacagacgacggcccagctcaagctgtccccttatgtcaattatagtttcagagttatggccgttaattctattgggaagtctctgccttccgaggcctcagagcaatatctgaccaaggcctcggagccagacaaaaatccgaccgccgtggaaggtctcggcagtgaaccggacaatctggttattacttggaagcccctgaatgggttcgagagcaacgggccaggactgcaatacaaggtgagttggcgccagaaagacggggatgacgagtggaccagtgtggtggtggccaatgtctcgaagtatatcgtctcgggcacccccacctttgtgccctacctgatcaaggtacaagccctgaacgatatggggtttgcacctgaaccagccgttgtgatggggcacagcggcgaggatctgcctatggtggctcctgggaacgtgcgggtaaatgtcgtgaattcgacactagctgaggtgcactgggaccccgtgcctttaaagtccattaggggccatctgcaagggtaccggatctattattggaaaacccagtcctcttcaaagcgcaaccgccgacacatcgagaaaaagattctcaccttccagggcagtaaaacacacggcatgctacctggactcgagccattttcacactataccttgaacgtgcgggtcgtcaacggcaagggtgagggtccagcctcccctgaccgcgtgttcaacactcccgagggtgtaccgtctgcaccctcatctttgaagatcgtcaatccgacccttgactctttaacactagaatgggatcctccttcacaccctaacggcattctgactgagtacaccttgaagtaccagcctatcaacagtacccacgaactgggccccttggtggaccttaagattcccgccaacaagacaagatggacccttaaaaatctcaacttcagcactagatataaattctatttttacgctcagacctctgcagggtctggctcgcaaatcaccgaagaagcagtgacgaccgtcgacgaggctggcatcttacccccagacgttggcgcagggaaggcaatggcttccagacaagtggatatcgcgactcaagggtggttcatcggcctgatgtgtgctgtggcactgctcatcctgattttgctgatcgtgtgttttattaggagaaacaaaggcggtaagtatcctgtaaaggaaaaggaggatgctcacgcagaccccgagattcagcccatgaaagaggacgacggaactttcggcgaatattctgacgccgaggaccataaaccacttaagaaaggaagtaggacgcctagcgaccgaaccgtcaaaaaagaggacagtgacgattctctggtggactacggggagggtgtaaacggacagtttaatgaggatggttcttttatcggtcagtattcgggcaaaaaagagaaggagcctgccgagggaaatgaaagcagcgaagctccctcccccgtcaacgcgatgaacagcttcgtgtag

SEQ ID NO: 197093 - DNA, 3915 bp, synthetic construct
  misc_feature 1..3915: note = Description of Artificial Sequence: Synthetic coding sequence
  source 1..3915: mol_type = other DNA
atgcagctgaagatcatgcccaagaagaagcggctgagcgccggccgcgtgccattgatcctcttcctgtgtcagatgatttcagcacttgaggtacctctcgatcctaagctgttggaagacctagtgcaaccaccaaccatcacccagcagtcgcctaaggactacattattgatccacgtgagaatattgttattcagtgcgaggccaaagggaagcctcctccttcgttctcttggacccggaacggaactcatttcgatattgataaggacccactcgtcaccatgaaaccaggaaccggcactcttattatcaatattatgtctgaaggcaaagcagagacctacgagggggtctaccagtgtactgcccgcaacgagcgtggggcagcggtgtccaacaacatcgttgtccgaccatccagaagccctctttggaccaaggagaagctggaaccaataaccctccaaagtgggcaatccctggtcctgccctgcaggccccctattggcctcccgccccctatcatcttctggatggataatagttttcaacgactcccacagtcggaacgcgtcagccagggccttaacggcgacctctacttcagcaacgttctcccagaggatacaagggaggactacatatgttacgccagattcaaccacacgcaaacaatccagcaaaagcagcctatctcagtgaaagtgatcagtgtagacgagctgaatgataccatcgccgccaacctctccgacacagaattctatggggcgaaaagttcgcgagaacggccccctacatttctcacacccgagggaaatgcctccaacaaggaggaattgcggggaaatgtgttgtccctcgagtgcatagccgagggcttacccacaccgatcatttattgggccaaagaggacggcatgcttccaaagaataggaccgtctacaagaatttcgaaaagaccctgcagatcatccacgtcagcgaagcagatagtggcaattatcagtgtatcgctaagaatgcgctgggcgctatccaccacacaatctcggtgagagtgaaggctgcaccttattggatcaccgccccccagaatctcgtgctatccccaggggaagacgggaccttaatctgtcgggctaacggaaaccctaagcctagaatttcctggctgacaaacggtgtccccattgagattgcacccgatgacccctctagaaagatcgacggagataccatcatctttagtaacgtacaggagaggtccagtgctgtgtaccaatgtaacgcttcaaatgaatacggttatctcctggcaaatgctttcgtcaatgttctcgctgagccaccccgcatcctcacccctgccaacactttgtatcaggtgatcgccaacagacccgccttactagactgcgccttctttggcagccccctgccaactattgagtggttcaagggagcgaaagggtcagccctccacgaagacatttatgtcctgcatgagaatgggactcttgagattcccgttgcgcagaaagacagcacaggcacctacacctgtgtggccaggaataaattaggcatggctaagaatgaagtccacctggagatcaaagaccccacttggatagtaaaacaacccgaatacgctgtggtacagaggggatcgatggtctcatttgaatgtaaggtgaaacacgatcacaccctcagccttactgtcctctggcttaaagataatagggagctgccctccgatgaacgctttacggtcgacaaagatcatcttgtggtggccgatgtctctgatgatgactcagggacgtacacctgtgtggctaatacgactcttgacagtgtgagtgccagtgccgttctctctgtggtcgctcccacgccaacccccgcccccgtctatgacgtcccaaacccccccttcgatctggagctgaccgaccaactggataaatccgtgcagctttcctggacaccaggagatgataacaatagtccaatcacgaagttcatcatagaatacgaggacgcaatgcacaagcccggactctggcatcatcaaactgaggtgagcggcacgcagacaactgcccagctgaagctgtctccttacgtgaattactcctttagagtcatggccgtgaactctatcggtaagtccctcccctcggaagcttccgagcagtacctgaccaaagcatcggagccagataaaaatccgacagcggtggaaggcttgggatctgaacctgacaacctggtcattacctggaaacctcttaacggttttgagtcaaacggccctggactgcagtataaggtcagttggagacaaaaagatggcgacgatgagtggacgtccgtcgtggttgccaatgtttccaagtacatagtgtccgggaccccaaccttcgtcccttacctgattaaggttcaagccttaaacgacatgggcttcgcaccagagccggccgtggtgatgggccatagcggcgaagatttgcccatggtggcccctggcaatgttagggtcaacgttgtcaactctactcttgctgaagtgcattgggaccccgttccactaaagtctatccggggacatctgcagggatacagaatctactactggaagactcagagctcatcaaagaggaaccggagacatattgagaagaaaatcttgacttttcagggttcaaaaactcatgggatgcttcccgggctggagccgttctcccactatactctgaacgtgcgggttgtaaatggtaagggagaagggcccgcatcccccgaccgcgttttcaatactcctgagggtgtgcccagcgctccttctagcctaaagatcgtcaatcccacacttgactccctcaccctggaatgggaccccccgtcacatccaaacgggattctgactgaatacaccctaaaataccagcctatcaacagcacccacgagctcggaccacttgtggacttgaaaataccagctaacaaaacaaggtggaccctgaaaaacctaaatttctctactaggtacaaattttacttttatgcccagacctccgcaggctctggctcacagattactgaagaggccgtcaccaccgtcgatgaggctggaatcttgccaccagatgttggggcaggtaaggtccaagcagtgaatccccgaataagtaacctgactgctgctgccgctgagacctacgccaatatctcttgggagtacgaaggacccgaacacgtgaacttctacgtcgagtacggcgtggcgggtagcaaagaagaatggcggaaagagattgtaaacggctcgcgatcattttttggcctcaaggggcttatgccagggacagcatacaaggtacgcgttggggcagtcggagatagtggctttgtttcttcagaggatgtatttgaaaccggccccgcgatggcatccaggcaagttgacatcgccacccagggatggtttattggtctcatgtgcgctgtagccctcttaattctaatcctgctcatagtatgtttcatacggagaaacaaagggggtaagtatccagtgaaggaaaaggaagacgcccatgccgatcccgagatccagcctatgaaagaggacgatggaactttcggtgaatattccgacgctgaagatcacaagcctttaaaaaagggttccagaacaccatccgaccgaaccgtgaagaaggaggactctgatgacagcctggtcgattacggggagggagtgaatggacagtttaatgaggatgggagctttattggtcagtactccgggaagaaggaaaaggagccagccgagggaaacgagagctcagaggccccatcgcccgttaatgccatgaactctttcgtgtag

SEQ ID NO: 197094 - DNA, 3927 bp, synthetic construct
  misc_feature 1..3927: note = Description of Artificial Sequence: Synthetic coding sequence
  source 1..3927: mol_type = other DNA
atgcagctgaagatcatgcccaagaagaagcggctgagcgccggcagagttccattgattctattcctgtgccagatgatcagcgctctggaggtaccgcttgatcagaaatcaactgaggttatggtacagccccccacaatcacccagcagagtccaaaggactacataattgaccctagggaaaatatcgttattcagtgcgaggcaaagggtaaacctccccctagtttttcctggacccggaacgggacacactttgacatcgacaaggatcccctggtcactatgaagcctggcacaggcaccctaatcatcaacattatgtcagagggcaaagctgagacctatgagggggtctaccaatgtacagctagaaatgaacgaggtgctgcagttagtaataatatcgtggtgcgaccttctcggtcccccctgtggaccaaggaaaagcttgaacccatcaccctgcagtcaggacagagtctagttttgccctgtcgaccccccattggactgcctcctcccatcatcttctggatggataacagttttcaacggttacctcaaagcgaaagagttagccagggtctaaacggggatttgtacttctccaacgtgttgcccgaagacacaagggaagattatatctgctacgcccgcttcaaccacacacaaactattcagcagaaacagcctatctctgtgaaagtgatttctgtcgatgagctgaacgacaccatcgccgcaaacctgagcgacactgaattctatggagccaagtcttctagagagcggccccctactttcctcacacccgagggaaatgctagtaacaaagaggaactccgcggcaacgtgctgtccctggagtgcatcgctgaggggctgccaaccccgattatatattgggctaaggaggatggcatgctgcctaagaatagaaccgtctacaaaaacttcgagaaaacattacagattatccatgtcagtgaagccgactctggaaactaccagtgtatcgccaaaaatgccctgggcgctatccatcatactatttctgtgcgagtaaaggccgccccttactggatcactgcaccccaaaacctggtcctgagtcccggggaggatggtacactgatatgccgggcaaatggaaatcctaaacctcggatctcctggctcaccaatggagtgcctatcgagatcgcaccagatgatccaagcagaaagatcgacggagataccataatctttagcaacgttcaggagcgctcgtcagccgtctatcagtgtaatgccagcaacgaatacggctaccttctcgcaaacgcattcgtgaacgtgttagccgaacccccaaggatactcacgccagccaatactctgtaccaggtgatcgccaacagaccggccctgctggactgtgcgttttttggctctcctttgcccacgatcgagtggttcaaaggagccaagggatccgcactccacgaagatatttatgtgcttcatgaaaacggaacactggagatccccgtggcccaaaaggactctacaggaacttacacctgcgtggcgcggaataagctggggatggctaagaatgaggtccatctcgaaatcaaggaccccacatggattgtcaagcagcccgagtacgccgtggtgcaaagggggagtatggtttcgtttgaatgcaaggttaagcatgatcacacgctgtctctaaccgtcttgtggttaaaagataacagggagctgccttccgacgaacgcttcacagttgataaggatcacctggtcgtggcggatgtgtcagatgatgactcagggacctacacatgtgtggctaatacaacgttagattctgtgagcgcgtctgccgttctcagtgttgtcgccccgaccccgacgcccgcccccgtgtatgacgttcccaaccctcccttcgacctggagcttaccgaccagttggacaaatcggtgcaactcagttggacccccggggatgataacaattcaccaataaccaaatttattattgaatacgaggatgccatgcacaaacccgggctgtggcaccaccaaacagaggtgagtgggactcagactaccgcccaacttaaactcagcccatatgtaaactactcctttcgcgtgatggcagtgaactctatcggtaaaagcctgccaagcgaagccagcgagcagtacctcacaaaagcctctgaaccagacaaaaaccctacagccgtggagggacttggcagcgaacctgataacctagtcattacttggaagcctttgaatgggtttgaaagcaatggcccgggcctgcaatacaaagtttcctggcgacagaaagacggagatgacgaatggacgtccgttgtggttgctaacgtttcgaagtacattgtatctggaacccctaccttcgtaccttaccttattaaggtgcaagcactgaacgacatgggcttcgcccctgaacccgccgtggtgatgggccattccggggaagacctgccgatggtggccccaggcaacgtgcgcgtgaatgtagtcaacagcacactggcagaggtccactgggatcccgtccctctgaagtctatccggggccatttacagggctacaggatttactactggaaaacacagagctcgagcaaaagaaaccgacgccacattgaaaaaaagatactaacctttcagggcagtaaaacacacggcatgctgcctggtctggagcctttttcccattacaccctgaacgtccgtgtcgttaatggtaagggagagggtcccgcttcacccgatagagtgttcaacacacctgagggcgtacccagtgccccttcctccctgaaaattgtaaaccccaccttagactctctcactctggagtgggaccctccttctcatccaaacgggatcctgacagagtatacgcttaagtaccagcccataaactctacccacgagctcggacccctggtggatttgaagatcccagcaaataagacacgctggaccctgaagaatcttaacttcagcacccgctacaagttttatttttacgcacagacctccgccggtagcggttcacagatcacggaagaggctgtgaccacagtggacgaagcagggatccttccccccgacgtgggggcgggaaaagttcaggcagtgaatccccgtatatcaaatttgacggctgcagcggcagagacatacgcaaatatatcctgggaatatgaagggccagagcatgtgaacttctacgtagagtacggagtggccggcagcaaagaggaatggcgaaaagaaatcgtaaacggatctaggtccttttttggactgaagggtctgatgccgggcacagcgtacaaggtgcgcgtgggcgcagtgggcgattccggctttgtgtcatccgaggacgtgttcgagactgggcccgctatggcaagccggcaggtggacatagcgacccagggatggttcattggcctgatgtgcgcggtggcgctgctcattttgatcctcctgattgtgtgtttcattaggcgtaataaaggggggaaatatcctgtgaaggagaaagaagatgcccatgccgaccctgaaatccagccaatgaaggaggatgatggtaccttcggagagtactcatcactcaagaatgatgccgaagatcataaacccctgaagaaggggagcaggacccccagcgatcggaccgtgaagaaagaagacagtgatgactcgcttgtggactatggagaaggagtcaacggtcaatttaacgaagacggtagcttcattggccaatactccggaaaaaaagagaaagagcccgctgaaggcaacgagagcagtgaagccccctctcccgtgaacgctatgaactcttttgtctag

SEQ ID NO: 197095 - DNA, 3543 bp, synthetic construct
  misc_feature 1..3543: note = Description of Artificial Sequence: Synthetic coding sequence
  source 1..3543: mol_type = other DNA
atgcagctgaagatcatgcccaagaagaagcggctgagcgccggcagagttccgctgatccttttcctctgtcagatgatctccgctctcgaagttcccctggaccagaagagtacagaagtcatggtccaacctcctacgatcacccaacagtcccccaaagattacatcattgatccaagagaaaatatcgtcattcagtgcgaggcaaagggaaaacccccaccctcgttctcatggactaggaacgggacccatttcgatatcgataaggatccattagttaccatgaaacccgggaccggcaccctaataattaacattatgagtgagggaaaggccgagacatatgagggcgtttaccagtgtaccgctcgcaatgaaagaggcgccgctgtttctaacaatatcgtagtgcgccctagtcgctccccgctgtggactaaggagaagctggagccaatcactctacaatccggccagtccctcgtcttaccgtgtcgcccccctatcggcctgccaccaccaataatcttctggatggacaatagttttcagcgcctcccccaaagcgaacgcgtcagccaaggtctgaacggagacttgtacttttctaatgtgctgcccgaagacacccgggaggattacatatgctatgctagatttaaccatacccagaccattcagcaaaagcagccaatctccgttaaagttatcagtgccaagagctccagagagcgaccgccaaccttcctgacccctgagggcaatgcatcaaacaaggaggaattgcgcggcaacgtgctgagtctggagtgcatcgctgagggtttaccaacgccaattatttattgggctaaagaggatggcatgttaccaaagaataggactgtctacaaaaacttcgaaaaaaccctccagatcatccacgtctccgaggcggactcagggaactaccagtgcatagctaaaaatgcacttggagccattcaccacaccatcagcgtgcgagtaaaggccgccccatattggatcaccgcgccccaaaaccttgtgctgtctcctggtgaggatggaacactgatctgtagagcgaacggcaacccaaagccccgcatatcttggctaactaatggtgtgcccatcgagattgctcctgacgaccccagcaggaagatcgacggggacactatcatcttctctaacgttcaagagagaagctctgcggtctatcagtgcaacgcctcaaatgagtacggctatctgctagccaacgcctttgtaaatgtgctcgccgagccaccccggatcctgacccctgcaaacactttgtaccaggtgattgccaacaggcccgcgctcctggactgcgcttttttcggctcgccacttcccacaattgagtggtttaaaggcgctaagggcagtgcattgcatgaagatatctacgtcctacacgagaacggcactctcgaaatccctgtcgcccagaaagatagtactggcacatacacctgtgtggcccgcaacaaactggggatggctaaaaacgaggtgcacctggaaataaaagatcctacgtggatcgtgaagcaaccagaatacgcggtcgtgcagcgtgggtccatggtgagcttcgagtgtaaggtgaagcacgaccacacactgtccctgactgtgttgtggctgaaggacaacagagaactgccgagcgacgagcggttcactgttgacaaggaccatctggtagttgccgacgtgtccgacgacgatagtggcacctatacctgtgtcgcaaacactactctcgatagtgtttccgcaagcgcggtattaagtgtagttgcccctacccctacacctgcccctgtgtacgacgttcccaacccgcccttcgatctcgagctgacggaccaattggacaagtctgttcaactgtcatggactcctggggacgacaataattctcccattaccaagtttataattgagtatgaggatgcgatgcataaacccggcctatggcaccatcaaacagaagtgagtggaacccaaactaccgcccagctcaagctctctccctatgtgaattattcctttagagtgatggccgtcaattcgatcgggaagtccctgccaagcgaagcttctgagcaatatcttaccaaggcgagtgaacctgataagaacccgactgccgtggaaggcctgggctccgagcccgacaatctggtgatcacatggaaacctctcaacggctttgaaagcaacggcccagggctgcaatataaggttagttggcgccaaaaggatggagacgatgaatggacctccgtggtcgtagccaacgtctcaaaatatattgtttctggaacccctactttcgtgccttaccttatcaaggtacaagcactgaacgatatgggctttgcccccgagcctgctgtcgtgatggggcacagcggcgaggatttgccaatggtggccccgggaaacgtgagggtgaacgtggtaaacagcaccctggccgaggttcactgggacccggtgcctctgaagtcaatccgtggccacctgcaggggtatcggatctactactggaaaacccagtccagcagcaagcgcaatcggagacatattgaaaagaagatcctaactttccaggggtccaagacccacggaatgcttccgggactggagcccttctcccactataccctgaatgtgcgcgtcgtgaatggcaagggagagggccccgcatctcccgacagagtttttaacaccccagagggtgtaccatctgcaccctcttcactgaagattgtgaatcccactctagattccttaacactcgaatgggacccccctagtcatccgaatgggatattgacggaatatactctgaagtaccagccaataaatagtacacacgaattagggcctctcgtggacctaaagatccccgccaacaaaacgaggtggaccctgaagaatctgaacttctctacccgctacaaattctatttttatgcgcaaacctccgccggtagtggttcgcagatcaccgaggaggctgtcaccactgtggacgaggccatggcctctaggcaggtggacatcgctacacagggctggtttatcgggctaatgtgcgccgttgcccttttaatcttaattctcctgatcgtgtgcttcattcgaagaaataagggcggcaaatatcccgtgaaagagaaggaagatgcccacgctgatccagagatccaacctatgaaggaggatgacgggacctttggcgaatactccgatgccgaagaccataagccactcaagaaaggcagtcggacgccctccgacaggactgtcaagaaggaggactctgatgacagcctggttgactatggagagggggtgaacggacaattcaacgaagacgggagttttattggacagtattccggcaagaaagagaaagagcccgctgaaggcaacgagtcatcagaagcaccatctcccgtaaatgctatgaatagtttcgtttag

SEQ ID NO: 197096 - DNA, 1296 bp, synthetic construct
  misc_feature 1..1296: note = Description of Artificial Sequence: Synthetic coding sequence
  source 1..1296: mol_type = other DNA
atgcagctgaagatcatgcccaagaagaagcggctgagcgccggcagggtccccttgatactgttcctgtgccaaatgatcagcgcactcgaggtgcccctggatcttgttcagccgcccaccatcacccaacagagtccaaaagactacattattgaccctcgggagaacatcgtgatccagtgtgaggctaaagggaagccgcctccatcctttagttggacacgcaatggcactcattttgatatcgataaagatcctttggtcacgatgaaaccaggcacaggaaccttgattatcaacattatgtctgagggcaaagcggaaacctacgaaggggtctatcagtgtactgctcgaaacgagcgcggcgccgctgtctccaataacattgtggtgagaccatctaggagccccctgtggaccaaagagaagctcgaacccatcacactgcaaagtgggcagtccctcgtcctaccatgtcgcccccccatcggactgcctcctccgattattttttggatggataacagttttcaacgcctcccccaatcagaaagggtctcccagggcctcaacggagacttatactttagcaatgtgctgccggaggatacacgagaggattacatatgctacgccagatttaatcatacacagaccatacagcaaaagcagcctatcagcgtgaaagtaatcagcgtcgatgaattaaacgataccatagcagcaaacctgtccgatacagaattctatggggcaaagagcagtcgggagaggcctcctaccttcctgactccagagggcaacgcctctaataaggaagagctgcggggcaatgtgctgagcctcgagtgtatcgcagaagggctaccaaccccaattatatattgggctaaagaggatggtatgttgccgaaaaaccgcacagtctataagaacttcgagaagactctgcaaattattcatgtcagtgaggccgattcgggaaattaccagtgtattgccaagaacgcgctgggggctattcaccatacgatttctgtgcgtgtgaaagccgctccttactggattaccgcgccacagaacctagtactgagcccgggcgaggacggtaccctgatatgcagggccaacggcaaccccaaaccgcggatcagttggctaacaaacggggtgccaatagagattgcccccgatgacccatcccgcaagattgacggtgacaccataatcttcagtaatgtgcaggaacgcagcagcgccgtatatcaatgcaacgcaagtaacgagtag

SEQ ID NO: 197097 - DNA, 186 bp, synthetic construct
  misc_feature 1..186: note = Description of Artificial Sequence: Synthetic coding sequence
  source 1..186: mol_type = other DNA
atgcagctgaagatcatgcccaagaagaagcggctgagcgccggccgggttccattaatcttattcctgtgccaaatgataagcgctcttgaggttcctctggaccctaagttgctggaggatctggtgcagccccccaccattacgcagcagtccccaaaggactacatcatcgacccaaggtag

SEQ ID NO: 197098 - DNA, 321 bp, synthetic construct
  misc_feature 1..321: note = Description of Artificial Sequence: Synthetic coding sequence
  source 1..321: mol_type = other DNA
atgcagctgaagatcatgcccaagaagaagcggctgagcgccggcagggtacctctcattttgttcctctgtcaaatgatttcagcccttgaagtgcccttggaccttgtccagccacccactattactcaacagtcacctaaggattatattatcgacccccgcgagaacatcgtgatccaatgtgaggctaaggggaaacctccgccatcatttagttggacgagaaacggtacccattttgatatcgataaagatcctctagttactatgaagcccggaaccggaaccctgattattaacatcatgagcgagggatag

SEQ ID NO: 197099 - DNA, 3915 bp, synthetic construct
  misc_feature 1..3915: note = Description of Artificial Sequence: Synthetic coding sequence
  source 1..3915: mol_type = other DNA
atgcagctgaagatcatgcccaagaagaagcggctgagcgccggcagggttcccctcatcctgttcttgtgtcagatgatctcggccctggaagtaccactggatcccaaactgcttgaagacttggtgcagccccccacgatcacccagcaatcccccaaggattatattatcgatccacgggagaacattgtgatccagtgcgaggcaaaagggaagccaccaccctcttttagctggacacgaaatggcacccatttcgacatagacaaagacccattagtgactatgaagccaggcacgggaacactgatcatcaatatcatgtcagaggggaaggctgagacctacgaaggggtgtatcaatgcaccgcaaggaacgaacggggcgccgccgtgtctaataatattgtggtgagacccagtcgtagccctctgtggaccaaggaaaagctcgagcctatcactctacagtccgggcagtccttggtccttccctgtagaccacctatcggactgcccccgccaattattttttggatggacaactccttccagagactgccacagagtgaaagagtcagccaagggttgaacggagatctgtacttctccaatgttctccccgaagatacacgcgaggactacatttgttatgctcggttcaatcacacccagaccattcagcagaaacagccgatttcagttaaggtgatatctgtggacgaacttaacgacactattgccgccaacttgagtgataccgagttttacggcgctaagtcctcccgcgagaggcctcccacttttctgacgcccgaagggaacgcctcaaacaaggaagaactgaggggcaacgtgctaagtcttgagtgcatcgccgaaggtctcccaactcccattatctactgggcgaaagaggacggaatgctccccaaaaacaggaccgtttacaagaatttcgaaaagaccttgcaaattatccacgtttcagaggctgatagtggcaactaccagtgcatcgctaagaacgctcttggtgctatccaccacaccatttctgtgcgagttaaagctgcaccttattggatcaccgcaccacagaatctggtgctgtcgccgggagaggatggcaccctgatttgcagagccaacggcaaccccaagccgcggatttcctggctgaccaacggagtgcccatcgagattgcacctgatgacccctcacgtaaaatcgacggagacactataatttttagcaacgtccaggaaaggtcttctgccgtatatcaatgcaacgctagtaacgaatacggatatctgttggccaacgcctttgtgaacgtcctcgccgagccccctcgaatcctaacacctgctaatactctgtaccaggtcatagctaatcgcccggctctcctagactgtgctttttttggttctcccctgccgactatcgagtggttcaaaggcgccaagggttctgccttacatgaagacatatacgtcctgcatgaaaatggcaccctggaaatccccgtggcccaaaaagattccactgggacttacacctgtgtggcgcggaataaactcgggatggccaagaatgaagtgcacctggagatcaaagacccgacctggatcgtgaagcagcctgagtacgcagtcgttcagcgaggaagcatggtgtcgtttgaatgcaaggtgaagcacgaccacactctgtccctgactgttctctggcttaaggacaaccgggaactcccctcagacgagcggtttacagtggataaagatcaccttgttgtggctgatgtgtctgacgatgatagcggaacctatacatgcgtagccaacactacacttgactcggttagcgcaagcgctgtactgtccgtggtcgcacccaccccaacccccgccccagtttacgatgtgcccaacccaccattcgaccttgagctcaccgaccagctggacaagtctgtacagctctcctggacaccaggggacgataacaacagccctataacaaaattcattatcgaatatgaggacgccatgcacaaaccaggactctggcatcaccagacggaggtctccggcacccagacaacagcccagctgaagttaagtccatacgtgaactactcctttagggtaatggctgtgaattcaatcggtaagtcccttccatcagaggcttcagaacaatacttgaccaaggcctctgagcctgataagaatcctaccgccgtagagggccttggctcagaaccagacaatttagtgatcacttggaaaccgctaaatggattcgaatccaatggccccggactccagtacaaggtaagttggagacagaaggatggagacgatgagtggactagcgtggtggtcgctaacgtaagcaagtatattgtgtctgggactcctactttcgttccctatctcatcaaagtgcaggctctgaacgacatgggctttgctccagagcccgctgtcgtgatggggcactcaggagaagacctgcccatggtggctcccggtaacgtgcgcgtcaatgtcgttaactccaccttagctgaggttcattgggacccagtgccccttaagtcgatccggggacacctgcagggttacaggatctactactggaaaacccagtcttcttcaaagcggaatcgcaggcacattgagaagaaaattctaacattccagggtagtaagacccatggaatgctgcctggtctcgagccttttagtcactatactctaaatgtacgggtagtgaacggtaaaggcgagggcccagcaagccccgatagggttttcaacacgcccgaaggggtgccttccgcaccctcctcactgaaaattgtgaaccctaccctggatagtctcaccttagaatgggatcctccgtcccatccaaacgggattcttacagagtatacattgaaataccaacctattaatagtactcacgaactagggccgctggtggatctgaagatacctgcaaataagacaagatggaccctcaaaaatctaaacttttcaaccagatataaattctatttttatgctcagacttccgccggatcgggtagccagattaccgaagaggccgtcactactgtcgacgaagccgggatcttaccacccgatgtgggtgcaggcaaagtgcaagcagtgaatccccgcattagcaatttgactgctgccgccgcggaaacctatgcaaatatttcatgggagtacgaaggtcccgaacacgtgaacttttatgtagagtatggggtggccggcagcaaagaggagtggaggaaagagatcgtgaacgggtcgagaagttttttcggacttaagggactgatgcccggcacagcttataaagtgcgggtcggtgctgtaggcgacagtggatttgtgtcgtccgaggatgtcttcgagaccggccccgcgatggctagccgccaggtggatattgctacacaaggctggttcatcggtcttatgtgcgcggtggccttgctgatcctgatactgctgatcgtgtgctttatcaggcggaataaaggcgggaagtaccccgtcaaggaaaaggaggacgctcacgcggatcccgaaatccagcccatgaaggaggatgatgggacattcggcgaatactccgatgccgaagatcacaagcccctgaaaaagggttcacggacccccagcgataggacagtgaagaaagaggatagtgacgacagtcttgttgattatggagagggtgttaacggccagttcaacgaggatgggagctttatcggtcaatattccggcaaaaaagagaaggagccggccgagggaaacgaatcaagtgaggccccttctccagttaacgccatgaactctttcgtgtag

SEQ ID NO: 197100 - DNA, 447 bp, synthetic construct
  misc_feature 1..447: note = Description of Artificial Sequence: Synthetic coding sequence
  source 1..447: mol_type = other DNA
atggccagccggcaggtggacatcgccacccagggctggttcatcggtctaatgtgcgcagtcgccctcttgatcctgatactgctgattgtgtgctttatcagaagaaacaaaggtggtaagtatcccgttaaggaaaaagaagatgcccatgctgacccggaaattcaacccatgaaagaggacgatggaacgtttggtgagtatagcgatgcggaagaccataaacctctcaagaaagggagccggacccccagcgaccggacagtgaaaaaagaggatagcgatgatagtctggttgactatggtgaaggcgtgaatgggcagttcaatgaggatggcagcttcatcggacaatacagtggcaagaaggaaaaagaacccgctgaaggaaacgaatcaagtgaggcaccctctcctgttaatgcaatgaatagctttgtttag

SEQ ID NO: 197101 - DNA, 357 bp, synthetic construct
  misc_feature 1..357: note = Description of Artificial Sequence: Synthetic coding sequence
  source 1..357: mol_type = other DNA
atgcagctgaagatcatgcccaagaagaagcggctgagcgccggccgtgtgcctttgatactctttctctgccaaatgatctccgccctcgaagtgcctttggacccgaagctgctagaggatctagtgcagcctcctacgatcacacagcaaagtcccaaggattacattatcgatccacgcgaaaacattgtgatccagtgcgaggccaaggggaagccaccgccgtcttttagctggactcgtaatggaacccattttgacattgataaggaccctttggtgaccatgaaaccaggaactggcactttaataatcaacatcatgagcgaggggaaggctgagacttacgagtag

SEQ ID NO: 197102 - DNA, 2316 bp, synthetic construct
  misc_feature 1..2316: note = Description of Artificial Sequence: Synthetic coding sequence
  source 1..2316: mol_type = other DNA
atgcagctgaagatcatgcccaagaagaagcggctgagcgccggcagggtgcctctcatccttttcctatgccaaatgatttctgccctcgaggtcccattggatcttgtgcagccccccacaataacccagcagagtcccaaagattatattatcgaccctagggagaatatcgtgattcagtgtgaggccaaaggaaagccgccacccagcttctcatggacacgaaatggtactcacttcgatatagacaaagaccccctggtcactatgaaacctggaaccggcactcttatcataaatatcatgtcggaaggcaaggctgaaacgtatgaaggggtgtaccagtgcaccgcacgcaacgagaggggggctgctgtgagcaacaatatcgtggtcaggccatcccgctcacccctgtggacaaaggagaaattggagcctataaccttgcagagtggtcaatctctggtgctaccctgtaggcctcctattggtcttccccctcccataattttctggatggacaactcctttcagagactcccccagtctgagagagtgtcccaaggattgaatggcgacctgtacttctccaacgtcctcccggaggatacgagggaagactatatttgctacgccagattcaatcacactcagacaatccagcaaaaacagcccatttctgtgaaagtgatatctgtggacgagctcaatgacacgatagctgcgaatctgtcagacacggaattttacggagcgaagagctccagggagcgtcccccaacttttctaacgcccgaaggcaatgcttccaacaaggaagagctgcggggcaatgtattaagcctggagtgcattgccgaagggctgcccaccccaattatatattgggcgaaagaggacggtatgctgcccaaaaacagaacagtctacaaaaacttcgagaaaaccctgcaaattatccatgtgtcagaagccgattctgggaattaccaatgtatcgcaaagaatgccctgggggcgatacaccacaccatctccgtgcgggtgaaggcggccccttactggattaccgcaccacaaaacttggtactctcgcctggggaggatggcacactcatatgcagggctaacggcaatccaaagccccgaatctcttggctgactaatggagttccgatcgaaatcgcaccagacgacccaagcaggaaaattgatggggataccataattttcagtaacgtccaggaacggtcatctgcagtctatcagtgcaacgcctcaaatgagtacggatacttgttggctaacgcctttgttaacgtgctcgcagagccccccagaattctgacacctgccaatacactttatcaggtgattgccaaccggccggccctgctagactgcgccttcttcggctcacccctccccacgatcgagtggtttaagggagctaagggctctgccctgcatgaggatatctacgttctgcatgagaatggaacactggagattccagtcgcacagaaagactcaacaggaacatacacttgcgtggcccgaaataaacttggaatggccaagaacgaggtgcacctcgagatcaaggacccaacctggatcgtgaagcaaccggagtatgccgtcgtgcagagaggctcaatggtttcatttgagtgtaaggtcaaacacgaccatacactgtccctgacagtgctgtggctgaaggataatagggagctaccgagcgacgaacgctttacagtcgacaaagaccacctagtggtagccgatgtcagcgacgatgacagtggaacgtacacttgtgtcgcaaatactaccctggatagtgtctccgctagcgcggtcctcagcgttgttgacgttccaaatcccccgttcgatctggagctgacagaccaactcgacaagtccgtccagctgtcgtggacaccaggagacgataataactccccgatcacaaagtttattatcgaatacgaagatgcaatgcataagcccggcctgtggcatcaccaaaccgaggtctcaggaacccaaactacagcccagctgaagttaagcccctatgtgaactatagctttagggtgatggccgtcaactcgattggcaagtccctgccttccgaggcctccgaacagtatttaacgaaggcttccgaaccagacaagaatccaaccgccgtggagggactgggatctgaaccagataacctcgtaatcacatggaagccactcaacgggtttgaatcaaatggtccgggcctccagacaagtactgccagtttctag

SEQ ID NO: 197103 - DNA, 321 bp, synthetic construct
  misc_feature 1..321: note = Description of Artificial Sequence: Synthetic coding sequence
  source 1..321: mol_type = other DNA
atgcagctgaagatcatgcccaagaagaagcggctgagcgccggccgcgttcctctgatcttgtttctctgccagatgataagcgccctggaggtgccactggatttagtacagccaccgacaatcacccagcagtcccccaaagattacataatcgatccgcgggagaacatcgtgatccagtgtgaggccaaaggtaagccgccccccagcttctcatggaccaggaatggaacccacttcgatattgacaaggaccctctggtgactatgaaaccaggcacaggaaccctgatcatcaatattatgagtgaggggtag

SEQ ID NO: 197104 - DNA, 3462 bp, synthetic construct
  misc_feature 1..3462: note = Description of Artificial Sequence: Synthetic coding sequence
  source 1..3462: mol_type = other DNA
atgcagctgaagatcatgcccaagaagaagcggctgagcgccggcagggtccccttaattctattcctgtgccagatgatttccgcactggaagtaccactggaccagaaaagcacggaagtgatggtacagccccccactattacccaacagtctcccaaagactatataatcgatccccgagagaatatcgttatccagtgcgaggcgaaagggaagccaccgccatccttctcctggacgcgaaacgggacgcactttgatattgataaagatccgctggtgactatgaaaccgggcacaggcacactgatcatcaatatcatgtcggaaggtaaggctgagacctacgagggagtctaccagtgcaccgcacgaaatgaaagaggcgcagccgtgtccaataacatcgtagtgcgcccaagtagaagcccactgtggactaaagaaaagctggaaccgatcactttgcaatccggccagagtttagttttgccttgtcgccctcccatcggcctgccccccccaattatcttttggatggataattcgtttcagcgtctacctcagtccgagcgtgtgtctcaaggactcaatggggatctctatttctcaaacgtgctcccagaggatacccgtgaagattatatctgctacgcaagattcaatcatacccagacaatccagcaaaaacagcccatcagcgtaaaagtcatttccgtcgatgaactcaacgataccatagcagccaacctttctgatactgagttctacggggccaaatcaagcagggagaggccacctacgtttctaactccagagggcaatgcatctaacaaagaggaactgagggggaatgttctcagccttgagtgcatagccgagggtttgcccacgccaattatctactgggcgaaggaggatggcatgcttcccaaaaacagaactgtttataagaacttcgagaagacactacagattattcatgtctctgaggcggattcaggtaattaccagtgtattgctaaaaatgccctcggagccatccatcatactatctctgtgagagtgaaggcagctccatattggattacagccccgcagaacctagtgctatctcccggggaggacggcacactaatctgtagggccaacggaaatcctaagcctagaatctcctggcttaccaatggcgtgcctatcgaaatagcaccagatgacccaagccgcaaaatcgatggcgacaccataatcttctcaaacgtccaggaacgctccagcgcagtctaccagtgtaatgcctcaaacgagtatgggtacctgcttgcgaatgcattcgtgaacgttctggctgaacctccacggatcctcaccccagctaacaccctatatcaggttatcgctaatcgccctgcacttcttgactgcgccttttttggatcacctctccccacaatcgagtggtttaagggagctaagggctcagctttacatgaagacatctatgtgctgcacgaaaatggcactctggagatccccgtggctcaaaaggactcaacaggaacctacacctgtgtggctaggaacaaattgggtatggctaagaatgaagtccacctagagattaaggaccccacttggattgtgaagcagcccgagtatgccgtagtgcagagaggaagcatggtgtcatttgagtgtaaggtgaagcacgaccatacactttctcttactgtcctttggctgaaggataatagagagctccctagcgatgaacgtttcaccgtggacaaagatcacttggtcgtagctgacgtttctgacgacgacagcggcacctatacttgcgtagctaatacgactctcgattcagtgtccgccagcgcagttctgtctgttgtcgccccaacgcctacacctgcacctgtatatgatgtccccaatccgcctttcgatctcgagctaacagatcagctcgataaatctgtccagttgagctggacaccaggcgacgacaataattcccccatcaccaagttcatcattgagtatgaggacgccatgcacaagcccggcctctggcatcaccagaccgaggtttcgggcactcagactaccgctcagctgaagctctctccatacgtgaattactccttcagagtcatggccgtcaattccattggcaagtcgctcccctctgaagccagtgagcagtatctgaccaaggccagcgaacctgacaagaatcccaccgcagtcgaggggctgggctccgagcccgacaacttagtcatcacctggaagccgctaaatggcttcgaatccaacgggccaggtctgcagtacaaagtgtcctggcgtcagaaagacggagatgacgagtggaccagcgtcgtcgtcgcgaatgtgagcaagtatatcgtgtctggcacgccaacctttgttccctacctgatcaaggtgcaggccctcaacgatatgggcttcgctcctgagcccgctgtcgtgatgggccattcaggagaggacttgcctatggtggctccaggcaatgtgcgcgttaatgtggtcaacagcaccctcgccgaagtgcactgggatcccgtaccactcaagagtattcgcggacatctacaggggtaccgtatctattattggaagacccaatcctcctccaagagaaacagacggcatattgaaaaaaagattctgactttccagggttccaagacgcacggcatgctgcccggtctcgagccattcagccactacacgttgaatgtgcgtgtcgtcaatggtaaaggagaagggccagcgtccccagatcgcgtgtttaatactcctgagggggttccttctgcccccagctcactcaagatagtgaaccccaccttggacagtctgaccctggaatgggacccaccatcccatccaaacggcatcttgacggagtacaccttgaaatatcagcccatcaattccactcacgaactgggacctttagttgacctgaagataccggccaataagactagatggacgctgaagaacctcaacttttctacgcgttacaagttttacttctatgcacagacaagtgccgggagtggatcccagattacagaagaagccgtcacaaccgttgatgaggctgggatcctgccgcctgacgttggagcgggcaaagccatggcctcaaggcaggtggatatcgcaactcagggctggttcataggacttatgtgcgctgtggcactcctgattctcatacttttgattgtctgcttcattcgcagaaataagggtggtaagtaccctgtgaaggagaaagaagacgcgcatgccgaccctgagattcaacccatgaaggaggacgacggcacatttggagagtactccgacgctgaggaccacaagccgttgaagaaagggtcccggactcccagtgacaggactgtttag

SEQ ID NO: 197105 - DNA, 681 bp, synthetic construct
  misc_feature 1..681: note = Description of Artificial Sequence: Synthetic coding sequence
  source 1..681: mol_type = other DNA
atgcaggtgcacctgaccgtgcaggtgccccccaagatctacgacatctcaaacgatatgaccgtcaatgaaggtacgaatgtcacacttacttgcctggccacggggaaaccagagccgtcaattagctggcggcacatctccccgtccgccaagccatttgagaacgggcagtaccttgatatttacggcatcacacgtgaccaggctggcgagtatgagtgtagcgccgaaaacgatgttagcttcccggacgtacgaaaagtgaaggttgtcgtgaattttgcaccaactattcaggaaattaaatccgggaccgttacacctgggagatctggccttatacgttgtgaaggagccggcgttccaccaccagccttcgaatggtacaaaggggaaaaaaagttgttcaatggccagcaaggcattattatccagaacttctcaacaagatcaatcttgacagtaacgaacgtcacccaggagcattttggcaactacacctgcgtggctgcaaataagctaggaaccaccaacgcaagcctgcctctcaatcctccctccactgcccagtacgggatcactggatctgccgacgtcctgtttagctgttggtacctggtgctgacattgtctagtttcacaagcattttctacctcaagaacgcgatcctgcagtag

SEQ ID NO: 197106 - DNA, 1065 bp, synthetic construct
  misc_feature 1..1065: note = Description of Artificial Sequence: Synthetic coding sequence
  source 1..1065: mol_type = other DNA
atggacatgatgctgctggtgcagggcgcctgctgcagcaaccagtggcttgctgccgtgcttctctccctgtgttgcctgctcccatcatgcttgcctgcaggtcagagcgtcgactttccttgggcggccgtggataacatgatggtccggaaaggtgacacagctgtgctccgctgctatctagaggacggggctagcaaaggcgcctggctcaaccgcagctcaatcatcttcgccgggggtgataaatggagcgttgacccccgagtgagcatctcaacacttaataagcgggactacagtctccaaatccagaacgtggacgtgacggacgatggaccctacacgtgttcggtccagacccagcatacccctcggaccatgcaggtacacctcacggtgcaagtacctccaaagatttatgacatttcgaacgatatgacagtaaacgaaggcacaaatgtcacattgacatgcctggcaaccggaaaacccgaaccttccatcagttggcgacatatctccccctcagcaaagccttttgagaatgggcagtacctggacatctatgggattacgagggatcaggctggggaatatgaatgctccgccgaaaacgatgtttccttccctgatgtacgtaaggtgaaagtcgtcgtgaatttcgcaccaacgattcaagagattaagtccggtacagttactccaggcaggtcgggccttataaggtgtgaaggtgctggagtgccaccgcccgcttttgagtggtacaaaggcgaaaaaaagctcttcaacggccagcagggcatcattatccagaacttcagcacacggtcaattctaacagtgaccaacgttacccaggaacatttcggaaattacacctgcgtcgctgccaacaaattgggaacgaccaacgcatccttacctctaaatcccccctctacggctcagtacggcatcacggggagtgctgatgtgctcttcagctgctggtacctcgtcttaacactttcatcctttacgtctatcttctacctaaagaacgcaatccttcagtag

SEQ ID NO: 197107 - DNA, 927 bp, synthetic construct
  misc_feature 1..927: note = Description of Artificial Sequence: Synthetic coding sequence
  source 1..927: mol_type = other DNA
atgatgctgctggtgcagggcgcctgctgcagcaaccagtggctggctgcagttttgctttctttgtgctgtttacttccctcatgtctgcccgctgggcaaagtgtagacttcccttgggcagccgtcgataacatgatggtgcgaaaaggagatacagcagttcttcggtgttatcttgaagatggcgcctcaaagggagcctggctgaaccggtcgtcaatcatatttgctggaggggataaatggagtgtagatccacgggtgtctattagcacacttaataaacgggactactccctccagattcagaacgtcgacgtgaccgacgacggtccttatacctgttccgtccagacccagcacacacctaggaccatgcaagtgcacctgaccgtacaggtgccaccaaaaatctatgatatatctaacgatatgaccgttaatgagggcactaatgttacgcttacatgtctcgcaaccggcaaacctgagccttcgatttcctggaggcacatatcgccatcagtggctcctacaatccaggagataaaaagcggtaccgttacaccaggcaggtctggcctcattcgttgtgagggagctggggtccccccaccagcctttgaatggtataaaggtgaaaaaaaactgtttaatggacaacagggcatcatcatccaaaactttagtactagatctattctaactgttaccaacgtgacccaggaacatttcggtaattacacatgcgttgctgctaataagctgggtacaacgaacgctagcctgcctctcaatcctccttccaccgcccaatatggaatcacaggttctgctgatgtactgttctcatgctggtacctggtactcactctgagcagctttacctcgatcttctacctgaagaacgctattctgcagtag

SEQ ID NO: 197108 - DNA, 2133 bp, synthetic construct
  misc_feature 1..2133: note = Description of Artificial Sequence: Synthetic coding sequence
  source 1..2133: mol_type = other DNA
atggagacccgggagagcgaggacctggagaagacccggcggaagtccgcctccgaccagtggaatactgataacgaaccagcgaaggtcaagcccgaactgctcccagaaaaggaagagacctctcaggcagaccaagacatccaggacaaagaaccgcactgccacattccaataaaacgcaatagtatcttcaacaggtctatccggcgaaagtccaaggccaaggcgcgcgacaatcctgagcggaacgctagctgccttgccgactctcaggataatggaaaaagtgtgaatgaacctctgactcttaatattccctggagcaggatgccgccctgcaggactgctatgcagacagaccctggcgcacaagagatgtccgagagtagttctacccctggcaatggagccacgccagaggagtggccagccctggccgactcgccaaccacgttgactgaagccctgcgaatgatccatccgataccagccgattcatggcggaacctgattgaacagattggcctgctttaccaggagtaccgtgataaatcaacactgcaggaaatcgagactcgacgccagcaagacgcggaaattgaagacaacactaatggatctcctgcctcagaggacactccagaggaggaagaggaggaagaagaggaagaagagccagcatcgccacccgaacgtaagacgctgcctcagatctgcctgctgtccaatccccacagtagatttaatctatggcaagacttgccagaaattcgaagctccggagtcctggagattctgcagcccgaggagattaagctgcaggaggctatgttcgaactggtgacctccgaagcgagctattataagagcctgaacctccttgtgagccacttcatggagaatgagcggatccgtaagatcttacacccctccgaggctcacattctattcagcaacgttctcgacgtcttagccgtgagcgaacggtttctgcttgagttagagcacaggatggaagaaaatatcgttatctctgacgtttgcgatatcgtctataggtatgccgcagaccactttagtgtatacataacctacgtctccaaccaaacctaccaggaaagaacgtataaacagctgttgcaggagaaggccgcttttcgcgagttaatcgcacagctggagctggatcccaaatgcaggggcctgccattctcaagcttcctgatactgcctttccaaaggatcaccagattgaaacttctggtgcaaaacattttaaagcgcgtcgaggagaggagcgaacgtgagtgcacagccctggatgcacacaaagaactcgaaatggttgtgaaagcctgcaatgaaggcgtgagaaaaatgtctcggacagaacagatgatatcaattcagaagaagatggagttcaagattaaatctgtccctatcatcagccactctcggtggctgttaaagcagggcgagttgcagcagatgtccgggccaaagactagcaggaccctgagaacgaaaaagttattccacgagatttatctgtttctatttaatgatctgttggtcatctgtcgacagattcccggggataagtaccaggtgttcgatagtgctccaaggggattgctaagggtcgaggaacttgaagatcaggggcagactctggctaacgtgtttatccttcggctgctggaaaatgcagacgatcgcgaggctacgtatatgctgaaagcctcctcacagagcgagatgaagcggtggatgacgtcccttgccccaaataggcgcactaagttcgtatcttttacatctcggctgctggattgtccccaagtgcagtgcgttcatccttacgtggctcagcagcctgacgaacttacattggaattggcagacatacttaacatcctggacaagacagacgacggctggattttcggtgaacgactccacgaccaggagaggggttggtttccaagcagtatgactgaagaaattctaaatcctaagatccgcagccagaatctaaaggagtgctttagagtgcataagatggatgaccctcagaggagccagaacaaagatagaaggaaactgggatccaggaatagacagtag

SEQ ID NO: 197109 - DNA, 1857 bp, synthetic construct
  misc_feature 1..1857: note = Description of Artificial Sequence: Synthetic coding sequence
  source 1..1857: mol_type = other DNA
atggagctgctggccgccgccttcagcgccgcctgcgccgtggaccatgacagctccaccagcgaatcggacgctcgggactccgcagccggccatctcccgggaagcgaatcttcttctacccctgggaatggcgctacaccggaagagtggcccgctctggcggactctcccaccaccttgactgaggcacttcggatgatccatcccattcccgccgatagctggcgcaaccttatcgaacaaattggcttgctgtatcaggagtatcgagataagagtactttacaggagattgaaacaaggaggcagcaggatgccgaaattgaagataacactaacggttcccctgcaagcgaggatacgcccgaggaagaggaggaagaggaagaagaggaggagcctgcctctccccccgaacggaagacactgccgcaaatctgtttgttgagcaaccctcatagccgtttcaatctttggcaggacctgcctgagattaggtcatctggggtactcgaaatattgcagccagaagagataaagctgcaagaggctatgtttgagcttgtgacctccgaggcctcatattataaatccctgaacctgctcgtgtctcacttcatggagaacgagcgcatcaggaaaatcctgcacccaagtgaagcccatattctgttcagtaacgtgctggacgttctcgcagttagcgaacgcttcctgctggaacttgaacatcggatggaagaaaacattgtcatttctgatgtgtgcgacattgtataccggtatgccgccgaccacttcagcgtttacattacttatgtgagcaaccagacataccaggaacgcacatataaacagcttttgcaagagaaagctgcctttagggagctgatcgcccagctggagctggacccaaaatgtcggggacttccttttagtagtttcttaatcctgcctttccaaaggatcactagactaaagctcctagtacagaacattctaaaacgagtggaggagcggagtgaacgggagtgtactgcattggatgcccacaaggagctcgaaatggttgttaaggcctgtaacgaaggggtaaggaagatgtctagaacagaacagatgatcagtatccaaaaaaagatggagttcaagattaaatctgtcccaataatcagtcatagccggtggctgcttaagcaaggcgaactgcagcaaatgagcggacccaagacaagtcggacgctgagaaccaagaagcttttccatgagatatacctctttttgtttaacgatttgcttgtaatctgcagacagatcccgggggataagtaccaggtgtttgattcagctccccgggggctcctccgggttgaagagttggaagaccaagggcaaaccttggccaatgtgtttatcctccggcttctggaaaacgcagatgatagggaggccacatatatgctgaaggcgtcctcccaatcagagatgaaacgttggatgacatctctggcccctaaccggcggacaaaattcgtgagttttacttcccggctcttggactgtccacaggtccagtgtgtacacccttacgtagcccagcagcccgatgaactaacattggaactggccgacatccttaatatcttggataaaacagacgacgggtggattttcggcgaacggctgcatgaccaggagcgaggatggtttccaagctcaatgacagaggagatactgaaccccaagattaggagtcagaatctgaaggagtgtttccgcgtgcacaaaatggatgatcctcaacgctcccagaacaaagatcgaaggaagctcggcagccgtaacaggcaatag

SEQ ID NO: 197110 - DNA, 717 bp, synthetic construct
  misc_feature 1..717: note = Description of Artificial Sequence: Synthetic coding sequence
  source 1..717: mol_type = other DNA
atggagctgctggccgccgccttcagcgccgcctgcgccgtggaccatgattcatctaccagtgaaagcgacgcaagagacagtgcagcaggacacctgcctggctccgagagctcgtccacccctgggaatggtgccacccccgaagaatggcctgccctcgcagacagtcccaccaccctgactgaagccttacggatgatacacccgatccctgcggatagttggagaaacttgatcgaacagatagggctgctgtaccaggaatacagggacaagtcaacactgcaagaaatcgagactcgtaggcagcaggacgcggagattgaggacaacaccaatggctctcctgcatccgaggatacgcccgaggaggaagaggaagaggaggaagaagaagaacctgcctctcctcctgagcgaaagacgctgcctcaaatatgcctgctgtcaaatcctcactcccgctttaatctttggcaggatctgcccgagatccgtagctcaggtgtgttggagattctccaacctgaggaaatcaagctgcaggaggccatgttcgagcttgtgaccagtgaggcatcttattacaaaagtctgaacctcctggtttctcacttcatggagaatgagagaattcggaagattctgcatccgtcagaggcccatattctgttctctaatgttctggatgtgctcgcggtatctgagcggtag

SEQ ID NO: 197111 - DNA, 1302 bp, synthetic construct
  misc_feature 1..1302: note = Description of Artificial Sequence: Synthetic coding sequence
  source 1..1302: mol_type = other DNA
atgttcgagctggtgaccagcgaggccagctactacaagagcctgaatctcctggtgtcccactttatggagaacgagagaattcgcaagatacttcatccttccgaggcacacattctgttctccaacgtcctggatgtgctagccgtgtccgagaggtttctcctcgaattagaacatagaatggaagaaaatatcgtgatctccgatgtgtgtgatatagtgtaccgatacgcagccgaccatttctcggtctacatcacatatgtgagtaatcaaacatatcaggagagaacttacaagcaattgctgcaggaaaaggccgcgtttagggagctcatcgcccagctggagctggaccccaagtgcagaggccttcccttttcctctttcttaattctgccctttcagagaatcacaaggttaaagctcttggtccagaacatcctgaagagagtggaagagcggtctgagagagagtgcaccgcactcgatgcccataaagagctggaaatggtggtcaaggcctgcaatgaaggagtcaggaagatgtcccggacagaacagatgatatcaattcagaagaagatggagtttaagattaagtctgtgcctattatctcacactctcgctggcttttgaaacagggagaactccagcaaatgtccggcccaaaaacatcgcgcaccttaaggacaaaaaaactcttccacgaaatatatctcttcttatttaatgatttgctggtgatttgtcgccagatccctggggacaagtatcaggtgtttgacagcgcccccagaggtctgctgcgggttgaggagctggaagatcagggtcaaaccttagctaacgtgttcatccttcgcctgctggagaacgccgacgatagagaggccacttatatgctgaaagcctcttcacaatctgagatgaaaaggtggatgacaagtcttgcccctaaccgacgaactaagtttgtctctttcacatctaggcttctggattgtcctcaagtccaatgtgtgcatccttatgtcgcccagcagccagatgaactaaccctggaacttgccgatatcctgaatattctcgacaagacagacgatggttggatttttggcgagcgccttcatgatcaggagagaggctggttccccagcagcatgacagaggaaattctgaaccccaagattcgaagccagaatctgaaagaatgtttccgggtccacaagatggacgaccctcaacgctcccagaacaaggacaggcgcaaattgggaagtagaaatagacagtag

SEQ ID NO: 197112 - DNA, 1803 bp, synthetic construct
  misc_feature 1..1803: note = Description of Artificial Sequence: Synthetic coding sequence
  source 1..1803: mol_type = other DNA
atgcccccctgccggaccgccatgcagaccgaccccggcgcccaggagatgtctgagagcagcagcacccctggtaacggcgctactcccgaggaatggccagctctggccgattctccaacaaccctgaccgaggctctgaggatgatccatcctatccctgctgatagctggaggaatctgatcgagcaaattgggctgctctaccaggagtaccgagacaaatccactctgcaggaaatcgaaacccggagacagcaggacgcggaaattgaggacaacaccaacggaagccccgcttctgaggacaccccggaagaggaggaggaagaggaggaggaagaagagcctgccagtccacccgagcggaaaacgttgccccagatttgccttttatctaatccccacagtagattcaacttatggcaggacctccccgagattaggagctctggagtcttggaaatcctacagcctgaggagatcaaactgcaggaggctatgttcgagcttgtcactagcgaagcttcctactataaatccctcaatctgttagtctcccattttatggaaaatgagaggatacgcaaaatcctacatccatctgaggctcatatacttttttccaacgtgctggatgtcctggcagtgagtgagcgattcctccttgaactggagcataggatggaggaaaatattgttattagcgacgtttgcgacatcgtctatcggtatgctgccgatcactttagtgtttatattacctatgtttccaatcagacctatcaggaaaggacgtacaaacagttgctccaagagaaagccgcctttagagagctgatcgctcagctggagcttgacccgaagtgtcgcgggctcccgttcagctccttcttaatcctgccattccaaagaattactaggctcaaactgctcgtgcagaatatcctgaagagggtagaggaacggagcgagcgcgaatgtaccgccttagatgcacacaaggagctcgaaatggtcgtcaaggcgtgtaacgagggggtaagaaagatgtcgcggacagagcaaatgatctcgatacagaaaaaaatggagtttaaaattaaatcagtgcccatcatctctcatagtaggtggcttctgaagcagggagagctgcaacagatgtccggacctaagacctcgcggactctccgcaccaagaaattgttccacgaaatctacctgttcctttttaacgacctgctcgtaatatgccggcagatcccaggagataagtatcaggttttcgactcagccccaagaggactcctccgagtggaagagctggaggatcagggtcagacccttgcaaacgtgtttatcctgcggttgcttgagaacgctgacgatcgggaggcaacatacatgctgaaggcctcatctcagtctgagatgaaacgttggatgacatcactcgcccctaaccgccgaaccaaatttgtcagttttaccagtagattgttggactgccctcaggtgcagtgtgtgcatccatatgtcgcgcagcagccggacgagctgaccttagagctagccgatatattgaacattctagacaagacagacgacgggtggatttttggagagcgactgcatgatcaggaaaggggttggtttcccagttccatgactgaggagattctcaaccccaagatccgttctcagaatttaaaggagtgtttcagagtccataagatggacgacccacagagatcccagaataaagacagacggaaactgggctcaaggaacagacagtag

SEQ ID NO: 197113 - DNA, 705 bp, synthetic construct
  misc_feature 1..705: note = Description of Artificial Sequence: Synthetic coding sequence
  source 1..705: mol_type = other DNA
atgaccggcagcagcgtgttcgactacatccaccccggcgaccactctgaggtgcttgagcagctcggcttaaggactcctacgcctggcccgcccacccctccgtctgtgtcttcgtcatcttcctcttcgtcctccctcgccgatactcctgagatcgaggcatcactgacaaaggttcctccaagttcactggttcaggaacgatcatttttcgtgcgcatgaagtcaactctcacaaaacgaggattgcatgtgaaagcctccggttataaggtgatccacgtgactgggaggctgcgcgctcatgctctgggcctcgtggccctgggccataccctcccgcctgctcctctggcggagctgccgctgcacgggcacatgatagtgtttcgcctttcactgggattgactattttggcatgcgaatctagggtatccgaccacatggatctgggaccctccgaactagttgggcgcagctgttatcaattcgtgcacggccaggacgcaaccaggatcagacagtcgcacgtcgacagctgcagaggcttgcgagtggcagcagtgtgtgggcattccggctgggaacgagaggagccccgcggcgcaccctgtgccctgggacagcctcgagcccagccttctaggggttggcctaactcttttggctgtctgcctgcctcatctcaaagggggctttag

SEQ ID NO: 197114 - DNA, 1773 bp, synthetic construct
  misc_feature 1..1773: note = Description of Artificial Sequence: Synthetic coding sequence
  source 1..1773: mol_type = other DNA
atggccgccccctaccccggcagcggcggcggcagcgaggtgaagtgcgtaggagggaggggcgccagcgttccctgggactttctgccgggtctgatggtcaaagccccgtcaggcccgtgccttcaagctcaacggaaagaaaagtcccgtaacgccgctcgtagtcgccgcggcaaggagaatctcgaattttttgagcttgccaaactgttgcctctccccggggcaatctcaagtcagctcgacaaagcttccattgtgcgattgagtgtgacctatctgagactccgccgttttgccgcccttggcgcgccgccatggggactaagagctgctggacccccagccggccttgcccccggccgccgaggtcctgcagcactcgtttcggaagtgttcgaacagcacctgggcggacatatcctccagagcctggatggcttcgtgtttgctctcaatcaggagggcaaattcctttatatatcagagactgtgtcgatctatctgggcttatctcaagttgagatgacgggcagctctgtgttcgattacatccatccgggggatcattctgaggttcttgagcagctggggctgcgcactccgacacctgggccacccactccacctagcgtcagctcaagctcttcctcatccagctctctggcagacaccccagaaatcgaagccagcctcacaaaagtccccccgtcctcgctggtgcaggaaagatcttttttcgtccgcatgaaatctactctcactaaacgcggactacacgtcaaggccagcggctacaaagtgatccacgtgacaggtaggttgagagcccacgccctgggtctcgtggcattgggacacaccttacctcccgcccccctggcggagctcccactccatggacatatgattgtctttcgacttagtctcggactaacaatactggcctgtgaaagtcgggtgagcgatcacatggacctcggccccagcgagctggtgggcagatcttgttaccaatttgttcatggacaagacgccaccagaatccgccaatctcacgttgatctgcttgataagggccaagtaatgaccggttattatcgctggctgcagcgggctggcggttttgtgtggctccagagcgtggccacagttgcaggctcaggaaaaagtcccggtgaacatcatgtgctttgggtgtctcacgtcctgagtcaggccgaaggcggccagacacctttagacgctttccagctgccagcatccgttgcttgtgaagaggcgtctagccccggccccgagcccacagagcccgaaccccccacagaagggaaacaggcagcacctgcagaaaatgaggccccccagacccaagggaaacgcatcaaagtggaacccggccctcgagaaacaaaaggcagcgaagacagcggagatgaagatcctagtagtcatccagccacgccacggcccgagttcacgagtgtcattcgggctggcgtgttgaagcaggacccggttaggccctggggtctggcaccccccggtgacccaccgcccacactgttgcatgcagggtttctgcccccagtggttcgcgggctctgtacgcccgggactatccggtacgggcctgcagaattggggctggtctatccccacttgcaaagactgggacctggacctgcactgcctgaggccttctacccccccctggggctcccgtatcccggcccagcaggcacaaggctgcccaggaagggagactag

SEQ ID NO: 197115 - DNA, 2475 bp, synthetic construct
  misc_feature 1..2475: note = Description of Artificial Sequence: Synthetic coding sequence
  source 1..2475: mol_type = other DNA
atggacgaggacgagaaggaccgggccaagcgggccagccggaacaagtcagagaagaaaaggcgcgaccagttcaatgttctgatcaaggaactatcttccatgcttcctggaaacacgaggaaaatggataaaaccactgttctcgagaaagtgatcggattccttcagaaacacaatgaagtatctgctcagacagagatttgcgacattcagcaggactggaaaccaagctttttatcaaatgaagaattcacccagctgatgctggaggcccttgacggcttcattattgcagtcacaacagacggctccattatatatgtcagcgacagtatcacaccactgctaggacaccttcccagcgatgtcatggatcagaacctgctgaattttctgcccgagcaagagcactcagaagtgtacaagatcctttcaagccatatgttggtgaccgatagcccttctccagagtatctgaagagtgatagcgatttagaattttactgccatctgttacgggggagtctgaaccccaaagaattcccaacatacgaatatattaagtttgtggggaacttcaggagctacaacaatgtccctagcccaagctgtaacggcttcgataacacattatctcgtccctgccgggtgcccctgggtaaagaagtgtgcttcatagccactgttagactggctacacctcagttcctcaaggaaatgtgtattgtagacgagcccctggaggagttcacaagcagacacagccttgagtggaagttcttgttcttagaccaccgggcaccacccataataggatacctgccatttgaagtgcttggcacgagtggttacgattactaccacatcgacgacctggagctcttggcaagatgccaccagcacctaatgcaattcggtaagggcaaatcttgttgttacagatttttgacaaaaggacagcaatggatctggctgcagacgcactattacattacctaccatcagtggaattccaagcctgaatttattgtctgcacccacagcgtcgttagttacgccgacgtgcgagtcgagcgtcgtcaggagctcgcgctcgaagaccccccatctgaggcccttcactcctcggcactcaaggataaaggtagctctcttgagccaaggcagcacttcaatactctcgacgtgggggcctcgggtctcaatacaagtcacagtccatctgcttcctcaagatcaagtcataagtcatcccacacggcgatgtcggaaccgaccagcacaccaactaagctaatggctgaggcaagcacccctgccctcccccgctctgctacactgccgcaggaattaccagtgccgggcctgtcccaggcagccacgatgcctgcgccattgccaagtccctcatcatgcgacctgacacaacagcttctgccacagactgtgctgcagtccacaccagcgcccatggctcagtttagcgcacagttcagtatgtttcaaaccattaaagaccagctggagcaacggaccagaatcctgcaagcaaatatacgctggcagcaggaagagttacataagatccaggagcaactgtgtctggtccaagatagtaatgtgcaaatgttcctccagcagcccgccgttagcttgtctttttcatcaacccagcgccccgaagctcagcagcagttacagcagcgctccgccgcagtgacacagccccagctaggcgccggacctcagcttccaggccagatatcttccgcccaggtgacatctcagcacttattaagagagtcctctgtgatctcaacacaaggtcctaaaccaatgcgatcatcccagctcatgcagagctctggtaggagcggttcttctttagtgtctcctttctcttccgctaccgccgctcttccccctagtctcaatctgactactcccgcgtcaacgtcacaagacgccagtcaatgtcagccatcacctgactttagtcatgaccggcagttacgcctgcttctaagtcaacccattcagccaatgatgcccggatcctgtgatgctcgacaaccttcagaagtctcaagaaccggacgacaggtgaagtatgctcagtcgcaaaccgtcttccagaatcctgacgctcatcctgccaattcctcctccgcccccatgccagtgttgctgatggggcaagcagtgctccacccatcttttccagcctctcaaccctcccccctgcagcctgcacaggcccgacaacaaccaccgcagcactacctgcaggtgcaggcgccaacgagtctgcacagcgagcagcaggatagcctgcttctgtctacttactcacagcagcccgggacgctgggctacccccaacctcccccagcccagccccagcctctccggcccccaaggcgcgtgtcctcactcagtgagtcatccgggttgcagcagccacctcggtag

SEQ ID NO: 197116 - DNA, 2670 bp, synthetic construct
  misc_feature 1..2670: note = Description of Artificial Sequence: Synthetic coding sequence
  source 1..2670: mol_type = other DNA
atgtacgcctacggcttcgtgggccggtgcgcccccttccccgccgaggaagggcgcacatttgacctttctgaagagctgggtagatcagtgactcgggaggggactggtacaacccgactgaattctgagcctgtcccactactttgcctcccactgctaaattgttcccgcaagaactgcattgagaatctaatggacgaagacgaaaaagatcgcgccaagagggcatcgagaaacaaatcggaaaagaagaggcgggaccagtttaatgttctgattaaggagctgagtagcatgcttcctggcaacacaaggaagatggataagaccaccgttcttgagaaagttattggctttcttcagaagcataatgaagtctccgcccaaacagaaatctgcgacatacaacaggattggaaacctagctttctcagtaacgaagagtttacacagctgatgttagaggccttggatggcttcatcattgctgtgactacggatggctccatcatttatgttagcgactctattacccctttactgggccacctccccagcgatgtgatggatcagaatttacttaattttctgcccgagcaggaacactcagaagtctataagatcctgtcctcacacatgctcgtgaccgatagccccagcccagagtaccttaaaagcgattccgatctagagttttattgccacctgctcagggggtcactgaaccccaaagagtttccgacgtacgagtacattaagtttgtggggaacttcaggtcttataacaatgtaccgtctccttcttgtaacggctttgataacaccctgtcacgcccttgccgcgtaccgctgggaaaagaggtatgtttcatcgcgaccgtgcgcctcgctacaccccagtttcttaaagaaatgtgtattgtggacgagcccctagaagagtttacaagtcgacactctctggagtggaagtttctttttctggatcaccgggcgcccccaatcataggatacctgccttttgaagtcctgggtacttccggctacgattactatcatatagatgacctcgagctactcgcgcggtgtcaccagcatctcatgcagtttggcaaggggaaatcatgttgttatagatttttaacaaagggacagcagtggatttggctgcagacacactactacataacttaccaccaatggaattctaagcctgaattcatcgtctgcacccattccgtggtgagctatgcggatgttcgtgtggagaggcggcaagaactggctctcgaagatcccccgagcgaagcactacattcaagtgcattaaaagacaaggggagttccctggagccacgccaacatttcaacacattggatgttggagcgtccggcctcaacacatcgcatagtccatccgcatccagtcgatctagccacaagagctcccacaccgcaatgagtgaacctacatcgaccccaactaagctgatggctgaggcctccacgcctgctctcccccgctcggccactctgccacaagagttgcccgtacccggattatcccaggctgcgaccatgcctgccccactgccctccccgagttcctgcgatctgactcagcagctgctgcctcagaccgtattgcagtcaacacctgctccaatggctcagttcagcgcgcagttctccatgtttcagaccatcaaagatcagttagaacaacgcacacggattcttcaggccaacatcaggtggcaacaagaagaattgcacaaaatccaggaacagctgtgccttgtgcaggattctaatgtgcaaatgttcttacagcaacctgctgtgagtctcagtttttcatccacccagaggccggaggcacagcaacagcttcagcagaggtcggctgcggtgactcagccccaactgggcgccggacctcagctgcctgggcaaatctcttctgcgcaagtgacctcccagcacctcttaagagaaagcagcgtcatctcaacccagggcccaaagccgatgaggtcatcccagctgatgcaatcatccggccggagcggatcatctctcgtgagcccatttagcagcgccacagcagccctgcctccatcccttaatcttaccacccccgccagcacaagccaggacgcgtcacaatgtcagcctagtcctgacttttcccatgacaggcagctccggctgctgctgagccagcctatccagcccatgatgccaggatcttgcgatgcccgtcagccgtctgaggtatcacgaacaggacgccaagtgaaatatgcacaaagccagaccgttttccagaaccctgatgcacacccagccaattcttcatccgccccaatgccagtgttactcatgggccaagctgtactgcatccaagtttcccagcatcacagccttccccattacaacccgcacaggcacgtcaacagcctccacagcactatctccaggtgcaggcccctacctccctgcactctgagcagcaggactcactcctgctaagcacctattcccaacagccaggtactctcggctatccgcagccaccacctgctcagcctcagcctctgcgacccccccgtcgagtttcttcactgtctgagtcctcaggcctccaacagccacccagatag

SEQ ID NO: 197117 - DNA, 774 bp, synthetic construct
  misc_feature 1..774: note = Description of Artificial Sequence: Synthetic coding sequence
  source 1..774: mol_type = other DNA
atggcccccaccaagcccagcttccagcaggaccccagccggcgggaaagaatcacagcacagcatccactgcctaatcagtccgaatgtcgtaaaatctaccgctacgacggcatatattgcgaatccacctatcagaacctccaagctcttcggaaggagaagagtagagatgctgctcgaagtcggcgcggcaaggaaaactttgagttctacgaattagctaaactcttgcccctcccagctgctatcacctcacagttggataaggcttctattatccgcctgacaatttcatacctgaagatgcgcgatttcgcaaaccaaggcgacccaccctggaatctcagaatggagggtcctcctccaaacacatctgtcaaggtcattggcgcccagcgccggagatccccaagcgccttggccatcgaggttttcgaagcacacctggggtcgcacatcttacagtctcttgacggattcgtttttgctctgaatcaggaaggcaaattcctgtatatttcagagacagtgagcatttacctgggattatcacaggtggaactcactggctccagcgtgttcgattatgtccatcccggcgaccatgtggagatggccgaacaactgggcatgaaattgcccccaggtagggggttactgtcacaggggaccgccgaagacggggcgtcctcagcgtcgagttctagccagtcagagacacccgaacccgtggtttgttttccgcccgcttctgaccagttccttctatag

SEQ ID NO: 197118 - DNA, 2706 bp, synthetic construct
  misc_feature 1..2706: note = Description of Artificial Sequence: Synthetic coding sequence
  source 1..2706: mol_type = other DNA
atggcccccaccaagcccagcttccagcaggaccccagccggcgggaaaggttacaagccctgagaaaagagaagtcacgagacgcagctcgatccaggaggggcaaagaaaacttcgagttctatgagttagcgaagctgctgccactgcccgctgccattacaagtcagctggacaaggcgagcataattcgattgacgatttcatacttgaaaatgagggacttcgcaaaccaaggtgatccaccctggaacctccgaatggaggggccgccccctaacactagtgtgaaaggagcccaacgacgccggtcgccctccgccttagcaattgaagtattcgaggcacacctgggatcccatatccttcaatcactcgacggatttgtgtttgctctcaaccaagaagggaaattcttgtatatttctgagacagttagtatctacctcggactgagccaagtagagctgaccggctcatcagttttcgactacgttcaccctggggatcatgtcgaaatggctgagcagctgggcatgaaattaccaccaggacgcggcctgctaagtcagggcactgcagaagacggcgccagctcagcttcctcaagtagccagtccgagacccctgaacctgtggagagcactagcccaagccttttgacaactgacaataccctggagcggtctttcttcatccggatgaagtccactctgaccaagaggggggttcacatcaaatcttccggctacaaggttatccatatcaccggcaggctgcggctgcgcgtttccttgtcacatggccggacagtgccaagccagatcatgggactcgttgtcgtggcacacgccctcccaccaccaactatcaatgaagttcgaatcgattgccacatgttcgtcacacgggtcaatatggacctgaacattatctattgtgagaaccgcatctcggactatatggatctcaccccggttgatattgtgggtaaaagatgttatcactttatccatgccgaggatgtggagggcatcagacatagccacctggatttattaaataagggtcagtgtgtgactaaatactacaggtggatgcagaagaacggggggtatatctggatccagagctctgccactatagcaatcaatgcgaagaacgccaatgaaaaaaacattatttgggtcaattatttgctctctaaccccgaatataaggatacaccgatggacatagctcagcttccacatctgccagagaaaaccagtgagtccagtgaaaccagcgattccgaatctgattcaaaggacacatctggaataaccgaagacaatgagaactccaagtcagatgaaaaaggtaaccagtctgaaaatagtgaagaccctgaacctgaccgcaaaaaatcagggaatgcttgtgacaatgatatgaactgtaacgatgacggccatagcagtagcaatccggatagccgggatagtgatgattcgttcgaacacagtgacttcgaaaatccaaaggccggggaggacggttttggcgctttgggggcaatgcagattaaagtagaaaggtatgtcgagtcagagtccgatctcaggttgcagaattgcgagagcctgacctctgattccgccaaagactcggacagcgccggggaggccggagcgcaagcaagttcgaaacatcagaagaggaaaaagagaaggaagaggcagaagggcggttctgcgtctcgccgtcgcttgagttcagcatcaagcccgggtggcttggacgctggcctcgtggagcctccacgtctcctctcttcacctaattcagcttctgtgctgaaaattaagaccgagatcagtgagccaatcaacttcgataatgatagctctatttggaactatcccccaaacagagaaatttcacgtaacgaaagcccctactccatgacaaagcccccttcttctgaacactttccgtctccacagggcggtggaggagggggggggggaggcggtggcttgcatgtcgcaattcccgacagcgtgcttacccctcctggagctgatggggccgccgccagaaaaacacagtttggagccagtgctacagccgccctggctcccgtggccagcgacccgctgagtccacctttgtctgcaagtccacgggacaaacaccccgggaacggcggaggggggggaggaggaggagggggggctgggggggggggacctagtgcatctaactctttgctatacacaggggatctagaagccctccagcgtcttcaggctggaaacgtcgtcctgcctttggtccatcgcgtgactggaacacttgccgccactagcactgccgcgcagcgcgtatatacaactgggacgattaggtacgcccccgctgaagtcacactggcaatgcaatccaatttgctaccgaacgcgcacgcagtaaactttgtcgatgtcaacagccctggtttcgggctggaccccaagacaccaatggagatgctgtaccaccacgtccatcgcctgaacatgagcggtccgttcggcggcgccgtttctgcagcgagccttacacagatgccagctggcaacgtgtttactacagctgaaggccttttcagcactttgccgttccccgtctacagcaacggaatccacgccgctcagaccctggaaaggaaagaggattag

SEQ ID NO: 197119 - DNA, 2802 bp, synthetic construct
  misc_feature 1..2802: note = Description of Artificial Sequence: Synthetic coding sequence
  source 1..2802: mol_type = other DNA
atggcccccaccaagcccagcttccagcaggaccccagccggcgggaacgcatcacggcccagcacccacttccaaatcaatcagaatgtcgcaaaatttatagatatgatggaatttactgcgaaagtacctaccagaaccttcaggccttgagaaaggaaaaatctcgagatgcggcccgatcccgcaggggtaaagaaaactttgaattttacgagctcgcgaaattgctgcctttgccggctgccatcacgtcccaactggacaaagccagcattattaggttgactatttcatatttgaaaatgagggattttgctaatcagggtgatcccccatggaatctgcgcatggagggtcccccccccaacactagcgtcaaagtcataggcgcgcagcgccggcggagcccaagcgctctggcaatcgaggttttcgaggcacacctcggtagccatattcttcagagcttagatggatttgtttttgcactgaaccaggaaggcaagttcctgtatatcagcgagacagtttccatatatctgggcctctcacaggtggaactgaccggatcctcggtcttcgattatgtgcatccaggggaccacgtggagatggcagaacagctggggatgaagttgccaccggggagagggctcctttcgcaggggacagccgaagatggagctagctccgccagctcttcatcgcagtccgaaacccccgagcccgtcgaatcaacctcacctagtctcctgacaacggacaatacactggagcgctcttttttcatcaggatgaagtccaccttgaccaaacgcggtgtccacattaagagcagcgggtacaaggtaatccacattaccgggaggctgcggcttagagtttcattatctcacggcagaaccgtgcccagtcagatcatgggtctagtcgtggtagctcatgctctaccaccacccaccatcaatgaagtccgcatcgattgtcacatgttcgtcacacgtgtaaacatggacctcaacataatatattgcgaaaacaggatctctgactacatggacctcacgcccgtagatatagtgggtaagagatgctaccactttattcatgctgaggacgtggagggtataaggcattctcacttagatctgttgaataagggacagtgtgtcacaaaatattataggtggatgcagaaaaacggaggctatatctggatccagtctagcgccactattgcaatcaatgcgaaaaatgcgaatgaaaagaatatcatttgggttaattacctgttatctaatcccgaatataaagacaccccgatggacatagcccaactgcctcaccttcccgaaaaaacgtccgagtcctctgaaaccagcgactctgagagtgattctaaagacacttctggcatcacagaagacaacgaaaattccaagagcgatgaaaagggcaaccaatctgaaaattccgaggatccggagccggaccggaaaaaatctggcaatgcctgcgacaacgatatgaactgtaatgacgacggccatagttctagtaaccccgactccagggattctgacgactcattcgagcattcggactttgaaaacccgaaggctggggaagacggcttcggagccctgggcgcaatgcagatcaaagtcgaaagatatgtagaatcggaatccgatctgcggctgcaaaattgcgagtcgctcacaagcgacagtgcgaaggatagcgactccgctggggaggcgggcgcccaagcatcttcaaagcatcagaaaagaaaaaaaagacgcaagcgtcagaagggaggctctgcttctaggaggaggctgagttccgcatcctcccctggaggccttgacgcaggcctggtcgagcctcctagattgttgtcaagcccgaactccgcctccgttcttaagattaaaacagagatcagcgaacctatcaattttgataatgattcgtctatatggaactaccctcctaacagggagatcagtagaaacgaatctccctactccatgaccaaaccaccaagttccgaacatttcccctccccgcagggaggaggaggcggcggcggcggtggcggggggctgcacgttgcgattcccgatagtgtcctgaccccccccggagctgatggcgccgcagccagaaagacgcagtttggcgcaagcgcgactgcagcactggctcccgtggcatccgacccactcagtccccctctctcagcaagtccacgggataagcaccccggcaatgggggcgggggagggggcggagggggaggcgccggtggcggaggcccctccgccagcaattccctcctgtatactggagatttagaggccctccagaggctgcaggctgggaatgtcgttttgccgctggtgcatcgggtgactggtaccctggctgccactagcaccgccgcgcaacgcgtctatactactggaacgattagatatgccccagccgaagtcactctggctatgcaatccaatctcctcccaaatgcccacgcagtaaatttcgtggatgtgaattccccaggattcggtctggatccaaagacccccatggagatgttgtatcaccatgtacaccgcctcaacatgtccggaccattcggcggggctgtcagcgctgcgtcactcacacagatgcctgccggcaacgtgttcaccaccgctgagggactctttagtaccctgccctttccagtatactccaacggcattcacgccgctcagaccctcgagagaaaagaagactag

SEQ ID NO: 197120 - DNA, 2763 bp, synthetic construct
  misc_feature 1..2763: note = Description of Artificial Sequence: Synthetic coding sequence
  source 1..2763: mol_type = other DNA
atggcccccaccaagcccagcttccagcaggaccccagccggcgggaacgacttcaggctttgaggaaagaaaaatctcgcgatgccgctaggagccggaggggaaaggagaactttgaattctacgagcttgccaaactccttcccctccctgccgcaatcacaagccagctggacaaggcatctattattcgcctgaccatctcatacctcaagatgcgcgattttgccaatcagggcgaccccccatggaacctgagaatggaaggtccgccaccgaatacgtctgtgaagggcatccagatgtggaaatcagagctttgtatgcgtaaaacgccgtgcgaggtgattggagcccagagacggaggtcaccctccgctctagcaattgaagtttttgaggcccatttggggagtcacatcctgcagagcctggatgggttcgtgtttgcgctgaaccaagaggggaaatttctatacatctccgagactgttagcatatacttgggtctctcacaagttgagctgactgggtcgtcggtttttgactatgtccacccaggtgatcatgtggaaatggcagagcagctaggaatgaagcttcctcccgggcggggtctcctgtcgcagggaacagcggaggatggagcctcatcagcatcaagttccagtcaatctgaaactcctgagcccgtggagagtacatccccctccctcctgaccacagataacactcttgaaagatcttttttcatccgcatgaagagtacgcttacaaagcgtggggttcatattaaaagctcaggatacaaggtcattcacattaccggtcgattacggttacgtgtgtcactctctcacggccgcaccgttcctagccagatcatgggcctggtggtagtggctcatgctctgcccccccctactatcaacgaggtccgtatcgattgtcacatgtttgttactagagttaatatggatctgaatattatttactgtgagaatcggatttcagactatatggatcttactccagtagatattgtcggaaaacgatgctaccacttcatccacgctgaggacgtggagggtatcagacacagccacctggatctgttgaacaaggggcagtgcgtgacgaagtactaccgttggatgcagaaaaatggtggttatatctggattcagtctagcgcaaccatcgctatcaacgctaagaatgccaacgaaaagaatatcatttgggtcaattacctgctgtcaaaccccgagtataaggatacaccgatggatatagcccagctcccccacttgcctgagaaaaccagtgagtcttccgagacttctgacagtgaatccgacagcaaagataccagtggtatcaccgaggataatgagaacagtaagagcgacgaaaagggaaaccaatcggagaactcggaggatccagaacccgatagaaagaaaagcggaaatgcctgcgataatgacatgaactgtaatgatgacggacacagttcatctaatcccgatagcagggactctgacgatagcttcgaacacagcgatttcgaaaacccaaaggcgggcgaagatggtttcggtgcattaggcgccatgcagatcaaggtggagagatatgtggagtccgagtccgatttgcgactccagaactgcgagtcgttaacttctgactccgccaaggatagtgacagcgccggtgaggcaggcgcgcaggctagcagcaagcaccagaaaaggaagaaaagaagaaaacggcaaaaggggggctccgccagcagaaggagactttcgtcggctagtagtcccggcgggttggatgctggacttgtggaaccaccgcggctgcttagcagtccgaattctgcctcggtgctcaagattaaaactgagatctcagaacctataaatttcgataacgactcaagtatttggaactatccacccaatcgggaaatctctagaaatgaatccccttattctatgactaaacctccaagcagcgaacacttccctagtcctcaggggggaggaggcggaggaggaggaggggggggtctccatgtggccatcccagatagcgtgctcacaccaccaggcgctgacggtgccgcggccaggaagacccagtttggggccagcgctactgccgccctggccccagttgcatctgatcctcttagtccacctttaagcgctagccctcgggataaacatcccggaaacgggggcgggggcggaggcggaggcggcggcgctggagggggggggccatcagcttctaactcattactgtatactggagacttggaagccctccagcggctccaggccggaaatgtcgtgctgccgcttgtgcatagagtgactggcacattggcggccaccagcacggccgcgcagcgggtatatactaccggtactattcgttatgccccagctgaggtaaccctggccatgcagtccaacctgctccctaacgcccacgccgtcaattttgtggatgtcaactctcctggatttgggctggaccccaaaaccccaatggagatgctctaccatcatgtgcatagactcaacatgtctggaccatttggcggggctgtctccgctgcctcgcttactcagatgccggcggggaacgtgtttactaccgctgagggactgttctccactctcccattccccgtgtactccaacggtattcatgccgcccaaactctggagcgcaaggaggactag

SEQ ID NO: 197121 - DNA, 462 bp, synthetic construct
  misc_feature 1..462: note = Description of Artificial Sequence: Synthetic coding sequence
  source 1..462: mol_type = other DNA
atgcgggacttcgccaaccagggcgaccccccctggaacctgcggatggaagggccccccccaaacactagcgtgaaaggagcacagcgaagacggtcacccagtgctttagcaatagaagtgttcgaggcacaccttggaagccacatcctgcagtctctggatggctttgttttcgcactcaaccaagagggcaaattcctttacatcagtgaaaccgtctccatttacctcggattgtcgcaagtggagctcaccgggagctctgtctttgactatgttcatcctggggaccatgttgagatggcggagcaactgggcatgaaactccctcctggtaggggactcctatcccaaggaactgccgaggacggggcttcctctgcatcctcatcatcccagagcgagaccccagaaccagtggtttgcttcccacccgcatccgaccagttcttgctttag

SEQ ID NO: 197122 - DNA, 2712 bp, synthetic construct
  misc_feature 1..2712: note = Description of Artificial Sequence: Synthetic coding sequence
  source 1..2712: mol_type = other DNA
atggcccccaccaagcccagcttccagcaggaccccagccggcgggaacgcctccaagctcttcggaaagagaaatcacgggacgccgcgcgatctcggagaggcaaagagaacttcgaattctacgaactggctaaactactgcccctccccgccgctatcacctcccagttagacaaggcatctatcatacgtctaactatttcctacctgaagatgagggatttcgcaaaccagggggaccccccttggaatctgaggatggaggggccgccccctaataccagtgttaaagtcatcggagcgcagcgtcgaaggtcacctagcgctctcgctattgaggtgttcgaagcccacctgggctcccacatcctgcagtccctggatgggttcgtgtttgccttgaatcaggaaggcaagttcttgtacatctctgaaacagtgtcaatctacctcggactctcacaggttgaactcacaggaagttctgtgttcgattatgtgcacccaggcgaccacgtagaaatggccgagcagttaggaatgaaactgcctccgggcaggggactgcttagtcagggcaccgccgaggatggagcaagttctgcttcttcctcctctcagagtgagacaccagaacccgtcgaatcaacatctccaagcctattgactactgataatactcttgagaggtcttttttcatcagaatgaagtccaccctcacgaaaagaggagtccacataaagtcgagcggctataaagtaatccatatcaccggaagattgcggctgagagtcagcctgtctcatggaaggactgtccctagccagattatgggccttgtggtggtggcgcacgccctgcctcctcccaccattaacgaggtaaggattgactgtcacatgttcgtcacccgggtgaacatggacctcaacatcatttattgcgaaaatcgaatttcagactacatggatctgactcccgtggacatcgttggcaaacgctgctaccattttattcacgccgaagatgtcgaaggtataaggcatagtcaccttgatctgttgaacaagggccagtgcgttaccaagtactataggtggatgcagaagaacggaggctacatttggatacagagttccgcaaccatcgctatcaacgccaaaaacgcaaatgagaagaacatcatctgggtcaattacctgttatcgaaccccgagtataaggataccccaatggacattgctcagctcccccatctacctgagaaaacctctgagtccagtgaaacaagtgactcggagagtgatagtaaagacacctcggggataacagaggacaacgaaaatagtaaatccgacgaaaagggcaaccaatccgagaactctgaagatccagaaccggatcgcaagaagtcaggcaacgcctgtgacaatgacatgaactgtaacgatgacggccatagctcctcgaatcccgattcacgagactctgacgactcattcgagcatagtgattttgaaaatcctaaggcaggcgaagacggtttcggagctctgggcgctatgcaaatcaaagttgagcgatacgtggagagtgaatccgaccttcgtctgcaaaattgtgagagcctgacatcagattcagcaaaagattcagattctgccggcgaggccggtgcgcaggccagctccaagcaccagaaacgtaaaaagcggagaaagagacagaagggtggttctgcctcgagacgaaggctgagttccgcctcctcccctgggggactggatgccggcctggtggaaccccccaggttactctcctcccccaactcagccagtgttctgaaaattaaaacggaaatttctgagcctatcaattttgacaacgattcttccatctggaattatccccctaacagagagatctcgcgaaacgagtccccttactctatgaccaaacctccgagtagtgaacatttcccttcgccacaaggcggaggtggtggtggagggggcgggggggggttgcatgtggccattccagacagtgtgctcacaccccccggagcagacggagctgcggccaggaaaacgcaattcggcgccagcgccacggctgccttggcgccagtcgcctctgatcctctatctcctcctctgtcagcatctccgagggataagcaccccgggaatggggggggggggggaggcggaggcggcggagcagggggaggaggtccaagcgcaagcaactctcttctgtacacgggggacctcgaggcacttcagaggctgcaggctggaaatgttgtattgcccttagtccatcgcgtgacaggtacgctggcggccacatctactgctgctcagcgagtctacaccaccgggactatccggtatgccccggcagaagtaacactggcaatgcaatccaacctcttgccaaacgcccacgcagtcaattttgtggacgtaaacagtccgggtttcgggctcgatcctaagactccaatggaaatgctgtaccatcacgttcacagactcaacatgagtgggcctttcgggggtgcggtgtccgccgcctccctgacccagatgccagccgggaacgtgtttactaccgcagaggggttgttttcaactctgcccttccccgtgtactcaaatggaattcatgccgcccaaacgctggagcgtaaagaagattag

SEQ ID NO: 197123 - DNA, 2409 bp, synthetic construct
  misc_feature 1..2409: note = Description of Artificial Sequence: Synthetic coding sequence
  source 1..2409: mol_type = other DNA
atgtaccggagcaccaagggcgccagcaaggcccggcgggaccagattaatgcagagattcggaatttaaaggaattactacccctcgcggaggcggacaaagtccggttgagctacctgcatatcatgagccttgcttgcatctataccaggaagggggtgttctttgctggggggaccccactcgccgggcccacagggctcttgagcgctcaggaactggaagatatcgttgctgccttgcccggtttcctgctggtatttaccgcagagggtaagttgctgtatctcagcgagagcgtcagtgagcaccttggacactcaatggtggatctagtcgcccagggggatagcatctacgatattatcgacccagctgaccacctgaccgtccgacagcagctgacactcccttctgccctcgatactgatcggctatttcgatgccggttcaacacttctaagagccttcggagacagtccgcgggcaacaagctggtgctgattagggggcggttccacgcccacccaccaggggcttattgggctgggaatccggtctttaccgccttctgcgctcctctggagccaaggcccaggcccggacccggccctggaccaggccctgcatccctattcctcgccatgttccagagtcgacacgcaaaggacttggctctgctggacatcagcgagagtgtcctgatctatcttggattcgagcgcagcgagctcctgtgcaaaagttggtacgggctccttcatccagaggacttggcacacgcgtctgctcagcattatcgtcttctggctgagtccggagacattcaggctgagatggtcgtgcggctacaagccaaaaccggcggctgggcgtggatctattgtttactgtatagtgagggccccgaagggccaattaccgcaaataactatcctatttcggacatggaagcctggagcttgagacagcaacttaattccgaggacacccaagcagcctatgtgctcggcactcctaccatgcttccctctttccccgagaacattctttctcaagaggagtgctcatccacaaaccctctgtttaccgctgctctcggggcgcctcgctccactagctttccatccgcaccagaactctccgtggtgtccgccagtgaggaattgcctaggccctcaaaggagctggacttttcatacttgacctttcctagtggaccggagccatccctgcaggcagagctctcgaaggacctagtctgcacacctccgtacacacctcaccaacctggaggttgtgcttttctgttctctctccacgaacctttccagacccaccttcctacaccaagtagcaccctccaggagcaactgactccctctacagcgacttttagtgaccagcttacaccgagctcagccaccttcccagatcctctgacaagtccactgcagggacagctaacggagacctccgtacggtcttacgaagaccagctcaccccctgcacaagtactttccctgaccagttactcccatcaacggctactttcccagaaccgctggggtccccagctcacgaacagctgacccctccttctaccgcgtttcaagcacacctggatagcccctcacagacctttcccgagcaactgagcccaaaccccactaaaacctacttcgctcaggagggctgctcgtttctgtatgagaagctgccaccttccccctcctccccggggaacggagattgcaccctgttagcgctcgctcagctcagaggcccattgtcggtcgatgtgccccttgtgccagagggcctccttacccctgaggcatcacccgtaaagcagagtttctttcactacagcgagaaggagcaaaatgagatcgacaggcttatccaacaaatctcgcaacttgcacagggaatggaccgaccattttccgctgaggccggcactggaggcctcgaaccactagggggcctagagccactggacagtaatctgtcgctgagcggagccggcccacctgtcttgagccttgacttaaaaccctggaaatgtcaagaactggatttcctcgccgacccggataacatgttccttgaagaaacaccagttgaagacattttcatggatctgtccacgcccgatccatccgaggaatggggaagtggcgatcccgaagcggagggacctggcggggcaccaagtccgtgtaataacttatctccggaggatcactctttccttgaagatctggccacctatgagacggccttcgagaccggggtgtcggctttcccatacgacggttttactgacgagctccaccagctgcagagccaagtccaggacagcttccacgaagatggctccgggggagaacccacattctag

SEQ ID NO: 197124 - DNA, 705 bp, synthetic construct
  misc_feature 1..705: note = Description of Artificial Sequence: Synthetic coding sequence
  source 1..705: mol_type = other DNA
atgtaccggagcaccaagggcgccagcaaggcccggcgggaccagatcaatgccgagattagaaatctcaaagaactgctgcccctggccgaagcggataaagtgcgcctgtcctatctgcacattatgagcctggcgtgcatttatacccggaagggagtattctttgctggtggtactcctttagcggggcctaccggccttttatccgcccaagaactggaggatatcgtggccgccctgcctgggtttctcctagtgtttactgctgaaggcaagttactgtacctgagcgagagcgtctcagagcatctcggccactcaatggtcgacctggttgcgcagggggattcaatttacgacattatagatccagccgatcacttgacagtgaggcaacaacttactctcccttcggctctggacaccgatcggctgttcaggtgtaggttcaatacatctaagtccttacgtaggcagtccgccgggaataagctcgtgttgataaggggccgcttccacgcgcatccccccggagcctactgggcggggaaccccgtcttcactgctttttgcgcgcctttggaaccccgacctaggccagggcccggaccaggcccggggcccgcctccctcttcttggctatgtttcagtcccggcatgcaaaggacctcgcactgttagatatctccgagtcaggatag

SEQ ID NO: 197125 - DNA, 1299 bp, synthetic construct
  misc_feature 1..1299: note = Description of Artificial Sequence: Synthetic coding sequence
  source 1..1299: mol_type = other DNA
atgcccgccggccgggccgcccggacctgcgccctgctggccctgtgccttctgggcgccggcgcccaggatttcggcccaactcggtttatctgcacaagcgtgccggtggacgctgatatgtgcgcagccagcgtggctgccggtggagccgaagaactccgctccagtgtgcttcagttgcgcgaaaccgtgctccaacaaaaagaaaccatcctgagccaaaaagaaactatcagggaattaactgcaaagctagggcgatgcgagtcgcagagcacgctggaccctggcgcaggggaggcacgagccggcggcggaagaaaacaacctggcagcggcaagaacactatgggcgatctgagtcgcacacctgctgctgagactctaagccagttagggcagacattacaaagtctaaagacaaggttggaaaacctggagcagtatagcaggctgaatagctcaagccagacaaactccctcaaagaccttctccaatccaaaatcgatgagctggaaaggcaggtgttgagtcgcgtgaacacgctggaggaaggaaaaggcgggcctcgcaacgacaccgaagagagggtgaaaatagagaccgcgctgaccagtctacaccagcgcataagtgagctggagaaaggtcagaaagataatcgacccggtgataaatttcagctgactttcccgctgcgtacaaactacatgtatgccaaagtgaaaaaatcactacccgagatgtacgcgtttaccgtgtgcatgtggctgaagtcttctgccactcctggggtgggtaccccattctcttatgccgttcccggccaggcaaatgaactcgtactcatcgagtggggaaataatccaatggagattctgattaacgacaaggtggccaaattgccatttgttatcaacgatgggaaatggcatcacatctgtgtgacttggacaactagggacggcgtatgggaagcgtatcaggatggaacccaagggggttcgggcgagaatctcgccccctaccatcccatcaagccccagggggtgctggtgctgggtcaagagcaggacaccctggggggtggtttcgatgccactcaggccttcgtcggcgaacttgctcatttcaacatctgggataggaaattgacgccaggagaagtatacaacctggcaacttgctccacaaaggccctgtccggcaatgtcatcgcctgggcggagtcccacatcgagatttacggaggcgccactaagtggacctttgaagcgtgccggcagatcaattag

SEQ ID NO: 197126 - DNA, 585 bp, synthetic construct
  misc_feature 1..585: note = Description of Artificial Sequence: Synthetic coding sequence
  source 1..585: mol_type = other DNA
atgtacgccaaggtgaagaagagcctgcccgagatgtacgccttcaccgtttgcatgtggctgaagtcatccgccactcctggggtgggaaccccgttctcttatgccgttcccggacaagccaatgaattggtgctgattgagtggggtaataaccctatggagattctaatcaatgacaaagtggccaaactgccatttgttatcaatgatggcaaatggcaccacatctgcgttacctggaccacacgtgacggggtttgggaagcatatcaggatggaacccaggggggtagcggtgagaacctagcaccttatcatccaattaagcctcagggtgtactcgtcctaggacaggaacaggatactctgggcgggggctttgatgccacacaagcattcgtcggcgaactcgcccatttcaacatttgggaccgtaagcttactcccggagaagtttataacctcgctacttgcagtacaaaggccctctcggggaacgtgatcgcctgggcagagtcccacattgaaatctacggcggagcaacaaaatggacgtttgaagcttgcagacagattaactag

SEQ ID NO: 197127 - DNA, 1296 bp, synthetic construct
  misc_feature 1..1296: note = Description of Artificial Sequence: Synthetic coding sequence
  source 1..1296: mol_type = other DNA
atgctggccctgctggccgccagcgtggccctggccgtggccgccggtgcacaggatagtccggcccctgggagcaggttcgtttgcaccgctctgccaccggaggctgtacatgctggatgccccttgcccgcaatgcctatgcagggtggcgcccaatcacccgaggaggagctccgggcagccgtgcttcagctcagggagactgtcgtccagcagaaagagaccctcggtgcccaacgcgaagccattcgcgagctgaccggcaagctggcaaggtgcgagggccttgcaggtggcaaggctcggggcgcaggcgcaaccggaaaagataccatgggagatttaccccgggaccctggccacgtagtggagcagctgagcagaagtctgcaaacgctgaaagaccggctggaatcgttagagcaccagcttcgagcgaatgtgtccaacgccggtctccccggggacttcagagaagtcctacagcagaggttaggagaacttgagcgccaactattacgcaaggttgccgaactggaagatgagaagagtctgctgcacaacgagacaagcgcccataggcagaagactgagtccactctcaacgctctactgcagagagtcaccgaactcgagagaggcaatagtgcattcaagagtcccgacgcttttaaggtgtccctgccattacgcacgaactatctatacggaaagataaagaaaactctgcctgaactgtacgcctttacaatctgtctatggcttcgaagttcagcctcccctggcatcggaactcccttcagctatgcggtgccaggccaggccaatgagattgtcctgattgagtggggcaacaacccaatagagcttttaatcaatgataaggtcgctcagctacccctgttcgtgagcgacgggaagtggcaccacatctgcgttacctggaccacccgtgacgggatgtgggaggcctttcaggatggcgagaagctgggcacaggggaaaatctggcaccttggcatccaatcaaacccggcggagtgcttatcctgggtcaggaacaggataccgtgggcggcaggttcgatgctacacaggcgtttgtcggcgaactgtctcaattcaacatctgggaccgcgtgctacgcgcacaggagatcgtaaatatcgccaattgttccacaaacatgcccggtaacatcatcccatgggtcgataacaacgtggatgtgtttggtggcgcctctaagtggcctgtggagacctgtgaagagcgcctgttagacctttag

SEQ ID NO: 197128 - DNA, 246 bp, synthetic construct
  misc_feature 1..246: note = Description of Artificial Sequence: Synthetic coding sequence
  source 1..246: mol_type = other DNA
atggccgccgtggccgccgccagcgccgagctgctgatcatcggctggtatatttttcgcgtgttactccaggtgtttttggaatgttgcatttactgggtggggttcgccttccgcaacccccctggtactcagcccattgctcgttctgaagtctttcgttatagcctacagaagctggcctacaccgtgtccagaaccggacggcaggtgctcggagagaggaggcagcgcgccccaaattag

SEQ ID NO: 197129 - DNA, 165 bp, synthetic construct
  misc_feature 1..165: note = Description of Artificial Sequence: Synthetic coding sequence
  source 1..165: mol_type = other DNA
atggccgccgtggccgccgccagcgccgagctgctgatcatcggctggtatatttttagagtactgcttcaggtgtttcgttacagcctgcaaaagctggcatacacagtgagtcggactgggagacaggttctgggcgaacggagacagcgcgcaccgaattag

SEQ ID NO: 197130 - DNA, 270 bp, synthetic construct
  misc_feature 1..270: note = Description of Artificial Sequence: Synthetic coding sequence
  source 1..270: mol_type = other DNA
atgatcagcagcgtgaagctgaacctgatcctggtgctgagcctgagcactatgcacgttttttggtgttatcccgtaccctcctccaaggtgagcggaaagtctgattacttcctaattctcctcaattcttgtccaacaaggctggacagatcaaaggaactggcctttctgaaacctattctcgagaagatgtttgtgaaaagatcattcagaaacggagtcggcactggtatgaaaaagacctccttccagagggccaaatcatag

SEQ ID NO: 197131 - DNA, 525 bp, synthetic construct
  misc_feature 1..525: note = Description of Artificial Sequence: Synthetic coding sequence
  source 1..525: mol_type = other DNA
gtggtgctgctgtacgccagcacctacgtgctggtgagcctgagcatagataggtatcacgctatcgtatacccaatgaaagtcttgatagtgattgcctggagccttagtttcctattttccatccccacgctaatcattttcggcaagcgtacactgtctaatggggaagtgcaatgctgggccttatggcccgacgattcctactggaccccttacatgacgattgtggcattcttgggcagcttgattacttttatctgctgttggagcccttatttcttgttcgacatactggataactttaatctgctgcccgacacacaggagagattctatgcttccgtaataatccagaaccttccagcattgaattctgccattaatccactcatctattgcgtcttctcctcttccatatcttttccttgccgcgaacagagaagccaagactcacggatgaccttccgggaaagaactgagaggcacgaaatgcaaatattgtctaagcccgagttcatctag

SEQ ID NO: 197132 - DNA, 1134 bp, synthetic construct
  misc_feature 1..1134: note = Description of Artificial Sequence: Synthetic coding sequence
  source 1..1134: mol_type = other DNA
atgcccgccaacttcaccgagggcagcttcgacagcagcggcaccggtcaaactttggatagttcccctgtggcttgtacagagacggtgaccttcaccgaggttgtcgagggcaaagagtggggctctttctactactcctttaagactgagcagcttattacgttatgggtcttgtttgttttcacaattgtggggaatagcgtcgtactattcagcacttggaggcgcaagaagaagtcacggatgacgttcttcgttactcagctggcaatcaccgacagctttacgggcctggttaacatactaaccgatatcaactggagattcacaggagacttcacagcacctgatctggtgtgtagggtcgtgcgatacctgcaggtggtgctgctgtacgcgtcgacatacgtactggtatcgttgagtattgacagatatcatgcgattgtgtacccaatgaagtttctacaaggagagaaacaagctagggtgctgatcgttattgcctggtccctttccttccttttctcaatacccacacttatcatcttcggcaagcgcactctgtccaacggggaagtgcagtgttgggccctgtggccagatgactcttactggacgccctatatgacaatagtggccttccttgtctacttcatccccttgacaattataagcatcatgtatggaatcgtgatccgaaccatctggattaagagtaagacatacgaaactgtgattagtaactgcagcgacggtaaactgtgctcttcttataatcgcggactgatcagtaaagccaaaataaaagcgatcaagtattctatcataattatcttagccttcatttgttgttggtccccatacttcctgtttgacatcctggataatttcaatctgttaccagacacccaggaaagattctatgcctcggtgataatacagaacctacctgctctcaattcagctatcaatcccctgatctactgtgttttctccagtagcattagctttccatgtcgagtaatccgcctgagacagctccaggaggccgccctaatgctatgcccacagcgggaaaactggaaagggacatggccaggcgtgccatcatgggccttgccaaggtag

SEQ ID NO: 197133 - DNA, 1116 bp, synthetic construct
  misc_feature 1..1116: note = Description of Artificial Sequence: Synthetic coding sequence
  source 1..1116: mol_type = other DNA
atgcccgccaacttcaccgagggcagcttcgacagcagcggcaccggacaaactcttgattcgtcccccgtcgcctgcaccgagacagtgacgttcaccgaagtggtcgagggaaaggagtggggcagcttttactacagtttcaagacagaacagcttattacgctatgggtgttgtttgtattcacgattgtaggaaatagtgtggtcctgttttccacatggcgacgtaaaaagaagagcagaatgactttctttgttacacagcttgctatcacggattcttttaccggtttggtgaacatactgacagacattaattggagattcacgggggattttactgccccagacctggtgtgcagagttgtgaggtatctgcaggtggtgttgttgtacgcctctacttacgtcctcgtttcattgagcatcgaccgataccacgccatcgtatatcctatgaagtttttacagggagagaaacaggcaagagttctgatcgtaattgcttggagtttaagtttcctgtttagcattcccaccttaattatctttggtaaacggacactatcaaatggtgaggttcagtgctgggccctctggcctgacgattcctactggactccttacatgacaattgtggcctttctggtttactttattccacttacaatcatctcaattatgtacggcatcgtgattcgcacaatttggattaaatccaagacatatgaaaccgtaatctctaattgctctgacggcaagctgtgttccagctataataggggattaatatccaaggccaagatcaaggcgataaagtattccataatcattatccttgcattcatctgctgttggtcgccttacttcctgtttgatatcctggataatttcaacctgctcccagatacccaagagcggttttacgcctcagtcattatccaaaatctccctgctctcaattccgccataaaccctttaatttactgcgttttcagcagtagcatctcattcccttgccgcgagcagaggtcacaggactcgaggatgaccttcagagagcgaaccgaacgtcacgagatgcagattctgtccaagcccgagttcatctag

SEQ ID NO: 197134 - DNA, 1173 bp, synthetic construct
  misc_feature 1..1173: note = Description of Artificial Sequence: Synthetic coding sequence
  source 1..1173: mol_type = other DNA
atgcccgccaacttcaccgagggcagcttcgacagcagcggcaccggccagacacttgattcttctcccgtagcctgcacagaaacagtgacgttcactgaagtggttgaaggcaaagagtggggtagtttttactactcctttaagactgagcagctgatcacactgtgggtgctctttgtttttactatcgtcggcaattctgtggtcctcttttccacttggagacgaaaaaaaaaatcccggatgacattttttgtgacacaactggctattacagacagttttactgggctggtaaacattttaactgacataaactggaggttcaccggggactttactgcaccagacttagtgtgtagagtagtgcggtacctccaggtggtgcttctgtatgctagtacttacgtcctggtcagcctgagcattgaccgataccatgccatagtataccccatgaagtttttgcagggggaaaaacaggccagagtgctgattgtgattgcctggtctctgtcttttctttttagcatccctacgctgatcatttttggcaagcgaaccttgtcaaacggtgaagtccaatgctgggctctgtggccagacgactcatactggacgccctacatgacaatcgtggcctttctcgtctattttattccactgactatcatatccataatgtatgggatcgtgattagaaccatctggataaaatctaagacatacgagacagtgattagcaactgttctgacggcaaactctgctcctcctataatcgaggacttatttccaaagctaaaattaaagccattaagtacagtattattataatcttagcctttatctgttgttggagtccctacttcctgttcgacatcttagataacttcaatctgctgcctgatacccaggagagattttatgcctcagttatcattcagaatttgcccgccctgaactccgccataaatcctctgatctattgtgtctttagcagctccatatcgttcccctgtagggctaactcaagtgtctatttgcttgcatgcgacgtgtccgtcctctgggccttggtcttaacatccgaaaaggaatcatgcgaaagctggaggcggaaaggagccaagatcacggggtttcagaacgacgtgcccggcgagaactag

SEQ ID NO: 197135 - DNA, 918 bp, synthetic construct
  misc_feature 1..918: note = Description of Artificial Sequence: Synthetic coding sequence
  source 1..918: mol_type = other DNA
atgcccgccaacttcaccgagggcagcttcgacagcagcggcaccgggcagacgttggatagctctccagtggcgtgcaccgagaccgtgacattcaccgaggtggtagagggaaaggaatggggaagtttctactatagtttcaaaaccgagcaactgattacgttgtgggtcctctttgtcttcactatagtgggaaattctgtggtgctgttttcaacgtggcgtaggaaaaagaagtccaggatgacattttttgttacccaactggcgatcacagaaaaacaagccagggtcttgattgtaatcgcgtggtccttatcgttcctgttttcgattccaactttgatcattttcggaaagcggacgctgagtaacggagaggtgcagtgctgggctctgtggccagatgacagctactggacaccctatatgactatcgtggcgttcctggtgtactttatacccctgacgatcatttcgatcatgtacgggattgtcatccgcacaatttggattaaatccaaaacttacgagacagttattagcaactgtagcgacggaaagctatgtagctcctacaacagaggtctgatttctaaggccaagattaaggctatcaagtatagtattataattatccttgcctttatttgctgctggtcaccatacttcctcttcgatattctggataactttaatctgctccccgatacgcaagagaggttttatgctagcgtcatcatccagaatctgcccgcactgaattcagccataaaccccctgatctactgtgttttctcttcctcaatttcttttccatgtcgggaacagaggtcacaggattcccgcatgaccttcagagaaagaaccgagagacatgaaatgcagatccttagtaagcccgagttcatctag

SEQ ID NO: 197136 - DNA, 432 bp, synthetic construct
  misc_feature 1..432: note = Description of Artificial Sequence: Synthetic coding sequence
  source 1..432: mol_type = other DNA
atgcccgccaacttcaccgagggcagcttcgacagcagcggcaccggacagacattggacagttcccctgtggcttgtacggagacagtgacttttacagaggtggttgagggcaaagagtggggctcattttattattccttcaaaactgaacagttaattactctgtgggtgctctttgtttttacgattgtagggaattcggtagtcctattttccacctggcgacggaagaagaagtcacggatgacattttttgtgactcagctcgccattacagactctttcacagggctcgtgaatattctgaccgacattaattggaggttcacgggagatttcacggcccctgacctcgtctgcagagtggtgaggtatctccaggtaatggttatgaagctgttccacattcaaaaaatgaacatggaatag

SEQ ID NO: 197137 - DNA, 285 bp, synthetic construct
  misc_feature 1..285: note = Description of Artificial Sequence: Synthetic coding sequence
  source 1..285: mol_type = other DNA
atgcccgccaacttcaccgagggcagcttcgacagcagcggcaccggtcagaccttggacagttccccagtggcctgtaccgaaacagtgacctttacagaggtcgtcgagggaaaagaatggggctccttttactattcgtttaaaactgagcagctgataaccctctgggttttattcgttttcaccatcgtgggaaatagtgtcgtgcttttttcaacgtggcgtaggaaaaagaagagcaggatgacatttttcgtaacccagttggctatcacagtatag

SEQ ID NO: 197138 - DNA, 294 bp, synthetic construct
  misc_feature 1..294: note = Description of Artificial Sequence: Synthetic coding sequence
  source 1..294: mol_type = other DNA
atgctgggcaacaagcggctgggcctgagcggcctgaccctggcccttagtttactggtgtgcttaggagcactggctgaagcctacccgtccaagccagataatcctggcgaggacgctccagcagaggacatggcccgctactatagtgccctgcgccactatatcaacctgatcacgcggcagcgatacggtaaacggtcatcgccagagactctcatctcagacctcctgatgagagagtccacggaaaatgtccccagaacccggctggaagaccccgccatgtggtag

SEQ ID NO: 197139 - DNA, 294 bp, synthetic construct
  misc_feature 1..294: note = Description of Artificial Sequence: Synthetic coding sequence
  source 1..294: mol_type = other DNA
atgctgggcaacaagcggctgggcctgagcggcctgaccctggccctcagcctgctcgtctgtctgggtgctctggccgaagcctacccaagcaaacctgacaaccctggggaagatgccccggctgaagatatggccaggtattactcagccctccggcattacatcaacctgataaccaggcaaagatatgggaaacgctcctctccagagaccttaatatcagacctcctgatgagggagtcaaccgagaatgtaccaaggaccagactggaggaccccgctatgtggtag

SEQ ID NO: 197140 - DNA, 294 bp, synthetic construct
  misc_feature 1..294: note = Description of Artificial Sequence: Synthetic coding sequence
  source 1..294: mol_type = other DNA
atgctgggcaacaagcggctgggcctgagcggcctgaccctggccttatcactactggtgtgcctcggggctctagccgaggcttatccttcaaagcctgacaaccccggggaggatgctccagccgaggatatggctcggtactattctgcactgaggcactatatcaatctgatcacccggcagcgctatggaaaaagaagtagtccggaaactctgattagtgatctactgatgagggagagcactgaaaatgttccccgaacgagactcgaagacccagctatgtggtag

SEQ ID NO: 197141 - DNA, 1155 bp, synthetic construct
  misc_feature 1..1155: note = Description of Artificial Sequence: Synthetic coding sequence
  source 1..1155: mol_type = other DNA
atgaacagcaccctgttcagccaggtggagaaccacagcgtgcactctaatttcagtgagaagaacgcccagcttctggccttcgagaatgatgactgccacttgcccctggctatgatatttactttggcattggcttatggtgctgtaatcattctgggggtctctggcaacctggcactcataataatcattctgaagcagaaagagatgaggaatgtgaccaacattctgattgtaaacctttcctttagcgaccttctggtagcgatcatgtgtctgccatttacctttgtgtatacactgatggaccattgggtttttggagaagctatgtgcaaactgaatccgttcgtccagtgcgttagcatcacagtgtctatcttcagtctggtgctcatcgcagtagaaagacaccaactgatcatcaatccacggggatggagacccaataatagacacgcctatgtcggtatcgccgttatttgggtgcttgccgtggcctcatctctcccctttcttatttaccaggtgatgaccgatgagccgttccagaatgtgaccttggatgcatataaggataaatacgtgtgctttgatcagtttccctcagacagccacagactctcttatactaccctcctgctcgtcctgcaatactttggacccttatgctttatatttatttgttatttcaagatctacattcggctgaagagacggaataatatgatggacaaaatgcgggacaataagtatcgcagcagcgagactaaacgcatcaatatcatgctcctctcgatagttgtcgcttttgcagtgtgttggctgcccctgacgatcttcaacaccgtcttcgattggaaccatcaaatcatcgcgacttgcaaccacaatctgttgttcctcctgtgtcacctgaccgcaatgattagtacatgcgttaatcccattttttacgggttcttgaataaaaacttccagagagatctacagtttttctttaatttttgtgattttcgcagcagagacgatgactacgagactatagctatgtccaccatgcacacggatgtgagcaaaactagcttaaagcaggcttcgcccgtggcctttaagaaaattaataataacgatgacaacgagaagatttag

SEQ ID NO: 197142 - DNA, 186 bp, synthetic construct
  misc_feature 1..186: note = Description of Artificial Sequence: Synthetic coding sequence
  source 1..186: mol_type = other DNA
atgaacagcaccctgttcagccaggtggagaaccacagcgtgcactccaacttcagcgagaagaacgcacagcttttggctttcgaaaacgacgattgccacctgccactcgccatgatttttacactggctcttgcctacggagccgtgattattctgggtgtgagtggcaatctggccctctag

SEQ ID NO: 197143 - DNA, 426 bp, synthetic construct
  misc_feature 1..426: note = Description of Artificial Sequence: Synthetic coding sequence
  source 1..426: mol_type = other DNA
atgatggacaagatgcgggacaacaagtaccggagcagcgagaccaaaagaattaatatcatgctgctcagtatagtggtcgcttttgccgtctgttggttgcctctcactatatttaataccgtctttgactggaatcaccagattatcgcaacttgtaaccataatttgttatttttgttatgccacttaaccgcaatgatttctacgtgtgtcaatccaattttttacggatttctcaataagaatttccaacgcgatctgcaattcttcttcaatttttgcgattttcggtcaagggacgacgactatgagaccatcgctatgtctactatgcatactgatgtgtccaagacatccttaaaacaagccagtcctgtggctttcaagaagattaacaataacgatgataacgagaaaatctag

SEQ ID NO: 197144 - DNA, 78 bp, synthetic construct
  misc_feature 1..78: note = Description of Artificial Sequence: Synthetic coding sequence
  source 1..78: mol_type = other DNA
atgaacagcaccctgttcagccaggtggagaaccacagcgtgcactcaaatttttctgaaaagaatgctcaactttag

SEQ ID NO: 197145 - DNA, 183 bp, synthetic construct
  misc_feature 1..183: note = Description of Artificial Sequence: Synthetic coding sequence
  source 1..183: mol_type = other DNA
atgaacagcaccctgttcagccaggtggagaaccacagcgtgcactccaatttcagcgagaaaaatgcacagttactggccttcgagaatgacgactgtcatctgcccctggccatgattttcactctggctctcgcatacggggctgtgatcattctcggcgtaagcggcaatctggcctag

SEQ ID NO: 197146 - DNA, 1146 bp, synthetic construct
  misc_feature 1..1146: note = Description of Artificial Sequence: Synthetic coding sequence
  source 1..1146: mol_type = other DNA
atgggccccatcggcgccgaggccgacgagaaccagaccgtggaggaaatgaaagtggagcaatacggcccacagacaactcctcggggggaactggttcccgatcctgagccggagttgatcgacagcactaagctgatcgaggtccaggtggtgctcatcctggcctattgtagtattattctgctgggggtaatcgggaactctttggtgatccatgtggtgataaagttcaagtcaatgaggaccgtaaccaattttttcatagctaatctggctgtagcggacctgttggttaataccctttgtctaccttttaccctgacttatacccttatgggggagtggaagatgggccccgtcctctgtcatctggtgccgtacgcccagggactggcagtgcaagtatctaccataaccctgacggtgatagccttggaccgccacagatgtatcgtctatcatttggagtctaaaatatctaaacgaatctctttcctgattatcgggctagcctggggaatttccgctctccttgcatcccccctggctatcttccgcgagtattcactgatcgagatcatcccagactttgaaatcgtggcatgtacagagaagtggccaggcgaggagaagagtatatatggtactgtgtactcactgtcctccctcctcatcctctacgtgctgcctcttggcattatctccttctcatatacacgcatctggagtaaattgaagaatcatgtcagccccggggctgctaacgaccactatcaccagagacgccagaaaaccaccaagatgctggtgtgtgtcgtcgtcgttttcgccgtgagctggctcccactacacgcttttcagctagctgttgacatcgactcccaggtcctcgatctcaaggagtacaaacttattttcactgtctttcacattatcgcaatgtgctcaacctttgccaatcccctgctgtatggctggatgaactccaactatcgaaaggccttcctgtctgcattccgctgtgaacagcgcctggacgcaatccattcggaggtctcagtgacctttaaggcgaaaaaaaatctggaagtgcgaaagaactcgggccccaatgatagcttcactgaagccaccaacgtctag

SEQ ID NO: 197147 - DNA, 1146 bp, synthetic construct
  misc_feature 1..1146: note = Description of Artificial Sequence: Synthetic coding sequence
  source 1..1146: mol_type = other DNA
atgggccccatcggcgccgaggccgacgagaaccagaccgtggaggaaatgaaggtggagcagtatggaccacagaccacacctcggggagagctagttccagaccccgagcctgaactgattgatagtactaaattaatcgaggtacaagtcgttcttattctggcgtattgcagcatcatcctattgggcgtgattgggaattcccttgttatccatgtcgtcattaagttcaagtccatgcgcacggttaccaatttttttatcgccaacttagcagtggcagatctgttggtgaacacactgtgcttacctttcaccctaacatatacgctcatgggagagtggaaaatggggcccgtactgtgccatctcgtcccctatgcccaaggcctcgccgtgcaggtatctactattaccctgactgtcattgcccttgatcggcaccgctgtatcgtctaccacctggagtctaaaatctctaagagaatctccttccttatcatcgggctggcatgggggatatctgcactgttagcctcacccctcgcaatcttccgcgaatatagcttaatcgagatcatcccagatttcgagatcgtggcctgtacagagaagtggcctggagaagagaaaagtatctacggcacggtttactctctgagctcattgctcatactttatgtgctgccactcggtatcatctccttttcctacacccgtatctggtccaagctgaagaaccatgtttcaccgggggcagccaatgatcattaccatcagagacgtcagaagacgacgaaaatgctggtatgcgtcgttgtggtgttcgccgtctcctggcttccgctgcatgcttttcaattggccgtagatattgatagtcaggtgctcgatctcaaggagtataagcttatctttacagtgtttcatattattgccatgtgctccacgtttgctaatccactgctgtatggctggatgaattctaattaccggaaggcctttctctccgcttttcgttgcgagcagcgtctcgacgctatacattcagaagtctccgtgaccttcaaggctaaaaagaatcttgaggtacggaaaaatagcggaccaaacgactccttcacagaggcgacaaacgtttag

SEQ ID NO: 197148 - DNA, 1338 bp, synthetic construct
  misc_feature 1..1338: note = Description of Artificial Sequence: Synthetic coding sequence
  source 1..1338: mol_type = other DNA
atggacctggagctggacgagtactacaacaagaccctggccaccgaaaataacacggccgccacccgcaatagcgatttcccagtgtgggatgactataagtcctcagtagatgacttacagtatttcctgatcggactgtacacttttgtctccctgcttgggtttatgggaaatctactgatccttatggcgctcatgaagaagcgtaaccagaagaccaccgtcaatttcctcataggcaatctggcgttctccgacatcctggtcgtactattttgttcaccattcacacttacctccgtgcttctggatcagtggatgtttggcaaggtgatgtgtcacatcatgccttttctgcagtgcgtcagcgtcctcgtaagtacactgatactgatctcgattgctattgtgcgctaccatatgatcaaacacccgatctctaataatctcacggccaaccatggatacttcctgatcgcgacagtgtggaccttggggttcgctatttgttctccccttcccgtgtttcactcccttgtggaattacaagaaaccttcggctcggcactgctctcttcacgctacttgtgtgtggaaagctggccttcagactcataccggattgcatttacaatctcgctgcttttggtacagtatattctgccactggtgtgcctgaccgtttcgcacacctccgtgtgcagatctatttcctgcgggctttccaacaaggaaaacagattggaggaaaacgaaatgattaatctaaccctccatccctccaaaaaatcaggaccccaagtgaaactcagcgggtcgcacaagtggagctacagcttcattaaaaagcatagacgacggtactcaaaaaaaaccgcttgtgtgctgcctgccccagaacgaccttcacaagaaaatcatagtcgtattttaccagagaactttggaagcgtacggagtcagctatcctcttcttcgaagttcatccctggtgtgcccacctgtttcgagatcaagcctgaagagaactcagatgttcacgagctcagagttaaacgctctgtgactagaattaaaaagcgcagccggtccgtattctacagactgaccatccttatccttgttttcgcagtttcttggatgcctcttcatctcttccatgtcgtgaccgactttaacgacaaccttatttctaaccgtcactttaagctagtgtactgtatctgccatctcctgggtatgatgtcttgctgcttgaaccccatcctctatggctttctgaataacgggattaaagccgatctcgtgtctctgattcactgtctacacatgtag

SEQ ID NO: 197149 - DNA, 1338 bp, synthetic construct
  misc_feature 1..1338: note = Description of Artificial Sequence: Synthetic coding sequence
  source 1..1338: mol_type = other DNA
atggacctggagctggacgagtactacaacaagaccctggccaccgagaacaacaccgctgccacaagaaacagtgattttccagtatgggatgactacaagtcctcagtggatgacctgcagtactttctgattggattgtatacgtttgtcagcctgctcggctttatgggcaatctgttaatcctcatggcactcatgaagaagagaaatcagaaaaccacagtcaactttcttattggcaatctcgcttttagtgacatcctggtggtattgttctgtagcccgttcacactcacatctgtactgttggatcagtggatgtttggtaaggtcatgtgtcatatcatgccatttctgcagtgcgtgtcagtgcttgtgtcaacgcttatattgatttctattgcaatcgtaaggtatcacatgatcaaacaccctatcagcaacaaccttacggctaaccatgggtattttctaatcgcgacagtctggaccctcggatttgctatttgcagtccgttacccgtgttccattcactggtagagctgcaagaaacatttgggagcgccctactgagtagtaggtacctgtgcgtggaatcttggccatccgactcgtacagaatcgcctttacgatatccctattactcgtccaatacattttgccccttgtttgcctaactgtaagccacactagcgtttgcaggagcatcagttgcgggctctctaacaaggaaaaccgactggaagaaaacgagatgataaacctgacgctgcacccgtctaaaaagagcggtccccaagtgaagttgtccggttcccacaagtggagttacagctttatcaagaaacatcgccgtcgatattcaaaaaaaaccgcttgtgtgttacctgctcctgaacgaccctctcaggaaaatcattcaagaatcctgcccgaaaattttggaagcgtgaggtcccagttgtcaagtagcagcaaattcattccgggggtgcccacctgttttgaaatcaagccagaggagaattctgatgtacacgagctgcgggttaaaagatctgttaccagaatcaaaaaacgcagcaggtcagtgttctaccggttgactatcctcattctcgtgttcgcagtgagttggatgcctctccatctgtttcatgtggtgacagacttcaacgacaacctaatttccaatcgacactttaaactggtttattgcatctgccaccttctcggtatgatgagttgctgtcttaatcccattctatatggcttcctcaacaatggcataaaggcagatctggtgagtctgattcactgcctacatatgtag

SEQ ID NO: 197150 - DNA, 1338 bp, synthetic construct
  misc_feature 1..1338: note = Description of Artificial Sequence: Synthetic coding sequence
  source 1..1338: mol_type = other DNA
atggacctggagctggacgagtactacaacaagaccctggccaccgagaacaacactgcagctacgaggaactcggattttcccgtgtgggatgattacaaatcctctgtggacgatctccagtattttctgattggactgtataccttcgtttctctgcttgggttcatgggcaatttgctcatcctaatggcccttatgaaaaaaaggaaccagaaaacaacggttaacttcttaattggcaacctggccttttctgatattcttgtggtgctgttctgcagtcctttcacactgactagtgtactgctcgatcaatggatgttcggaaaggtaatgtgccatatcatgccatttcttcagtgtgtttccgtgcttgtgtccacgctcatcctgatctcgatcgctattgttcggtaccatatgatcaaacatcccatatccaataatctgacagccaaccacggctatttcctcatagccacagtgtggacattgggcttcgcgatttgttccccactacctgtctttcattcactggtggagctccaggaaacgtttgggtccgcactattatctagtagatacctgtgcgtcgagtcctggccttcagacagctaccggattgctttcacaatctccctgctcctggtgcagtacattttacccttggtttgtcttacagtgtcacacacttctgtctgtagaagcatcagctgcgggctgagcaataaagaaaaccggttggaagaaaatgagatgattaacctgaccctgcacccatccaagaagagtggtcctcaagttaagctgagcggatcacataagtggtcttatagcttcatcaaaaagcacagacgaagatatagcaagaagacagcctgtgtgctgccggcaccagaaaggcccagccaggagaatcacagcagaatactccctgagaatttcggctcggtgcgctcccagctatcctcttcgtcgaaattcattcctggcgtccccacttgttttgaaatcaagcccgaggagaactctgacgtgcatgaactgagggtcaaaagaagtgtcacaagaatcaaaaaacgctccagatcagtgttttatcgactcactatcttaatcttggtatttgctgtgagttggatgccacttcatctttttcacgtggtcactgacttcaatgataaccttatcagcaaccgtcatttcaagctcgtgtattgcatatgccacctcctgggaatgatgtcttgctgcctgaatccgattctctacggctttctgaacaacggaattaaagcagatctggtgagcctgatacattgtctgcacatgtag

SEQ ID NO: 197151 - DNA, 987 bp, synthetic construct
  misc_feature 1..987: note = Description of Artificial Sequence: Synthetic coding sequence
  source 1..987: mol_type = other DNA
atggacaacgccagcttcagcgagccctggcccgccaacgccagcggcccagaccctgcactgtcctgttccaacgcatccaccctggctcccttacctgccccactcgcggtggcagtacccgtggtgtatgcagtcatatgcgcggtgggtctagccgggaacagcgctgtgttatacgtgctcttacgcgcccctcgcatgaaaactgtcaccaacctcttcatcttaaatctggccatcgccgatgagctctttactctggtcttgcctatcaacatcgctgacttcttgttgagacagtggcctttcggggaactgatgtgtaagctcatagtcgcgatcgaccagtataatactttcagttctctctacttccttaccgtgatgagcgccgacaggtacctggtcgtcctggccaccgcagaaagtaggagggtcgcgggaaggacctactccgcggctagagccgtgtcgctggccgtctggggtatcgtgaccttagtggttctgcccttcgcagtctttgcccgcttagacgatgagcagggaagacgccagtgcgtcttggtgtttcctcaacccgaagccttctggtggcgcgcttctaggctgtacaccctggtcctcggatttgccattcctgtctctactatatgcgtgctctatactacactcttgtgccgtctgcacgccatgcgcctcgacagtcacgctaaggcgctcgagcgagccaagaaacgggtgacgtttctagtcgtggctatactcgccgtgtgcctcctctgctggactccttatcacttgtcgaccgtggtcgctctgaccacagatctgccccagaccccccttgtgatcgctatctcttattttatcacatccctgtcttacgccaatagctgcttgaatccctttctctatgccttccttgacgctagctttcgtagaaatctaaggcagttaattacctgtcgcgctgcggcgtag

SEQ ID NO: 197152 - DNA, 1599 bp, synthetic construct
  misc_feature 1..1599: note = Description of Artificial Sequence: Synthetic coding sequence
  source 1..1599: mol_type = other DNA
atgctggccgagcccttccccaaggtggtggccagcctgatcatcctgcacctatcaggcgctactaaaaaaggtaccgagaagcagacgacatcagagactcagaaatcagtccagtgcggcacctggacaaagcacgcggagggcgggatattcactagtcccaactatccctccaagtatcccccagaccgggaatgcatttatattatagaggccgccccccgccagtgcatcgaactgtacttcgacgagaagtacagcatcgaaccctcttgggagtgcaaattcgaccacattgaagtgagagatggaccattcgggtttagccccataatcggccggttttgcgggcagcagaatcctcccgtgatcaagtcctcgggtaggttcctctggatcaagtttttcgccgatggcgagttggagagtatggggttctccgcccggtacaacttcacaccagacccagacttcaaagacctgggagctctcaaaccactacctgcctgtgagttcgaaatgggtggaagcgagggcatcgtggagtctatccagattatgaaggagggtaaagcaactgcttcagaggccgtggactgtaagtggtatattcgtgctccaccccgcagcaagatttatttgcgctttttagattatgagatgcagaactctaacgagtgcaagcgaaatttcgtggccgtttacgacgggtcttcaagcgtggaagacttgaaggctaagttctgttccaccgttgcaaatgacgtcatgttgagaaccggcctgggcgtgatccgcatgtgggccgacgaaggcagcagaaactcccgtttccagatgctgttcacgtcatttcaggagcctccgtgcgaaggcaatacctttttctgtcactctaacatgtgcatcaacaatactttggtttgtaacggacttcagaattgtgtatacccttgggatgagaaccactgcaaagagaagcgcaaaacgtctttactcgaccagctcactaacactagtggtactgtaatcggggtcacctcgtgcatcgtgattatcctgattattatcagtgtgattgtacagatcaaacaaccccggaagaaatacgtgcagaggaaaagtgattttgatcagacagtgttccaagaggtgttcgaaccacctcactatgagctgtgcactctgcgcggaacaggggccaccgccgattttgctgatgtagccgacgacttcgagaattaccataagctcaggcggtcctcctccaagtgcattcatgaccaccattgcggttcccagctctcttcgactaaaggctcgcggtcaaacctgtccacgcgagatgcctcgattctcacagaaatgccaacccagcccgggaagcctctcatccctcctatgaaccggcgcaacatccttgttatgaagcattcttacagtcaggacgcagcagacgcatgcgacatcgatgaaatcgaggaagttcccacaacttcccacaggctgagccgccacgacaaggccgtgcagaggttttgtctgatcgggtccctctcaaaacatgagtcggaatacaatacaacccgggtatag

SEQ ID NO: 197153 - DNA, 1602 bp, synthetic construct
  misc_feature 1..1602: note = Description of Artificial Sequence: Synthetic coding sequence
  source 1..1602: mol_type = other DNA
atgatccacggccggagcgtgctgcacatcgtggccagcctgatcatcttgcatctgagtggggccacaaaaaagggcacagagaaacagaccacaagcgagacccaaaagtccgttcagtgtgggacgtggacaaaacacgccgaaggcggcatttttacctcccccaattacccaagcaaatacccacccgaccgcgagtgcatctatattatagaagccgctccacgacaatgtattgagctttacttcgatgagaaatactctatagaaccgtcttgggaatgcaaattcgatcacattgaggtgcgggatggccctttcgggttttcaccaatcattgggcggttctgtggccaacaaaatccaccagtgattaagtcctcaggacggtttctttggattaagtttttcgctgacggcgaactggaatcaatggggtttagtgctcgctataacttcacgccggaccctgatttcaaggatcttggcgcactcaagcctctaccagcctgtgaatttgagatgggcgggtccgagggaatagtggagagcatacagattatgaaagagggcaaggcgactgcctccgaggcggtggactgtaaatggtacattcgagccccaccaagatccaagatctacctgaggttcctggactatgagatgcaaaactccaatgagtgtaaacgcaactttgtggctgtttatgatggatccagttctgtcgaggacctgaaagctaaattttgctccacagtggccaacgatgtgatgctgcgaactggactgggagtaataagaatgtgggctgacgaggggagccggaatagtagattccaaatgctgtttacatcttttcaagagccaccttgcgaaggcaataccttcttctgccactcaaacatgtgtatcaacaacactctggtatgcaacggactgcagaattgtgtgtacccttgggacgaaaatcactgcaaagagaagaggaaaaccagcctgctggatcagctcacaaacacttctggtaccgtgatcggggtaaccagctgtattgttattatcctgatcatcatcagcgtgattgtccaaatcaagcagcctcgaaagaaatatgtgcaaaggaaatcagactttgaccagaccgtcttccaggaggtcttcgaacctccccactacgaactgtgtacgctccgcggaactggggccacggccgactttgcggacgtagcagatgatttcgagaactatcacaagctgcggcgctccagctccaaatgcattcatgaccaccattgtggatcccagctcagcagcactaagggcagtagaagcaatttgtccacaagagatgcttccatccttaccgagatgcccacccaacccgggaagccactgattccacccatgaatagacggaacatcctggtgatgaagcactcctattctcaagacgccgcagacgcatgtgatattgatgaaatcgaggaagtgcccacaactagtcacagactttcaagacatgacaaagcagtgcagcgcttctgccttatcggatcactgtctaagcatgaaagcgagtacaacaccacaagggtgtag

SEQ ID NO: 197154 - DNA, 471 bp, synthetic construct
  misc_feature 1..471: note = Description of Artificial Sequence: Synthetic coding sequence
  source 1..471: mol_type = other DNA
atgctggccgagcccttccccaaggtggtggccagcctgatcatcctgcacctgagtggagctaccaagaagggcaccgaaaaacagacaaccagcgaaacccagaaaagcgtgcagtgcggcacctggaccaagcatgctgagggtggtatctttacgtcccctaattatccttcaaagtaccctccggatagagagtgtatctacattatcgaggccgctccaagacaatgcattgagctttatttcgacgaaaagtactctatcgagccctcttgggaatgcaagtttgatcatatcgaagtgagagacggtccctttgggttctcacctatcattggccggttctgtggccagcaaaacccacctgtcattaagtccagtggcagatttctatggattaagttcttcgcagacggcgaacttgaaagcatgggcttcagtgcccggtacaactttaccccagaatag

SEQ ID NO: 197155 - DNA, 1602 bp, synthetic construct
  misc_feature 1..1602: note = Description of Artificial Sequence: Synthetic coding sequence
  source 1..1602: mol_type = other DNA
atgatccacggccggagcgtgctgcacatcgtggccagcctgatcatcttgcatctttccggagcaacgaaaaaaggaaccgaaaaacagaccacaagtgagacccagaaaagcgttcaatgtgggacttggacaaagcacgcagagggagggatcttcacctccccaaactatccaagtaaatatcccccggaccgggaatgcatttatatcattgaggccgccccgcgacagtgcatcgaactgtatttcgacgagaaatattcaatagagccctcatgggaatgtaaattcgatcacatcgaggtccgagatggcccatttggcttctccccgatcattggcagattctgcgggcagcagaatccacccgtcatcaaatcttctggacgcttcttgtggatcaagttttttgcggatggtgagttggagagtatgggctttagtgctcgctacaatttcacccccgatcccgatttcaaagatctcggtgcactcaaacctctgccagcctgtgagttcgagatgggaggttcagaggggattgtggagagcatccagatcatgaaggaagggaaggccactgcctccgaggccgtggactgcaaatggtacatcagagccccaccccgcagtaaaatctacctgagatttctggattacgagatgcaaaactcaaacgaatgcaagagaaattttgtggccgtttacgatggctcaagctcagtggaggacctgaaggccaagttctgcagtaccgtagccaacgacgtaatgctaagaactggattgggagtgatccgcatgtgggctgatgagggtagccgtaatagtcgtttccagatgctgttcactagtttccaagaacccccatgtgagggcaacacatttttctgtcatagcaatatgtgcataaataacactttggtttgcaacggacttcagaattgcgtgtacccctgggatgagaaccactgcaaagaaaagaggaaaacttcattgctcgaccagctcactaacacctcaggaaccgttatcggagtgacctcatgcatcgttataatccttatcatcattagcgttattgtccaaattaagcagcccaggaagaaatacgtgcagcggaagtcagattttgaccagacggtctttcaggaggtgttcgagccaccccactatgagctctgcacactccgcggcaccggagcaacagctgacttcgctgacgtggcggatgattttgagaattatcacaaactgcgcaggtcttccagcaagtgtatccatgatcaccactgcgggagccagctgagcagtaccaagggctccaggtctaatctctccacaagggatgcctccattctgaccgagatgcctactcagcccggaaagcctctcatcccccctatgaacagaaggaacatccttgtgatgaagcattcatatagccaggacgccgcggacgcttgtgacattgacgagatcgaggaggtgccaaccacaagtcatcgcctaagcagacacgacaaggccgtgcaaagattttgcctcattggcagtctctcaaagcatgaatctgagtataacactacaagggtgtag

SEQ ID NO: 197156 - DNA, 1017 bp, synthetic construct
  misc_feature 1..1017: note = Description of Artificial Sequence: Synthetic coding sequence
  source 1..1017: mol_type = other DNA
atgagcggcagcagcctgcccagcgccctggccctgagcctgctgttggtgtctggtagcctgctgccaggaccgggggctgcacaaaacgcagggttcgtcaaaagccccatgtccgagacaaagctcaccggagatgcatttgagctttattgtgacgtggttggctcccctacccccgagatacaatggtggtacgccgaagtcaaccgggcagagagttttaggcaactctgggacggagccaggaaacggcgagtgacagtaaatacggcttatggcagtaatggagtcagtgtgctccggattacgcggctaacactggaagacagcggtacgtacgagtgtcgtgcgagcaacgaccccaagcgtaatgacttacgtcagaatccatcgattacgtggatcagagcccaggccaccatctcagtgttgcagaagccacgcatcgtgacgtccgaagaggtcatcatcagggattcaccagtcctgcccgtcacactgcagtgcaaccttacctcttcctcacataccctgacatattcatattggacgaagaacggcgtggaactatccgctactcggaagaatgcgtctaatatggagtatcggataaataagcccagagcggaggattccggcgagtatcactgcgtctaccatttcgtgagtgctccgaaagctaatgctaccatagaggttaaggccgctccggacatcaccggccacaaacggtcggaaaacaagaatgaagggcaggacgctaccatgtattgtaaaagcgtgggttatccccaccctgactggatatggcgcaagaaggaaaacgggatgccaatggatatcgtcaacacgtccggcagattttttatcattaacaaagagaattacactgagctcaacatcgtgaacctgcagatcacggaagacccaggggagtacgaatggtgtggcgctacctggcctcacagcggcctctcttgggagttctggttgaagctaagttctctttggtag

SEQ ID NO: 197157 - DNA, 1197 bp, synthetic construct
  misc_feature 1..1197: note = Description of Artificial Sequence: Synthetic coding sequence
  source 1..1197: mol_type = other DNA
atgagcggcagcagcctgcccagcgccctggccctgagcctgctgcttgtgtcagggtcactcctgcctggccctggtgccgctcagaacgcaggctttgttaaaagcccaatgtccgagacgaagctcacgggggatgcattcgagctctattgtgatgtggtaggtagtcccacccccgagatccaatggtggtacgccgaagtgaaccgcgcggaatcctttcggcaactgtgggatggcgcccgcaaacggagggtcaccgtcaacactgcctatggctcaaacggggtgtcggttctgcggataactaggttgaccctagaggatagcggaacttacgagtgtcgtgctagcaacgatccaaaacggaatgacttacgtcagaacccgagtataacatggattcgggcacaggcaactatcagtgtgctacagaaacccagaattgtaacgtccgaggaggtcataatccgcgatagtcctgtgctccccgtgaccctccagtgcaacctgacgtccagctcgcacaccctaacatactcctactggacaaagaatggcgttgaactcagtgccacacgtaagaatgctagcaacatggaataccgtataaataagccccgtgcagaagacagtggagaataccactgcgtgtatcacttcgttagcgctcctaaggcgaacgccaccatagaagtgaaagccgctcctgacatcactggccacaaacgtagtgaaaacaaaaatgaaggccaggatgccacaatgtactgtaaatcggtcggatatccacacccggattggatatggagaaaaaaggaaaatggtatgcctatggacatcgtcaacactagcggccgttttttcattatcaacaaagagaattacacggagcttaatattgtgaacctccagatcacggaggacccaggtgagtacgagtgcaatgccaccaacgccataggttctgcgtctgtcgtaaccgtgttgagggtgcgatcacatctcgctcccctgtggccttttctcgggattcttgccgagataatcatattagtcgtgatcattgtggtctacgagaagaggaagcggcctgatgaggtcccagacgacgacgaacctgccggacccatgaagaccaattcaaccaacaaccacaaggacaagaacctacgccaacgcaacaccaattag

SEQ ID NO: 197158 - DNA, 849 bp, synthetic construct
  misc_feature 1..849: note = Description of Artificial Sequence: Synthetic coding sequence
  source 1..849: mol_type = other DNA
atgagcggcagcagcctgcccagcgccctggccctgagcctgctgcttgtgtcgggttctctcctccccggacccggagccgctcagaacgagccgcgcatcgtgacctccgaggaggtgatcatcagggattccccagttctgccagttacgcttcagtgcaatttgaccagtagttctcataccctgacctactcttattggaccaaaaacggggttgagctgagtgcaacgcggaagaacgcatcaaacatggaataccgaataaataagcctcgagcagaggactcaggtgagtatcactgcgtgtatcactttgtgagcgctccgaaggccaatgctacaatcgaggtcaaagccgctcccgatattaccgggcataaacgctctgagaataagaatgagggccaggacgccaccatgtattgcaaatctgtgggatatccccaccctgactggatctggagaaaaaaggagaatgggatgccaatggacattgtcaatacgtccggtcggttttttatcattaacaaggagaactatacagagctgaacattgtgaatctgcaaattacagaagatcccggagagtacgagtgcaatgccactaacgccattggatccgcctcggtcgtgaccgtcctaagagttcgctcacatcttgcacctctttggccattcctcggaattttggcagaaatcattattcttgtcgtgatcatagtggtctatgagaagcgaaaacgcccagacgaagtgcccgacgacgacgagcctgccggcccgatgaagaccaattctactaataaccataaggacaagaatctgaggcagaggaatacgaactag

SEQ ID NO: 197159 - DNA, 582 bp, synthetic construct
  misc_feature 1..582: note = Description of Artificial Sequence: Synthetic coding sequence
  source 1..582: mol_type = other DNA
atgagcggcagcagcctgcccagcgccctggccctgagcctgctgctggtgtcaggctctttacttcccggtcctggggcggcccagaacgctgccccagacattacgggacacaagagaagcgagaacaagaacgaaggtcaagacgccacgatgtattgtaagagcgtcggatatccccatcccgattggatctggagaaagaaggagaacggaatgcctatggacatcgtgaacacatccggcagatttttcattatcaataaggagaactacaccgaactcaatatcgttaatttacagattactgaagaccccggcgaatatgaatgcaacgcaaccaatgccatcggaagcgcctcagttgttactgttctgagggttaggtcccacctggcccctttatggcccttcttagggatattggcagaaattataatcctagtcgtaattattgtcgtctacgagaagcgtaaaagaccagacgaggtgcctgatgatgatgaaccagccggtcctatgaaaacaaactctaccaacaaccataaagacaagaatttgcgccagcgcaataccaattag

SEQ ID NO: 197160 - DNA, 1185 bp, synthetic construct
  misc_feature 1..1185: note = Description of Artificial Sequence: Synthetic coding sequence
  source 1..1185: mol_type = other DNA
atgagcggcagcagcctgcccagcgccctggccctgagcctgctgctcgtaagtggctccttgttacctgggcctggagccgcacaaaacgcaggctttgtgaaaagcccaatgagcgagacgaaactgacaggagacgcattcgaactgtattgcgatgtcgtagggtcgcccacccccgaaatccagtggtggtacgcagaggtcaatagagccgagtctttccgccagctttgggacggcgcccgcaaaagaagggttacagtaaacacggcgtatggaagcaatggagtttcggttctgcgcattacgcggttgaccctcgaagatagcggtacttacgagtgccgggcatccaatgacccaaagagaaacgacctcagacagaacccaagcattacatggatccgcgctcaggcaaccatcagcgtgctgcaaaagccgcgcatagtcacttcggaagaagtgatcatacgggactctccagtgctcccggttacgttacagtgcaatctcactagttctagtcatactctgacttattcgtactggacaaaaaatggtgtggagctgtccgctacccggaaaaacgcctccaacatggaatatagaatcaacaaaccacgggcggaggactcaggggaatatcactgcgtatatcacttcgtttccgctccaaaggccaacgctactatcgaggtcaaggcggcgcctgacattaccggacataagcgatctgaaaataaaaatgagggacaagacgctactatgtactgcaaaagcgtaggatacccccatcccgactggatctggcgaaagaaagagaacgggatgcccatggacattgttaacaccagcggtcgtttcttcatcatcaataaagagaattatacggagctgaatattgtcaatctccaaattactgaagaccctggagagtacgaatgcaatgcgaccaacgccatcggatccgcaagtgttgtaacggtgctgcgtgtgcgcagccatctggctccactgtggcctttcctgggtatcttggcggagattattatcctggtggtgatcatcgttgtatacgagaagagaaagcggcctgacgaggtccctgacgtgccccctcggaagactaacagcaccaacaatcacaaggacaaaaatcttcggcagagaaatacgaactag

SEQ ID NO: 197161 - DNA, 513 bp, synthetic construct
  misc_feature 1..513: note = Description of Artificial Sequence: Synthetic coding sequence
  source 1..513: mol_type = other DNA
atgatggccggcatgaagatccagctggtgtgcatgctgctgctggcattctcatcgtggtctctgtgcagcgactcagaggaggagatgaaggccctcgaggcagatttcctcaccaacatgcatactagcaagatcagtaaggcccatgtgccttcgtggaagatgacactcttgaacgtgtgctcgctcgtcaataatctgaactcccctgctgaagaaacaggggaagtgcacgaggaagagttagtagcgcggaggaagctgccaacagccctggatgggttttccctggaggccatgctaacgatataccaactgcataaaatctgtcactcccgcgcatttcagcattgggaactgattcaggaagatatactcgacaccgggaacgataagaatgggaaggaggaagttatcaagagaaaaatcccttatatcctgaagagacagttgtatgagaacaagccccggcgcccatacatcctaaaaagggattcttactactactag

SEQ ID NO: 197162 - DNA, 348 bp, synthetic construct
  misc_feature 1..348: note = Description of Artificial Sequence: Synthetic coding sequence
  source 1..348: mol_type = other DNA
atgaccctgctgaacgtgtgcagcctggtgaacaacctgaacagcccggcggaggagaccggcgaggtgcatgaggaggaacttgtagccagacgaaaattgccaacagcccttgacggcttttcacttgaagctatgctgaccatctatcagttacacaaaatttgtcactctagggcatttcaacactgggagttgatccaggaggatatcctagacacagggaatgataagaatggcaaggaagaggtcatcaagcgcaagattccctatattctgaagcggcagctctacgaaaacaagccccggcggccctatatactcaaacgggactcttactattattag

SEQ ID NO: 197163 - DNA, 288 bp, synthetic construct
  misc_feature 1..288: note = Description of Artificial Sequence: Synthetic coding sequence
  source 1..288: mol_type = other DNA
atgatggccggcatgaagatccagctggtgtgcatgctgctgctggcattttcctcatggtctctttgctcagacagcgaagaagagatgaaagctctcgaagctgattttctgacgaacatgcatacctcaaaactgatccaggaagacatcttggacaccgggaatgataaaaacggcaaagaagaggtgataaagagaaagattccctacatcttgaaaagacagttatacgagaataaacccagacgcccatatatcctgaagagggactcttattactattag

SEQ ID NO: 197164 - DNA, 1257 bp, synthetic construct
  misc_feature 1..1257: note = Description of Artificial Sequence: Synthetic coding sequence
  source 1..1257: mol_type = other DNA
atgcggctgaacagcagcgcccccggcacccccggcacccccgccgctgacccttttcagcgggcccaagccggtctagaggaagcccttcttgctcccgggtttggcaatgcctccggcaacgcctccgaaagagtactggccgctccttcgtctgaattggacgtcaataccgacatttactctaaggtgttggtgacagccgtgtatcttgctctattcgttgtgggcaccgtaggcaacacggtgacagcgtttacgctggcacgcaagaaaagccttcaatcactgcaaagcactgtgcactaccatctgggatccctcgcgctgagtgatctcttaactttgctcttggctatgcccgttgaactctacaatttcatctgggtgcatcacccatgggccttcggcgatgccggctgtaggggctactacttcctgcgtgatgcgtgcacttacgctacagcactgaatgtagccagtctgtccgtcgagagatacttggccatttgccaccccttcaaagcaaagactttgatgagccgcagtcgcactaaaaaatttattagcgctatctggctggccagtgctctgctggctgtgcccatgctgtttacaatgggggagcagaatagaagcgcagacggccaacacgctggaggtctggtttgtaccccgacaatccacactgcaacggtcaaggtggttatccaggttaacacttttatgagcttcattttccccatggtggttatcagcgttcttaacacaatcatcgcgaataagcttaccgttatggtccggcaggccgcagagcagggtcaggtgtgtacagtggggggagagcatagcaccttctcaatggcgattgaacctgggcgggtgcaggcccttcggcacggtgtgcgcgtcctgcgggcggtggtgatcgcatttgtggtctgctggctaccgtaccacgtcagaaggctcatgttttgttatatctccgatgaacaatggacgccgttcctctatgatttctaccattacttttatatggtgacgaatgcactgttttacgtgtcatccacaatcaaccccatattgtataatttggtgtctgcaaattttagacacattttcttggccactcttgcttgtctatgccccgtttggaggagaagaaggaaaaggccagccttttccaggaaagccgattccgtgagctccaatcacaccctgtctagtaatgcgactcgcgagaccctctactag

SEQ ID NO: 197165 - DNA, 951 bp, synthetic construct
  misc_feature 1..951: note = Description of Artificial Sequence: Synthetic coding sequence
  source 1..951: mol_type = other DNA
atgggcgtgtgcggctacctgttcctgccctggaagtgcctggtggtagtgtctctcagactgttgttcctagtgcctacaggggtacctgtgaggtccggggatgccactttcccaaaggcaatggacaacgtgacagtacggcagggcgaatccgctacactacggtgcactatagacaaccgagtcacccgtgttgcctggttgaatcgatcgacaatcctgtatgccggcaacgataaatggtgcctggaccccagagttgtgctgctcagtaatacccaaacgcaatattcaattgaaatacaaaacgtggatgtgtacgatgagggaccttatacctgttccgttcagactgacaaccacccaaaaacctcccgggtccacttaatcgtccaagtgtcgcctaagatagtcgagatatcgtccgacatttctatcaacgaggggaataacattagcttgacctgtattgctaccggccgacccgagcctactgtcacatggagacacatcagccctaaagccgtaggtttcgtgtccgaagatgagtaccttgagattcagggcatcactcgcgagcagtcaggcgactacgaatgctcggctagcaatgacgtggccgcccccgttgtgcgcagggttaaggtcactgtaaattatccaccttacataagtgaagctaagggcactggggtacccgtcggccagaagggaacactccagtgcgaggccagcgcagtgccgtccgcggaatttcagtggtacaaagacgacaaaagattaatcgagggcaagaagggagtaaaagtcgagaatcggcctttcttaagtaaactcatcttcttcaatgtatccgaacacgactacggaaactatacatgtgttgccagcaacaagctggggcacacgaatgcctctattatgttgtttggagaaactgtcctgtag

SEQ ID NO: 197166 - DNA, 1035 bp, synthetic construct
  misc_feature 1..1035: note = Description of Artificial Sequence: Synthetic coding sequence
  source 1..1035: mol_type = other DNA
atgggcgtgtgcggctacctgttcctgccctggaagtgcctggtggttgtgtctctgagattgctattcctggtgcccactggcgttcccgttcgttcaggagacgcaacgtttcccaaagccatggacaacgtcactgtgagacagggagagagtgctacgcttcgttgcacaatcgacaatcgggtgacacgggtggcttggctgaatcgatctaccatcctctatgcagggaatgataagtggtgcctcgacccaagagtggtgctccttagcaatacacagacacagtacagcatcgaaattcagaacgtggatgtgtatgacgaagggccctatacttgttcggtgcagacggataatcatccaaagacgtcaagggttcacctgattgtgcaggtgtctcctaaaatcgttgagatctcctccgacatcagcataaacgaaggaaacaacatttccctgacatgtattgctacaggccgacccgaacccaccgtgacatggaggcacatcagtcctaaggctgtgggcttcgtttccgaggacgaatacctcgagattcagggcatcacccgagagcagtcaggcgattacgaatgtagtgcctccaatgatgtcgccgcgccagtcgtgcgccgcgtgaaggtcacagtaaactaccccccctacattagtgaagctaaaggtacgggggtgcctgttggccaaaaagggacccttcagtgtgaagcgtcggctgtacccagcgcagagtttcagtggtacaaggatgacaaacgactcatagaaggcaagaagggtgtcaaggtggagaaccggccattcctgagtaaactgatcttttttaatgttagtgagcatgactatgggaattacacatgcgttgcaagtaacaaactcggtcacacgaatgcatcaatcatgctatttggtcccggcgctgtaagcgaggttagcaatggcacatcccgaagagcgggctgcgtgtggctactgcccctattggtacttcaccttttattgaagttttag

SEQ ID NO: 197167 - DNA, 1035 bp, synthetic construct
  misc_feature 1..1035: note = Description of Artificial Sequence: Synthetic coding sequence
  source 1..1035: mol_type = other DNA
atgaagaccatccagcccaagatgcacaacagcatcagctgggccatctttaccggtcttgcggccctgtgcctgtttcaaggagtccctgtgaggtctggagacgctacctttcccaaagcgatggataatgtgactgtgcgccagggcgagtcagcgaccctacgctgtacgattgataacagagtgactcgcgtggcttggctgaaccgctctacgattctgtatgccgggaatgataaatggtgccttgatccacgggtcgtgctgctatcgaacacacagacccagtactccatcgagatacagaacgtggatgtgtacgatgaggggccttatacctgttccgtccagaccgataaccaccctaagacttctagggtgcatctgattgtgcaggtttcccccaaaattgttgaaatttcatcagatatcagtatcaacgagggaaataacatttcactgacatgtatcgcaactggcagaccagaaccgacagtgacatggcgtcatatctctcccaaggcagtcggattcgtcagcgaagatgagtatctcgagatacaaggtataacaagagagcaatcaggagactacgaatgttctgcgtccaacgacgtggccgccccggtcgtcagacgcgttaaggtgacagtcaactatccaccctacatctcagaagccaaggggaccggtgtgccggttggccagaaaggcacgctgcagtgcgaagcttccgccgttcctagtgctgagtttcagtggtataaggatgataaaaggttgattgagggcaagaaaggagtaaaagtcgagaatagacccttcctgagcaaattgattttcttcaatgtgagcgagcacgactacggcaattacacgtgcgtcgcctccaacaagctcgggcataccaacgcaagtatcatgctctttggccccggcgccgtgtccgaggtaagcaatggcacaagcagaagggcgggctgtgtgtggctactcccactattggtgctgcacctcctgctcaaattttag

SEQ ID NO: 197168 - DNA, 1041 bp, synthetic construct
  misc_feature 1..1041: note = Description of Artificial Sequence: Synthetic coding sequence
  source 1..1041: mol_type = other DNA
atgaacggcaagcggaacggcgagggcggcaagcggtggaagtggaaaggcaccggtgtgcccgtgcggagcggggacgcgacatttccaaaagccatggacaacgtcactgtccgccagggcgagtctgccacactaaggtgcacaatcgacaatagggtaacaagagtggcctggctcaatcgtagtacaatcctttatgccggaaatgacaaatggtgcctcgacccccgagtggtgctgctgtcaaacacccagacgcagtattctattgaaattcagaacgttgatgtttacgacgaaggcccatacacctgtagcgtgcagactgacaaccaccccaagacttcccgggtgcatttgatagtccaagtgagtcccaagattgtggagatctcatccgatatcagtataaatgagggaaataacataagtttgacctgcatcgcgaccggacgacctgagcccacagtgacatggcgacatataagcccaaaggcggtgggatttgtcagcgaagatgaatacctcgagattcagggcataaccagagagcagtcaggcgactatgaatgctcagccagcaatgacgtggccgccccggtcgtgcggcgcgtaaaggtgactgtgaactaccccccatatatatcagaagccaagggcaccggcgtgcctgtcggccagaagggcaccctgcagtgcgaggcctccgccgtgcccagcgctgaattccaatggtataaagacgataagcggttaatcgaaggaaagaaaggcgtcaaagtagagaataggccgtttctgagtaagctgatcttttttaacgtgagcgagcatgactacggcaattacacttgtgtcgcttctaacaagctgggacacaccaatgcctccattatgctttttgaggttaagaccacggctttgacaccatggaagggtcccggcgctgtaagtgaggtttcgaatggcacctcaaggagggccggatgtgtatggctgctgcctctgcttgtgctgcatctacttcttaaattttag

SEQ ID NO: 197169 - DNA, 1068 bp, synthetic construct
  misc_feature 1..1068: note = Description of Artificial Sequence: Synthetic coding sequence
  source 1..1068: mol_type = other DNA
atgaagaccatccagcccaagatgcacaacagcatcagctgggccatctttaccggtctggcggcattgtgtctgttccagggagtgcccgtgaggtccggcgatgcgacgtttccaaaagctatggacaatgtcacggtccgacaaggggagtccgcaactttaaggtgcaccatcgataatcgcgttactcgggtggcatggctgaatagaagcacaattttgtatgccggaaatgacaaatggtgtctcgatcctagggtagtgctgctcagtaacacccagacacagtattcgatcgagatacagaatgttgacgtgtatgacgagggaccctacacttgctctgtgcagaccgacaaccaccccaaaacctcacgagtacacttgattgtccaagttagtcctaaaattgtcgaaatctctagtgatatctcaattaacgaaggtaataatatctctctaacctgtatcgccacaggcaggcccgagcccacagtcacatggcgacacattagcccaaaagccgtcggcttcgtttcagaggacgagtacctcgaaattcagggcataacacgggaacagtctggagactacgaatgcagcgcatcaaacgacgtggcggctccagtggtccggcgcgtaaaggtgaccgtcaattaccccccatatatttcagaagctaaaggcacaggggtgccggtgggtcagaaagggacgctgcagtgtgaagcaagcgcagtaccgtcggcagaatttcaatggtataaagatgacaagaggcttatcgaaggcaagaagggcgtgaaagtggaaaaccggcccttcttaagtaagctcatttttttcaatgtgtctgagcatgactacggaaattacacttgtgtagcttctaacaaattgggacacaccaatgcaagtattatgctcttcgaagtaaaaacaacggcgctcactccttggaaggggcccggagccgtatccgaagtgagcaacggaacttcccggcgggcggggtgcgtttggttattacccctgctcgtcctgcatctactgctgaaattttag

SEQ ID NO: 197170 - DNA, 1068 bp, synthetic construct
  misc_feature 1..1068: note = Description of Artificial Sequence: Synthetic coding sequence
  source 1..1068: mol_type = other DNA
atgggcgtgtgcggctacctgttcctgccctggaagtgcctggtggtcgtttccctgagacttctgttcctggtgcccacgggggtcccagtgagaagcggggatgctacattccccaaagctatggacaatgttaccgtgcgccagggtgaatctgccactctccgatgcacgatcgataatcgcgtaaccagggtcgcctggttgaataggagcacaatcctctatgccggaaatgacaaatggtgcttagaccctagggttgtccttttgtcaaatactcaaactcagtattctattgaaatccagaacgtcgatgtctatgacgaaggaccatatacctgttccgtccagactgataaccatcccaagaccagccgcgtgcaccttatagtgcaggttagcccaaagatcgtcgaaatctcgtccgatatctccattaacgagggtaacaatatttcccttacttgcatcgctacagggaggcccgaaccgactgtgacctggagacatatctcgccaaaagcagtaggctttgtttctgaggacgagtatctggaaatccagggaataactagagaacaatctggggactacgaatgcagcgcgagtaatgacgtggccgcccccgtagtgcggagggtcaaagtcacggtaaactatccgccctacattagcgaggcaaagggaacaggcgtgccggtggggcagaaagggactctccagtgtgaggcgagcgcagtgccctctgccgagtttcagtggtataaggatgataagcgtttgattgaaggcaaaaagggcgtgaaggtggagaatcgtccctttctgtccaagctcatcttcttcaacgtgtcagaacatgactatggtaattacacttgcgtggcgtcaaataagttgggccataccaatgctagtatcatgctatttgaggtgaaaaccaccgctctgacaccatggaagggacccggagcagtatccgaggtcagtaacggcacatcgcgacgtgccggctgtgtctggctcctcccactgctcgtcctccatctgttgctgaaattctag

SEQ ID NO: 197171 - DNA, 2373 bp, synthetic construct
  misc_feature 1..2373: note = Description of Artificial Sequence: Synthetic coding sequence
  source 1..2373: mol_type = other DNA
atgctgcggggcggccggcggggccagctgggctggcacagctgggccgccgggcctggttccctgcttgcttggctcattctcgcctcagcgggagcagctccttgccctgacgcgtgttgccctcatggttcctcaggtctcagatgtaccagagacggagctctagactccctgcatcacctgccaggcgctgaaaacctcaccgaactgtatattgagaatcagcaacatcttcagcacctggagctgcgcgacttgcgtgggctgggcgagctccgcaaccttactattgtcaaatctggcctgcggtttgtggctccagatgcttttcatttcaccccaaggctctccagactaaatctgtcttttaatgcactggagagtcttagctggaagaccgtccaaggactttctctgcaagagctggtcctgtccggaaaccctctgcattgctcatgtgccctgaggtggctccagcgatgggaagaagaaggccttggtggcgtcccagaacagaagttacagtgtcatggacagggccccctggctcacatgcctaacgcatcgtgtggggtaccaactctaaaggttcaagtccccaacgcttccgtcgacgtgggtgatgatgtgctgctgcgctgtcaggtggaagggcgcgggctcgagcaagccgggtggattctcacagaactggaacagtccgctactgttatgaagagcggaggcctgccatcactgggcctaactctggctaacgtgaccagcgacctaaataggaaaaacgtgacctgctgggctgagaatgacgtgggcagagccgaagtttccgttcaggtgaacgtgtccttccctgccagcgtgcaactgcacactgccgtagagatgcatcactggtgtatacccttctccgtggacggccagcccgcacccagtctgaggtggctattcaatgggtccgtgttgaacgagacatcctttatctttacagagtttctagagcctgccgccaacgaaaccgtgaggcacggctgcctgcgtctgaatcagccaacgcacgttaataatggcaactacacccttctggcagcgaaccctttcggtcaggcctccgccagtatcatggcagcatttatggacaatcctttcgagtttaaccctgaggatcccatccctgacacaaactccactagtggggacccagtagaaaaaaaggatgaaacacctttcggcgtttccgtcgctgtcggcctggccgtgtttgcgtgcctgtttctttccacgttgctactggtgcttaataagtgcggcaggcgtaataaattcgggattaacagacctgccgtcctggctcctgaagacgggctggccatgagcctccacttcatgactcttgggggcagctctctgtcccctaccgagggaaagggcagtgggttgcagggtcacattattgaaaatccccaatatttcagcgacgcgtgtgtgcaccacatcaaacgcagagacatcgtgctgaagtgggagttaggtgaaggggcttttggaaaggtatttcttgctgaatgtcacaatctactgccagaacaggataagatgctggtggcggtaaaagcactcaaggaggcctccgagtctgcgcgccaggatttccaacgcgaggccgagctgttaacaatgctgcaacatcagcatatcgtcagattttttggagtgtgtaccgagggcaggccactgcttatggtttttgagtatatgcgccacggggacctgaataggttcctgcggtctcacgggcctgatgcaaaactccttgccggcggcgaagacgtggcccccggaccgctcggtcttgggcagctcctcgctgtggcctcgcaagtggcagccggaatggtttacctcgccggcctacattttgttcacagagatctcgccacccgtaattgtctcgtgggccaaggcctcgtagtgaaaatcggagattttggaatgtcaagggacatctattccactgactactatagagtgggcggaaggaccatgctacctatccgatggatgccaccggagtctatcctatacaggaagtttaccacagagtctgatgtatggtcctttggagtcgtgctgtgggaaattttcacatatgggaaacagccctggtaccaactgagtaatacagaagccatcgattgcattacccaaggacgtgaactggaaagacctcgggcgtgcccacccgaggtgtacgcaattatgaggggatgctggcaaagagagcctcagcaaaggcacagtatcaaggacgttcatgccaggctgcaggcacttgctcaggcacctcccgtgtacctggacgttctgggatag

SEQ ID NO: 197172 - DNA, 2283 bp, synthetic construct
  misc_feature 1..2283: note = Description of Artificial Sequence: Synthetic coding sequence
  source 1..2283: mol_type = other DNA
atgaaggaggccgccctgatctgcctggcccccagcgtgccccccatcctcacagttaaatcctgggatacaatgcagctgagagccgctagatctcggtgcaccaatctcttagcagcctcatatatagagaatcaacaacacctccagcacctcgagctccgggacttgagagggctgggcgagctgcgcaacctcactatcgtcaagtcaggtcttaggttcgtagctccggacgcattccacttcactccccgcctctcccggctgaatctgagctttaatgctttggagagcctttcatggaagacagtccaaggactcagtctgcaggaactggtactgagtggcaatccactccattgctcatgcgcgttgcgatggctgcaacggtgggaggaggagggcctggggggcgtgcccgaacaaaagttgcagtgccacggccagggccctttggcgcacatgcccaatgcttcctgcggggtgcctacactcaaggtacaggtcccgaacgcgagtgtggatgtgggggacgacgtcctcctgaggtgtcaggtggaaggccgcggactggagcaggccggctggatcctgactgagttggagcagtctgcaaccgtgatgaagagcggcggcctgccctccttgggcctgacccttgctaacgttacctccgacctcaacagaaaaaatgtcacttgctgggccgagaatgacgtaggacgggctgaagtctctgttcaggtgaatgtgagcttccccgcaagtgtgcaactgcataccgcagtcgagatgcaccactggtgcatcccattttcagtagacggtcaacctgcaccatcactccgatggttgttcaacgggagcgtgctgaatgaaacatcatttattttcacagaatttctggagcctgctgcgaatgagaccgttcgtcacggatgcctgagattgaaccagcccacacatgtcaataacggcaattacacgctgctcgcagccaacccgtttggacaggcctctgcatcaattatggctgctttcatggataacccctttgaatttaatcccgaggatcctattcctgacaccaacagcacgagcggcgatcctgtcgagaagaaagatgaaactccatttggcgtgtccgtggctgtcggattagcagtctttgcctgcctgttcctgtccaccctgttgctggtgctgaacaagtgcggccggcggaataagttcgggattaatagacccgcggtccttgcgccagaggatggactagcaatgagcctccattttatgacactgggagggtcaagcttgtcccctactgaaggtaaaggctccggcctccaagggcatattatcgagaatccgcaatattttagcgatgcctgcgtgcaccacattaagaggcgggacatcgtgctaaagtgggagctgggcgagggggcgtttggaaaagtgttcctggccgagtgtcataacctgttgcccgagcaggataagatgcttgtggctgtgaaagcattgaaggaagccagcgagagtgcccgtcaggactttcaacgggaggcagagttattgaccatgctgcaacatcaacatattgtcagattctttggggtgtgtactgaggggcgaccgctgctgatggtgttcgaatatatgagacacggtgacttgaaccgctttctccgaagccatggccctgacgctaagttgcttgcaggcggcgaggacgttgcccctggtcccctcggcttgggacaactgctcgccgtggcgtcccaggtcgctgctggaatggtctatttggcaggcctgcattttgtccaccgcgacctcgcaacgagaaactgcttagtgggccaagggctcgtagtgaagataggcgattttggcatgtcacgcgatatttatagcactgactactatagggttggtggtcggaccatgcttccgatcaggtggatgcccccagaaagtattttgtaccggaagtttaccaccgagagcgatgtgtggtctttcggcgtcgtgttgtgggaaattttcacttatgggaagcaaccatggtatcagttgagcaacactgaggccatcgattgcataacacagggtcgcgagctggagcggcctcgcgcctgccctccagaggtttacgcaataatgcgggggtgctggcagagagaaccacagcagcgacactcaataaaagacgtacacgctagacttcaagctctggcccaggcacctccagtttatctcgacgttctggggtag

SEQ ID NO: 197173 - DNA, 2391 bp, synthetic construct
  misc_feature 1..2391: note = Description of Artificial Sequence: Synthetic coding sequence
  source 1..2391: mol_type = other DNA
atgctgcggggcggccggcggggccagctgggctggcacagctgggcagctggacccggaagtctcctcgcatggctgatcctagcatccgcaggcgccgctccatgccccgacgcctgctgcccacacggctcttctggtctgagatgtaccagggatggcgccctcgattccctccatcatctgcccggcgctgagaacttgactgagctgtatatcgagaatcagcagcacctgcagcatttggaactcagggatctgaggggcttaggagagctcagaaatttgacaatcgtgaaaagcggcctcagatttgtggctcccgacgcgtttcacttcacccccagacttagcaggctaaacctatccttcaatgccctagagtccttatcttggaaaacggtacaaggtctatcactgcaggaactggtgttaagtgggaatcctctgcattgttcttgtgccctacgctggctccaaaggtgggaggaggagggactgggcggggtgcctgaacagaagttgcagtgtcatggccaaggacccctcgcgcacatgccaaacgcgagctgcggcgtccccactttgaaagtgcaggtgcctaatgcatcagtagacgtcggcgacgacgtcctactgaggtgtcaggtcgaaggcagagggttggagcaggcagggtggattctgacagagcttgaacagtccgcgaccgtgatgaaatctggtgggctgccaagcctgggcctcacgctcgccaatgtgacctccgacctgaataggaagaacgtcacttgctgggcagaaaacgacgtgggcagggctgaggtttctgtgcaggtaaatgtctcgttccctgcatctgtgcagctgcacaccgccgtggagatgcatcactggtgtataccattctctgtggatgggcagcccgcccccagcttacgctggttatttaacgggtcagttctcaatgagactagcttcatttttaccgaatttctcgagcctgccgctaatgagacagtaagacatgggtgcttacggcttaatcagcccacacatgttaacaacggtaactacactctgctggccgccaacccatttggccaggcctctgccagcattatggccgcttttatggacaatccattcgagtttaatccagaagatcctattccagtgagcttcagcccagtggataccaactctaccagcggtgaccccgtggagaagaaggatgagacccctttcggggtctccgtggccgtcggcctcgccgtctttgcttgcctgtttctgagtaccttactccttgtgttgaataagtgtggcaggcggaataaattcgggattaatcgcccagccgttttggcccctgaagacgggctcgcaatgagcctgcactttatgaccctggggggcagttccttgtcccccacagaaggcaagggaagcgggctgcagggccatataatcgaaaacccccagtacttctcagacgcctgcgtccaccacatcaaacgacgggacattgtcctgaagtgggaacttggagagggcgccttcgggaaggtcttcctggcagaatgccataaccttctgcctgaacaggacaagatgttagtcgccgtcaaagccctcaaggaggcaagtgaatcagctcgtcaggatttccagcgggaggctgaactgcttaccatgttgcagcaccagcacattgtgaggtttttcggtgtgtgtacagaagggagaccactcctcatggtgtttgagtacatgaggcacggcgatctgaacagattcctgaggtcacacgggccagatgccaagctattagcagggggagaagatgttgcacccggcccgctgggccttgggcaacttctggccgtcgcttcccaggtggccgctggcatggtctatctggctggccttcacttcgtgcatcgagacctggccactaggaactgtctcgtcggtcaaggtctcgtggtgaaaatcggggacttcggcatgagccgcgatatttactccactgattattaccgggtcggtgggcgcacaatgcttcccataaggtggatgcccccggagtccatcctttatcgaaaattcactacggagtctgatgtgtggagcttcggtgtggtattatgggaaattttcacttacggaaaacagccttggtatcagctgtctaatactgaggccattgattgtattacccaggggagagagcttgaacggcctcgggcatgtccgcccgaggtttacgccataatgaggggttgctggcaacgcgagcctcagcagcgtcacagtatcaaggacgtccacgctcggctgcaggccctggcccaggcccccccagtctatctggacgtcttagggtag

SEQ ID NO: 197174 - DNA, 2517 bp, synthetic construct
  misc_feature 1..2517: note = Description of Artificial Sequence: Synthetic coding sequence
  source 1..2517: mol_type = other DNA
atgagcagctggatccggtggcacggccccgccatggcccggctgtggggcttttgttggctagtcgtgggcttctggagagcagcgtttgcgtgtccaacttcatgtaagtgttcagccagtcgaatttggtgtagtgaccctagccccggcatagtggcttttcctcgcctggagcctaacagcgtggatcccgagaacattacagaaatcttcatcgcaaaccaaaaaagactggagattataaacgaagacgatgttgaggcctacgtgggtctccgtaatctcacgattgtggactccgggctcaagttcgtggcacacaaggccttcctcaagaactccaacctccagcacataaactttaccaggaacaaactcacaagcctcagccgcaaacacttccgccatttggacctcagtgagctgattctagtgggcaacccattcacgtgttcttgtgacatcatgtggattaagactttacaggaggcgaagagttctccagatacacaggacttgtactgtcttaatgagtcatcaaagaacattccattggccaatcttcagatcccaaattgtgggctccctagtgcaaacctggccgcaccaaatctcaccgtggaagaaggaaagagtataaccctatcctgttctgtggccggcgatcctgtgcctaatatgtactgggacgtgggaaaccttgtgagtaagcacatgaacgagacgagtcacactcagggttctcttcgcattaccaacatctcatccgacgattctggcaaacagattagctgcgtcgctgagaatcttgtgggcgaggatcaggatagcgtgaatctcaccgtccacttcgcccccacaatcacttttctggagtctcctacctctgaccatcattggtgtattcctttcacagtgaagggaaaccctaaacccgcactgcagtggttttataacggtgctatcttaaatgaaagcaagtacatctgtacaaagattcatgtaaccaatcacacagagtaccatgggtgtctccagctggataaccctacccacatgaacaacggcgattacaccctgatcgccaaaaatgaatacggtaaggacgaaaagcaaatctctgcccatttcatggggtggcccggcatcgatgacggggcaaaccctaactaccccgatgtcatttacgaggattatggaacagctgctaatgatatcggcgatactacgaaccgtagcaatgaaattccgtccactgatgtgacagataaaaccggacgtgagcatctctcagtatatgcagttgtagtgatcgcctcagtagtggggttttgtctgctcgtgatgctttttctcctgaagttggcccggcactctaaattcgggatgaaagatttttcatggtttggcttcgggaaagtcaagtcgcggcagggcgtcggcccggcctctgtgatcagcaacgatgatgattcagccagccccctgcatcatatctccaatgggagtaatactcccagttcctctgagggaggaccggatgctgttataattggcatgaccaagattccagtcattgagaatcctcagtattttggcattactaatagccagctcaaacccgatacctttgtacagcacatcaagcgtcataatattgttcttaagcgtgaactaggggaaggagccttcggaaaggtatttttagccgagtgctataatttgtgccccgagcaggacaagatcctggttgccgtgaaaaccctcaaagatgcctctgacaacgctaggaaggatttccaccgcgaggctgaattattgactaacctccagcacgagcacatcgtgaaattttacggggtttgcgtagaaggcgaccctctgatcatggttttcgagtacatgaaacacggagatctgaacaaattcctcagagcccacggccccgatgccgtacttatggcggaaggtaaccctcccaccgagctgactcagagccaaatgttgcatatcgcccagcagattgctgccggtatggtgtatctggctagccaacacttcgtgcatagggatctagccaccaggaactgtctcgtcggggagaacctgcttgttaaaattggcgacttcggcatgtctagggatgtttattcaacagattattaccgggtgggtggtcatactatgctcccaatccggtggatgccgccagaaagcatcatgtaccgcaagtttacaacagaaagcgacgtttggtccctcggggtggtgctatgggaaattttcacctatggaaagcagccctggtatcagttaagtaataacgaggtgatcgagtgcattacgcaggggcgggtactccagagaccacggacatgtccccaagaagtgtacgagttgatgcttgggtgttggcagcgcgaacctcacatgaggaagaatatcaaaggcattcataccctccttcagaacctggccaaagcgtcccctgtttacttagacatcctgggttag

SEQ ID NO: 197175 - DNA, 1662 bp, synthetic construct
  misc_feature 1..1662: note = Description of Artificial Sequence: Synthetic coding sequence
  source 1..1662: mol_type = other DNA
atgagcagctggatccggtggcacggccccgccatggcccggctgtgggggttctgttggctcgtggtcgggttctggcgcgccgccttcgcatgtcctacttcctgcaaatgtagcgcttcgagaatctggtgctctgatcccagccccggtattgtggctttccctcggctggagcctaattctgtcgatcccgaaaacatcacagagatcttcatagcgaatcagaagcgccttgagattattaacgaagacgacgtagaggcctacgtggggctgcggaacctaacaattgtggattccggactaaaattcgtggcccacaaagccttcctgaagaattccaatttgcagcatatcaacttcacaagaaataagctgaccagcctaagtagaaagcacttcagacacctggacctgagcgagcttattctggtggggaatccttttacctgttcttgcgatatcatgtggattaaaacactgcaggaagcaaagtcttcgccagacacccaagatctttactgcctgaacgaatcttccaaaaatattcccctggctaatctgcagatccccaattgcgggctgccctccgccaacctggcggctcccaatcttaccgttgaagaagggaagagcatcactctttcctgtagcgtggccggagatccagtaccaaatatgtactgggatgtgggcaatcttgtgagtaagcatatgaacgagacttcacacactcaaggttctttgagaattaccaatatcagctcggacgattccggaaaacagatcagctgcgttgcggagaacctagtgggcgaggaccaagacagcgtcaatctgactgtgcacttcgctccaactataacttttcttgaatcacctacttctgaccaccactggtgcattccgtttacagtgaaaggcaacccgaagccagccctccagtggttctacaacggcgccatcctgaatgagagtaagtacatttgtaccaagattcacgttactaatcatactgaatatcacgggtgtctccagctggacaacccaacgcatatgaacaatggagactacacactcatcgccaagaatgagtacggcaaagacgaaaagcagattagcgcccatttcatgggctggccaggaatcgatgatggtgccaaccctaactatccagatgttatctacgaggactatggcaccgctgccaatgacattggggacacgactaataggtcgaatgagattcctagcaccgatgtcaccgataaaaccggaagggaacacttgagcgtgtatgccgtggtggtgatcgcttccgtcgtcggtttttgtctgctggtcatgttgtttctgctcaagctggctcggcactcaaaatttggaatgaaggatttctcttggttcggctttggaaaagtgaaaagccgccagggagtcggccctgcaagcgtcattagcaacgatgatgattccgcctctcctcttcaccacatctctaacggatccaacacgccgagcagttcggagggcggaccagatgccgtgatcatcggcatgaccaagataccagtgatcgagaacccccagtattttggcataacaaactctcagctgaagccggatacctggcctcggggttcaccaaaaactgcctag

SEQ ID NO: 197176 - DNA, 2469 bp, synthetic construct
  misc_feature 1..2469: note = Description of Artificial Sequence: Synthetic coding sequence
  source 1..2469: mol_type = other DNA
atgagcagctggatccggtggcacggccccgccatggcccggctgtggggcttctgttggctcgttgtggggttctggcgcgcagcgtttgcctgtccaacatcatgcaaatgcagcgcatcccgaatatggtgtagcgacccatcacctgggattgtggccttcccacgcctcgaaccaaattctgttgatccggaaaatatcaccgaaattttcatcgccaatcagaagcggcttgaaataatcaacgaggacgatgtcgaagcctacgtgggcctgaggaaccttacaatagtggacagcggactcaagtttgtcgctcacaaggcatttctcaaaaatagtaacctacaacacataaatttcacccggaataagctgacctcactgtccaggaagcacttccgccatttggacctctcggagctgattcttgtggggaacccatttacctgctcttgtgacatcatgtggataaaaacactccaggaagctaagagctcgccagacacacaagatctttactgcctaaatgagtcatccaaaaatataccattagccaaccttcagatccctaattgtggtctccccagcgccaacttagccgcgcctaacctaacagttgaggagggaaaatctatcaccctgtcttgcagtgttgccggggatcccgtgcctaacatgtattgggacgtggggaacctggtgagtaagcacatgaacgagacgtcccacacacagggttcactcaggatcaccaacatctccagcgatgactcgggcaagcagatctcatgtgtggccgaaaatctcgtgggcgaggaccaggacagcgtcaatctcactgtccacttcgcccccacgatcacctttttggagagcccgacgtccgaccaccactggtgtatacctttcacggtgaaaggcaacccgaagccagcgctgcagtggttttacaacggcgccatattaaatgagagcaagtacatctgtaccaagattcacgttactaatcacactgaatatcacgggtgcctgcaattagacaatccgacccacatgaataacggagactatactcttatcgccaagaatgagtatggtaaggatgagaaacagatcagcgcgcatttcatgggctggcctggcatcgatgatggtgccaacccaaactatcctgacgtgatatatgaggattatgggacagcagctaacgacatcggggacaccactaatcggtcaaatgagatccctagcacagacgtgaccgataagactggacgcgaacacctgtcagtttacgccgttgttgtcatagcctccgtggtgggattctgcctacttgttatgttgttcttgctcaagctggctcggcactccaaattcgggatgaaaggacccgcctctgtgatcagcaacgatgatgactccgcaagtcccctgcatcatattagcaacggatccaatacgccctccagctcagagggagggcctgacgctgtgatcataggtatgaccaagatcccagtgatcgaaaatcctcagtactttggtatcactaattcccaactgaagcctgatactttcgtgcaacacataaagcgtcacaatattgtgctcaagcgagagctgggagagggcgcgttcgggaaggtgtttctagcggagtgttataacctgtgtccagaacaggacaaaatcctggtggctgtcaagaccctcaaggatgcatcagataatgcacgaaaggatttccatagggaggctgagctcttgaccaacctgcagcatgaacacatcgtgaagttctacggagtgtgtgtagagggcgatccgctcataatggtgttcgagtacatgaaacacggcgacctcaataaatttctgagggcgcacggacctgatgcggtgcttatggctgaggggaacccacccaccgagcttacccagtctcagatgttgcatattgcccagcagatcgccgccgggatggtgtacctggcttcccagcactttgtccacagagacctggcaacccgaaattgcctggtgggggaaaacctcctcgttaaaatcggtgactttggcatgagtcgggacgtgtatagcacagattattatagagtgggagggcatacgatgcttcctatacgctggatgcccccagaatcaatcatgtatcgcaagtttacgacagaatccgacgtgtggtccctgggtgtggtattatgggaaatcttcacatatggaaaacagccttggtatcagttaagcaacaatgaagttattgagtgcattacacagggacgggtgctacagcgaccccggacctgcccacaggaagtctacgaactaatgctggggtgctggcaaagagagcctcacatgaggaaaaacattaaaggcatccacacgctgctgcagaatctcgccaaagccagtcctgtgtacctcgacattctgggctag

SEQ ID NO: 197177 - DNA, 1434 bp, synthetic construct
  misc_feature 1..1434: note = Description of Artificial Sequence: Synthetic coding sequence
  source 1..1434: mol_type = other DNA
atgagcagctggatccggtggcacggccccgccatggcccggctgtgggggttttgttggctagtggtcggtttctggagagccgcttttgcctgtcccaccagctgcaagtgttctgccagccgtatttggtgcagcgacccatcccctggcatcgtagcttttccacgtctggagcccaactccgttgatcccgagaacataacggagatcttcatcgcgaatcagaagcgtctcgaaatcatcaacgaggatgacgttgaagcttacgtaggcttgaggaatctcaccatcgtagacagcggactgaagttcgtcgcacacaaggcctttctgaaaaactcaaatctgcaacacatcaatttcacaaggaacaaactcacatctcttagtaggaagcatttccgtcatctggacttgtccgaactcatcctcgtggggaatcccttcacatgctcctgtgacattatgtggattaagactctgcaggaagcaaagagctcgcccgatacccaggacctctattgcttgaatgaatcttccaaaaacataccgctcgccaatctacaaatccctaactgcggactccccagcgccaatctggccgctcctaacctaacagtggaggagggaaagtccatcaccctaagctgttctgtggccggtgatccagtgcccaatatgtattgggatgtgggcaatcttgtgagcaagcacatgaacgaaaccagccatacccagggaagccttagaatcacaaacatatcttctgatgactcaggaaagcagatttcatgcgtagccgaaaacctcgttggagaggatcaggactccgtaaaccttaccgtccatttcgctccaaccattaccttcctggaatcccccacttctgaccatcactggtgcatcccctttacggtgaagggcaaccccaagccagccctgcagtggttctacaacggtgccatcctgaatgagtccaagtatatctgtactaaaattcatgtcactaaccatacggaataccatggttgccttcagttagataacccaacacacatgaacaacggagattacaccctgatcgccaaaaacgagtacggcaaggacgagaagcagattagcgcccactttatgggctggccgggtattgacgatggcgctaaccccaattaccctgatgtgatatatgaagattatggcacggcagctaatgatattggggacacgacaaaccgcagcaacgaaattccaagcacggacgttaccgacaagaccggcagagaacacttgagtgtctatgctgtagtagtgattgcctccgtcgtgggtttctgccttctagtaatgctgtttctcttgaagttggcacgccacagtaagttcggaatgaaaggttttgttctgttccataaaatccctctagatggttag

SEQ ID NO: 197178 - DNA, 1614 bp, synthetic construct
  misc_feature 1..1614: note = Description of Artificial Sequence: Synthetic coding sequence
  source 1..1614: mol_type = other DNA
atgagcagctggatccggtggcacggccccgccatggcccggctgtggggcttctgctggctggttgtcggattttggcgagcagccttcgcatgtcccacctcatgcaaatgttcagcatcccgtatctggtgtagtgacccctcccctggaattgtggcattcccccgcctggagccaaatagtgtggacccagaaaacattactgaaatcttcattgccaatcagaagaggctggaaatcattaatgaagacgatgtggaggcctacgtaggtctccgtaacctcacaatagttgacagcgggctgaagtttgtagcccacaaggcattccttaagaattccaacctccagcacataaacttcactaggaacaagcttaccagcctctcacgcaagcattttcgacacctcgatctcagcgagttgatactggtgggcaatccattcacttgctcttgcgacataatgtggatcaaaacactccaagaagcaaaaagtagccccgatacgcaagacctgtattgtctaaatgagtcatccaagaatatcccactggccaacctgcagattcctaactgcgggctgccctcggctaacctggcggcaccgaatttgactgttgaggagggcaagagtatcactctaagctgttcggttgccggagacccagtgcctaacatgtactgggacgtggggaatctggtttctaaacacatgaacgagaccagtcacacccaaggcagtttgcgtattacaaacatttcctccgacgatagcggcaagcagatctcgtgcgtcgctgagaacttggtgggagaagaccaggactcagttaatctgactgtccatttcgcacctaccataacctttctggaatctcccacctctgaccaccattggtgtattccttttacggtgaaaggcaatcccaaacccgctctgcagtggttttacaacggagcaatccttaacgaaagcaaatatatctgcaccaagatccatgtgaccaatcacacagagtaccatggatgcctgcagctcgacaatcccacccacatgaacaatggcgattacactctgattgctaaaaatgagtacggaaaagatgaaaaacagatcagcgcacacttcatgggatggcccggcatcgatgatggcgccaacccaaactaccctgacgttatatacgaggactatgggacggccgccaatgacatcggcgacaccacaaaccggtccaatgaaattccatcaaccgacgtgactgacaagaccgggagggagcacctgtccgtgtatgccgtcgtggttattgcctcagttgtgggtttttgcttactggttatgctcttcctgttaaaattagctaggcactccaaattcggaatgaaggggcccgccagtgtcatctctaacgatgatgacagtgcttctccattgcaccacattagtaatggatctaacaccccttcatctagcgaaggtggcccagacgccgtaatcatagggatgaccaagatacctgtcatcgaaaatccccagtacttcggcatcaccaacagccagctgaaacccgacacatggcccagaggctcccctaaaactgcctag

SEQ ID NO: 197179 - DNA, 2469 bp, synthetic construct
  misc_feature 1..2469: note = Description of Artificial Sequence: Synthetic coding sequence
  source 1..2469: mol_type = other DNA
atgagcagctggatccggtggcacggccccgccatggcccggctgtgggggttctgctggctggttgtgggattttggcgggccgcattcgcttgtcccacctcatgcaaatgctctgcctctcgcatttggtgttcagacccctcccctgggattgtcgccttccctaggctcgagcccaactccgtcgacccagagaacattaccgaaatattcatcgccaaccaaaaacgcttggagatcatcaacgaggacgatgtggaagcttatgtggggctccgcaatcttactatcgtcgacagcggattgaagttcgttgctcacaaagctttcctcaagaactcaaacctccaacacataaacttcacacggaataagctcacctcactctcacggaagcactttcgtcatctcgatctgtccgaactgatcctggtgggcaatcctttcacgtgttcctgtgacattatgtggatcaaaacattacaagaggccaagtccagtcccgacacccaggatctgtattgcctcaacgagtctagcaaaaatattcctttagcgaatctgcagataccaaattgtggtttgccgagtgccaacctggccgccccaaaccttactgtggaggaggggaagtctatcacactgtcgtgttccgtggccggggatcccgtccccaacatgtattgggatgtgggcaacctggtatcaaagcatatgaacgaaacctcgcatacccaaggctcacttaggattactaacatctcctccgacgacagcggcaaacaaatcagctgcgtcgccgagaatctggtcggtgaagaccaagatagtgttaacctgacagtgcacttcgctcccaccattacttttctggaatcacctacctcggaccaccattggtgtattcctttcaccgtgaaaggcaaccctaagccggctttacagtggttttacaatggtgcaatcctgaacgaatccaaatacatttgcactaagattcatgtcacgaaccacaccgaatatcatggatgtctccagttggataaccccacccacatgaataacggcgactataccctaatcgctaagaatgagtacggcaaagacgaaaagcagatctccgctcacttcatgggatggcccggtatagatgacggtgcaaaccccaattacccggatgtgatatacgaggactacggcacagctgcaaacgacattggcgatacaacaaacagatctaatgagattccttctaccgacgttacagacaagaccggacgggaacacctaagtgtttacgccgtggtagtgatcgcaagtgttgtgggattttgtctcctggtcatgctgttcctgctcaagctggcccggcattccaagtttgggatgaagggcccagcttccgttatctcaaatgatgacgacagcgccagtcccctacaccatatctctaacggctccaacacaccgtcatcatcagagggaggacctgacgctgttattataggaatgacaaaaattccagtgatagagaacccacagtattttggaattacaaacagccaactcaaacccgacacctttgtgcagcatatcaaacggcacaacatagtgctcaaacgtgagttaggggagggggcctttggaaaagtattcctagctgagtgctacaatttgtgccctgagcaagacaagattctagttgccgtgaaaaccctgaaggatgcctctgataatgctcggaaggattttcatcgggaggccgagctgttgacaaacctacagcacgaacatatagtgaaattttacggagtctgtgtggaaggagaccccttgatcatggtattcgagtacatgaaacatggggatctaaataagtttttacgggcccacgggcctgacgctgttctgatggctgaggggaacccacctacagaacttactcagtcccagatgcttcacattgcacagcagatagcagccggcatggtttatctggcctcacagcattttgtacaccgggatcttgccacccgaaactgcctggtgggagaaaaccttctggttaagatcggagactttggtatgtctagggatgtctattcaacagactactatcgcgtcgggggccatacaatgctgcccatacggtggatgccacctgaatctattatgtaccgaaaattcactacagagagcgacgtgtggtcactgggggtcgtcctctgggagatatttacttatgggaaacagccatggtaccagttatccaataatgaagttattgagtgtatcacacagggccgagttctccaacggccacgaacctgtcctcaggaagtgtatgagctgatgctgggatgctggcaacgtgagccgcatatgcggaaaaacatcaaagggatacacacacttctgcagaaccttgctaaagcatctcccgtgtacctcgatatactgggctag

SEQ ID NO: 197180 - DNA, 2517 bp, synthetic construct
  misc_feature 1..2517: note = Description of Artificial Sequence: Synthetic coding sequence
  source 1..2517: mol_type = other DNA
atgagcagctggatccggtggcacggccccgccatggcccggctgtgggggttctgctggctggtggttggattttggagggccgccttcgcgtgccccacctcttgtaaatgctctgctagcagaatttggtgctctgacccatctcctgggatcgtggcattccctcgtttagagcctaacagcgttgacccagagaacatcaccgagatcttcattgcaaatcagaagaggctggagatcattaatgaggacgatgtggaagcttacgttggcctaagaaatcttaccatagtcgacagtggactaaagttcgttgctcataaagcattcttgaagaacagtaatctgcagcacataaactttacacgtaacaagttgacatccctgagcaggaagcattttagacacctggatctttctgagctcatcctggtgggaaatccattcacgtgttcctgcgatataatgtggatcaagaccttgcaggaagctaaatcctccccagatacgcaggatctctattgtctgaatgaatctagcaagaatataccactggcaaatctgcagattcccaactgtgggctgcccagcgctaatcttgctgcacctaatctaactgtggaggagggcaagtctatcaccctgagttgctctgtggccggagatcctgtccctaatatgtactgggatgttggcaacctggtttccaagcatatgaacgaaaccagccacacccaaggttcccttagaatcacgaacatctctagcgatgatagcggtaagcagatatcctgcgtggcagagaatctggtaggtgaggatcaggattctgttaatctgactgtacatttcgccccaacgatcacttttttagagagccccacgagcgaccatcattggtgcataccattcaccgtgaaagggaacccaaaacctgccctccagtggttctataacggtgcaatcctgaatgagtcaaagtacatttgcaccaagattcacgtgaccaaccatacagagtaccacgggtgcttacagctggacaatcccacacacatgaacaacggcgattacaccctcatcgcaaagaatgagtacggaaaagatgagaagcaaatttcggcccactttatgggttggcccggcatagatgacggagctaatcccaactatcctgacgtcatctatgaggattacggaaccgctgctaatgatatcggcgacactaccaatcgctccaacgagattccgtccacagacgtaacagacaaaacagggcgcgaacatctcagtgtgtacgcggtggttgttatcgcctccgtcgttggcttttgccttctcgtgatgctttttctcctgaagctggctaggcatagtaaattcggcatgaaggacttctcctggtttggcttcggcaaggtgaagtctagacaaggcgtagggcctgcatctgttattagcaacgatgacgatagtgcaagtccactgcatcacataagcaacgggagtaacactccgtcctcctcagagggtggtcccgacgctgttattattgggatgaccaagatccctgtgattgaaaacccacagtatttcggtataaccaatagccagctgaaacctgatacctttgtacagcacataaagcgacacaacatcgtgttaaagcgtgagctgggagagggcgcattcggaaaagtgttcctggcagagtgttacaatctctgtcccgaacaagacaagattctggttgcggtcaagaccctgaaagacgcttccgacaatgctcgcaaagatttccacagggaagcggaactgctaactaatctccagcatgagcacatcgttaaattctatggggtgtgtgttgagggggacccgctgatcatggtgttcgagtacatgaagcacggcgacctgaacaaattcttgcgtgcgcacgggcccgacgctgtgttaatggccgaaggtaaccctcccacagagcttacacagagtcaaatgctgcacattgcccagcaaattgcagcaggcatggtgtatctcgcttcacagcactttgtacatcgcgatctcgctaccaggaactgcctggttggtgagaatctgttggtcaaaatcggagacttcggcatgtcccgtgacgtgtatagcacagattactatagggtcggaggccatacaatgctgccaatccgctggatgcctcctgaaagcatcatgtataggaaattcacaactgagagtgatgtgtggtctttaggggtggtgctgtgggaaatttttacttacgggaaacagccatggtatcagctgtcaaacaacgaggtgatcgagtgtatcacccaaggcagggtgttacagcggccaaggacctgtccccaggaggtgtatgagctgatgctgggctgctggcagagagaacctcacatgcgaaaaaatattaaaggaatccataccctcctgcaaaatctggccaaggcgagtccagtgtatctggacattcttggctag

SEQ ID NO: 197181 - DNA, 966 bp, synthetic construct
  misc_feature 1..966: note = Description of Artificial Sequence: Synthetic coding sequence
  source 1..966: mol_type = other DNA
atgtggatcaagaccctgcaggaggccaagagcagccccgacacccaggacctgtactgcctgaacgagagttcaaaaaatatcccactggccaacttacagattcccaattgtgggcttccgtctgctaaccttgccgcccctaacctgaccgttgaagaaggtaagagtattaccttatcctgcagtgttgcgggggatcccgtgcctaacatgtactgggacgtggggaacctggtttcaaagcacatgaatgagacttcacacactcaaggatctttgagaattaccaacataagcagtgatgactctggtaagcagatcagttgtgtcgctgagaaccttgtgggcgaggatcaggattccgtcaatctcacagtgcactttgcccctaccatcacatttctggaatcgcccactagcgatcaccactggtgtatccctttcacagtgaaagggaatccgaaacccgcgctgcagtggttctataacggtgccatcctgaatgagagtaagtacatctgtacaaagattcacgtcacaaatcacaccgagtatcatggctgccttcagttggacaaccccacccatatgaataacggcgattacactctgattgcaaaaaacgagtacggaaaggacgagaagcagattagtgcacatttcatggggtggcccggcattgacgacggagccaatccaaattatcctgatgtgatctatgaagattatggcacggcagcaaacgacattggggataccacgaatagaagtaacgagatcccttctactgatgtgaccgataaaaccggcagagaacacctctctgtttacgcagtggtcgtcatcgcaagcgtagtaggcttttgcctccttgtgatgctgttcctgttgaaactggctcgccacagtaaattcggaatgaagggctttgtcctgtttcacaaaatacccttggacggctag

SEQ ID NO: 197182 - DNA, 1434 bp, synthetic construct
  misc_feature 1..1434: note = Description of Artificial Sequence: Synthetic coding sequence
  source 1..1434: mol_type = other DNA
atgagcagctggatccggtggcacggccccgccatggcccggctgtggggattctgttggttggtggttggtttctggcgcgccgctttcgcatgtccaacctcctgcaaatgcagcgccagtcgaatatggtgcagcgacccttctcccggcattgtggcattccccaggctggagcctaattcagtagatccagaaaacatcacagagatatttatcgctaaccaaaagcgcctcgagataattaacgaagacgacgtggaggcctacgtcggcctgcgcaatctgacgattgtggattcagggctgaaatttgtcgcccacaaggcattccttaaaaattctaaccttcaacatattaacttcacacggaataaattaaccagcctctctcgcaagcattttcgccacctggatcttagtgagctgatcctcgtggggaacccattcacgtgctcgtgcgacataatgtggatcaagactcttcaggaagctaagagtagccccgacacccaggatctctattgcctgaacgagtcaagcaaaaacattcccctagctaatttgcagataccaaactgtgggctgccctcagctaacctggctgcccctaacctgacagtcgaggaaggcaagagcattacactttcctgctctgtcgccggtgacccagtcccaaacatgtactgggatgtggggaatcttgtgtccaaacatatgaacgaaactagtcatactcaggggagcctcaggataacgaatatttctagcgacgatagcgggaaacagattagctgcgtggccgagaacctggtgggggaggatcaagactctgtgaatctgaccgtacattttgcccctaccattaccttcctggagtcacccacctcagaccaccattggtgcataccattcacggtaaaaggcaatcctaagcctgcactccaatggttttacaacggggctatcctgaacgagagcaagtacatttgtacgaagattcatgtgaccaatcacacagaataccacggttgcctgcaactggacaatcccacccacatgaataacggcgactataccttaatcgctaagaatgagtacggcaaggacgagaaacagatttctgcccactttatggggtggcctggcattgatgatggtgccaatcccaactacccagatgtaatctacgaagactatggcaccgcagcaaatgacattggcgacacaacaaaccgctccaacgagatacctagcaccgacgtgacagacaaaaccggacgtgagcacttgtctgtgtatgccgtggttgtcatagcatcagttgtgggtttctgtctcctcgtgatgttattcctactgaagctggctcgccattctaagttcggaatgaaaggcttcgtcctatttcataagatcccacttgatggttag

SEQ ID NO: 197183 - DNA, 1839 bp, synthetic construct
  misc_feature 1..1839: note = Description of Artificial Sequence: Synthetic coding sequence
  source 1..1839: mol_type = other DNA
atggacgtgagcctgtgccccgccaagtgcagcttctggcggatcttcctgttgggaagtgtgtggcttgattacgtcggttcagtgctcgcctgccctgcgaattgcgtctgttctaaaaccgagatcaactgccgcaggccagatgatgggaacctgttccccttgttagagggtcaggatagcggtaattctaacggaaatgcttcaatcaatatcaccgacatttcgcgtaacatcacctctatccacatcgagaattggcgatcgctgcatactttgaacgccgtggatatggagttatatacaggactgcagaaacttacgattaaaaattccgggctgaggagcatccaaccacgcgcctttgctaagaaccctcacctccggtatatcaacctgtcctcaaaccggctgaccacgcttagctggcaactattccagactctctcacttagagaactgcagctagagcagaactttttcaattgttcttgtgatatacgctggatgcagctgtggcaggaacagggcgaggcaaaacttaactcccagaatctctactgtattaacgccgatggaagtcaactgccacttttcaggatgaatatctcacagtgcgacctcccagaaatctctgtttcgcatgtgaatctcacagtgcgcgagggtgacaacgcagttatcacttgcaacggatcgggtagccctcttcccgacgttgattggattgtgacaggcctacagagcattaacacacaccagactaatttgaactggacaaacgtacacgccattaatttaaccctagtgaacgtaacgtctgaagacaacggatttactctcacatgtatcgctgagaatgtggtaggtatgtctaacgcatccgtggctctaactgtatactatccccctcgcgtggtaagcttggaagagcccgagttacggctggaacactgtatagagtttgtcgtgcgaggcaacccgccaccaacgctgcattggctgcacaatgggcagccacttcgggagagcaaaattattcacgtggagtactatcaagaaggtgaaatcagcgaagggtgtctgctgtttaataagccaactcactacaacaatggtaactataccctgatcgccaagaatcctctgggcacagcgaatcagaccattaatgggcatttcttgaaggaaccctttccagagagcactgacaatttcattctgtttgatgaggtgtcaccaactcctccaataacagtcacccacaagcctgaggaagatacctttggcgtctctatagccgttggactggctgcgttcgcatgtgtgctgctcgtggtgctgtttgttatgattaacaagtacgggcggagatcaaaattcggcatgaaaggtccagtcgccgtgatcagtggtgaagaggactccgcatctccccttcaccatattaaccacggaatcacaactccctcatccttggatgccggaccagatacggtcgtcatcggcatgaccaggatacccgttatagaaaatccacaatacttccgccagggccataattgtcacaagcccgacacttgggtgttcagcaacatcgataaccatggcatcctgaacctgaaagacaatcgggaccatttggtgccttccacacactatatctacgaagagcctgaagtccagagcggggaagttagctatccgcgctctcatggatttcgggaaatcatgcttaatccgatctccttacccggacactccaaacctctcaaccacgggatttacgttgaggatgtaaacgtgtacttttccaaaggcagacacggtttttag

SEQ ID NO: 197184 - DNA, 414 bp, synthetic construct
  misc_feature 1..414: note = Description of Artificial Sequence: Synthetic coding sequence
  source 1..414: mol_type = other DNA
atgacccggatccccgtgatcgagaacccccagtacttccggcagggacacaactgtcacaagcccgacacctacgtgcagcacatcaaaagacgagatatagtcctcaaaagagagctgggcgagggagcattcggcaaggtgttcctggctgagtgctacaacctgagccccaccaaggataaaatgctcgtagccgtgaaagccttaaaagacccaacgttagccgcgcgcaaggattttcagagagaggccgaactactgaccaacctccaacatgaacacatcgtcaaattctatggcgtgtgtggcgatggggacccacttattatggtcttcgaatacatgaagcacggcgacctgaacaagtttctttcatcaatatccagcccaaaatctcaccagcaagggtag

SEQ ID NO: 197185 - DNA, 2478 bp, synthetic construct
  misc_feature 1..2478: note = Description of Artificial Sequence: Synthetic coding sequence
  source 1..2478: mol_type = other DNA
atggacgtgagcctgtgccccgccaagtgcagcttctggcggatctttctcctgggcagcgtgtggctagattacgtcggtagcgttctagcttgcccagccaactgcgtgtgttccaagactgagataaactgtaggagacctgacgatggcaatctcttccccctccttgaaggacaggattctggcaacagcaacggcaacgcctccattaacatcacagatatcagccgaaatatcacgtccatccatattgaaaactggagatcactgcacacactcaacgccgtcgatatggagctgtacaccggcctgcagaaactcactataaaaaacagcggactacgcagcatccaacctagggcttttgctaagaatccacatttgcgctacatcaacctgtcatccaaccggttgaccactctttcgtggcagctgtttcaaactctgagtctccgagagctgcaacttgagcaaaatttttttaactgctcctgcgatataagatggatgcagctctggcaagaacagggagaggctaaactgaattcgcagaatttatactgcattaatgctgatggctctcagctgccactgttccgaatgaacattagccagtgtgacttaccagaaatttctgtgtcgcacgtcaatctcacagttcgagaaggcgacaatgccgtcatcacgtgcaatggcagcgggtctcccctccctgacgtagactggattgtgactggtctgcagagcataaacactcaccagaccaacctcaattggacaaatgtacatgcgattaacctcactttggtgaacgtgacttctgaagataatgggtttactctgacctgtattgccgagaacgttgtgggaatgtctaatgctagcgtggccttgacagtgtattatcccccaagggttgtgagtctcgaggagcctgaactgagacttgagcactgcatcgagttcgttgtgagaggaaatcccccacctaccctgcactggctccacaatggacagccgctccgcgaaagcaagatcatccatgtggagtattatcaagagggagaaattagtgagggctgcctgttgtttaataaacctactcattacaataacggtaactacacgctaattgccaaaaatcctctcggcacggccaatcaaaccatcaacgggcacttcttaaaagaaccctttccggagtccactgataactttattcttttcgacgaagtgtctcctaccccccctatcacagtgacgcataaacctgaagaagacacatttggggttagtatcgccgtgggcctcgctgcctttgcatgtgtgctgctagttgtgctctttgtgatgataaataagtatggacgccggtccaagtttggaatgaaaggcccagtggcagtgatctctggggaagaggacagtgcatctcccctgcaccatattaatcacgggattacaacacccagctctctggatgcgggacccgatacagtcgtgatcggaatgacacgcatccccgtgatcgagaaccctcagtacttccggcagggccacaactgtcacaaaccagatacatatgtgcaacacattaagagacgggacatcgtcttaaagagagagctgggagagggcgctttcggaaaggttttcctcgcggagtgctataacctgtcccccacaaaagataaaatgttggtggcggtgaaagcccttaaagaccctactctggcggcacgaaaagatttccagagagaagctgaactgttgaccaacctgcagcacgagcacatagtgaagttctatggcgtttgtggggatggagatccccttattatggtctttgagtacatgaaacacggggatctcaacaaattcctccgagcccatgggcccgacgctatgattttagtcgacggccagcccaggcaggctaaaggggagttgggattatctcagatgctacacattgcatcccagattgcatctggcatggtatacctggcgagccagcattttgtccatagggacctcgcaacccgcaattgcctcgtgggggccaatttacttgtcaagatcggcgacttcggaatgagccgtgacgtttattccacagactattacagagttggaggacataccatgctgcctatcagatggatgccccccgagagcatcatgtatcgcaaatttaccacagagagtgatgtttggtcttttggagtaattctgtgggagatattcacctacggcaagcagccctggttccaactgtccaatactgaggttatcgagtgcatcacccaaggccgagttctggaacggcccagggtgtgcccaaaggaggtgtacgatgtgatgttagggtgttggcagagagagccacagcagcgactgaatatcaaggagatatataagatcctccatgccctcggaaaagctactccaatttacctggacatcctaggctag

SEQ ID NO: 197186 - DNA, 2496 bp, synthetic construct
  misc_feature 1..2496: note = Description of Artificial Sequence: Synthetic coding sequence
  source 1..2496: mol_type = other DNA
atggacgtgagcctgtgccccgccaagtgcagcttctggcggatctttctgctgggaagtgtgtggctggactacgtgggatcagtgctcgcatgccctgctaactgcgtgtgctctaagacagagatcaattgccgaaggcctgacgatgggaacttgtttccgctcttagagggtcaagactctggcaactccaatggaaacgcgtcaatcaatataaccgatatttcgcgtaacattaccagtatccacatcgagaactggaggagcctgcacacgctcaatgccgtggacatggaactgtacaccggtttacaaaagctaactattaagaattctggtctgagatctattcagcctcgggcgttcgcaaagaatcctcatctcaggtacatcaatttatcctcaaatcgtctcaccactcttagctggcagttgttccagacactgtcacttagagagctgcagctggagcagaacttcttcaactgtagctgcgatatccggtggatgcaactctggcaagagcagggggaggcaaaattgaactcacagaacctgtattgcattaatgccgacggctcacagttgcccctgttcagaatgaacatatcccagtgcgacttacctgaaatctccgtgagtcatgtcaacctgaccgtaagagaaggagacaatgcagttataacatgcaacggctcaggctctcctctcccagacgtggactggattgtcacagggctacagagtatcaacactcaccaaactaacttgaattggacaaacgttcacgcaataaacctgacccttgtaaacgtgacgagtgaggataatggatttaccctcacatgtattgcagagaacgttgtcggcatgtctaacgcgagcgttgccctgacggtatactatcctccgcgggtcgtgagcctcgaggaacctgaactgcgcctcgagcactgcatcgagtttgtagtgagggggaaccccccccccacacttcactggttacacaatggtcaacccttgcgcgagtccaaaatcattcacgtagagtactaccaggagggggagatctccgaaggttgtctgctcttcaataaacccacccactataacaacggaaattataccctaattgccaaaaaccccttaggaacagcgaaccagactattaatggacattttctgaaagagccttttccagttgacgaggtgtctcccacaccccccatcacagtcacccacaagcctgaggaggacactttcggcgtgtccattgccgtgggactggccgcattcgcttgcgtgctattagtcgttctattcgtcatgatcaataagtacggaagacggtccaaatttggaatgaaaggacccgtggcagtgatatcgggggaggaagattctgcctctccgttacatcacatcaatcacgggattactacaccctcatccctcgatgccggacccgacaccgtggtcatcggtatgactcgaattcctgtaatcgaaaatccacaatatttccgacagggtcataactgtcataagcccgacacctatgtccagcacatcaaacgacgggatatcgtactgaagagagagttgggggaaggagcattcggcaaggtctttctggctgagtgttataatctgtctccaaccaaggacaagatgctcgtagccgtgaaagcactgaaggatccaacactcgccgccaggaaggattttcaaagagaagcggaactgctcacaaatctgcagcacgagcatatagtcaaattttacggagtctgcggggacggggaccccttaattatggtgtttgagtatatgaagcatggagacttgaacaagtttctgcgcgctcacggccctgacgctatgattctcgttgatggccagccacgccaggcgaagggagagcttggcctgagtcagatgctgcatatagcatctcaaatagcatccggtatggtatacttagccagtcaacactttgtgcatagggacctggcaacaaggaactgtcttgtgggcgccaatctactagtgaaaataggagacttcggtatgagtcgcgacgtttactctacagattactatcgtctatttaatccctcaggaaacgatttctgcatttggtgcgaagttggcggacacactatgctccctattcgatggatgccaccagagtcaatcatgtataggaagttcacaactgaaagtgacgtctggtctttcggggttattctctgggagatcttcacttacggcaaacagccatggttccagctctcgaacacagaagtgatcgaatgtattactcagggccgcgtgcttgaaagaccacgagtgtgccctaaggaggtttatgatgttatgttaggatgctggcagcgcgagccacagcagcgactgaacatcaaagaaatctacaaaattctccacgccctgggaaaggctacacccatctatttggatattctggggtag

SEQ ID NO: 197187 - DNA, 2520 bp, synthetic construct
  misc_feature 1..2520: note = Description of Artificial Sequence: Synthetic coding sequence
  source 1..2520: mol_type = other DNA
atggacgtgagcctgtgccccgccaagtgcagcttctggcggatctttctgcttggctcggtgtggttggattatgtcggcagcgttctagcatgcccagcaaattgcgtttgttctaagactgaaatcaactgccggaggcccgacgacgggaatttattccctctactcgagggccaagacagcggcaacagcaacggtaatgcttctataaacataacagatatttcacgtaatatcacttccattcacatcgagaactggaggtcactccatacactcaatgctgttgacatggagttgtacacgggtttgcagaaattgaccattaagaattccgggctgaggagcatacagccaagggcctttgctaaaaatccccacttacgctacatcaacctgtcgtccaataggctgaccacactgagttggcaactatttcaaactctttcgcttcgggagctgcaactggaacaaaacttcttcaactgttcctgtgacattcggtggatgcagctgtggcaagaacagggcgaggctaaactgaacagccagaacctgtactgcatcaatgctgacggatctcagctgcccctgttccgcatgaacattagccaatgcgacctgccagaaattagcgtgtcccacgtgaacctaacagtcagagaaggcgataatgccgtaattacctgcaatggtagtgggtccccactgccagacgtggattggattgtcaccggactgcaaagcattaacacacaccagactaacctgaattggaccaacgtacacgctattaatttgacgttggtcaatgtgacttcggaggacaatggtttcacgctgacgtgcatagccgagaatgtagtgggaatgagtaacgcctcggtggctcttaccgtttactaccccccacgcgtggtgagcttggaagaaccagagctcaggctggagcactgcatcgagtttgttgtgagaggaaacccaccaccaaccctgcattggctccataatgggcagccgctgcgcgaatccaagatcatccacgtggagtattaccaggagggtgagatctctgaagggtgcctcctgtttaataagccaacacattataataacggtaactatacgctgattgctaagaacccgcttgggaccgctaaccagaccatcaacggacattttcttaaggagcctttccctgaaagcactgataatttcatcctatttgacgaggttagtcctaccccaccaataaccgtcacacacaagcccgaagaggacactttcggcgtgtccatcgcagtcggactagcagctttcgcctgcgtcctcttggtggtgctgtttgttatgatcaacaaatacggccgccgctctaaattcggtatgaaggggccagtagccgtcatatccggcgaggaagactctgcatccccattgcaccatattaaccacgggatcaccacgccgtcctctttggacgccggccccgatacagtggtcataggaatgacgagaatccctgtgatcgagaacccacagtacttccgacagggacacaactgtcacaagccggacacctatgtccagcatatcaagcggagggatattgtgctgaagagggaactgggtgagggcgccttcggcaaagtatttctggcagagtgctacaatctgtcccctactaaagacaagatgctggtggctgtgaaggcccttaaagacccaactctcgctgctcgaaaggacttccaaagagaggccgagctgttaacgaaccttcagcacgagcacatcgtcaagttttacggcgtgtgcggtgacggggatcccctcattatggtgttcgaatatatgaaacacggcgatctcaataaatttttgcgcgcccatggaccggacgcaatgatccttgttgacggccagcccaggcaagccaaaggcgagctggggctgtctcagatgctacacatcgcctctcagatagcctcaggtatggtttacctggcttcacagcatttcgtccaccgagacctggcaactaggaattgcctcgtcggggctaatctcctcgtcaagatcggggactttggcatgagcagagatgtttactccactgactactatagactgtttaatccttctgggaacgatttctgtatctggtgcgaggttggggggcacactatgttgcctatcagatggatgccccccgagtctatcatgtatagaaaatttactacggaatccgacgtctggtctttcggtgtaattctttgggaaatctttacgtacggcaagcagccatggttccagttgagtaatactgaagttattgaatgtatcacacaaggtagagttctggagagaccacgggtctgtccaaaagaagtctacgacgtgatgttgggctgttggcagcgcgagccgcaacaacgcttaaacataaaagagatttataaaatactgcatgcactcggtaaggccacacccatatacctggacatactgggttag

SEQ ID NO: 197188 - DNA, 2478 bp, synthetic construct
  misc_feature 1..2478: note = Description of Artificial Sequence: Synthetic coding sequence
  source 1..2478: mol_type = other DNA
atggacgtgagcctgtgccccgccaagtgcagcttctggcggatcttcttgctggggagtgtttggctcgattacgtaggatccgtgctagcctgccccgcaaattgtgtgtgcagcaagactgaaattaactgtcggcgacctgacgacgggaatctattcccactgctggaaggacaggattcgggcaatagcaatggaaacgcatctatcaacatcactgatatttccaggaatataactagcattcacatcgagaattggaggtccctgcacaccttgaatgccgttgatatggaactttacaccggacttcagaagctcaccatcaagaattcagggttacggtcgatccaaccccgcgcattcgcaaaaaatcctcacctgaggtatattaatctgagctccaacagactgacaactctctcttggcaactattccagactctgtccctgagagagctacagctggagcagaacttcttcaattgttcgtgcgacatcaggtggatgcaactttggcaggagcagggggaagccaaacttaatagtcagaatctgtattgcattaatgctgacggctctcagctgccactgtttaggatgaacattagtcagtgcgacttaccggagatctcggttagccacgtgaatctcacagtgcgtgaaggagacaacgcagtgatcacgtgtaatggcagtggaagcccactcccagatgtcgactggatcgtgaccgggctgcaaagcattaacacacaccagactaacctcaattggactaatgttcacgccatcaacctgactctagtgaacgtcacaagcgaagacaacggctttaccctgacatgcattgcagaaaacgtcgtcggcatgtcaaatgcttccgttgcactcacggtatactaccccccgagggtggttagtttggaggagccagaactccggctggagcactgcatcgagttcgtagttagggggaacccgcccccaaccctccactggctgcacaacgggcagcccctgcgcgagagcaagatcatccatgtggaatactaccaggagggcgagatttccgaagggtgtctgttattcaacaagccaacacactataacaatggcaattacacactaatcgcaaagaaccctctcggtacagctaaccagactatcaacggacactttttgaaggagccattccctgaatctactgacaactttatcctgttcgatgaagtgagtcctacgccgccaataaccgtgacccacaagccagaggaggacacttttggagtgtccattgctgtgggcctggctgcctttgcatgcgtgctcctggtggtcttgttcgtaatgattaacaagtatgggaggcgttccaagtttggaatgaagggcccagtggctgtaattagtggagaggaagactctgctagcccactgcaccatatcaaccacggcattactacacccagctcccttgatgcaggcccagatactgtggtgattggaatgaccaggatacctgttatcgaaaatccccagtacttcagacaggggcataactgccacaagcctgacacttatgtgcaacacatcaaacgccgggatattgtgctcaaacgagaactcggggagggggctttcggcaaagtattccttgccgaatgttataacctctcccccaccaaggacaaaatgctagtagctgttaaggctctcaaagacccgaccctggccgcccgcaaagactttcagcgcgaggctgaactgctcaccaatctccaacatgaacatattgtgaagttttatggcgtgtgcggcgacggagacccactgattatggtgttcgagtacatgaagcacggggacctgaataaatttttgagagctcacggcccagatgctatgattctggtcgatgggcagcctcgacaggccaaaggtgagctcggtctctctcagatgctgcacattgcctctcagattgcatccggtatggtctacctagcctcacagcacttcgttcacagggatcttgccaccagaaactgcctcgtgggtgccaacctcttggtgaaaattggagatttcggcatgtctagagacgtttatagcactgactattatcgggtcggaggccacacaatgctgcctatccgttggatgcccccggagtcaattatgtatagaaagttcaccacagagagcgatgtctggtccttcggagtgattctgtgggaaatcttcacgtacgggaagcaaccttggttccagctgtcgaatacggaagttattgaatgcataacacagggccgagttcttgagaggccccgtgtgtgccccaaggaagtctatgatgtgatgctagggtgttggcagagggaacctcagcagaggcttaacatcaaagagatatacaaaatcttacacgctctcggaaaggcgacccccatttacctggatatccttgggtag

SEQ ID NO: 197189 - DNA, 1839 bp, synthetic construct
  misc_feature 1..1839: note = Description of Artificial Sequence: Synthetic coding sequence
  source 1..1839: mol_type = other DNA
atggacgtgagcctgtgccccgccaagtgcagcttctggcggatctttcttttaggatcggtctggctcgattacgttggatcggtactcgcgtgccctgctaattgcgtatgcagcaagactgagattaactgtcgaagacctgatgatgggaaccttttccccctgcttgagggccaggatagtggaaacagtaatggcaacgcgtctatcaacataacagacatctcccgaaacatcacgagcatacacatcgagaactggagaagcttgcacacactcaatgccgtggatatggaactgtacactggcttgcagaagcttaccatcaaaaacagtgggctacggagtattcagcctagagcattcgcaaagaatccacacctgaggtacattaatttaagctctaaccggctgacaactctctcttggcagttgttccagacactttcgcttagggagctacaattggaacaaaatttctttaactgttcatgcgacattcggtggatgcagctgtggcaggagcagggtgaagctaagctgaactctcaaaacctgtattgcatcaacgccgacggctctcaattgcccttgttccggatgaacatatcccagtgtgatctgccagagatttcagtctcccacgtaaacttgactgtgcgggagggcgataacgctgttatcacgtgtaatggttcaggcagccctttgccagacgttgactggatcgtaaccggcttgcagtcaattaacacccaccagacaaatctgaactggacaaatgtgcacgctatcaacttaacactggtcaatgtgactagcgaggacaacggattcaccctgacatgtattgccgagaacgttgtggggatgagcaatgcatctgtcgcactgacagtttactatcccccccgcgtggtgagcctcgaggaaccagagctgcgtctggaacattgcatcgaattcgtggtgaggggaaatcccccaccaacgctgcactggctgcacaatggacagcctctgcgcgagtcaaaaattatccatgttgaatactatcaggaaggagagatttctgaggggtgcctgctttttaataagccaacgcactacaataatggtaattacacactcatcgctaaaaacccactgggcaccgctaatcagacaattaatgggcatttcctgaaggaaccgttccccgaaagtaccgataattttatcctgttcgacgaggtgtcccccacaccccctatcaccgtcacacataagcccgaggaggacacgtttggggtctcaattgcggtgggactcgccgccttcgcctgcgtcctgctcgtagtgctttttgtgatgatcaacaagtacggccgccgctcaaaatttggcatgaaaggcccagttgctgtcatctctggcgaggaggactctgcctcccctctgcatcatattaaccacggtattacaaccccctcctcacttgacgccggtcccgacaccgtcgttatcggaatgacccggatacccgtcatcgagaatccacagtacttccggcaggggcacaattgccataagcccgacacctgggtgttctcgaatatagataatcacggcatccttaatctgaaggataacagggatcatctggttccgtcaacccactatatttatgaggagccagaggtccagtccggcgaggtatcctacccccggtcccacgggttcagagagatcatgcttaatcctatctcactcccagggcacagcaagcccctgaatcatggcatatatgttgaggatgtcaacgtatatttttccaagggcagacacggcttctag

SEQ ID NO: 197190 - DNA, 1854 bp, synthetic construct
  misc_feature 1..1854: note = Description of Artificial Sequence: Synthetic coding sequence
  source 1..1854: mol_type = other DNA
atggagctgtacaccggcctgcagaagctgaccatcaagaacagcggccttaggtctattcaacccagggcttttgcaaagaacccgcatttaagatatattaatctctcttctaatagactgacaacactgagctggcagctgtttcaaaccctctccctgcgcgaactccagctggaacagaactttttcaattgtagttgtgatattcggtggatgcaattgtggcaagagcagggggaggctaaactgaattcgcagaacttgtactgcattaatgccgatggtagtcagttgcccctttttcggatgaacattagccagtgtgatctgccagagatctccgtctcccacgttaatctaacagtcagggaaggggataatgccgtgatcacctgcaatggatccggaagtccacttcccgatgttgattggatcgtgacagggctgcagagcattaatactcaccaaaccaacctgaactggacaaacgtgcatgccattaacctgaccttggttaatgtcacctcagaagacaatgggttcactctgacctgtattgccgagaatgtggtgggcatgtccaatgcaagcgttgctctcaccgtgtactacccgccgagggtggtgagcttggaggagccggagcttagactcgagcactgcatcgagttcgttgtgcggggtaatcctccaccaactcttcactggttgcacaacggccagccgctaagggaatccaaaattattcatgtggagtactaccaggagggggagatatccgagggctgtttgcttttcaacaagcctacacactacaacaacgggaattacacactgatcgccaagaacccactgggcacagctaaccagaccatcaacggccatttcctcaaggagccatttccagaatcaaccgacaacttcatcctgttcgacgaggtttcacctaccccacctatcacagtaacacataaaccagaggaagataccttcggagtgtccatcgccgtcgggctggccgcctttgcgtgtgtgcttctggtggttcttttcgtgatgatcaacaaatatgggcgccggagcaagttcgggatgaaaggacctgttgccgtgatttcaggggaggaggacagtgcctcgccactgcaccatatcaaccatgggattaccacacctagcagccttgatgccgggcccgacaccgttgttattggaatgactaggatccctgtgattgagaacccccagtacttcagacaaggccacaattgtcataagcccgacacgtacgttcagcacataaaacggcgagatatagtgctgaaacgcgaactgggcgaaggtgccttcggcaaggtgtttcttgccgagtgttataacctgtccccgactaaagacaagatgttagtcgcagttaaggccttgaaagacccaaccctggctgcgagaaaggatttccagcgcgaggccgagctacttactaacctgcaacatgagcacatcgttaagttctacggagtttgtggcgacggtgatcctctcattatggtatttgaatatatgaagcatggtgacttgaacaagtttttgcgtgcccacggaccagacgctatgatcctggtcgatggtcagccacggcaggctaagggcgaactgggtctgtctcagatgctgcatatcgctagccagatcgccagcggcatggtctacctggcgagccagcactttgtgcacagggatctcgctactcgtaactgcctagtgggtgccaacttgttagttaaaattggcgactttggcatgtccagagatgtgtacagtacagactactaccgggtggtccaggcttag

SEQ ID NO: 197191 - DNA, 774 bp, synthetic construct
  misc_feature 1..774: note = Description of Artificial Sequence: Synthetic coding sequence
  source 1..774: mol_type = other DNA
atgagcatcctgttctacgtgatcttcctggcctacctgcggggcatacagggaaataacatggatcagaggtctctccctgaggacagccttaactcgctcatcattaagctgatccaggccgacattctgaaaaataagttaagtaaacaaatggtggatgtcaaagagaactaccagagcacactcccaaaagccgaagccccccgtgagcctgagcgcggcggccccgctaagtctgccttccagccggttatcgctatggacaccgaacttctgcggcagcagcgccgatacaacagtcctcgcgtgctcttgtccgatagcacaccactcgaaccccctccactgtatttgatggaggactatgtgggatcaccagtggtggccaatcggacatcgagacgcaagaggtatgctgagcacaagtctcaccgtggggagtactccgtctgcgactccgaatccctgtgggtcacagacaaatcatctgcgattgatatcagggggcaccaggttaccgtccttggggagataaaaacaggcaacagtcccgtgaagcagtatttttacgaaacccgctgcaaggaggctaggcccgttaaaaatggctgcaggggaatcgacgacaaacattggaattctcagtgcaaaaccagtcagacgtatgtcagggcactgacatctgaaaataacaagctcgtaggttggcgctggatccgaatagacacttcatgcgtatgtgcattgagccgaaagatcggccgcacttag

SEQ ID NO: 197192 - DNA, 813 bp, synthetic construct
  misc_feature 1..813: note = Description of Artificial Sequence: Synthetic coding sequence
  source 1..813: mol_type = other DNA
atggtgaccttcgccaccatcctgcaggtgaacaaggtgatgagcattctgttttacgttatatttctcgcctatctgagggggattcaggggaacaatatggaccagcggtccttacccgaggactcactcaactctctcatcattaagcttatacaggctgacattctgaaaaacaaactttccaaacagatggtcgacgttaaggaaaattaccagtctactttacctaaggccgaggctcccagagagcctgaacgagggggccctgccaagagtgctttccagcctgtaattgcgatggatactgagttactgcgacagcaaagacgttataatagccccagagtgctcctatcagactcaaccccactggagcccccacctctgtatctcatggaggattacgtcggctccccagtggtcgcgaacaggacatcccgccggaaacgctacgctgaacacaagagccaccgaggcgagtatagcgtatgtgattccgaaagtctatgggtgaccgacaaatcgtccgctatagacattaggggtcaccaggtgaccgttcttggggagattaaaaccggcaattcacctgtgaagcagtatttctacgaaacacggtgcaaggaagctcgtccagttaagaacggttgtcgaggtatcgatgacaaacattggaactcccagtgtaaaacctcgcaaacctacgtccgcgcccttacttcagagaacaacaaactcgtcggctggcggtggattagaatagatacatcttgcgtatgcgcgctaagccgaaaaatcggaaggacctag

SEQ ID NO: 197193 - DNA, 633 bp, synthetic construct
  misc_feature 1..633: note = Description of Artificial Sequence: Synthetic coding sequence
  source 1..633: mol_type = other DNA
atgctgcccctgcccagctgcagcctgcccatcctgctgctgttcctgctgccgtctgtgccaatcgagtcgcagcccccacccagcacactgcctcctttcctggcacccgagtgggacttgctctcaccacgcgtggtgctctcccgcggtgcaccagcgggaccccccttgctgttcctgcttgaggcaggagccttccgagagtcagcaggagcaccagctaatcggagccgccgcggagtgagtgagactgcccccgcgtcaaggaggggagagcttgccgtttgtgatgcagtcagcggctgggttaccgaccggagaaccgccgtggacctgcggggccgcgaggtcgaggtcctaggcgaggtgcccgccgcagggggcagtccactcagacagtattttttcgagacacggtgcaaagcggacaatgctgaggaaggcggacccggcgccggtggcgggggctgtcgtggcgtggatcggcgtcattgggtttcagagtgcaaggcgaaacaaagctatgtaagagccctcactgccgacgcccaaggcagggtagggtggaggtggattaggattgacactgcctgtgtctgtaccctgttatcacgtaccgggagagcttag

SEQ ID NO: 197194 - DNA, 594 bp, synthetic construct
  misc_feature 1..594: note = Description of Artificial Sequence: Synthetic coding sequence
  source 1..594: mol_type = other DNA
atgcagcggtggaaggccgccgccctggccagcgtgctgtgcagcagcgtgctctctatctggatgtgtcgggagggcctgttattaagccaccggcttggtcccgccttggtgccattgcatcggttaccccgcaccctggacgccagaatcgctaggctggctcagtatcgggctttactgcagggcgccccagatgctatggagttacgggaactaactccgtgggccgggcgacctccaggcccccggcgtcgggcgggaccccgccggcgaagagcgcgagcacggttaggggcccgtccgtgtggccttcgggaactggaggtgcgtgttagcgagctcgggctgggctacgccagtgatgagaccgtcctttttcggtactgcgctggagcctgcgaggcagccgctagagtctacgatcttggactacgtaggcttcgtcagcggcggaggttgcgccgtgaacgggtgagggcccagccgtgttgccggcccacggcatatgaggacgaggttagttttctagacgcccatagccggtatcatacggttcatgaactttccgctcgagagtgtgcgtgtgtatag

SEQ ID NO: 197195 - DNA, 1323 bp, synthetic construct
  misc_feature 1..1323: note = Description of Artificial Sequence: Synthetic coding sequence
  source 1..1323: mol_type = other DNA
atgagcagctgccggggccagaaggtggccggcggcctgcgggtggtctcccccttcccattgtgtcagccggccggggagccctctcagggcaagatgcgctccagttgtgttctgctgacagccctggttgcccttgccgcgtactacgtgtacatcccactgcccggcagcgtgtctgatccttggaagttaatgttactcgatgccacctttcgcggggcgcagcaagtcagtaatcttatccactacctgggccttagtcatcatctactggccttgaactttattatcgtgtcctttggcaagaagagcgcctggtcctctgcccaggtgaaggtgacagacaccgacttcgacggcgtcgaggttcgcgtgtttgaaggaccccctaaacctgaggaaccccttaaacggtcagtcgtttacatccacgggggagggtgggcccttgcatccgccaaaatcagatattatgatgaactctgcacagccatggcagaagagctgaatgccgtgatcgtctcaatcgagtacagactcgtcccaaaagtgtattttccagaacagattcatgacgttgtgcgggctaccaagtacttcctaaagccagaagttctgcagaagtacatggtagaccccggtaggatctgcatttcaggcgattcagctggcggaaacctcgcggctgcactgggtcagcagttcacacaagacgctagcttgaagaataagctgaagctccaggcgctgatctatccagtgctgcaggcactggatttcaacacccctagttatcagcaaaacgtgaacactccaatcctccctaggtacgtgatggtgaagtattgggtggactactttaaaggcaattacgatttcgttcaggccatgatcgtgaataaccatacttccctggacgtggaagaagctgctgcagttcgggcccggctgaactggacatctctattgcctgcctccttcacaaaaaattataagcccgtcgtgcaaaccacaggaaatgctagaattgtacaggagcttccccagctgctagatgcccgcagcgcccccctcattgctgaccaggccgtgctgcaactgttgcctaagacgtacattttgacatgcgagcatgacgtccttcgggatgatggaatcatgtacgccaaaaggcttgaatcagccggagtcgaggtcaccttagaccactttgaggatggtttccacggctgcatgatctttacaagttggccaacgaatttcagcgtaggaatacggacaagaaacagctatattaagtggctggaccaaaatctttag

SEQ ID NO: 197196 - DNA, 1227 bp, synthetic construct
  misc_feature 1..1227: note = Description of Artificial Sequence: Synthetic coding sequence
  source 1..1227: mol_type = other DNA
atgcggagcagctgcgtgctgctgaccgccctggtggccctggccgcctattatgtgtacatccccctgcccggatccgtcagcgacccatggaagcttatgctgctggatgctactttccgcggagcccagcaggtcagcaacctgattcactacttaggattatcccaccacctcttagcactcaattttattatcgtgagtttcggcaagaagtccgcatggtcctctgcccaagtgaaagtaacggacaccgattttgatggggtggaggttagggtctttgagggcccacccaagcccgaagaaccactcaagcggagcgtggtgtacatccacggcgggggatgggccctcgcctcagccaaaatccggtattacgatgaactctgcacagccatggccgaggaactgaacgccgtgattgtgtcaatagaataccggctggtgccaaaggtatatttccccgagcagatacacgatgtcgtacgggcaaccaagtacttcttgaagcctgaggttctgcagaagtacatggtcgatcccggcaggatatgtatttctggcgattccgctggaggaaatctggctgctgcacttggccagcagttcacgcaagacgcctccctcaagaacaagctgaagctccaggcattgatttaccctgtcctgcaagcgttggacttcaatacccctagctatcagcagaacgtgaatactccaatcttgccaaggtatgtgatggtgaaatattgggttgactacttcaaggggaattacgatttcgttcaggccatgattgtcaacaatcacacttccctcgacgtcgaagaggcggctgcagtcagagctagactgaactggacatcactgctaccagccagtttcaccaaaaattacaaaccggtagttcaaactaccggcaacgcaagaatagtacaggagctgccccagcttctagacgctagatccgccccgctcatcgcagatcaggcggtgctccagctgctccccaaaacgtacattctgacgtgcgagcatgacgtgcttagggacgacggcatcatgtacgcgaaacgactggaatccgctggggtggaagtgaccctggatcacttcgaggacggattccatggttgcatgatctttactagttggcccacaaatttctctgtgggaattagaactcgcaattcatatattaaatggctggaccaaaacttgtag

SEQ ID NO: 197197 - DNA, 1347 bp, synthetic construct
  misc_feature 1..1347: note = Description of Artificial Sequence: Synthetic coding sequence
  source 1..1347: mol_type = other DNA
atgagcagctgccggggccagaaggtggccggcggcctgcgggtggtctcaccctttcctctgtgtcaacctgccggggagccctcacaagggaagatgagaagttcttgcgttctcctgaccgccttagtcgctctagccgcctactacgtgtacatcccacttccagggtcagtgagcgacccttggaaactcatgctgctcgacgcaactttccgaggcgctcagcaggtgagtaatctgattcattatctcgggctttcacaccacttgttggcactcaactttattattgtgtcctttggaaagaagtcagcgtggagtagtgcacaagttaaggtcaccgataccgacttcgatggggtcgaggtccgagtttttgagggcccacccaagcctgaagaaccactgaagcggagcgtcgtctacatccatggagggggttgggcgctggcctccgcttccgctagctggtcgccctccgacgaaatacgctattacgacgagctctgcacagccatggcggaagagctgaacgcagtgatcgtctcgattgagtaccgactggtgccaaaagtttattttcctgaacaaattcatgacgtagtacgggctactaagtacttccttaagccagaagttctacagaaatatatggtggaccctggccggatctgcatctcaggagacagtgccggggggaatctggccgccgcacttgggcagcagtttacacaggacgccagtctaaagaataagcttaagttgcaggcgttaatctatcccgtgcttcaggccctcgactttaacactccatcgtaccagcagaatgtgaacacacccatcctgcctaggtatgtaatggtgaagtattgggttgactactttaaaggaaactatgacttcgttcaagccatgattgtgaacaatcacacctctctcgacgtcgaggaggcagccgctgtccgggctaggttgaactggacttctctactccccgcttctttcaccaaaaactacaaacctgtagttcagaccaccggtaatgccagaatcgtccaggagctgccacagctcctcgacgcaagaagcgcgcccttgatcgcggatcaggctgtgctgcaattattgccaaaaacttacatccttacttgtgaacacgatgtgcttcgggacgatggtatcatgtacgcaaagcggctggaatcagccggggttgaggtcacccttgatcatttcgaagatggctttcacggttgtatgatttttacgagctggccaaccaacttcagtgtcggcatcaggactagaaacagttatatcaaatggttagaccaaaacctgtag

SEQ ID NO: 197198 - DNA, 828 bp, synthetic construct
  misc_feature 1..828: note = Description of Artificial Sequence: Synthetic coding sequence
  source 1..828: mol_type = other DNA
atggccgaggagctgaacgccgtgatcgtgagcatcgagtaccggctggtaccgaaagtctattttcccgagcagatacacgacgtagtgcgcgctaccaagtatttcttaaaaccagaagtactacagaagtacatggtggatccaggccgcatctgtatctcaggcgactctgctggcggcaacctcgcggccgccctaggccagcagtttacccaggatgccagcctgaaaaataagcttaagctgcaagcgctcatttaccctgtccttcaagccctggacttcaacactccttcatatcagcagaatgtgaatacccctattttgcctcgctacgtcatggtcaagtattgggtcgattacttcaagggcaattatgacttcgtgcaagccatgatcgtgaataatcacacatctctggacgtcgaagaagcggcagctgtgcgtgccaggctcaattggacctctttgcttcctgcctcttttaccaaaaattacaaaccagtggtgcaaaccacgggaaatgcccgcatcgtgcaggagttacctcaactgttggacgcaaggtccgctcccctgattgcagaccaggccgtattgcagcttcttcccaaaacttacatcctcacctgtgagcacgatgtgctcagggatgatggcataatgtatgccaaacgcttggagagtgccggggttgaagtgacactggaccattttgaagacggatttcatggctgcatgatttttacttcctggcctaccaatttctccgttggtattaggacccgcaactcttacatcaaatggctagatcagaatctctag

SEQ ID NO: 197199 - DNA, 2754 bp, synthetic construct
  misc_feature 1..2754: note = Description of Artificial Sequence: Synthetic coding sequence
  source 1..2754: mol_type = other DNA
atggccttcatccggaagaagcagcaggagcagcagctgcagctgtactccaaagaaagattctctctgctgctgttaaatctcgaagagtactattttgaacaacacagagccaaccacatcctgcataaggggtcccatcacgaacggaaaatcaggggatctctgaaaatctgcagcaaatccgtgatattcgaaccggattccatttcccagcccatcatcaagattccgctgcgtgactgtattaagattggcaaacatggagaaaacggagcaaatcggcacttcactaaggctaagtctggcgggatttcactaatctttagccaggtgtactttattaaggaacataacgtggttgccccatacaagatcgagagagggaaaatggaatacgttttcgaactggatgtgccgggcaaggtggaggacgtggtagaaactctcctgcagctccatcgggctagttgtctggacaagcttggtgatcaaacggccatgataaccgcaattttgcagtctagactggctagaaccagctttgataagaaccggttccaaaatataagtgaaaaactgcacatggaatgtaaagctgaaatggttaccccactggtaacgaaccccggacacgtctgtataaccgacaccaatctgtacttccaaccgctcaatgggtacccaaagccagttgtgcagatcactctgcaggacgtgcgcaggatttataagcggagacacgggctgatgcccctgggattggaagtgttttgtacagaagatgatctatgctctgacatctaccttaaattctatgaaccccaagatagagacgacctctacttctacattgctacatacctcgagcatcacgtagctgagcacacagcggaaagctatatgctgcagtggcagagagggcacctgagcaactaccagtatttgctgcacctcaacaacctggcagatagaagctgtaatgatctctcacaatatcctgtgttcccttggatcattcatgattacagctcaagtgagttagatcttagcaatccaggcacattccgcgatctttcaaagcccgtaggggcactgaacaaggagagattggaaaggctgctcaccagataccaggaaatgccggagcccaaatttatgtatgggtcgcattacagttcacccggctacgtgttgttctacttggtgcggattgcccccgagtatatgctgtgcctccaaaatggcaggttcgacaatgccgaccgcatgtttaacagcatcgccgaaacctggaagaattgtttggatggagcgacagatttcaaagaactaatacccgagttctacggcgacgatgtgtcatttctcgtcaacagtttaaagctggacctcggaaagagacaaggcggccagatggtggacgatgtggaactgcctccctgggcatcgtcccccgaagattttctgcagaagtccaaggatgctctcgagtctaactacgtctctgaacacttgcacgagtggattgacttgatctttggttacaagcagaagggctctgacgctgttggcgcacataatgtgttccacccgctcacatatgagggcggagtggacttaaattctatccaagatcccgacgagaaggttgcgatgctcacacagatcttagaatttggccagaccccgaaacagctctttgtgaccccgcaccctagacgaattacccccaagttcaagtcactttcacaaacctcctcgtataacgcctctatggccgactctcccggggaggaaagcttcgaagatctgaccgaggaaagtaagacacttgcctggaacaatatcacaaagctgcagctccacgagcactataagattcacaaggaggcagtcacgggcatcaccgtgagcagaaatggatcgagtgtctttactacatcccaggattctacgttgaaaatgttttccaaggagtccaagatgctgcaaaggagcatcagttttagcaatatggcactcagtagctgcctgctactgcccggtgacgctacagtcattacatcaagctgggacaataatgtatacttctacagtattgcctttggacggcgccaggacactctgatgggtcacgatgacgccgtgtcaaaaatttgttggcacgacaataggctatactctgccagttgggactctaccgttaaggtttggtcgggtgtcccagcggagatgccggggaccaagcggcaccactttgacctgctcgctgaactcgagcacgacgtgtcagttgacaccatcagcttaaacgccgcctccaccctgctggtcagcggcacaaaggaagggactgtgaatatctgggacttgacaacggccacactgatgcaccagattccctgtcatagtggaatcgtgtgtgacacggcattttcacctgactctcgtcacgtcttgtctaccgggacagacgggtgcctgaacgtcattgacgtccagaccggcatgctgataagttctatgacctcagacgagccgcaacggtgcttcgtctgggatgggaacagtgtgctctcaggctcccagagcggagagctcctggtgtgggatctgctcggcgcaaaaatcagcgaacggatccagggtcacacaggagccgtgacctgcatttggatgaatgagcaatgtagctcaataatcacagggggggaagatcggcagataatcttctggaagctgcagtactag

SEQ ID NO: 197200 - DNA, 2847 bp, synthetic construct
  misc_feature 1..2847: note = Description of Artificial Sequence: Synthetic coding sequence
  source 1..2847: mol_type = other DNA
atgaccggccaggcccggttccaccggggcgccgaggcctgccgggctatacgccaatgccggtctcggcgtccgcgggccgcacacccagagggccgggccggctctggtcggggttctaggcacgcatctccaggtgtgcggaggggtggcttctctctactgctgctgaacctggaggagtactactttgaacaacaccgggccaatcacattttgcataaaggaagtcaccatgaaagaaaaatccgaggcagcttgaagatctgttcgaagtccgttatttttgaacccgattccatctctcaaccaatcattaaaatacccctgcgcgactgtatcaagatcggaaaacacggcgagaacggcgctaatcgtcacttcaccaaagccaaatccgggggaatctcgctgatatttagtcaagtgtacttcattaaagagcataatgtcgtggcaccatacaagatcgaaagggggaagatggaatatgtgtttgaactcgatgtgccaggcaaagtagaggatgtggtcgaaaccctcctccagctgcacagagcatcctgcctggacaagctcggagatcagaccgctatgatcacagctattcttcagagcaggctggcacgcaccagctttgataaaaatcgcttccaaaatatcagtgaaaagttgcatatggagtgtaaagccgaaatggtcacccccctcgttaccaaccccggacacgtgtgcattacagacacaaacctctatttccagcctttgaatggctaccctaaaccagtcgttcagatcaccctgcaggatgtacggcgtatctacaaacgccggcacggcttgatgcctctcggcctggaggtcttctgcaccgaagacgacctgtgcagcgatatttatctgaaattttatgaacctcaggacagagatgacctttatttttacatcgccacatatttggagcatcatgtggctgaacatacagctgaaagttacatgctgcagtggcagcggggacatcttagcaattaccagtacttgctgcatctcaataacctggcggataggtcgtgcaatgatctatcacagtatccagtgtttccttggatcattcacgactacagctctagcgagttagatctttcaaatccaggcacattccgggacttatccaaacctgtgggggcacttaacaaggagcgactggaacgcctccttacccgttaccaggagatgccagagcctaagttcatgtacggctcccattactccagtcccggttacgtactattctatctggtgaggatcgcccctgagtatatgctttgtttgcagaatggacggtttgataacgctgaccgcatgtttaactcgattgccgaaacttggaaaaattgtctagacggggcaactgacttcaaggaactgattcccgaattctatggggacgatgtcagttttctggtgaatagccttaagctagatctcggcaagcgccaggggggacagatggttgacgatgtggagttgcccccctgggcctcgtctccggaggatttccttcagaagtctaaggatgctttggaatcgaactacgtttcggagcatctgcacgagtggattgatctaatttttggatacaagcagaaagggagtgatgctgtaggggcccacaatgttttccatccacttacatatgagggtggcgtggacctgaactccatacaggacccggacgagaaggtagccatgctgacacagattctggaattcggacagactcccaaacagttgttcgtcacgccacaccctcgccgcattactccaaagtttaaaagtctgagtcagaccagcagttataacgcttctatggctgactctcccggtgaggaaagttttgaggacctgaccgaggagtctaagaccttggcctggaataacatcaccaaactgcagctccatgaacactataagattcacaaggaggccgtgaccgggatcactgttagccgcaacgggtcgagcgtgtttacaacatcccaggatagcacactcaagatgttctctaaagaaagcaagatgcttcagcggagtattagctttagcaacatggcgctatcatcgtgcctcctgctccctggggacgccactgtgataacatccagctgggataataacgtctatttttactccattgcctttgggaggagacaagacactctgatggggcacgacgacgctgtgtccaagatctgctggcatgacaataggctgtatagcgcttcctgggattccactgtcaaggtgtggtccggcgtcccagccgagatgcctggaactaagaggcaccacttcgatcttctggcagagctggagcatgacgtcagtgtggatactatttccctgaatgccgccagtacactattggttagcggaacgaaggagggaactgtcaatatctgggacttgactacagccaccttaatgcatcagataccctgccattctggaattgtctgcgacacggcgttcagccccgattcccgccatgtcctgagcacaggcactgacggttgtctgaacgtgattgacgtgcagaccggtatgttgatctctagcatgacttctgacgaaccccaacggtgttttgtctgggacgggaattccgtgctgtctggatcacaatcaggagaactcctggtgtgggatttgttaggcgcgaagatatcagaaagaattcagggacacacgggcgcagtgacttgtatctggatgaatgagcaatgcagtagtataatcacggggggggaagataggcagatcatcttttggaagcttcagtactag

SEQ ID NO: 197201 - DNA, 1173 bp, synthetic construct
  misc_feature 1..1173: note = Description of Artificial Sequence: Synthetic coding sequence
  source 1..1173: mol_type = other DNA
atgggcgacaccttcatccggcacatcgccctgctgggcttcgagaagagatttgtaccgtcccaacattacgtgtacatgtttttggttaaatggcaggacctatccgagaaggtggtttaccgccgctttacggaaatctacgaattccataagacactgaaagaaatgttcccaatagaagccggcgctatcaatcccgagaacagaattattccccaccttcctgcccctaagtggtttgacgggcagcgagctgccgagaaccgtcagggcacccttacagaatattgcggaaccctgatgtcacttccaacaaaaatctctcgatgccctcacttgctcgacttcttcaaagtgaggccagatgatcttaaacttcccaccgataaccagacgaaaaagcccgaaacctatctcatgcctaaggatggaaaaagtaccgcaacagatattactgggcccataattcttcaaacatatagagctattgcgaattatgagaagacatcaggatcagaaatggcactgagtaccggtgacgttgtggaggtcgtggaaaagtctgagtcgggctggtggttctgccagatgaaagcaaagcgtggctggatacctgcatccttcctcgagcccctggattctccagacgagacagaagacccagagcccaactacgcgggagagccttacgttgcaattaaagcttataccgcagtcgaaggggacgaggtgagcctccttgagggggaggctgtcgaggtgatacacaaattactggacggctggtgggtcattagaaaagacgacgtaactggatatttcccctctatgtatctgcaaaagagtggacaggatgtatcgcaggcccagcgacagataaaaaggggcgctccacccaggcgttcctccattcgcaacgcacatagcattcaccagcgatctagaaagaggctgtcccaggatgcctacagaaggaatagcgtgaggtttttacagcagcggcgaagacaggcaaggcccgggccacaatccccagggagtcccctggaagaagaaaggcagacgcaacgatctaaaccccagcccgcagtacctccacgcccaagtgctgatctgatcctcaatcgctgctccgagagcaccaaacggaaactggctagcgcagtgtag

SEQ ID NO: 197202 - DNA, 444 bp, synthetic construct
  misc_feature 1..444: note = Description of Artificial Sequence: Synthetic coding sequence
  source 1..444: mol_type = other DNA
atgaccaagaagcccgagacctacctgatgcccaaggacggcaagtctaccgcaactgatatcacaggaccaatcatactccagacatatagggcgatcgccaactacgaaaagacaagcggatcggagatggcactctccaccggcgatgtcgtcgaggtggtcgaaaaatccgagtccgggcagacctctcacctgacagggttgcttcccctcgttttgcgcaacccgcagccccaagccccctgccaaggctcaggttccttggctcctggaagaacccccgccctgttgggggctcttaacgtgttaccgactctatgggtggcattttgcctaagcgttcacccagtcgtggctgttggcatctgcgcctggcaagctggcgccggccacgtttgcgtattctgcctggacggttacggaacagtctgttcactgtag

SEQ ID NO: 197203 - DNA, 759 bp, synthetic construct
  misc_feature 1..759: note = Description of Artificial Sequence: Synthetic coding sequence
  source 1..759: mol_type = other DNA
atgggcgacaccttcatccggcacatcgccctgctgggcttcgagaagagatttgtgccatcacaacattacgtgcacgttccgggagagatggcagggcccgtgggagagggcggcttgccagctctacaccgggacctgcgcgtgccttctccaaagtggtttgacggccagcgtgccgccgaaaaccgccagggcacgcttaccgaatattgcggcacattgatgagcttgcccactaaaatctctagatgccctcatctactagatttctttaaggtgcgccccgacgatctgaagttgccaacagataatcagactaaaaagcccgagacctaccttatgcccaaggatggcaaatccactgctaccgacatcaccggcccgatcatcttacagacatatagggcaattgcgaactatgagaaaacaagtgggtctgagatggcgctttctactggcgatgtcgtcgaagtggtcgagaagtctgagtcggggcagactagtcacctcaccggtcttctgcccctggtgcttcgcaacccccagccacaagcaccgtgccagggctcggggtcacttgcccctgggaggaccccagccctgctcggcgccctgaatgtgctcccgaccctgtgggtggcgttttgtttgtcggttcatccagtggtggctgtcggtatttgcgcgtggcaagccggcgccgggcacgtgtgcgtattttgcctcgatggttacgggacagtttgtagcctgtag

SEQ ID NO: 197204 - DNA, 1581 bp, synthetic construct
  misc_feature 1..1581: note = Description of Artificial Sequence: Synthetic coding sequence
  source 1..1581: mol_type = other DNA
atgagcctggtggaggccatcagcctgtggaacgagggcgtgctggcagctgacaaaaaagactggaagggagcgctggacgcgttcagcgcagtacaggaccctcacagcagaatatgctttaacatcggttgtatgtacaccatccttaagaacatgaccgaagcagaaaaggctttcactagaagtatcaaccgggacaagcatctggctgttgcttatttccagcgagggatgttgtactaccagacagagaaatatgacctggccatcaaggacctgaaagaagccttaattcagctaaggggcaaccagctgattgactataagatcctcggcttgcagttcaagctgtttgcttgtgaggtgctgtataacatcgcgttcatgtatgcgaagaaggaagagtggaaaaaagccgaagaacagctcgcccttgccacttccatgaagtccgagcccagacacagtaaaattgataaggccatggagtgcgtatggaaacagaagctgtatgagcctgtagtgatccctgtgggaaagctgtttaggcctaatgagaggcaggtggcacaacttgccaagaaggactacttgggaaaggccaccgtggtggcctctgttgtggatcaggacagcttcagcggattcgctccactccagccccaggcagctgagcccccacctcgtccgaagacgccagagatttttcgggcattggaaggcgaggctcacagagtcttgttcggctttgtgccggagacaaaagaggaactgcaggtgatgcctgggaacatcgtctttgtgctgaaaaagggtaatgacaattgggcaacagtaatgttcaatggacagaaaggtctggtgccctgtaactacctggagccggtggagctgaggattcacccccagcagcaacctcaagaggagagctctccacaaagcgatattcccgccccgccctcatctaaggcacccgggcgtcctcagttgagtcctggccagaaacaaaaagaggagccaaaagaggtgaaactcagcgtccccatgccttacacactaaaggtgcactataagtatacagtcgtgatgaagacccagcctgggctcccgtattctcaagtgcgtgatatggtgagcaagaagttggaactgcgactggagcacactaaactctcgtatcgtcccagggactccaacgagctggtcccgttaagcgaagattctatgaaggatgcttgggggcaggtcaaaaactattgcctcacgttgtggtgtgagaacaccgtgggagaccagggttttcccgacgaaccgaaagaatccgaaaaggcagacgcaaataatcagaccacggagccacaactcaaaaagggaagccaggttgaggcgcttttttcctacgaagcgacccaacctgaagacctggaattccaggagggggacataatactcgttttgtccaaggtgaacgaagaatggctggaaggcgagtgcaaaggcaaagtgggcattttccctaaggtgttcgtggaagactgcgcgaccactgatctcgagtccactcgtagagaggtgtag

SEQ ID NO: 197205 - DNA, 1581 bp, synthetic construct
  misc_feature 1..1581: note = Description of Artificial Sequence: Synthetic coding sequence
  source 1..1581: mol_type = other DNA
atgagcctggtggaggccatcagcctgtggaacgagggcgtgctggcggccgataaaaaagattggaagggggccttagatgccttcagcgccgttcaagacccccactccagaatttgttttaacattggatgtatgtacacaatcctcaaaaatatgaccgaagccgagaaggcatttacacgttccataaatcgggacaaacacttggctgtggcctattttcagaggggcatgctttattatcaaacagaaaagtacgatcttgctatcaaggacctgaaagaggctctgatacagctgcgcggcaaccagctaatcgactacaagatcttggggctgcagtttaagctcttcgcctgcgaagtgctatataacatcgccttcatgtatgccaagaaagaagaatggaaaaaagcagaggaacagctggcgttggccacatctatgaaatcagaaccacggcattccaagattgacaaggcgatggagtgcgtgtggaaacaaaagctgtacgaacccgtggtcatcccagttggaaagctgtttagacccaatgaaagacaggtagctcaactggccaaaaaggactaccttggcaaggccacagtggtggcaagcgtagttgaccaagatagcttcagcggatttgccccccttcagccccaagctgcggagcccccgccgcgtccaaagacgccagagatcttccgtgcgctggagggagaagcccaccgggtgctgttcggcttcgtgccagagactaaggaggaactccaagtcatgcccggaaatatcgtgtttgtcttaaaaaaagggaatgacaactgggctacagtgatgttcaatgggcagaaagggctagtgccctgcaattacttggaacctgtagaactgaggatacatccgcaacagcagccgcaggaggagagctcacctcagtcagatatccccgcgcctccctctagcaaagcccccggaagaccacagctgtctccaggtcagaaacaaaaggaagaaccaaaagaagtgaagctgagtgtgcctatgccgtacacactgaaggtccactacaaatatacggtcgtcatgaagactcagccagggctgccttactctcaggtgcgcgacatggtgtccaagaaactggagctgcggctagagcacacgaagctgtcctacagaccgcgggacagcaacgagcttgtcccattgtcagaggatagcatgaaggacgcttggggtcaagtcaagaactactgtctaaccctctggtgtgagaataccgtgggagatcagggctttcccgatgagcccaaagagtcagagaaggccgacgccaataatcagaccactgagccgcagctgaagaagggaagtcaggttgaggcactgttctcttacgaagcgacccagcccgaggacctggaatttcaagaaggagatatcattttagtgttatccaaggttaatgaggaatggcttgagggcgaatgcaagggaaaagtaggcatatttcctaaggttttcgtagaggactgcgccacaaccgatctagaaagcacacgcagggaggtgtag

SEQ ID NO: 197206 - DNA, 1797 bp, synthetic construct
  misc_feature 1..1797: note = Description of Artificial Sequence: Synthetic coding sequence
  source 1..1797: mol_type = other DNA
ggcagccccgcccggggcgacgcccccacctgcctgctgagcgtgagttggcagttgtcctggccacccagtttctacctgataatgtccctagtggaagccatttcgctgtggaatgagggagttctcgcagcagacaaaaaggattggaagggggctctggacgcttttagcgcagtgcaggatccccactctagaatctgctttaatatcggctgcatgtacacgatcctcaagaacatgaccgaggccgagaaggcatttactcgatctattaacagggacaaacacctcgccgtggcatatttccaaagagggatgttatactaccagactgaaaaatacgatctggccataaaagacctgaaagaagcgttaatccagctgcgggggaaccagctcatcgactacaaaattctaggcttgcagtttaagctctttgcttgtgaggtactctataacatcgctttcatgtacgctaagaaagaggaatggaagaaagccgaggagcagctggccttggccacaagtatgaaatccgaacctcggcactcgaagatcgataaggctatggagtgtgtttggaagcaaaagctgtacgagccagtagtcatacctgtcggcaaactctttcgacccaacgagcggcaagtcgctcaactcgctaagaaagactacctcggtaaggctactgtcgtcgcatcagtggtcgaccaagactccttctcgggcttcgcacctctgcagccgcaggtgagacagtccgacctacttggcgcccaggccggatcagtttcatcaagacaattgcaactcgacgtggagctcgagccaggttggtcccaggtccccgggtccaaattctctgtgtttgctccctggcaccacgttcgagggtggggcttagacctcgtctctattctctgtcgggccctggagggcgaggcccatcgagttttgttcgggttcgttcccgagacaaaagaggagctgcaggtgatgccaggaaatattgtattcgtgctaaagaaaggaaatgacaattgggcaacagtcatgtttaacgggcagaaaggcctggtgccatgtaactacctcgagcctgttgagctgcggattcatccacaacagcagcctcaggaagagagctcccctcagagtgacatccctgcccccccaagcagcaaggccccaggcaggccacagctgtcgcctggacagaagcaaaaagaagagcccaaggaggtcaaactatccgtgcccatgccgtatacattgaaagtccactacaaatacacagtcgtgatgaaaacgcaaccaggcttgccctattcacaagtgagagatatggtgtctaaaaaactggagttgagactggagcatactaagctgtcttatagaccccgagactcaaacgaactggtgcccctgtccgaagacagcatgaaggacgcctggggtcaggtaaagaattactgcttgacactgtggtgtgagaataccgtcggcgaccagggatttcctgacgagcccaaagagagtgagaaggctgacgctaataaccagacaaccgagccgcagctgaagaaagggtcgcaggtggaggccctattctcttatgaagctacgcagccagaagatttggagtttcaggagggggatatcattcttgtcctgtcaaaggtgaatgaggagtggctggaaggggagtgtaaaggtaaggtcgggatatttcctaaggtgtttgtcgaggattgcgccaccaccgatctggagtcaacaaggcgagaggtctag

SEQ ID NO: 197207 - DNA, 1446 bp, synthetic construct
  misc_feature 1..1446: note = Description of Artificial Sequence: Synthetic coding sequence
  source 1..1446: mol_type = other DNA
atgagcctggtggaggccatcagcctgtggaacgagggcgtgctggcagccgataagaaggactggaaaggagcactggatgcgttttcagccgtgcaggatccacatagcagaatctgctttaacatcgggtgcatgtacacaatattgaaaaatatgaccgaagccgagaaggcgttcactaggagcataaatcgggataaacatctggccgttgcatactttcagagaggaatgctttactaccagaccgagaagtacgacctggcgatcaaggacctgaaagaggccctcattcagctgcgagggaaccaactgatagattacaagatccttggcctccagttcaaactgttcgcctgcgagaaacagaaactctacgaacctgtggtgattcctgtgggtaaactgtttcgacccaatgaaaggcaagtggctcaactagccaagaaggactacctgggcaaggcgacagtggtggcttctgtggtggatcaggacagcttttctgggttcgcaccgttacaacctcaggccgctgaaccccccccaaggcctaagactcctgaaatcttcagagcccttgaaggcgaagctcatcgggttcttttcggtttcgtccctgaaacgaaggaggagctgcaggtgatgcctggcaatatcgttttcgtgctaaaaaagggcaatgacaattgggccacggtgatgttcaatgggcagaaggggttagtgccctgtaactacttggagccggtggaactgcgcatccacccacagcagcagccccaggaagaaagcagcccccagtctgatatcccagccccccccagctcgaaggcccccggccgaccccagctctctcccggacagaaacagaaggaggaaccaaaggaagtgaagctgagcgtccctatgccctacactttgaaggtgcattataagtataccgtggttatgaaaacccagcccgggctcccttactcacaagtgagagatatggtttctaaaaaactggagctgcgcctggaacatacaaagctgtcctatcggcctcgggacagcaatgaacttgtacccctcagtgaggattccatgaaggacgcttgggggcaggtaaagaattactgcctgaccctgtggtgtgagaataccgttggggatcaaggatttcccgacgagcctaaagagtctgagaaggcagacgccaacaaccagaccacagaacctcaactgaagaaggggtcccaagtcgaggccctgttctcttacgaggccacgcagccggaggacctggagtttcaggagggcgacattatacttgtcctttcaaaagtgaacgaagaatggttggagggtgagtgcaaagggaaggttggaatctttcctaaggttttcgtcgaggattgcgcgacgactgaccttgagagtaccagaagagaagtttag

SEQ ID NO: 197208 - DNA, 1338 bp, synthetic construct
  misc_feature 1..1338: note = Description of Artificial Sequence: Synthetic coding sequence
  source 1..1338: mol_type = other DNA
atgagcctggtggaggccatcagcctgtggaacgagggcgtgctggcagcagataagaaggattggaagggcgcgcttgatgcatttagtgccgtgcaggaccctcactcacgaatatgcttcaacatcggatgtatgtacacaatattaaaaaacatgacagaagccgagaaagccttcacacggagtattaatagggacaagcatctggcggtggcatatttccagagaggcatgctgtattatcagacagagaaatacgatttggccatcaaggacctcaaagaggcgcttatccagctacgaggcaaccaactcatcgattacaagattctgggacttcagtttaagctgtttgcttgcgaggtagtcgcctccgtcgtcgaccaggatagtttttccggttttgctcccctgcagccgcaggctgcagagccccctcctcgaccaaaaacccctgagattttccgagcgctggagggtgaggctcatcgcgtcctcttcggatttgtgcccgaaacaaaagaggaactgcaggtgatgccgggtaacattgtgtttgtcctcaaaaagggaaacgataactgggcgaccgtaatgtttaacggccagaaggggcttgtcccatgcaattatcttgaacccgttgagctcaggatccatccacaacagcagccccaagaagagagttcccctcagagtgatataccggcgccacctagttctaaagcccccggacgaccccaactgtcaccaggacaaaagcagaaagaggagcctaaggaggtgaaactttctgttcccatgccttataccttgaaggtccattataaatataccgtagtgatgaaaacacaacctgggctgccctactctcaggtccgagacatggtctctaagaaacttgaactccgtttggagcacaccaagctgagctaccgcccaagggattccaacgaattggttccattgtcagaggattcgatgaaagatgcttggggtcaagtgaaaaactattgcctgactctctggtgcgagaacaccgtaggagaccagggatttcccgacgagcccaaggagtccgaaaaggctgacgcaaataatcaaacaacggagcctcagttaaagaaaggttcccaggtcgaagcattgttctcctatgaagccactcagccggaggatctggagtttcaggaaggggacataatactggtgctgtctaaggtgaacgaagagtggctcgaaggcgaatgcaagggtaaagtaggtatcttccccaaggttttcgtggaggactgcgctaccactgatttggagtccacgcgacgggaagtttag

SEQ ID NO: 197209 - DNA, 432 bp, synthetic construct
  misc_feature 1..432: note = Description of Artificial Sequence: Synthetic coding sequence
  source 1..432: mol_type = other DNA
atgcccggcaacatcgtgttcgtgctgaagaagggcaacgacaactgggctactgtcatgttcaacgggcaaaaaggcctcgtgccatgtaattacttagagcctgtggagttgcgaatccatccacagcaacaaccacaagaggagtcttccccccagtcggatattccggccccgccgtctagcaaagcaccagggcgtccccagctgtcccccggacagaaacagaaggaggaacccaaagaggtaaagttgagtgtgccaatgccgtacacattgaaggtgcactacaagtataccgtggttatgaaaacccagcccgggttgccctactcacaagtgcgagatatggtcagtaaaaagctggagctcagactggaacacactaagctctcctacagaccccgggacagcaatgagctggtcccttag

SEQ ID NO: 197210 - DNA, 171 bp, synthetic construct
  misc_feature 1..171: note = Description of Artificial Sequence: Synthetic coding sequence
  source 1..171: mol_type = other DNA
atgccctacaccctgaaggtgcactacaagtacaccgtggtgatgaagactcagccaggacttccgtactctcaggtgagagacatggtgagtaagaagttagagctcagattggagcacaccaagctatcctatcgtcccagagacagtaacgaactcgtgcctctgtag

SEQ ID NO: 197211 - DNA, 1020 bp, synthetic construct
  misc_feature 1..1020: note = Description of Artificial Sequence: Synthetic coding sequence
  source 1..1020: mol_type = other DNA
atggccgtggcccagcagctgcgggccgagagcgacttcgagcagctccctgacgacgttgcgatctccgctaatatcgccgacatcgaagaaaaaaggggattcacgagccactttgtgttcgtcatcgaggtaaagacgaaagggggctctaagtatctaatctatcgtcgctatcgccagtttcacgccttgcaaagcaaactggaggaacgctttggcccggacagcaaaagttctgctctggcctgtactctccctaccctgccggccaaggtctacgtgggcgtcaagcaggaaatagctgaaatgaggatccccgccctaaatgcctacatgaaatccctgctcagcttacccgtctgggtgctcatggacgaagacgtgcgtatattcttctaccagagtccatacgacagcgaacaagtgcctcaggcgctgagaagactgcggcctagaacccggaaggttaagtccgtttcccctcagggaaattctgttgaccgcatggcagcccccagggcagaagcattgttcgattttaccggcaacagcaagctcgaattgaatttcaaggctggcgacgttatcttccttctgtcaagaatcaacaaggactggctggaaggcaccgtgaggggcgctacaggaatcttcccactgtctttcgttaagattctgaaagacttccccgaagaggacgatcccacaaactggctgcgctgctattattacgaggatacaatctccaccattaaggacatcgcagtcgaagaggatctgagcagcacccccctcttaaaagatctgttggagttaacgaggagggagtttcagcgcgaggatatcgccctgaattacagggatgcagagggtgacctggttcggctgctgagtgacgaggatgtcgccctgatggtgaggcaagctaggggacttccaagccagaagaggctgtttccctggaaactgcacatcacacagaaagacaactatcgggtttacaacactatgccctag

SEQ ID NO: 197212 - DNA, 1047 bp, synthetic construct
  misc_feature 1..1047: note = Description of Artificial Sequence: Synthetic coding sequence
  source 1..1047: mol_type = other DNA
atggccgtggcccagcagctgcgggccgagagcgacttcgagcagctccccgacgatgtcgccatctcagccaatattgcagatatagaagagaaacgcggcttcacgagtcatttcgtgtttgtaatcgaggtgaagacaaaaggtgggtctaagtatctgatctatcgccgttatcgacagtttcacgcgcttcagtctaagctcgaagaacgattcgggcccgactccaaaagttcagccctggcgtgcacgctgcccaccctgccggccaaagtttacgttggggtgaaacaggaaatcgcagaaatgagaattccagctttgaatgcatacatgaaaagtcttttgtctctacctgtgtgggttctcatggatgaagacgtccgaatcttcttctatcagagcccatacgattccgaacaagtgccccaggccctccgtaggctgagaccccggacgcgaaaggtgaagagtgtttcaccccagggaaattccgtagaccggatggctgctccaagggccgaggccctattcgatttcacaggtaatagcaaactcgaactcaacttcaaagccggtgatgtaattttcctcctcagtcggattaacaaagactggcttgagggaaccgtgagaggagctactggaatctttcctttatcttttgtaaagatactgaaggactttccagaagaagatgatccgaccaattggctccggtgctactattatgaggataccatctctacaataaagtctgttgcatgggaggggggggcctgccctgcatttctgcccagcctccggcccctcccactaactagcccaagccatggtagcttatcccatagtaaggctcccagcgggtctcaaatgtctcacaacgccgtgactagccatcaacgccctggctggcctggccaaccccactcccccttcccgcatcccacaccccattttcagcccgatgcctccctcttgcaacctgtcacacccctggggactagtcgatggagaaagatcagcgccgcccttccatactag

SEQ ID NO: 197213 - DNA, 501 bp, synthetic construct
  misc_feature 1..501: note = Description of Artificial Sequence: Synthetic coding sequence
  source 1..501: mol_type = other DNA
atgcggatccccgccctgaacgcctacatgaagagcctgctgagcctgccagtgtgggtcctgatggatgaggacgtgaggatttttttctaccagagtccctacgactctgagcaggtgccgcaggctcttagaagactgagacctcggacaaggaaggtaaaatcggtgagcccccagggcaatagtgtagatagaatggccgccccccgcgccgaggccctgtttgactttaccggcaattccaagctagaactcaacttcaaggccggcgatgttatttttctgctgagtcggattaacaaagattggctcgaggggactgtgcgtggagcaaccggaattttcccgctgagcttcgtcaagatcttaaaggatttcccagaggaggatgatcccacaaattggcttcggtgttactactacgaggataccatctcaacaatcaagagcgtggcctgggaaggcggggcatgcccagccttcctgccctcactctag

SEQ ID NO: 197214 - DNA, 480 bp, synthetic construct
  misc_feature 1..480: note = Description of Artificial Sequence: Synthetic coding sequence
  source 1..480: mol_type = other DNA
atgaacgacatcagccagaaggccgagatcctgctgagcagcagcaagcctgtgccaaagacgtacgtgcctaagctgggtaaaggcgacgtgaaggataagtttgaagcaatgcagagggcaagggaagagcggaaccagcgcagatctagggacgagaagcagcgccgcaaggagcaatatatcagggagcgggagtggaaccgccgtaaacaggagattaaagaaatgctcgcttccgacgatgaggaggacgtctcttcgaaggtggaaaaggcgtatgtaccaaaactcaccggtacagtcaaggggcgctttgccgagatggagaagcagagacaggaggaacagcgcaagagaaccgaagaagaaagaaaaaggcggatagagcaggatatgttggaaaagagaaagatccagcgagaactggcaaagcgggcagagcagaagttagcaagaagagatggggcacacctttag

SEQ ID NO: 197215 - DNA, 1836 bp, synthetic construct
  misc_feature 1..1836: note = Description of Artificial Sequence: Synthetic coding sequence
  source 1..1836: mol_type = other DNA
atgaacgacatcagccagaaggccgagatcaaggagatgctggcctctgatgatgaagaggatgtatctagcaaagtagaaaaagcatacgtcccgaagcttactggaaccgtgaagggcagattcgccgaaatggaaaaacagagacaggaagaacaacgcaagcgtaccgaagaagagcggaagagaagaatagagcaggacatgctggaaaaaagaaagattcagcgagaactggccaagcgggccgaacagattgaggatatcaacaacacgggaacagagtccgcgagcgaggaaggggacgattccctcttgataactgtcgtgcccgtgaaaagttacaaaacctctggtaaaatgaagaagaattttgaagacttggaaaaggagcgagaggagaaagagaggattaagtacgaagaggataagaggatccgttacgaagagcagcggccttctctcaaggaggccaagtgccttagcttggtgatggatgatgaaatcgagtccgaagcgaaaaaggaatcactttctcccggcaagcttaagctcaccttcgaagagcttgaacggcagcggcaggagaacaggaagaagcaagccgaggaggaggccagaaaacgactggaagaggagaagagagccttcgaggaagccaggcggcaaatggttaatgaagacgaggagaaccaggacacagcgaagattttcaagggctatcgccccggtaaactgaagctgtctttcgaggagatggaacggcagcggagagaggatgagaagaggaaggccgaagaagaggctcgacgtcgcatcgaggaggagaagaaggctttcgccgaagcccgacgaaatatggtggtagatgatgatagccctgagatgtacaagacgattagccaggagtttctaacacctggaaagttagagattaactttgaggaattgctgaaacagaaaatggaagaggaaaagcgccgaacggaggaggagagaaaacacaagctggaaatggagaaacaggagttcgagcagctgagacaggagatgggtgaggaagaggaggagaacgagacattcggattaagccgagagtatgaggagttaatcaagctcaagcgatccggaagcattcaggcgaagaacctcaaatctaagtttgagaaaatcgggcagctgagcgaaaaggagatccagaaaaagatagaggaagaaagggcaagaagaagagccatagacctcgagatcaaggaacgagaggctgagaactttcatgaggaggacgacgtggacgtgagaccagctaggaagtcagaggcaccttttacacacaaagtgaacatgaaggccaggttcgagcagatggccaaagctagagaagaagaggagcaaaggcgcatcgaggagcagaaacttctgcgaatgcagtttgaacagcgcgagattgatgcagcactccagaagaagcgagaagaggaggaggaggaggagggctccatcatgaacgggtcaactgcggaagacgaagagcagaccaggtccggggccccctggttcaaaaaaccccttaaaaatacttctgtggtggattcagagcctgtccgatttactgtgaaggtaaccggcgaaccaaaaccagaaattacatggtggttcgagggcgagatcctacaagacggagaggattatcagtatattgagcgcggagaaacatattgtctgtatttacccgaaaccttccctgaggatgggggagaatacatgtgtaaggctgtgaataacaaggggtccgctgcttctacctgtattctgaccatcgagtctaaaaattag

SEQ ID NO: 197216 - DNA, 2028 bp, synthetic construct
  misc_feature 1..2028: note = Description of Artificial Sequence: Synthetic coding sequence
  source 1..2028: mol_type = other DNA
atgaacgacatcagccagaaggccgagatcctgctgagcagcagcaagccagtccctaaaacatatgttcctaagctgggcaagggagatgttaaagacaagtttgaggctatgcagcgagccagagaggagagaaaccagaggcggtctagagacgaaaaacagcggaggaaggagcaatacatcagggaaagggagtggaaccggagaaagcaagagattaaagaaatgttagctagcgatgatgaggaggacgttagctcaaaggtggagaaagcctacgttcccaaactgaccggaaccgtcaagggccggttcgccgagatggagaaacagcggcaggaggaacagcgaaagcgcaccgaagaagagcggaagagacgaatcgaacaggatatgcttgaaaagcggaaaatacagcgggagttagcgaaaagggccgagcaaatcgaagacatcaacaacacgggcactgagtctgccagcgaggagggtgacgactctctgctgatcaccgtggtgccagtgaaatcatacaaaacttcaggaaagatgaaaaaaaatttcgaagatttggagaaagagagggaggagaaggagcggatcaaatatgaggaggacaagaggatcagatacgaagaacagagacctagcctaaaagaagcaaagtgtctgtccctagtgatggacgacgagatcgaatccgaggccaagaaagaaagtctgtcgcctgggaaactcaagctgacgtttgaggagctcgaacgccagcgtcaagaaaaccgcaagaagcaggccgaggaagaagcccgcaaacgcttagaggaggaaaagcgcgcgttcgaggaagctcggcgccagatggtaaacgaggacgaggagaaccaggacaccgctaagatcttcaagggttaccggcccggtaagctgaagctcagctttgaagagatggagcgacaacggcgagaagacgagaagcggaaggccgaagaggaagcacgtcggcgtatcgaggaggagaaaaaagcatttgctgaggctcgccggaatatggtggtcgacgatgacagtccagaaatgtacaaaactatttcacaggagttcctcacgcccggcaagctcgagattaacttcgaagaactgcttaagcagaaaatggaagaagaaaaaagaaggacagaggaagaaagaaagcataaactagaaatggagaaacaagaattcgagcagcttcggcaagaaatgggtgaagaagaggaagaaaatgaaacattcggtctaagcagagaatatgaggagctgatcaagttaaagcggagcggcagtatacaggccaagaatctgaaatcaaagttcgagaagatcggccagctgtcagagaaggagatccaaaagaaaattgaagaggaacgagctaggagacgagcaatcgatctcgaaatcaaggaaagggaagcggaaaacttccatgaagaggacgacgtcgatgtccggcccgctcggaagagcgaagctccatttacacacaaggtgaacatgaaggccagattcgaacagatggcaaaagcccgcgaagaagaggagcagcggaggattgaagagcagaagcttctaaggatgcaattcgagcagcgggaaatcgacgcggcactgcaaaaaaaacgggaagaggaggaggaggaggaaggctctatcatgaacgggagcacagcggaggatgaagagcagacaaggtccggggcgccttggtttaagaagccattgaagaatacatcagttgtggatagtgaacccgtacgatttaccgttaaagtcaccggcgagcctaagcccgagattacatggtggttcgaaggagagattctgcaagatggggaggactatcagtatatcgaaaggggcgagacatattgcctgtatctgccagaaaccttccctgaggatggcggcgagtatatgtgcaaagctgtgaacaataagggcagcgctgctagtacgtgtattctgaccatcgagtccaagaattag

SEQ ID NO: 197217 - DNA, 1731 bp, synthetic construct
  misc_feature 1..1731: note = Description of Artificial Sequence: Synthetic coding sequence
  source 1..1731: mol_type = other DNA
tgagtgaagggccggttcgccgagatggagaagcagcggcaggaggagcagcggaaacgtactgaggaggaacgaaagagacgaatcgagcaggatatgttggagaagcgtaaaatccagagggagctcgccaaaagggcggaacagatcgaggacataaataacacggggaccgagtctgcgagcgaggagggagacgactcgctcttaattactgtcgtgcccgtaaagtcatataagaccagcggtaagatgaagaaaaacttcgaggatctggaaaaagagagggaagagaaagagcgtattaagtatgaggaggataagaggatccggtatgaagagcagaggcccagcctgaaggaggcgaaatgcctgagcttggtgatggatgatgaaattgagagcgaggccaagaaggaaagcctgtcgccaggtaaactgaagctgaccttcgaagaacttgaacgccagcggcaggagaacagaaaaaagcaagccgaggaggaggctaggaaaagactggaagaggagaagagagcatttgaggaggccaggcggcagatggtcaatgaagacgaggaaaatcaggataccgccaagatatttaagggctatagaccaggcaaactcaaattgtcattcgaagagatggaacgccagcggagggaggatgaaaaacgaaaagccgaggaggaggctcgaagaagaatcgaggaagagaagaaggcttttgcagaggcacggagaaatatggtcgtggacgacgacagtccagagatgtataagacaatctcacaagagttcctgacgcccggtaagctcgaaattaatttcgaggaactcctgaagcagaagatggaggaggagaagagaaggaccgaagaagaacgtaagcacaagctggagatggagaagcaggagtttgaacagctgcgccaagaaatgggggaggaggaggaagaaaacgagacctttggactgagtcgggagtatgaagagcttatcaagctcaagcgaagtgggtccatccaagcaaaaaatctgaagagtaaattcgagaagatcgggcagctcagcgaaaaagagattcagaagaaaattgaagaagagagagccagaagacgggctattgatctcgaaattaaggagcgcgaggcggaaaattttcacgaggaagacgacgttgatgttaggccggctcgcaagagcgaagcccccttcactcacaaggtaaatatgaaggccaggtttgaacagatggctaaagcaagggaggaagaagaacagagaagaatcgaagaacagaagctactacggatgcagttcgaacagagagagattgatgctgctttacaaaagaagagagaggaggaagaagaggaggaaggaagcattatgaacggcagtactgctgaggacgaggagcagacaagatccggggcaccttggttcaagaagccattaaaaaataccagcgtggtggattccgagcccgtgcgcttcactgtgaaagtgacgggggaaccaaagccagagattacatggtggttcgagggtgagattctgcaggatggggaggattatcagtatatcgagcgcggggaaacctactgcctgtatttacctgagacctttccagaagacgggggtgaatacatgtgcaaagctgttaataacaagggttccgctgcaagcacgtgtatccttactattgagaccgacgactactag

SEQ ID NO: 197218 - DNA, 966 bp, synthetic construct
  misc_feature 1..966: note = Description of Artificial Sequence: Synthetic coding sequence
  source 1..966: mol_type = other DNA
atgaacgacatcagccagaaggccgagatcaaggagatgctggccagcgatgacgaggaggacgtatcttcaaaagtcgagaaggcgtatgtgcctaaactcaccggcactgtgaagggccgatttgctgaaatggagaagcagcgacaagaagagcagagaaagcgcacagaagaggaaaggaagagacggatagagcaggatatgctcgaaaagagaaagatccagagagaactggcaaaacgtgccgaacaaatcgaggacatcaataatacgggtaccgaatctgccagcgaggagggcgatgactcactactgatcaccgtggtgcccgtcaagtcctataaaacgagtggcaaaatgaaaaaaaattttgaggacttggaaaaggagcgagaggagaaggagcggattaagtacgaggaagacaaacgcataagatatgaggaacagaggccttctctgaaggaggctaaatgtctgtcgctcgtgatggatgacgagatagaatccgaagccaagaaggagtcactaagccctggaaaactaaaactgactttcgaagagctggagcgacagcggcaagaaaatcgcaaaaagcaggctgaagaagaggcaaggaaacggttagaggaggagaagagggcattcgaagaggcgagacgtcagatggtgaacgaggacgaagagaatcaggacaccgctaaaatctttaaggggtaccgtcctggaaagcttaaactgagttttgaggagatggaaaggcagcggagagaagatgagaagcgaaaggccgaagaagaagccaggcgcaggatagaagaagaaaagaaagcatttgcagaggcccgccggaacatggtggtggatgatgattccccagagatgtataagacaatcagtcaggaattcctcacaccggggaagcttgagattaacttcgaggaactccttaagcagaaatag

SEQ ID NO: 197219 - DNA, 1308 bp, synthetic construct
  misc_feature 1..1308: note = Description of Artificial Sequence: Synthetic coding sequence
  source 1..1308: mol_type = other DNA
atgaacgacatcagccagaaggccgagatcctgctgagcagcagcaagccagtgcctaaaacgtacgttccaaagctagggaagggtgacgttaaggacaagttcgaggctatgcagagagccagggaagagcgcaaccagcggcgatcacgcgatgaaaaacagcgtcgcaaggagcagtacatccgcgagagagaatggaatcggcggaagcaggagattaaggaaatgctggcttcagacgacgaggaggatgttagttccaaggttgaaaaagcctatgttccaaagctgacagggactgtgaaggggaggttcgccgaaatggagaagcaaagacaggaagaacagaggaagcggactgaagaggagagaaaaaggaggatcgaacaggatatgctggagaagagaaaaattcaacgtgagctggctaagagagccgaacaggaaggagacgactccctcctcattacagttgtgccagtaaagtcctacaagacctcaggtaagatgaagaagaacttcgaggacctggaaaaagagagggaagagaaagaaagaattaaatacgaagaggataaaaggataagatacgaagagcagcgcccgtctcttaaggaggccaaatgtctgtcactggtaatggacgacgaaatcgagagtgaggcgaaaaaggagtctcttagccccggtaaactgaaactgacttttgaagaactggagcgccagcgtcaggagaaccggaagaagcaggccgaggaggaagctcgcaagaggctggaggaagagaagcgtgccttcgaggaggccaggcggcagatggtgaacgaagatgaggagaaccaggacactgccaagatatttaaagggtacagaccaggaaagttaaaactaagcttcgaggaaatggaaagacagcggcgagaggacgagaagcggaaggcagaagaagaagcacgcagacggatcgaagaggagaagaaggcttttgcagaggcccggagaaatatggtcgttgacgacgattctccggagatgtacaaaactattagtcaggagtttctgacccccggcaaactggaaatcaactttgaagagctgctgaagcagaagatggaagaagagaaaaggcgaacagaggaggagaggaagcataagctggaaatggagaaacaagagttcgagcagttgaggcaagagatgggtgaagaagaggaggaaaacgaaacctttgggctttcccgggaatacgaggaattaattaagttgaagagatccggctcgatccaggccaaaaatttgaaatag

SEQ ID NO: 197220 - DNA, 1989 bp, synthetic construct
  misc_feature 1..1989: note = Description of Artificial Sequence: Synthetic coding sequence
  source 1..1989: mol_type = other DNA
atgaacgacatcagccagaaggccgagatcctgctgagcagcagcaagcctgtaccgaagacctacgtacccaaactgggcaagggggatgtcaaagataaattcgaggcaatgcagcgcgccagggaggaacggaaccagcgaagatcgcgggacgaaaagcagagacgtaaggaacaatatatccgagaacgagagtggaaccgcaggaagcaagagataaaggagatgctggctagcgacgacgaggaagatgttagctctaaagtcgagaaagcctatgtgcctaagctcaccggaaccgtaaaaggacgtttcgccgaaatggaaaaacaacggcaggaggagcagcggaaacgcaccgaggaggagcgtaaaaggagaatcgaacaggacatgctggagaagcgcaagatccagagagaactggccaaaagagcggagcaggaaggggacgattcactgttaattaccgtcgtaccagttaaatcttataagacaagtggtaagatgaaaaagaacttcgaggacctggaaaaagagcgggaagagaaagaacgtatcaagtacgaggaagacaagcgcatcagatatgaagagcaaaggccaagccttaaggaagctaaatgtctaagcctggttatggacgatgagatcgagtccgaggctaaaaaggaaagtctttcaccgggcaaactgaaactgaccttcgaggagttagagcggcagcggcaggaaaacaggaagaaacaagcagaggaggaagctcgcaagcgcctcgaagaggagaaacgagccttcgaggaggccaggagacagatggttaacgaggacgaagaaaatcaggatacagcaaaaattttcaagggatacagacccggaaaactgaagctttccttcgaggagatggagcgacagcgaagggaggatgagaagcggaaagctgaagaagaggcgcggcgacgcatagaggaggaaaaaaaggcctttgcagaggccaggcgaaatatggtagtggacgacgacagccctgagatgtataagacgattagtcaggagttcctcacccctggcaaacttgaaattaattttgaggagctactgaagcagaaaatggaggaggaaaagcggaggaccgaagaagaacggaagcacaaacttgagatggaaaagcaggagttcgagcagttgaggcaggagatgggtgaggaagaagaagaaaatgaaacctttggactgtctcgcgagtacgaggagttgatcaaactgaagcgctccgggagtattcaggctaaaaatctcaagtccaagtttgagaaaatcggccagttaagcgagaaagaaatccagaaaaagatcgaagaggagcgcgccagaaggcgggcaatcgacttggagattaaagaaagggaagccgaaaactttcatgaggaggacgacgttgacgtccgcccggcccgcaagtctgaggcgccctttacgcacaaggtcaatatgaaagctcgtttcgaacagatggctaaggcacgcgaggaggaagagcagcggagaattgaggagcagaagctgctgagaatgcagttcgaacagagagaaattgatgccgccctgcagaaaaagcgcgaggaggaggaagaggaggagggatccattatgaatggctcaaccgcagaggacgaggaacagactcgttccggcgctccgtggtttaaaaaaccactgaaaaatacctccgtggtagattctgagccagtgcggtttaccgtaaaggtaaccggggagccaaaaccggaaatcacatggtggttcgaaggcgaaatcctccaggacggcgaggactaccaatacatcgaaagaggagagacgtactgtctttatctgcctgaaacctttcctgaggatgggggcgagtatatgtgtaaggcggtgaataacaagggttcggccgcctcaacctgcattctaacaatcgagaccgacgattactag

SEQ ID NO: 197221 - DNA, 813 bp, synthetic construct
  misc_feature 1..813: note = Description of Artificial Sequence: Synthetic coding sequence
  source 1..813: mol_type = other DNA
atggagaaccagcccgtgcggtggcgggccctgcccggcctgccccgcccaccggggcttccggccgcaccctggcttctgttaggggtcctcctgctgcctgggaccctacgtctggccgggggccagtcagtcacccacaccggtctgcctatcatggctagtctggccaataccgccatctcattttcgtgtcgaatcacctatccctataccccccagttcaaggtgttcacagtctcttattttcacgaggacctgcaagggcaacgctctcccaagaaacccacgaattgccatcctggattgggcactgaaaaccaatcacatacgttggattgccaggtcacgttggtgctccccggggcatcagccactggcacatactattgctccgtccattggccacacagtacagtaagagggagcggcacatttattttagtgagagatgcggggtacagagagccccctcagagcccccagaaactgctgctttttggatttaccgggcttctaagtgtgttgagcgtcgtcggaaccgcactgctgctgtggaataagaagcgtatgcgcggcccagggaaagaccccacccggaagtgccccgaccccagatcagcatcatcacccaagcagcacccaagtgagtccgtgtatactgcactgcagcgccgggaaaccgaagtctacgcctgcatagaaaatgaggatgggtcatcccccacagccaaacaaagccccttgtcccaggagcgaccccatagattcgaggatgacggggaactgaatctggtatatgaaaatctgtag

SEQ ID NO: 197222 - DNA, 1248 bp, synthetic construct
  misc_feature 1..1248: note = Description of Artificial Sequence: Synthetic coding sequence
  source 1..1248: mol_type = other DNA
atggcccccgtgagcggcagccggagccccgaccgggaggccagcggatcgggaggccgaagacggtcaagctccaaatcaccaaaaccctccaagtccgctagaagccctcgagggaggagatcacggtcccatagctgctcccgcagcggcgacagaaacggcctgacccatcaattaggcggactatctcaagggtcccgaaaccagagttaccgttctcgttcacgtagccgatctcgtgagaggccttccgcacccaggggcatccccttcgcttctgcctcaagtagcgtgtactacggctcctatagccgcccctatggttctgacaagccgtggcctagcctgctagataaggagcgcgaggagagtcttcggcaaaagcggctgagtgaacgggagcgaataggtgagttgggcgcccctgaagtgtggggtttaagcccaaaaaaccctgagcccgattccgatgagcatacccccgtggaggatgaagagccaaaaaagtccacgaccagcgccagtactagcgaggaagagaagaagaagaagtcttcccgcagcaaggagagatccaaaaagaggcggaagaagaagtcatcaaaacgcaagcacaaaaaatatagcgaagacagtgacagtgactccgacagcgaaactgatagctccgatgaggataacaagaggagggctaagaaagcaaaaaagaaagagaagaagaaaaaacatcgcagcaagaaatataagaagaagcgatccaagaaaagccgtaaggagtcttcagattccagttcaaaagaaagccaggaggagtttctcgaaaatccctggaaagatcgaactaaagcagaagagccaagcgacctaatcggtcctgaggctccgaagactctcacctcccaagatgataagcccctgaattatggacatgctttacttcctggggagggagcagcaatggcagagtatgtcaaggctggaaaaaggataccccgccgcggtgagattggccttactagcgaggagatcgcatcttttgagtgctcagggtatgtgatgtcagggagtcggcaccgacgcatggaagctgtacggttgcgcaaggaaaaccagatttactcagctgatgagaaacgcgctctggccagttttaaccaggaggaaaggcggaagcgggaaaacaagatcctagcatcattcagagagatggtgtacagaaagacaaaaggaaaggatgacaagtag

SEQ ID NO: 197223 - DNA, 2073 bp, synthetic construct
  misc_feature 1..2073: note = Description of Artificial Sequence: Synthetic coding sequence
  source 1..2073: mol_type = other DNA
atggagaagatcctgcagatggccgagggcatcgacatcggcgagatgccttcctatgatcttgttctatccaagccttctaagggacaaaagaggcatcttagtacttgtgacggtcagaaccctcccaaaaaacaagccgggtcaaaattccacgctcggccccgcttcgaacccgttcacttcgtggcctcttcctctaaggacgagcgacaagaggatccctacggaccccaaacgaaggaggtgaatgaacagacgcattttgcaagcatgcccagggatatttaccaggattacacccaagatagcttctccattcaagacgggaactctcagtattgcgacagttccggtttcatcttaacgaaagaccagcccgtgaccgccaacatgtatttcgactcaggaaatcctgctccttccactaccagccaacaggctaattctcagtccacccccgagccatcaccatctcagaccttccccgaatccgtcgttgcagaaaagcagtattttattgagaagctcacagccaccatctggaagaatttgtctaatccagagatgactagtggtagtgataaaattaactacacctacatgctcacgaggtgtatacaggcctgtaaaaccaaccccgagtacatctacgcccctctcaaggagattccgccagctgacattcctaagaacaaaaaactgttaacagacggatacgcttgtgaggtccgctgccaaaacatataccttacaacaggctacgccgggtctaaaaacggcagccgggatagagccacagagctggccgtgaaactgctacagaagcggatcgaagtgagagtggttagaagaaagtttaagcacacattcggggaggatctcgtggtctgtcaaatcgggatgagctcctatgagtttcctcccgccctgaagccccctgaagatctggtggtgcttgggaaagacgcatccgggcagccaatcttcaacgcctctgctaagcattggacgaacttcgtgatcactgagaatgcgaacgacgccataggtattctgaacaattccgcaagttttaacaagatgtccattgagtacaagtacgaaatgatgcccaacagaacctggagatgtcgggtttttttacaggatcactgcctggcagaggggtatgggacaaagaaaacttcgaagcacgctgcagctgatgaggcccttaaaattctacaaaaaacccagccgacctacccgtcagtgaaatcatcacagtgtcacactgggtcttccccccgcggttcaggcaaaaagaaagacatcaaggacttggttgtgtacgagaattcctccaacccggtttgcaccctgaacgacaccgctcagtttaatcgtatgacggtggaatatgtctatgagcggatgacagggctccgttggaaatgtaaggtgattctggaaagtgaagtcatcgcagaggcagtgggtgtaaagaaaactgtgaagtatgaagcggcaggcgaagcagtgaagaccctgaaaaaaacccagcccacagtgatcaataacctcaagaaaggagcagtggaagacgtgatcagccgcaacgaaatccagggccgttcagccgaggaagcctataaacagcagatcaaggaggacaatatcggtaaccagttgctacggaagatgggatggacaggaggtggcctcggcaagtccggcgaaggcattcgagagcctatttcagtcaaggagcagcacaagcgggaaggcctgggactggacgtagagagagtgaataagatcgctaaaagggatattgagcagatcataagaaattacgcccgatctgaatctcataccgacttgacttttagcagggagctgacaaacgatgaacgcaagcagatccaccagatagctcagaagtatggactgaagagcaaaagtcatggggtgggccatgaccgctaccttgtggtcggtcgcaaacggagaaaagaggacctgctagaccagctcaagcaggagggccaagtcggtcactacgaactggttatgccccaggcaaactag

SEQ ID NO: 197224 - DNA, 2073 bp, synthetic construct
  misc_feature 1..2073: note = Description of Artificial Sequence: Synthetic coding sequence
  source 1..2073: mol_type = other DNA
atggagaagatcctgcagatggccgagggcatcgacatcggcgagatgcccagctacgacctagtactgtccaaacccagtaagggtcagaaaaggcatttgtcaacttgcgacggccagaaccctccaaaaaagcaagctgggagtaagttccacgcccgtcccagatttgagccagttcacttcgtggcatcatcttccaaggacgaaaggcaggaggacccttacggaccacagactaaagaggtgaatgaacagacccacttcgcctctatgcccagagatatttatcaggactacacccaggattcgttctcgatacaggacgggaactcacagtactgtgactcatctgggttcattctgactaaagatcagcctgtgaccgccaacatgtattttgatagcggaaatccagctccttctactacatctcagcaggcaaatagtcagtcaacaccggagccatctccctcccaaacgttcccggagtccgtggtcgcagaaaagcagtactttattgagaaactgacagctactatctggaagaacctgtctaatccagagatgacttcaggtagcgataaaattaactacacttacatgctaactcgttgtatccaagcctgtaaaactaacccggagtatatatacgcacccctaaaagagatcccacctgcagatatcccgaagaacaagaaattgctgaccgacggatatgcttgtgaagttcgctgccagaatatctatttaactacaggatacgcaggctctaaaaacgggtctcgagatcgcgccacagagcttgctgtgaagctcttgcagaaacgcattgaagtaagggtagtgagacggaagttcaagcacacatttggcgaagatttggttgtgtgtcaaattggcatgagttcttacgagttccctccggctctgaaaccgccggaggacctggtggtgctgggaaaagacgcttccggtcagcctatctttaacgcaagtgcgaaacactggactaattttgtgatcaccgaaaacgccaatgacgccataggaatcttaaataactcagcaagctttaataagatgtctatcgagtacaaatatgagatgatgcccaataggacctggcgatgcagagtctttctgcaggaccactgcctggccgagggctacggcacgaagaagacaagcaagcacgccgcggccgacgaagcccttaagattttgcagaagacccaacccacgtaccccagcgttaagagttcacagtgccacacaggctcatccccacgcgggtctggcaagaagaaggacattaaggacctcgtggtgtacgagaacagtagtaatcccgtttgcacacttaacgacacggctcagtttaataggatgaccgtggagtacgtgtatgaaaggatgactggtctcagatggaagtgtaaggttatcttggaatccgaggtgatcgctgaggccgtgggggtcaaaaaaacggtgaaatacgaagcagccggagaagctgtcaagacactgaaaaaaactcagcctactgtcattaacaatttgaagaagggggcagtggaagacgtgatctcaagaaacgagatacagggaaggagcgccgaggaggcctataagcagcagattaaggaggacaatatcggtaatcagctactgcgtaagatgggttggactggagggggcttgggtaagtctggcgaagggataagagagcccatctccgtcaaggaacagcacaaacgggagggattgggtctggacgtggaacgcgtgaataaaattgcaaagcgcgacatagagcagatcatccggaattacgccaggtctgagtctcacactgacctgacctttagtcgcgagcttactaatgacgagaggaagcagatacaccagatcgcccagaagtacggccttaagagcaagagtcacggagttggtcatgatagatacctcgtggtggggaggaaacggaggaaagaagacctgctggaccagctgaagcaggaagggcaggttggccattatgagctcgtaatgcctcaggctaattag

SEQ ID NO: 197225 - DNA, 2118 bp, synthetic construct
  misc_feature 1..2118: note = Description of Artificial Sequence: Synthetic coding sequence
  source 1..2118: mol_type = other DNA
atgggcttcatgctgcccctgatcttccggtacagcccccggctgatggagaagattctgcagatggcagagggcattgacatcggagagatgccatcatacgatcttgtgttaagcaagccgtctaagggtcagaaacggcacttaagcacctgtgacggccagaatccccctaagaagcaggccggctcaaagttccatgctcgtcctcggttcgaacctgtgcatttcgtagcttcttcatcaaaagatgaacggcaggaagatccttacggtcctcagaccaaggaggtcaatgagcagacgcactttgcgtctatgcccagagacatctaccaggattatacacaggattccttctctatccaagatggtaacagtcagtattgcgactcctccggcttcattctgacaaaagatcagcccgtcactgccaacatgtacttcgacagtggaaacccggcacctagcacaacgtcgcagcaggccaactcacagtcgactcccgaaccatccccatcccagacatttcctgaatctgtggtagctgagaagcaatactttatcgaaaagttgaccgctacaatttggaagaatctcagcaatcctgaaatgacgtccggatcagacaagatcaactacacatacatgctgacacggtgcatccaggcctgcaaaacaaatccagaatacatttacgcccctctgaaagagataccccccgcagatatccccaaaaacaagaaactgctgaccgacggctacgcctgcgaggtccggtgtcagaacatctatttgactacaggttatgccggtagcaagaacggatctagagacagagctacagaattggccgtgaaactgctgcaaaaaagaatagaagtgcgcgttgttcggcggaagttcaaacacacttttggcgaggacctggtagtctgtcagattgggatgtcttcctacgaattcccccccgcgcttaaacccccggaggacctggtcgtactgggcaaagacgctagcggccagcctatatttaacgcttcggccaagcactggacaaatttcgtgattactgagaatgcgaatgatgccatcggaatcttaaataattctgcatccttcaataagatgtctattgagtataaatatgaaatgatgcctaaccggacatggcggtgcagagtgttcctgcaggatcactgtctcgcagagggatacgggacaaaaaaaaccagtaaacatgctgccgctgacgaggccctgaagattttgcagaaaacccagcctacctatccctctgttaaaagcagccagtgtcacaccggctcatccccccggggaagcgggaagaagaaggatattaaggatctggtcgtgtatgagaacagctccaatcccgtgtgtactctcaacgataccgctcagttcaaccgcatgacggtggaatatgtgtacgagagaatgactggattgcgatggaagtgtaaagtgatcctcgaatcagaagttattgcggaagcagttggcgtgaagaagacagtgaaatacgaggccgccggcgaagctgtcaagaccttgaaaaaaactcaacctaccgtgattaacaatctgaagaagggagctgtggaagacgtcatcagccgcaatgagatccaagggcgctccgcagaagaagcatacaagcagcaaatcaaggaggataatatcggcaaccagctgctcagaaagatgggctggaccggcgggggcctcgggaagtctggcgagggcatcagagagcccatcagtgtgaaggagcagcataaacgggaagggctgggactggatgtcgagcgcgtgaataagattgccaagagggacattgagcagatcatccggaactacgcccgcagcgaaagtcacaccgacctaactttcagtcgggagctcactaacgacgaacgcaagcaaattcatcagatcgcccagaagtacggactcaagtcaaagtcccatggggtgggacacgaccgttatttggtcgtggggcggaagagaagaaaggaagatctcctggaccagctgaagcaggaagggcaggtgggccactacgaacttgtcatgccccaggccaactag

SEQ ID NO: 197226 - DNA, 570 bp, synthetic construct
  misc_feature 1..570: note = Description of Artificial Sequence: Synthetic coding sequence
  source 1..570: mol_type = other DNA
atgctgctgcgggccgcctggcggcgggccgccgtggccgtgaccgcggctccagggcccaaacctgccgcccccacacgaggtcttagactgcgggtgggcgatagagccccccaatcggccgtaccagctgacaccgcggccgcccccgaagttggacctgtgctcaggcctctttacatggacgtacaggcaacaacacctctggatccacgcgtgctggatgcgatgcttccctacctgattaactattatggcaatccccattctcggacccacgcctacgggtgggaatctgaggcagcaatggagcgcgccaggcagcaggtggccagcttgattggagccgatccacgggaaatcatctttacaagtggtgccacagaatcaaataacatcgccattaaaacagaaagccactcagtgattcaggccggcgttcagtggcacgatcttgattctctgcaggcccctccccccggtttcacacccttctcctgtttatcactactgagcagctgggattacagacggcccccacctcaccccgctaactttctgtatttctag

SEQ ID NO: 197227 - DNA, 1374 bp, synthetic construct
  misc_feature 1..1374: note = Description of Artificial Sequence: Synthetic coding sequence
  source 1..1374: mol_type = other DNA
atgctgctgcgggccgcctggcggcgggccgccgtggccgtgaccgcggctccaggtcctaaaccagctgctccaactcgcgggctgaggctgcgggtcggcgatagagcccctcaatccgccgtgcccgccgacactgccgcagctccagaggtgggtcccgtccttcgccctctgtatatggacgttcaggctaccactccgctggatccacgcgtgctggatgctatgctaccatatctaataaattattatggtaatcctcattctcgaacccacgcatacggctgggagagcgaagcagccatggagagggcacggcagcaggttgcttccctgatcggtgcagatcctcgtgagattatctttacatccggggcaacagagagtaacaacatcgccatcaagggcgtggctcgcttctatcgcagcagaaagaagcacctgatcaccacccaaaccgagcacaagtgtgtgctggattcatgcagaagcctagaggcagagggctttcaggtcacatacctgccggtccagaagtctggtatcattgatcttaaagaattggaagcagccatccagcctgacactagtttggtgtccgtgatgacggtcaataatgaaattggagttaagcaacctatagcagaaattggtagaatctgctcatcgcgtaaagtctactttcacactgacgctgctcaggcagtaggcaaaatccccctggacgtaaatgacatgaagatcgatctcatgtctatttctggacacaagatctacggccccaagggggtgggagctatctacatcaggcgcagacctcgcgtgagagtggaagccctccagagtggaggcggccaggagagaggcatgagaagcggtaccgtccctactcctctggtggtgggtttaggggccgcgtgcgaagtggcccagcaggaaatggagtacgaccataagcggatttccaaattgagtgaaagattgatccagaatattatgaaatcactgccagacgtggtgatgaacggcgaccctaagcatcactatccaggatgcataaacctgagctttgcttatgtagagggagaaagcctcctcatggctctgaaggacgtggccctcagttccggcagcgcctgtacatccgcctcccttgagccgtcctatgtcttgcgggctatcggcacagacgaagaccttgctcacagctctatccggtttggaattgggagattcactacagaggaagaagtagattacaccgtggagaagtgtatacagcatgttaagcggctgcgcgaaatgagtccattgtgggagatggtgcaagacggtatcgacctgaagtctattaagtggacccagcactag

SEQ ID NO: 197228 - DNA, 486 bp, synthetic construct
  misc_feature 1..486: note = Description of Artificial Sequence: Synthetic coding sequence
  source 1..486: mol_type = other DNA
atgctgctgcgggccgcctggcggcgggccgccgtggccgtgaccgccgcacctggtccgaaaccggctgcccccacaaggggcctccgtctccgggtcggagaccgagcccctcagtctgccgtcccagcggacaccgccgcggcccctgaggtaggacccgtcttgagacctctgtacatggacgtacaggctacaacccctctggatccgcgggtcctggacgctatgctgccatatctgatcaattactacgggaacccccattcccgcacccatgcttatggctgggaatcagaagctgccatggagcgggcaagacaacaggtagcttcgctgattggggccgacccgagggaaatcatttttacaagtggggccaccgagtccaacaatatagctatcaagggcgtggccaggttctaccgttctcgaaagaaacatctgattactacactcagcgggggcgccgggggctgcgtgtag

SEQ ID NO: 197229 - DNA, 768 bp, synthetic construct
  misc_feature 1..768: note = Description of Artificial Sequence: Synthetic coding sequence
  source 1..768: mol_type = other DNA
atgaccgtgaacaacgagatcggcgtgaagcagcccatcgccgagatcggcagaatctgctcctctaggaaggtgtacttccatactgatgctgcccaagctgtgggcaagattcctctcgatgtgaacgatatgaagattgatctcatgagtataagcggccataaaatctatggacccaaaggtgttggcgccatttatataagaaggcgccctagagtcagggtggaggccttgcaaagcgggggcggccaggaaagaggtatgcgatcaggtacggtaccaacccctctggtagtgggattgggtgctgcgtgtgaggtagctcagcaggagatggagtatgaccacaagcgcatctctaagctgtcagagaggttgatccagaacattatgaagagtttgcccgacgtggttatgaatggcgaccccaaacatcactaccccggctgcattaatctgtccttcgcctacgtcgaaggagagagtctccttatggccctaaaagatgtggcattgtctagtggcagtgcctgcacttcagccagcctggagccctcatatgtgctgcgcgccattggtaccgatgaggacctagcccacagctctattcggttcggaatagggagatttacaacagaggaggaagtagattatactgtagagaaatgtatacaacacgtcaaaagactgcgtgagatgtccccactgtgggagatggtgcaggatggcattgatctgaaaagcataaagtggactcagcattag

SEQ ID NO: 197230 - DNA, 1221 bp, synthetic construct
  misc_feature 1..1221: note = Description of Artificial Sequence: Synthetic coding sequence
  source 1..1221: mol_type = other DNA
atgctgctgcgggccgcctggcggcgggccgccgtggccgtgaccgccgctcccggtccgaagcccgcagcccctactcgaggactccggctcagggtcggagaccgcgcccctcagagcgcagtcccagccgacaccgctgccgcccctgaggtaggcccagtgctgaggccactgtacatggatgtgcaagccacgacacccttagacccccgagtactggacgcaatgctgccttacttaatcaattactacggtaacccacactcccggacccacgcgtacggctgggagtctgaagcagcaatggagcgggctcggcaacaggtggcttctctcatcggagcagatccgcgggagataatattcaccagcggtgcaaccgaatctaacaacatagcaatcaaagagctggaggcagcgatccaacctgacaccagtctcgtctcagtcatgacagtgaataacgagatcggggtgaaacagcccatcgccgagatcggacgaatttgcagcagccgtaaagtttatttccacacagacgcggcacaggccgttggcaagatccccttagacgtgaacgatatgaagatcgacttaatgtccatctccgggcacaagatatacggccccaagggcgtgggcgctatctacatccggcgccggcctagagtccgcgtcgaggctctccagtcaggaggtggccaggaacgggggatgagatcaggaaccgtccccacccccttggtggtcgggcttggagcggcttgtgaagtggcccaacaagagatggagtacgaccacaagaggatctccaaactgagcgaacgcttaatccaaaatattatgaaatctctccctgacgtggtgatgaacggggaccccaagcaccactatccaggatgtataaacttgtcctttgcttatgtggagggtgagtccctcctcatggccttgaaggacgtggctctgagttccgggtctgcatgcacctccgcaagcctcgaaccatcttacgttctgcgcgccatcgggactgatgaggatctggctcactcatcaattcgctttggcataggcagattcaccacggaggaggaggtcgattatacagtagaaaagtgtatccaacatgtgaaacgcctcagggagatgagccccctatgggagatggtccaggacggcattgacttgaagtccatcaagtggacacagcattag

SEQ ID NO: 197231 - DNA, 693 bp, synthetic construct
  misc_feature 1..693: note = Description of Artificial Sequence: Synthetic coding sequence
  source 1..693: mol_type = other DNA
atgctgaagaacccctacaccatcaagaagcagcccctgcaccagtttgttcagagacctctatttcctttgcctgcggcattctatcacccggtgagatatatgttcatccagacccaggacactccaaatccgaatagcctgaagttcatcccaggaaagcccgttctcgaaaccaggaccatggatttcccaaccccggccgccgcattccgctccccactggcgaggcagctgttccgaattgagggggtaaaatcagttttcttcggacccgactttatcacagttacgaaagaaaacgaagagctagattggaatctgttgaaaccggacatttacgccacaatcatggactttttcgcatcgggattgcctctcgtgaccgaagaaacaccctctggagaggccggatctgaggaggacgacgaagtggttgctatgatcaaagagctgctggatacccgtatcagacccaccgtacaagaagatggcggagacgtgatttacaaaggcttcgaagatggcattgtccagctgaagctgcaaggatcatgcacgtcttgccccagctctatcattactctcaagaatggaatccagaatatgctgcagttctatatcccagaggtggaaggagtggagcaggtaatggatgacgagtctgatgagaaagaggccaatagcccgtag

SEQ ID NO: 197232 - DNA, 342 bp, synthetic construct
  misc_feature 1..342: note = Description of Artificial Sequence: Synthetic coding sequence
  source 1..342: mol_type = other DNA
atggacttcttcgccagcggcctgcccctggtgaccgaggagacccccagtggcgaggctggctccgaagaagatgacgaagtggtcgcaatgatcaaagagttactcgacacacgtattcgccctaccgtccaggaagacggcggggacgttatttataaagggtttgaggatggcatcgtacagctgaaactccagggctcttgtacttcgtgcccatcaagtattatcaccctcaaaaatgggatacaaaacatgctccagttttacatcccagaagtagagggggtggagcaggtcatggatgacgagagcgatgaaaaagaagcgaattcgccttag

SEQ ID NO: 197233 - DNA, 765 bp, synthetic construct
  misc_feature 1..765: note = Description of Artificial Sequence: Synthetic coding sequence
  source 1..765: mol_type = other DNA
atggccgccaccgcccggcggggctggggcgccgccgccgtggccgcagggctgaggagacggttctgccacatgctgaaaaacccctatactattaaaaagcagcctctgcaccagtttgtgcagcgtcccctgtttcctctcccagccgccttttaccaccccgtgcggtacatgtttatccaaacacaagacactccgaaccctaatagtctgaagttcatcccagggaagccggtactagaaacaaggacaatggattttcccacccccgcggctgcgttcaggtctccactggcacggcaactcttcagaattgaaggtgtcaagtcagttttctttggccctgacttcatcactgttaccaaggagaacgaagaattggattggaatctgttgaaacctgacatctacgctacaattatggactttttcgccagtggcctgccactcgtcaccgaggaaaccccatcaggcgaagccggtagtgaagaagatgatgaggtggttgctatgatcaaggagctgctagacacacggatacgtcctactgttcaagaagacggaggtgatgttatctacaagggctttgaggatgggatcgtgcaactgaaacttcagggatcctgcacgtcctgccccagtagcatcattactctgaaaaacggaattcagaacatgttgcagttctatatacccgaggtggagggagtggaacaggtgatggacgacgaatccgacgaaaaggaagccaatagcccatag

SEQ ID NO: 197234 - DNA, 300 bp, synthetic construct
  misc_feature 1..300: note = Description of Artificial Sequence: Synthetic coding sequence
  source 1..300: mol_type = other DNA
atggacttcttcgccagcggcctgcccctggtgaccgaggagaccccaagtggcgaggcagggtccgaagaagatgatgaagtggtcgccatgatcaaggaactgctcgatacaaggattaggcccactgtgcaggaggatggcggggatgtaatttataaagggtttgaagatggcattgtccagctcaagcttcaagggtcctgtaccagttgcccatcgtctattatcacacttaaaaacgggatccagaacatgctccagttctacattcctgaggtggaaggagtggagcagtag

SEQ ID NO: 197235 - DNA, 342 bp, synthetic construct
  misc_feature 1..342: note = Description of Artificial Sequence: Synthetic coding sequence
  source 1..342: mol_type = other DNA
atggacttcttcgccagcggcctgcccctggtgaccgaggagaccccaagtggagaagctggatccgaggaagatgatgaagttgtggcaatgatcaaagaattgctggacacaaggatcagaccaaccgtgcaggaggatggtggggacgtcatctacaaagggttcgaggacggcatcgtacagttaaagttacaaggcagctgtaccagttgtcccagctcgattattacgctgaaaaatggcatccagaatatgcttcaattttacattcccgaggttgagggagtcgaacaagtcatggatgacgagtcggatgagaaggaagccaacagcccctag

SEQ ID NO: 197236 - DNA, 291 bp, synthetic construct
  misc_feature 1..291: note = Description of Artificial Sequence: Synthetic coding sequence
  source 1..291: mol_type = other DNA
atggacttcttcgccagcggcctgcccctggtgaccgaggagaccccctccggtgaggcgggttctgaagaagatgacgaagtagtggctatgatcaaggagctgttggacacacggattagacccacagtacaggaggatggcggtgacgttatatacaagggcttcgaggacggcattgtccagctgaaactccagggctcatgcacctcttgcccatcgtccattataacattgaagaacggaattcagaacatgctccaattctatatccctgaagtggaggggtag

SEQ ID NO: 197237 - DNA, 1464 bp, synthetic construct
  misc_feature 1..1464: note = Description of Artificial Sequence: Synthetic coding sequence
  source 1..1464: mol_type = other DNA
atggccgccgccctgccccggaccctgggcgagctgcagctgtaccgcattctgcagaaggctaacttgctttcatatttcgatgcgtttatacagcagggcggcgatgatgtgcaacagttgtgtgaagccggagaggaagaattcctcgagattatggcgttggtcggaatggcaagtaaacctttgcatgtacggaggctgcagaaggcccttagagattgggtgacaaacccaggactgtttaaccaacctttgacgagtctccccgttagctcaattccaatttataagttacctgagggctctcccacctggctgggcattagctgttcctcatatgagaggtcttctaacgcccgcgagccccatctcaaaatcccgaaatgcgcagcgacaacttgtgtgcagagtctggggcagggaaagtctgacgtggttggaagcctcgcccttcagtccgtcggagagtccaggctttggcagggacaccatgccacagagtccgagcatagcctgagtccagccgacctgggctctcccgcatccccgaaagagtcctcagaggccctcgatgccgctgcagccctgagcgtcgcagagtgtgtggagcgcatggcaccaacgctgcccaagagcgatttaaatgaagtgaaggaactccttaagacaaataaaaagctggcaaaaatgatcgggcacatcttcgaaatgaatgacgacgacccccacaaggaagaggagatacggaagtacagtgccatatatggacggttcgacagcaaaagaaaggatggtaagcatttgactttgcacgagctcaccgttaatgaggcagctgcacagttgtgtgtaaaagacaacgctctcttgacaaggagggacgagctgttcgccctggctagacagatctcccgagaagtcacgtacaaatacacgtatcgcaccactaagagcaagtgcggggaacgggatgaactcagccctaagcgaattaaagtcgaagacggttttcccgacttccaggactcagtgcagactctgttccaacaggcaagggctaagtccgaggagctggccgccctaagctcacagcaacccgagaaagtgatggcaaaacagatggagtttctgtgtaatcaggctggctatgagcgtttgcagcacgcagagcgcaggctttcggccggactgtatagacagtcatcagaggaacattcgcccaacgggctgacgtcagataactcggatggtcagggggaacggccactcaatctgcggatgcctaacctgcagaacagacaaccccatcactttgtagttgatggggaactttctcggctgtacccctccgaggccaaatcccactcatccgagtccctggggatcttgaaagactaccctcattccgccttcactttggagaaaaaagtcatcaaaacagagccagaggattctcgttag

SEQ ID NO: 197238 - DNA, 1377 bp, synthetic construct
  misc_feature 1..1377: note = Description of Artificial Sequence: Synthetic coding sequence
  source 1..1377: mol_type = other DNA
atggccgccgccctgccccggaccctgggcgagctgcagctgtacaggatcctccagaaagcaaatctcctgtcttatttcgatgcttttatccagcagggcggtgacgatgtgcagcaactgtgtgaagccggggaagaggaattcctggagatcatggcactcgtcggaatggcaagtaaacccctgcatgtgagaagactgcaaaaagcactgagagactgggtgactaaccctggactttttaaccaacccctgacatccctccccgtgagcagtatcccgatctacaaattgccagaaggtagccctacctggctgggaatcagctgctctagttacgaacggtcgagcaatgctcgggagccccacctcaaaatcccgaaatgcgccgctactacctgcgtacagtccttagggcagggcaagagtgacgtagttggcagccttgcccttcaatccgtgggcgaatcccgattgtggcagggtcaccacgcgacggagtctgagcatagtctctccccggcagacttaggttctcctgcctccccaaaagagagttccgaggcacttgacgctgcagccgccctgagtgtcgctgaatgcgtggaaagaatggcacctaccctcccaaagagcgatctgaacgaagtcaaagagcttctgaaaaccaacaaaaagttggctaagatgattggccatatatttgaaatgaacgacgatgatccacacaaggaagaagaaatcagaaagtacagcgccatctatggacgtttcgactccaagcgcaaggatggaaagcacctgaccctccacgaactgaccgtcaacgaagccgctgcccaactctgcgttaaggacaacgccttactaactcgtcgcgacgagctgttcgccctcgccaggcagataagcagagaggtgacatacaaatatacctatcgcactaccaaatccaaatgcggggaaagggacgagttgtctcctaaaagaatcaaggtggaagatcagccagaaaaggttatggcgaagcagatggaatttctgtgcaatcaagcgggatatgagcgcctgcagcatgccgaaaggcgtctcagcgcaggcctctatcgtcagagcagcgaagaacattcccctaatggtctgacgtcagacaatagcgacggacagggggagcgccctctgaatctgaggatgcctaatctgcaaaatcgtcaaccacaccacttcgtcgtggatggtgaactgtctcgactatatcccagcgaagctaagagccacagcagtgagtcactggggattctgaaggactatcctcactccgcattcacactggaaaagaaggtaattaagactgaacccgaggactctcgctag

SEQ ID NO: 197239 - DNA, 1464 bp, synthetic construct
  misc_feature 1..1464: note = Description of Artificial Sequence: Synthetic coding sequence
  source 1..1464: mol_type = other DNA
atggccgccgccctgccccggaccctgggcgagctgcagctgtacaggattttgcaaaaggccaacctgctctcttattttgacgccttcatccagcagggtggggacgacgtgcagcaactttgcgaggcaggcgaagaagagtttctcgagattatggcactggtgggaatggcttcgaagcccctgcacgttcgtaggctgcagaaggctctgagagactgggtcacaaaccccggattgtttaatcagcctcttacgagtcttccagtcagctctattccgatttacaaactgcccgaaggaagccccacatggcttggaatatcatgctcaagctacgagcggtcctcaaatgctcgggagccccatttaaagatccctaagtgcgctgcgacaacatgcgtccagagccttggacagggtaagagcgacgttgtgggttctctggcgttacaatccgttggtgagtcgcgactgtggcagggacaccacgctaccgaaagtgagcatagtctgtccccggcagaccttggcagtcccgcaagcccaaaggagtcttccgaggcgctggatgcagcagctgctctgtcggtagccgagtgtgtagagcggatggcacctactctgccaaaaagcgatctgaacgaagtcaaggagctgctgaagaccaacaaaaaactggcgaagatgatcggtcatatctttgaaatgaatgacgatgatccccataaggaggaagagattaggaaatattcagcaatctatggacggtttgactcaaagcggaaggatggtaagcacctcacattgcacgagctgaccgtgaatgaagccgctgcacagttgtgcgtgaaagataatgccctcctgacaaggagagacgagctgttcgcactcgcacgccagatttcgagggaagtgacttacaaatacacatatcggaccactaaatccaaatgtggagaacgggatgagctgtcacccaagcgcattaaagtcgaggacggatttcccgattttcaggactcagtgcagaccctgttccagcaggctcgggctaaatcggaggagctggccgcactgagctcacagcagccggaaaaggtaatggccaagcaaatggagtttctgtgcaaccaggctggttatgaaaggttgcagcacgccgagagacggcttagcgcgggactgtataggcagtcttcagaggagcacagtcccaacggcctgacgtccgacaatagcgatggccagggcgaacggccccttaatctgaggatgcctaacctacagaaccgacaaccccatcacttcgtggtggacggcgaactatccaggttgtacccatccgaagcgaagtcccactctagcgagtccctaggtatccttaaggactacccccatagcgcgtttacactcgagaagaaagtcattaaaaccgaacctgaggattcacggtag

SEQ ID NO: 197240 - DNA, 1461 bp, synthetic construct
  misc_feature 1..1461: note = Description of Artificial Sequence: Synthetic coding sequence
  source 1..1461: mol_type = other DNA
atggccgccgccctgccccggaccctgggcgagctgcagctgtaccgcatcctgcaaaaagcaaatctgctgtcatatttcgacgctttcatccagcagggcggggacgacgtgcagcagctgtgcgaagctggagaagaggaattcttggagatcatggccttagtggggatggcctccaagcccctgcacgttagaagactccagaaggcgttgagggattgggtgactaaccctgggctattcaaccaaccccttaccagccttcccgtcagtagtatccccatttataagctgcccgaggggagccccacatggctcgggatttcatgctcatcttatgaaaggagcagcaatgcccgggaacctcatctgaaaattccaaaatgtgcagcgacaacgtgcgtacagtctctcggtcagggcaaaagcgacgtcgtgggatcactggctctccaatcagttggagaaagccgcctgtggcagggacatcacgccacagagagcgaacactccctgagccccgctgatctaggttctcccgcttccccaaaggaatcttcagaagccctcgatgctgcagccgccctgtcagtagcagagtgtgtggaacgcatggcaccgaccctgcccaaaagtgatttgaatgaagttaaggaattattgaagaccaacaagaagttggccaagatgatcggccatattttcgagatgaatgacgatgacccgcataaggaagaagaaatccgtaagtactccgccatatatgggagattcgactccaaaagaaaagatggaaagcatctgacacttcacgaactgaccgtcaacgaagcggcagcccagctctgcgtgaaagataacgcacttcttacacggagggacgagctcttcgcgcttgcacgccagatctcccgcgaggtcacatataaatatacctaccgcaccacaaaaagcaaatgtggagagcgggatgaactcagcccaaagcggattaaagtagaggacggctttcctgactttcaggattccgtgcagacattatttcagcaggcgcgtgctaaaagtgaagagctggccgccctttcatcccaacccgagaaggttatggctaaacagatggaattcctgtgtaaccaggctggctatgaacgcctgcagcacgccgaaaggcgactctcagccggtttatatagacagtcctctgaagagcatagccccaacggcttgactagtgacaactccgacggccaaggcgaacgaccgttaaacctgcggatgcccaatctccagaataggcagccacaccatttcgtcgtcgatggagagctgagtagactgtatccctccgaagctaaatcacattccagtgagtctctcggaattttgaaggattatccacactctgcctttacacttgagaagaaagtcataaaaactgagcccgaagacagtcgctag

SEQ ID NO: 197241 - DNA, 474 bp, synthetic construct
  misc_feature 1..474: note = Description of Artificial Sequence: Synthetic coding sequence
  source 1..474: mol_type = other DNA
atggccgccgccctgccccggaccctgggcgagctgcagctgtaccgaatccttcagaaagcaaatctcttaagttactttgatgcttttattcaacagggcggagacgacgttcagcaactgtgtgaggctggagaagaagagttcctggaaatcatggccctggtgggaatggcttcgaagcccctgcacgtacgacgtttgcagaaggctctccgcgattgggtgactaacccaggccttttcaatcagcctctgacaagtctccctgtttcatcgattccaatctataagctgcccgagggaagccccacctggctgggaatttcttgttccagctatgagcgtagctctaacgctagagaaccccatcttaaaatccccaagtgcgcagctaccacatgtgtccagtcactgggccagggcaagagtgacgtggtggggagcctggctctgcagagtgtaggagagtag

SEQ ID NO: 197242 - DNA, 189 bp, synthetic construct
  misc_feature 1..189: note = Description of Artificial Sequence: Synthetic coding sequence
  source 1..189: mol_type = other DNA
atggccgccgccctgccccggaccctgggcgagctgcagctgtacaggatcctgcagaaagcgaacctcctcagctacttcgatgcgttcattcagcagggcggggacgatgtgcagcaattgtgcgaggccggcgaagaggagtttctcgaaattatggccctcgtcggtatggcgagcaagccatag

SEQ ID NO: 197243 - DNA, 303 bp, synthetic construct
  misc_feature 1..303: note = Description of Artificial Sequence: Synthetic coding sequence
  source 1..303: mol_type = other DNA
atggccgccgccctgccccggaccctgggcgagctgcagctgtaccgcattctccagaaggcaaatctactgagctatttcgatgccttcatccagcagggaggcgatgatgtgcaacagctttgtgaggcaggagaggaggagtttctcgagattatggccctcgtggggatggcctccaagcccctgcacgttaggcgtctgcagaaggcgttgagagattgggtgactaacccaggtttatttaaccagccactgacaagccttccggtcagcagcataccgatctacaagctgccatag

SEQ ID NO: 197244 - DNA, 723 bp, synthetic construct
  misc_feature 1..723: note = Description of Artificial Sequence: Synthetic coding sequence
  source 1..723: mol_type = other DNA
tgaaaggagctgctgaagaccaacaagaagctggccaagatgatcggccatatctttgagatgaacgatgacgatcctcataaagaagaagaaatccggaaatattcagcaatctacggccggttcgactctaagagaaaggacggtaaacacctgacccttcatgaactgaccgttaacgaagccgctgctcagttgtgcgtgaaagacaatgctctgctgactcgacgggatgaattatttgcgcttgcgcgccagatttccagagaagtgacctacaaatacacgtaccgtacaacgaaaagtaaatgtggggagagggacgaactctctcctaaaaggatcaaagtcgagcagcccgaaaaggtgatggccaagcagatggagttcctgtgcaatcaagccgggtacgagagacttcagcatgctgaacggagactatcagccggtctttatcggcagagctccgaggagcactcgccgaatgggctcaccagcgataattccgatggacagggggaacgaccactcaacctgcgtatgcctaaccttcagaaccgacaacctcatcacttcgtagtcgacggggaactttccagactttacccttctgaggccaaatcgcacagcagtgagtccctgggtattctcaaggactaccctcattcagcgttcacattagaaaaaaaggtaattaagacggaacctgaggacagtaggtag

SEQ ID NO: 197245 - DNA, 459 bp, synthetic construct
  misc_feature 1..459: note = Description of Artificial Sequence: Synthetic coding sequence
  source 1..459: mol_type = other DNA
atggccgccgccctgccccggaccctgggcgagctgcagctgtacagaattttacagaaagccaatttgctgtcatactttgacgccttcatccagcagggtggcgatgatgtacagcagctgtgcgaagccggggaggaagagtttctcgagattatggctttagtggggatggccagcaaaccactccacgtacggaggctccagaaagcccttagagactgggtgaccaacccagggctattcaatcagcccctaacatccctacctgtgtcttcaattccaatctataagctgcctgagggctctccaacttggctcggaatctcgtgcagctcctacgagcggtcctctaacgccagagagccgcatttgaaaatccccaaatgtgccgccaccacatgcgtccagagtttggggcaaggaaaatccgacgtcgtgggcagtctggcattatag

SEQ ID NO: 197246 - DNA, 684 bp, synthetic construct
  misc_feature 1..684: note = Description of Artificial Sequence: Synthetic coding sequence
  source 1..684: mol_type = other DNA
atgatcggccacatcttcgagatgaacgacgacgacccccacaaggaggaagagattcggaagtactcggcaatctatggaagattcgactctaaaagaaaggatggcaaacatcttacactacacgaactgaccgtgaacgaagcagccgcacagctgtgtgttaaagataacgcactgctgacgcgcagggacgagctgttcgcactggctcggcagatcagtcgcgaagtcacgtacaaatatacctaccgaactaccaagtccaagtgtggggaaagggacgagctgagccccaaaaggatcaaagtggagcagcctgaaaaggtgatggccaagcagatggaattcctttgcaatcaggctggttacgaacgcctacagcacgccgaacggcgcctaagcgctgggttatatcgccagtcttcagaagagcactcccccaacggcctgacctcagacaactcagacggtcagggtgaaaggccactcaatctgagaatgcccaacctgcaaaatagacagcctcaccacttcgttgtcgacggggaattaagccggttgtatcctagtgaggccaagagtcattcatctgagagcctcggcatcctgaaagactatcctcactctgcattcaccctggagaaaaaggttatcaagacagagccagaggattctcgctag

SEQ ID NO: 197247 - DNA, 1578 bp, synthetic construct
  misc_feature 1..1578: note = Description of Artificial Sequence: Synthetic coding sequence
  source 1..1578: mol_type = other DNA
atgcaccgggcccccagccccaccgccgagcagccccccggcggcggtgattcagctaggcgcacactccagccacgtctgaagccaagcgctcgcgccatggcccttcctaggactctgggtgaattgcagctttaccgggtgctccagcgagccaatctactatcttactacgaaacttttatccaacagggtggcgacgacgtgcagcagttatgcgaggcgggtgaagaagagttcttggagattatggcgctggtagggatggcaaccaagcctcttcacgtccggcgtttgcagaaagcattaagagaatgggccactaatcctggacttttcagccagcccgtccctgctgttcccgtgtctagtataccattatttaaaatatccgagactgccgggacgagaaagggctctatgtctaacggacacggtagcccaggtgagaaggccggcagcgctcggtctttctcacctaaatcccctctcgaattaggggaaaaactgtccccactgcctggcggccctggtgcgggagacccccgaatctggcccggacggtcaactcctgaatcagacgtgggagcgggaggggaagaggaagccggtagccctcccttcagccctcctgccggggggggcgtgccggaaggaacaggagccggtggattagcggccggcgggaccgggggaggcccagaccgcttagaacccgagatggtgcgcatggtggtagaatcagttgagcgtatttttcgaagcttcccacggggagacgcaggcgaggtgacttcactactcaagcttaacaaaaaactcgcacggagcgtgggtcacattttcgagatggacgataatgactctcaaaaggaagaggaaatacgtaaatacagtatcatttacggtcggttcgactccaaacgccgggaaggaaagcagctgagtctacatgagctgactattaacgaagcagcggcacaattctgtatgcgagacaatactctcctcctgcgccgagttgaactgtttagcttatctagacaggttgccagggaaagcacttatctgtcttctctgaagggttccagactgcatccagaggagctgggggggccgcccctgaaaaagctgaaacaagaggtcggggaacagtcccacccagagatacagcagccacctccaggtcccgaatcgtacgtgccgccttacagaccttccctcgaagaggactcagcctccctgtccggcgagagccttgatggccatctgcaggctgtgggttcttgcccacggttgaccccaccacccgctgacctgccattggcactacccgcccacggactgtggtcaaggcacatcttgcagcagacattgatggatgaagggctgcgtctcgcacgcctggtctcacacgaccgggtaggaagactatcaccttgtgttccagccaaacctccactcgccgaattcgaggaggggctacttgatcggtgtcctgctcccgggccccatcccgccctggtggaaggaaggcgatccagtgtgaaggtggaggccgaagcctcacgacagtag

SEQ ID NO: 197248 - DNA, 1386 bp, synthetic construct
  misc_feature 1..1386: note = Description of Artificial Sequence: Synthetic coding sequence
  source 1..1386: mol_type = other DNA
atgcaccgggcccccagccccaccgccgagcagccccccggcggcggtgattctgccaggagaaccctccaacctcgccttaagccttccgcaagggctatggcactgcctcgaacactgggagagctgcagctttacagagttctccagagagcaaacctgctgagttactacgaaacctttattcaacagggcggcgatgacgtccaacagctttgtgaagccggcgaggaagagttcctggagatcatggccttagtgggcatggcaacgaagcctctccatgttaggcgtctgcagaaggcactaagggaatgggcaaccaaccctggcctgttcagtcagcccgtccctgcggttcccgtgtcttccatccctttattcaaaatctcagaaaccgctgggacccggaagggctctatgagtaatgggcacgggagtcctggagagaaggcagggtctgcacggtcattttcccccaagtcacctctcgaattgggggagaaactctcacccctaccaggcggtccaggcgccggcgaccctagaatttggcctgggaggtccacacctgagtcagacgtcggcgccggcggggaggaggaagccggctcccccccctttagtcctccagctggaggcggcgtccctgaaggcaccggcgctggagggcttgcagcaggaggcaccggcggcgggccagaccggctggagcccgaaatggttagaatggtggtcgagtctgtcgagcgtatatttcgatccttccctcgcggcgatgccggtgaagtcacatccctgcttaagctaaacaaaaaactcgcccgctctgtaggacacattttcgagatggatgataatgatagtcagaaggaggaagagatacgcaagtactccataatatacggaaggtttgactctaagcggagagagggaaaacagttgtcgctgcatgagctgactattaacgaggccgctgcccagttctgtatgcgggacaacaccttacttctgagacgggtggaactgtttagcttgtcacgacaggtggcgcgcgagtccacttatctcagtagtttgaaagggtcccggctgcaccccgaggagttaggcggcccccctttgaaaaagctaaaacaggaggtcggcgagcaatcgcaccctgagatccagcagccccctccaggacccgagagttatgtgccaccataccgcccctctttggaagaggacagcgccagtttgtcaggtgaaagcttggacggtcatcttcaggagttcgaggagggtctcctggaccgatgtcctgctccagggccacatccagccctggtggaaggtaggagaagctctgtaaaggtagaggcggaggcctcacggcagtag

SEQ ID NO: 197249 - DNA, 969 bp, synthetic construct
  misc_feature 1..969: note = Description of Artificial Sequence: Synthetic coding sequence
  source 1..969: mol_type = other DNA
atgcaccgggcccccagccccaccgccgagcagccccccggcggcggggacagtgcaagacggactctgcagcctaggctcaaacccagtgcacgggctatggcactccccagaacgcttggagagcttcagctgtatcgagtactccagcgggccaacctgctctcgtattacgagaccttcatacagcagggaggagatgatgtgcagcagttgtgtgaagctggcgaggaagaattcctggaaatcatggccctggtgggtatggcaaccaagcctctccatgtgcgacgcttgcagaaagctttgcgcgagtgggccactaatcctggactcttcagtcaaccagttcctgcagtgcccgtatcatccataccactgttcaagataagcgagacagctggcaccagaaagggatcgatgtcaaatgggcacggttcccccggagaaaaggctgggtctgctcgctcgttcagccctaagagccctctggaactgggggagaaactcagtccgctgccaggggggcccggcgcaggcgacccacgcatttggcccgggagaagcacacccgagtccgatgttggcgctgggggcgaagaggaggccggttcgccacccttcagtcccccagcggggggcggagtaccagagggcacaggcgcaggaggtctcgctgctggaggcaccgggggtgggcctgaccgcctggagccagagatggttcgtatggttgtggaaagcgtggaacgcatctttcggtcctttccgaggggagacgccggtgaggttacttccctgctcaagctgaacaagaagcttgcaagatcagtcggacatatctttgagatggacgataacgattcccagaaagaggaagagatccgcaagtacagcattatatacggccgcttcgactctaaaaggagagaaggaaagcagctgtcactgcatgaggcaagcccttag

SEQ ID NO: 197250 - DNA, 723 bp, synthetic construct
  misc_feature 1..723: note = Description of Artificial Sequence: Synthetic coding sequence
  source 1..723: mol_type = other DNA
tgaagcggcagcgccagccccgccgtggccgagctgtgccagaacacgccagagacatttctcgaagcatctaagttgctacttacctatgccgataatatcctgagaaaccccaatgatgaaaaatacaggagcatccgcatcggaaatacggcttttagtacccggctccttcccgtgcgaggagcagtagagtgtttgtttgaaatgggattcgaggagggcgaaactcatctgattttcccgaaaaaagcgtccgtggagcagttgcaaaaaattagggacctaatcgctatagagcggtcatctagactcgacggaagcaataagagccacaaggtgaaatcgagccagcagcctgcggcatccacacagctgccaaccaccccctcgtctaacccctcgggtttgaatcagcatacgaggaaccgccaggggcagtcctcagatcctccttccgccagtactgtagccgctgatagcgccatactggaagtgttacaatcaaacatccagcacgttctcgtgtatgagaaccccgcactgcaggagaaggcccttgcttgcattccagtgcaagagctgaagcggaaatcccaagaaaaactctcccgggcgcgcaaactagacaaagatatcattactctcagaaacttctggaagcaggacgtggacggcgtggcctccggacccatagtgctgcactgcgctgccgagctatag

SEQ ID NO: 197251 - DNA, 1965 bp, synthetic construct
  misc_feature 1..1965: note = Description of Artificial Sequence: Synthetic coding sequence
  source 1..1965: mol_type = other DNA
atggccgccgccgccctgggcagcagcagcggcagcgccagccccgccgtagctgagctctgccagaacacccctgagacgttcctggaggctagcaaactgcttctgacctacgctgacaacatactccgaaatcctaatgacgaaaagtatcgcagcatcaggatcggaaatactgcattcagcactcggctgcttcccgttcgtggcgcggtggaatgcctttttgagatgggatttgaggagggagagacccacttgatctttcccaagaaggcgagtgtcgaacagctgcagaagatcagagacctgatcgccatagaacggtcatcaaggctagatggatctaacaagtcccacaaggtcaagagcagccaacagcctgcagcttctacccaactgccaacaactccctcctctaatccgtctggattgaatcagcatacccggaacagacaaggacagtcttccgaccccccaagtgcctcaaccgtggctgccgatagcgctatcctggaggtgctccaatctaatatccaacatgttctggtctacgagaatcccgctttgcaggaaaaggctttggcctgtatccctgtgcaggagttgaagagaaagagccaggagaaactcagccgtgcccggaaactggacaaagggattaacatttcagatgaagattttcttcttctggagctgctccattggttcaaagaagaattcttccattgggtcaataatgtcctgtgttccaaatgcggagggcaaacaaggtctagagatcgatcgctcctgccctcggatgatgaacttaagtggggggctaaggaagtggaggaccattactgcgacgcttgccagttttcgaatcgttttccaagatacaacaaccctgagaagctgctcgaaactaggtgcggaagatgtggggagtgggccaactgcttcaccttgtgctgtcgcgccgtcggttttgaagcaagatatgtctgggactatacagatcatgtgtggaccgaagtgtactcaccctctcaacaacgatggctgcattgcgacgcatgcgaagacgtttgcgacaaaccattgttgtatgagatcggttggggcaaaaagctatcatacgttatcgctttctcgaaagatgaggtcgtggatgttacctggcgctattcctgcaaacacgaagaagtgatcgcccgaagaacgaaggtgaaggaggccttactgagggacaccattaatgggctcaataagcaaaggcagctgttcctttctgaaaaccgtcgcaaagaattgttacaaagaatcatagtggagcttgtggaatttatatcacctaaaaccccaaaacccggggagctgggagggcgcatatccggtagcgttgcatggcgtgttgctcggggcgaaatgggcctgcagcgcaaagaaacactcttcatcccttgtgagaacgagaagatatccaagcaattacatctctgctataacatcgtcaaagataggtacgtgcgagtaagcaataacaatcagactatcagcgggtgggagaacggtgtgtggaaaatggagtcaatctttaggaaagttgagactgactggcatatggtctacctcgccaggaaggagggctcgtctttcgcttatatctcttggaagttcgagtgcggctccgtgggcttgaaggtggactccatttcaatcaggacttctagccaaacttttcagactggaacagtggagtggaaactgcggtccgatacggcccaagtcgagctgactggagacaatagcctgcacagctatgcagacttcagcggtgctacagaggtgatactggaagccgaattaagccgcggagacggtgatgtggcttggcagcacacacaacttttcaggcagtcactgaacgatcacgaagaaaactgtctcgaaattatcattaaatttagcgacctctag

SEQ ID NO: 197252 - DNA, 1902 bp, synthetic construct
  misc_feature 1..1902: note = Description of Artificial Sequence: Synthetic coding sequence
  source 1..1902: mol_type = other DNA
gccgccctgggcagcagcagcggcagcgccagccccgccgtggccgagctctgccagaacacccctgagaccttcctggaagccagcaagctcttgcttacatacgcagacaatatactgagaaaccctaacgatgagaagtatcgatctatccgcatcggcaacacagccttctccacgaggctgctgcccgtcaggggcgccgttgaatgcctgttcgagatgggcttcgaagagggcgagacccatctgatcttccctaaaaaagcctcagtcgagcagctgcaaaagatccgcgatctaatcgccatcgaaaggagcagccggctggatggaagtaacaaatctcacaaggtcaagtctagccagcaacccgccgctagtacacagctgcctaccacaccttcttctaatccgagtgggttgaaccagcacacccgcaacaggcaggggcaatctagcgatccaccctccgcctccaccgtggcggcagattcagccattctcgaggttctccaatctaacatccagcatgttctggtgtacgaaaatccggccctgcaggagaaggcactggcctgtattccggtgcaggagctgaagcggaagtcgcaagagaagcttagccgcgcaaggaagttagataaaggaatcaatatttccgatgaggattttctccttttggagctcctccactggttcaaggaagagttttttcactgggtgaacaatgtactgtgtagtaagtgcggcggacagacacgtagtcgggatcggagtctgctccctagcgatgacgagctgaagtggggagccaaagaggttgaagatcattactgcgatgcgtgccagttcagcaataggtttccacgatataataatcccgaaaagctcctggagacaagatgtggtcggtgcggagagtgggccaattgcttcaccttgtgctgtcgcgctgtgggattcgaggcgagatatgtgtgggactatacggaactgcagcggactttgtcgcttaagctaaccacactgaaggagattggcaaaacatttcttaggatcagcaagcgtcagaaactgattcaggtcgtagacgtaacctggaggtactcttgtaagcatgaagaggttatagctcgtaggacaaaggtgaaggaggctcttctgcgcgataccattaacggcttgaataagcagaggcagctttttctgagcgagaatcgaaggaaagaattgctgcaacgtatcatagtggaactagtcgaattcatctcgccaaaaactcctaaacctggcgagctcggaggccggatttctgggtctgtcgcctggagagtggctagaggcgagatgggactgcagcgaaaagagactctgtttataccttgcgagaatgagaaaatttcgaagcagcttcacctatgttataacatcgtgaaggatcgctatgtgagagtgagcaacaataatcagaccattagtggctgggaaaacggggtttggaagatggagtcaatcttccgaaaagtggagaccgactggcacatggtgtatttagcaagaaaagaaggctcttccttcgcatacataagctggaagtttgaatgtggttctgttggactgaaggtggactccatctctattagaacatcatcacagactttccaaaccggcaccgtcgaatggaaactgaggagcgatactgcacaggtcgagctgacaggcgataactctctgcactcctacgccgacttctccggagctaccgaggtaatactggaagccgagttgtccagaggcgatggcgacgtagcatggcagcacacccagctgttccggcagtcgttgaacgaccacgaagagaactgccttgaaatcatcataaaatttagtgatttgtag

SEQ ID NO: 197253 - DNA, 1677 bp, synthetic construct
  misc_feature 1..1677: note = Description of Artificial Sequence: Synthetic coding sequence
  source 1..1677: mol_type = other DNA
atggccgccgccgccctgggcagcagcagcggcagcgccagccccgcggtcgccgagctttgccagaatacaccagaaacattcctcgaggccagcaaactgctgctgacatacgctgacaacatcctgcggaatccaaatgacgagaaataccgcagcatccggatcggaaacacagcatttagtacccgcctactacctgtccgaggagcagtggaatgtctgtttgaaatggggtttgaggagggggagacacacctgatattcccaaagaaggcctcagtcgaacagctgcaaaaaattagggatctcattgccattgaacggagcagccggctggatgggagtaataagtcacacaaggtaaagtcctcacagcagcctgccgcttctacgcagttgcccacaacaccctcatcaaaccccagtggactgaaccagcacacaaggaaccggcagggtcaatcatctgatcctccctccgctagcacagtcgcggctgacagcgcgattctggaagtgctgcagtcgaacattcagcacgtgttggtgtatgagaacccggccttgcaggaaaaggccctggcttgtatccctgtgcaggagctgaagcgaaaatcgcaagaaaaacttagcagagctaggaagttggacaaggggatcaatattagcgacgaagactttctgctgctggagttgcttcattggtttaaggaagagttttttcactgggtgaacaacgtactttgctcaaaatgtggcggacagactagatccagagacaggtccttgctgccctctgatgacgagttgaaatggggcgcgaaggaggtggaggaccattattgtgatgcgtgccaattctctaaccggtttccacgttacaacaatcccgaaaagcttctggaaacccggtgcggccgctgtggtgaatgggccaactgcttcaccctgtgctgcagggccgtgggattcgaggcacggtatgtctgggattacacagatcatgtttggacagaggtgtattccccaagccagcagagatggctccactgcgacgcttgtgaggacgtatgcgacaagccactcctgtatgaaatcgggtggggcaagaagctcagctacgtgattgcattttctaaggacgaggtcgtcgatgtgacttggagatatagctgtaagcatgaagaggtcatagctcggcgaactaaagttaaagaggccctgcttagagacactattaacggtctgaataagcaaagacagcttttcttgtctgaaaataggcgaaaagagctgctgcaacgtatcatcgtggaactggtagaattcatcagccccaagactcccaaacctggggaattaggtggccggattagcgggtctgtagcatggagagtggcccggggagaaatgggcctgcaaaggaaagagaccttgtttattccatgtgaaaatgagaaaatcagtaagcagctccatctctgttataacatcgttaaagaccggtatgtgagagtgtccaacaataatcaaacaattagtgggtgggaaaacggcgtctggaagatggaatcaatcttccgtaaggtggaaactgattggcacatgattactgtgtttacgcccatgctgatcttcctggtcccactgaaactgttctggaaacagaactag

SEQ ID NO: 197254 - DNA, 1839 bp, synthetic construct
  misc_feature 1..1839: note = Description of Artificial Sequence: Synthetic coding sequence
  source 1..1839: mol_type = other DNA
atgcggaaccccaacgacgagaagtaccggagcatccggatcggcaacacagccttctccaccaggctgcttcccgttagaggtgccgttgagtgtctctttgagatgggttttgaggaaggagagacacacctgatcttccccaaaaaagcgtccgtggagcaacttcagaagatcagggatctgatcgcaatcgagagatctagtaggctggatggaagcaacaaatctcacaaagttaagtcgagtcagcaaccagcagcatcaacacagctccccacgacaccatccagtaacccatctggactgaaccagcacactagaaacagacaaggacaatcttcggatcccccgtccgcatctactgtggcggctgactccgccatcctcgaggtgttgcagagcaatattcagcatgtcctggtgtatgagaatcccgccctacaggaaaaagcgcttgcgtgcattcccgtgcaggagttgaagcgaaaaagccaggagaaactgtcccgggcccgaaagttggacaaaggcattaacatctcagatgaagactttctgcttcttgagttgcttcactggtttaaggaggagtttttccactgggtcaataacgttctgtgctccaagtgcggcgggcagactcgaagtcgagatcggtcactattaccgtccgacgacgagcttaaatggggggcaaaagaggttgaggatcactactgtgatgcgtgtcaatttagcaaccgttttccccggtataataacccagagaaactgcttgagactaggtgcgggaggtgcggtgagtgggctaactgttttaccttatgttgtagggccgtcggtttcgaggcccgctatgtgtgggattatactgaccatgtgtggacagaggtgtacagtccaagccagcagcgttggctgcattgcgacgcttgtgaggacgtgtgtgacaagccattgctatatgaaatcggatgggggaagaaattgtcatatgtcatcgccttcagcaaagatgaagtggtggatgtgacctggaggtattcctgcaaacatgaggaggtcattgctcgacgaacaaaggtgaaggaggccctcctcagggatactattaacggactgaataagcaaaggcaactatttctgtccgaaaatcggagaaaagaactgctgcagcgcatcatcgtggaacttgttgagttcattagccccaagacacccaagcccggcgaattgggtggtcgtatctcaggctctgtggcttggcgcgtggctagaggtgaaatgggactccagagaaaggagaccctgtttatcccatgcgagaacgaaaaaatcagcaagcagctccacctttgctacaatattgtgaaggatcgttacgtgagagtgtcaaacaataatcaaacaataagcggttgggagaatggggtctggaagatggagagcatattcaggaaggtggagacggactggcatatggtgtatttggctagaaaagaaggctctagttttgcgtatatctcatggaagtttgagtgcggcagtgtaggactgaaggtggacagtatctctatccgaacctcgtctcaaacatttcagactggaaccgtcgaatggaagctcagatccgatactgcgcaggttgagctgactggggataatagtctccactcttacgcggacttttcaggagcaacagaagtgatcctcgaagctgagttgtcaaggggcgatggcgatgtggcgtggcagcatacgcagcttttccgtcagtccctgaatgatcatgaggagaattgcttggagatcattattaagttcagcgatctgtag

SEQ ID NO: 197255 - DNA, 516 bp, synthetic construct
  misc_feature 1..516: note = Description of Artificial Sequence: Synthetic coding sequence
  source 1..516: mol_type = other DNA
atgggcttcgaggagggcgagacccacctgatcttccccaagaaggcctctgtcgagcagctgcagaaaatcagggacctaatcgctattgaaagaagcagtaggcttgacggatccaataagtcccataaggtcaaatcatcccagcagccagcagcctcaactcagctcccaactacaccttcttctaacccttcgggactgaatcagcacactcgcaacagacagggacaatcatccgaccccccatccgcgtctaccgtggcggctgactcagccatcctcgaggtgttgcaatccaatatacagcacgtgttggtgtacgagaaccccgctctgcaagaaaaagccttggcttgcatcccagtgcaggagctgaaaagaaaatctcaggagaaactgtcacgggcacgaaagctggacaaggacataatcacgctgcggaacttttggaagcaagatgtagatggggttgccagtggccccatcgttcttcactgtgccgctgaactgtag

SEQ ID NO: 197256 - DNA, 1911 bp, synthetic construct
  misc_feature 1..1911: note = Description of Artificial Sequence: Synthetic coding sequence
  source 1..1911: mol_type = other DNA
atggccgccgccgccctgggcagcagcagcggcagcgccagccccgccgtagccgaactctgccagaacacccccgaaacgtttctggaagcatctaagctccttctaacgtatgcggacaacatattgcggaatccgaatgatgagaaatacagatcgatcaggatcggcaacaccgctttctccactaggcttctccctgtccggggcgcagtagagtgcctctttgagatggggtttgaagagggcgagactcacctgatctttcccaagaaggccagtgtggaacagctccagaaaatccgcgacctgatcgcgattgagcgctcctcaagactcgacgggagcaacaaatctcacaaagtgaagagttctcaacagcctgctgcctcgacacaattgcctactacacctagctccaacccctcaggcttgaaccagcatacgcgtaatcgccaggggcagtcatctgaccccccatctgcaagcacggtcgctgcagacagcgcgattttggaagtccttcaaagtaatatccagcatgtgctcgtttatgagaatcctgccttgcaggaaaaggctctggcctgcattcccgtgcaggagttaaaacgcaaaagccaggagaagctgtccagggcgaggaagttggataagggaattaacatttctgatgaggactttctgcttttggagttactgcactggtttaaagaagagttctttcactgggtaaataatgtgctgtgctcaaaatgtggcggccagacacgaagccgcgacaggtccctcctcccgagcgatgatgaattgaaatggggtgcaaaagaagtggaagatcattactgcgacgcgtgccagttctctaaccgctttccaagatataacaatcccgaaaagctcttggagacccgatgcggccgatgtggtgagtgggctaactgttttacgctgtgttgtcgggctgtgggtttcgaagcccgctacgtgtgggactacaccgagctccaaaggacgctgtctctgaagttgaccactctcaaggagatagggaagacttttttgcggataagtaaacgacagaaactcattcaggtcgtcgacgtgacatggagatactcttgtaagcacgaggaagtgatcgcccgtcggaccaaggtaaaggaagcactgctgcgggatacaattaatggtcttaacaagcagcggcagctgttcttgagcgagaaccgcaggaaagagttgttacagagaatcattgtggaacttgtagagtttatcagcccgaaaaccccaaagccaggggaactgggcggtcgaatttccggcagcgtggcctggagagtggcaagaggagagatgggactccagcgaaaggagactttgtttatcccctgtgaaaacgaaaaaatcagtaaacagctgcatttgtgctataatattgtcaaagacagatatgtgagagtcagcaataacaatcaaaccatctctggttgggagaacggggtttggaagatggaaagtatcttccgcaaggtcgagacggattggcatatggtctacctggctcgcaaagaggggtcaagcttcgcctatatctcatggaagttcgagtgcggatccgtcggcctgaaggtcgactccatatcaataaggacctcctcgcagacctttcagacgggcactgtggaatggaagctcagatcagatactgcgcaagttgaactaacaggcgacaatagtctgcatagttacgcagatttcagtggagcaactgaagtaatccttgaagccgagctgagcagaggggatggcgatgtcgcttggcaacacacccagttgttccgtcaatccctgaacgatcacgaagaaaactgtttggaaatcataatcaagttctctgatctctag

SEQ ID NO: 197257 - DNA, 1188 bp, synthetic construct
  misc_feature 1..1188: note = Description of Artificial Sequence: Synthetic coding sequence
  source 1..1188: mol_type = other DNA
atggccgccgaggccagcgagagcggccccgccctgcacgagctgatgcgggaagccgagatcagcttgctggaatgtaaggtctgctttgaaaaatttggacatcgccagcagcgacggccacgcaaccttagctgtggccatgtcgtgtgtctagcatgtgtggctgcccttgcccatccccgcacactggctctcgagtgtccattctgtcggcgggcctgccggggctgcgacacaagcgactgccttccagtgttacatctcatcgagttactgggcagcgcccttcgacagtccccggccgcccaccgtgccgccccgtccgcaccaggtgcactgacatgccatcacaccttcggtggatggggtacgttagtgaacccaaccggactcgctctgtgtccaaaaacgggcagggtcgtcgtggtgcacgacggtcggcggcgagtcaagattttcgactcaggtggcgggtgtgcacatcaattcggtgagaagggtgacgcagcccaggatatcaggtaccccgtggacgtcaccatcactaacgattgccatgtggtggtgaccgatgccggggaccgaagcattaaagtatttgatttcttcggacaaataaagctggtcattggcggccagttctccctcccttggggcgtcgagactacacctcagaatgggatcgttgttactgatgccgaggctgggagcctccacctcctagacgtcgactttgcggaaggggtgctgaggcggaccgagcgtctacaggcacacctctgtaatccccgtggggtggccgtgtcctggctgactggtgccatcgccgtcctcgagcatccactggccttaggaacaggggtgtgcagtacacgtgtgaaggtgttctcctcctcaatgcagttagtcggccaggtagataccttcggactgagcctgtactttcccagtaagattaccgcctccgcagtgacctttgaccatcaggggaacgttattgtagctgacaccagcggccctgccatcctgtgtctagggaaaccagaagagttccctgtccctaagcctatggtgacacatggcctgagccaccccgtggcacttaccttcacaaaagaaaacagcctcctcgtgctcgataccgcatcacacagtatcaaagtgtataaagttgactggggctag

SEQ ID NO: 197258 - DNA, 903 bp, synthetic construct
  misc_feature 1..903: note = Description of Artificial Sequence: Synthetic coding sequence
  source 1..903: mol_type = other DNA
atggccgccgccgccggcgacgccgacgacgagccccggagcggccactcaagcagcgagggcgagtgtgctgttgcccctgagcctctgacagatgctgagggactgttttctttcgcagactttggttccgcactcggcggaggaggagctggcctgtctgggagagcctccgggggggcacagtccccgctacgctatctccacgtgttgtggcaacaggacgccgagccccgggatgaactgagatgcaagattccagccggaagactccgcagagccgccagaccgcatcgcagacttggcccaactggcaaggaagttcatgccctcaagagactgagagactccgctaatgccaacgacgttgaaaccgttcagcagctgctcgaggatggtgcggacccctgcgctgctgatgacaaagggcgtacagctctgcactttgcaagctgtaatgggaatgaccaaatcgtccaactgctcctggatcatggcgccgaccccaatcagagggacggcctgggcaacacacccttacatttagcagcgtgtacgaaccacgtgcctgtgatcaccaccttgcttcggggaggtgcccgggttgacgctctcgatcgagcgggacgtacacctctgcatctcgctaagtctaagctcaacatactgcaggagggtcacgcccagtgtcttgaggccgtgcgtctcgaggtgaaacagatcattcacatgttgcgtgagtatttggagaggctagggcagcatgaacagcgcgagcgcctggacgatttgtgtacacgcttgcagatgacttcaacgaaggaacaggttgacgaggtgaccgacctcctagccagctttacatctctttctttacaaatgcagtcaatggagaagaggtag

SEQ ID NO: 197259 - DNA, 387 bp, synthetic construct
  misc_feature 1..387: note = Description of Artificial Sequence: Synthetic coding sequence
  source 1..387: mol_type = other DNA
atgaccgaggccgacgtgaaccccaaggcctaccccctggccgacgcccatcttaccaagaagctccttgatctggtgcagcaaagctgtaactacaagcaactgcgaaagggtgccaacgaggctacgaaaaccctcaaccgcgggatctctgaattcatagtaatggccgccgacgcggaacccctggaaatcatccttcacctgccactgctttgtgaagataaaaacgttccttacgttttcgttagatccaagcaggctctggggagagcttgcggcgtaagccgcccagtgatcgcctgttccgttactattaaagagggttcgcaactgaagcagcagatacagtctattcagcagtccattgaaaggttgctcgtatag

SEQ ID NO: 197260 - DNA, 387 bp, synthetic construct
  misc_feature 1..387: note = Description of Artificial Sequence: Synthetic coding sequence
  source 1..387: mol_type = other DNA
atgaccgaggccgacgtgaaccccaaggcctaccccctggccgacgctcacctcaccaaaaagttgttagatctggtgcaacagtcgtgcaactacaaacagctacggaagggagccaatgaggcaacgaaaacgcttaaccgcggaatatccgaattcattgtcatggctgccgatgcggagcctctggaaatcatcttacaccttccactactgtgcgaagacaagaatgtgccctatgtttttgtaagatctaaacaggcgcttggcagagcctgcggagttagcaggccagtgattgcttgctccgtcaccatcaaagagggcagccaactcaagcagcaaatacagtctatccagcagtctatcgaacgcctcttagtgtag

SEQ ID NO: 197261 - DNA, 399 bp, synthetic construct
  misc_feature 1..399: note = Description of Artificial Sequence: Synthetic coding sequence
  source 1..399: mol_type = other DNA
atgctgctggtgcagaccgaggccgacgtgaaccccaaggcctaccctttggcagacgcacacctgaccaaaaaactcttagacctcgtgcaacagtcctgtaattacaagcagttgaggaagggagcgaatgaggcaaccaagacactgaacagaggaatctctgagttcatcgtgatggccgccgatgcagagcccctcgagatcattttgcacctcccgctgctttgtgaggataagaatgtcccatacgtttttgttaggtccaagcaggctttaggcagggcatgtggcgtgagccgcccagttatcgcatgttctgtgactatcaaggagggcagccagctcaaacagcaaatacagtcaatccagcaatcaattgagcggctgctagtctag

SEQ ID NO: 197262 - DNA, 2130 bp, synthetic construct
  misc_feature 1..2130: note = Description of Artificial Sequence: Synthetic coding sequence
  source 1..2130: mol_type = other DNA
atggccaccgccggcggcggcagcggcgccgaccccggcagccggggcctgctccggctgctgagcttttgtgttctactggcgggactgtgtagaggaaattctgtcgaaaggaagatctatattccactgaataaaacagcaccctgcgtacgcctgcttaacgccacccatcagattggatgtcagagtagcatttccggggacactggcgtaattcatgtggtcgagaaggaagaagacctgcagtgggtcctgacagacggacccaaccctccttacatggtgctgctcgaatctaagcacttcacccgcgatttaatggagaaactgaagggtcgaacaagccgtatcgccgggctagccgtgtcccttactaagcccagccccgctagcggatttagtccctcggtacagtgtcccaacgatggttttggagtgtactctaacagctacggccccgagttcgcccattgccgcgagatccagtggaattctctcggcaacggtctggcatacgaagattttagttttcctatttttctcttggaggatgagaacgaaaccaaagtcatcaagcagtgctaccaggaccacaatttgagccagaacggctcggcccccaccttccccctatgcgctatgcagctcttttcccacatgcacgcagttattagcacggctacttgtatgaggaggagctcaattcaaagtacattctcgatcaacccggaaattgtctgcgaccctctgtctgattataacgtctggtccatgttaaagcctataaacacaactggaacacttaaacccgacgatagagtggtggtagccgcaactcggcttgattcccgttctttcttctggaacgtggctccaggggctgaaagtgctgtggccagcttcgttacgcagttggcagccgctgaggccttgcaaaaggcacctgatgtgaccacactgccacgtaatgtaatgtttgttttcttccaaggcgaaacgtttgattacatcggctcttcaagaatggtttacgatatggagaagggcaaatttccggtgcagctggagaacgtggatagcttcgtggagttaggacaagtcgccttgagaaccagtcttgaactgtggatgcacacagaccctgtatctcagaaaaacgaaagcgtgaggaaccaggttgaggatcttctcgccaccctggaaaagagcggggccggggtgccggccgtcatacttcggcgccccaatcaaagccagcctttaccgccatctagcctgcaacgtttcttgagagccagaaacatatctggagtggttctggcggaccactctggggccttccacaataaatattatcaaagtatctacgatacggccgaaaacattaacgtatcgtacccggagtggcttagtcccgaggaggacttaaatttcgtgaccgacacagcaaaggcgctagctgatgttgctaccgtgctcggcagggccttgtacgagctggcagggggcacgaatttctccgatactgtccaggcagatccccagaccgtcactagattgctctacggctttctgataaaagctaataattcctggttccagtcaattctcaggcaggatctgcgtagctatctgggggacgggccactgcagcattacatcgctgtgtcctctccgactaataccacgtatgtggtgcaatatgcgctcgctaaccttactggaaccgtggtgaacctcactcgggagcaatgtcaggacccgtctaaagtcccctccgaaaacaaggacctgtacgagtacagttgggttcagggaccattgcatagtaatgagacagaccgccttcccagatgtgtgcggagcactgctcggttagcccgcgccttgtcaccagccttcgagctgagtcagtggtcatcaactgagtactccacgtggacagaatcaaggtggaaagacatcagggcacgaatttttctcattgcctccaaggagttggagctgattacgctcacagtcggtttcgggatcctcatttttagcctgatcgtcacttactgcattaatgcaaaagcagatgtgctgttcatcgctcccagagagcccggggccgttagctactag

SEQ ID NO: 197263 - DNA, 2070 bp, synthetic construct
  misc_feature 1..2070: note = Description of Artificial Sequence: Synthetic coding sequence
  source 1..2070: mol_type = other DNA
atggacttcaacctgatcctggagagcctgtgccggggcaacagcgtcgagaggaaaatttatataccacttaataaaaccgccccctgcgtccggctactgaacgcaactcatcagataggttgccaaagctccatcagcggtgataccggcgtgattcatgttgtcgaaaaggaagaggacctgcaatgggtcctgactgatggacccaatccaccctatatggtcctcctcgagtcaaagcacttcacaagggacctcatggagaaactaaagggtaggacaagccgcatcgccgggctggcagtgagcctcaccaaaccaagtccggcctcaggattctccccatcagtacagtgtcctaatgatgggtttggagtatacagcaatagctacggaccagaatttgctcattgccgggaaatccaatggaactccctcggaaacgggttggcttacgaggatttcagcttcccaatatttctcttagaggacgagaatgaaaccaaagttataaagcagtgctaccaagatcacaacctgagccaaaacggttctgcaccaactttccctctgtgtgcaatgcagctcttctcccacatgcatgccgtgatctccacagctacttgcatgcgtagatctagtattcaaagcactttctctatcaatcctgagattgtttgtgatccactctccgattacaacgtatggtcaatgttgaagccaatcaataccacgggcaccttgaaaccggatgatagggtcgtcgtagctgccaccagactggacagcagatctttcttctggaacgtcgctccaggtgctgagtcagctgtagcgtcctttgttacccagctcgccgccgccgaggcactccagaaggctccggatgtgaccacgctcccccgcaatgtaatgtttgtctttttccagggagagacctttgactatattgggtccagccggatggtgtatgatatggagaagggcaaatttcccgtgcagttagagaacgtggactcattcgttgaactggggcaagtcgctctgcgaacctccttggaactgtggatgcataccgacccggtgtcccagaagaatgagtcagtccgcaaccaggtggaggacctcctggcaactctcgaaaagagtggagccggagtcccggccgtaattttgcggcggccgaatcagtctcagcccctgcctccgagttccctccaacggttcctcagagcgagaaacattagcggggttgtcctggctgatcatagtggcgcattccataataagtattatcagtcaatttacgatacagctgagaatatcaatgtctcatatcccgaatggctctcccctgaggaagatctcaatttcgtgacagacacagccaaagcactcgccgatgtggccactgtcttagggagagctctgtacgagcttgccggcggaacaaactttagtgataccgtgcaggctgaccctcaaacagtcacgcggctcctgtacgggttcttgataaaggctaacaactcatggtttcaaagcatactgcgacaggacttgaggagttatctgggcgatggccctctccaacactacatagctgtttcatcaccgaccaacaccacgtatgtggtgcaatatgctttggcaaatctgaccggaacagtggtaaatctgaccagagagcagtgtcaggatccttccaaagtcccttcagagaacaaggatctgtatgaatattcttgggttcagggccctttgcatagcaatgagactgacagactgccaaggtgcgtgagatctacagcccggcttgctagagctttgagccccgcattcgagttatcacagtggagtagcacagagtactcaacgtggaccgagtcccgctggaaggacataagggcacgaatcttcctcattgcttcaaaggagctggaactgatcacacttaccgtcggttttgggatccttatcttcagtctcatcgttacctattgcattaacgccaaagccgacgtactttttatagcaccgcgcgagcccggagcggtgtcatactag

SEQ ID NO: 197264 - DNA, 1356 bp, synthetic construct
  misc_feature 1..1356: note = Description of Artificial Sequence: Synthetic coding sequence
  source 1..1356: mol_type = other DNA
atgctgaagcccatcaacaccaccggcaccctgaagcccgacgacagggtagtggtggccgcaaccagactggacagcaggtcgtttttttggaatgtagcccccggcgcggagtctgctgtggctagtttcgtcacacagctggcagccgcggaggccctccagaaagcaccggatgtgactacactacctcgaaacgtaatgtttgtcttcttccagggagaaacattcgactacatcgggagcagtaggatggtctacgatatggagaagggaaaattcccagtgcagctcgagaacgttgattcttttgtggagcttggacaagttgcattgcggacaagcctcgagctgtggatgcacacagatccggtgtcccaaaaaaacgagagcgtccgtaaccaggtcgaagacctccttgctaccttggaaaagagtggagcaggggtgccggccgtgatactgcgccggccaaaccagtcccagccactgccaccttcgagcctgcaaagattcctccgcgccaggaacatctccggcgtggtactcgccgatcactctggtgccttccacaacaagtactaccaaagtatctatgatactgctgagaacattaatgtatcctatcccgaatggctttcgcccgaagaagatttaaacttcgtaacagatacagctaaggcattggcagacgtcgctacagttctaggacgcgcattgtatgaattggctggcggtaccaatttctctgacaccgttcaagccgaccctcagaccgttacccggctgctgtatgggttcctgatcaaagccaacaatagctggtttcagtccattttgagacaggatctcagatcttacttgggcgatggacccctgcagcattatattgccgtcagctctcctacaaacactacttatgtggtgcagtacgcacttgcaaatttaactggcaccgtcgttaacctgactagagaacagtgccaggacccatcgaaggtgcctagtgaaaataaggacttatacgaatactcatgggtacagggacccctgcacagcaatgagaccgacaggctgccaagatgcgtccggagtacagcccgcctcgcaagggctttgagccccgcatttgagctgtctcagtggtcttccactgaatactctacatggacggagtccagatggaaggacattagggctcgtatcttcctcattgccagtaaggagttagagctgataacattgaccgtcgggttcggaattttgatcttctcgctgattgtaacatactgcatcaacgccaaagcagacgtcctgtttatcgcgccccgtgagccgggcgctgttagctattag

SEQ ID NO: 197265 - DNA, 918 bp, synthetic construct
  misc_feature 1..918: note = Description of Artificial Sequence: Synthetic coding sequence
  source 1..918: mol_type = other DNA
atgctgaagcccatcaacaccaccggcaccctgaagcccgacgacagagtcgtggtggcggcgaccaggctggatagccgcagtttcttttggaatgtggcacccggagccgaaagcgccgttgcctcttttgtgacgcagttggctgccgctgaggctcttcagaaggcgccagacgtgacaacgctaccccggaacgtgatgttcgtattcttccaaggcgtggctctgcgtactagcttggaactgtggatgcacacagatcctgtctcccagaaaaacgagtctgtgagaaatcaggtggaagacttactggccacgcttgaaaaatccggagcaggggtgccagcagtaattctccggcggcctaatcagtcccagcctctgcctccttcctcgctgcagaggtttctgagggccagaaacatatccggggttgtactagcagaccactccggggccttccataacaagtattaccagtctatctacgataccgccgagaatataaacgtgagctaccctgagtggctcagtccagaagaagaccttaattttgtaaccgatacagcaaaggcactcgccgatgtcgctacagtcttgggccgtgctctgtacgagctggcaggtggcaccaatttctcggacaccgtacaagctgacccccagactgtgactaggctgctctatggttttctcataaaggcgaacaactcctggttccagtccatactcaggcaagacttgagatcctatctgggagacgggcccctgcagcattacatcgctgtgagctctcccacgaataccacttacgttgtgcagtacgccctcgccaatctcacaggaaccgtcgtcaacctaactagagagcagtgtcaggatccatcaaaggtgccctccgagaataaagactag

SEQ ID NO: 197266 - DNA, 2070 bp, synthetic construct
  misc_feature 1..2070: note = Description of Artificial Sequence: Synthetic coding sequence
  source 1..2070: mol_type = other DNA
atggacttcaacctgatcctggagagcctgtgccggggcaacagcgtggagcgaaaaatctacatacccctcaataagacagctccttgcgtccgcctgctgaacgccacccaccagatcgggtgtcagagcagcatctctggggacacaggagtgatccacgtggtcgagaaggaggaagacctacagtgggtgctgactgatggcccgaatcctccttacatggttttattggaatccaaacacttcactagggacctcatggagaagctcaagggccgtactagtaggatcgctggtctggcagtaagtctgactaagccaagtcccgcctctggtttttctccatccgttcagtgcccaaatgacggcttcggagtgtattcaaatagctatggacctgaattcgcccactgtagagagatacaatggaacagcctaggcaacggactcgcctacgaagacttctcgtttcctatctttctgctggaggatgagaacgagaccaaggtaatcaaacagtgttatcaggaccataatctgagccagaacggttccgccccgaccttccctctttgcgcaatgcaactgttcagtcatatgcacgccgtgatctcaaccgcaacgtgtatgcgtcggagctccattcagtccaccttttctataaatccggagattgtttgtgacccgctgtccgactacaacgtgtggagcatgctcaagccaatcaatactaccggtacactcaaaccggatgatcgggttgtggtggccgcgacccgtttagattcgagaagcttcttctggaacgtcgctccaggagccgaatcagccgttgcatcattcgtgactcaattggccgctgccgaggcactacagaaggctcccgacgtgactactttgcctcgcaacgtaatgtttgtgttcttccagggggagaccttcgattatattgggtcctcccgaatggtttacgatatggagaaggggaaatttccagtgcagctggaaaatgtggatagcttcgtcgagctgggacaggttgcattgcgcacatcccttgagctatggatgcacacggacccagtttcacagaagaatgagtctgtccggaatcaagtcgaagatctgctggcgacccttgaaaagtccggggctggggttccagcagtcattctacggcggcccaaccagtctcagcctctgccgcccagttcactgcagcgatttttgagagcccggaacatcagtggcgtggtgctggctgatcacagtggtgctttccataacaagtactaccaatcgatctacgacaccgccgagaacatcaacgtcagctaccccgaatggctgagcccagaagaggacctgaacttcgtgactgatactgctaaggctcttgccgacgtagcgaccgtgctggggcgggctctgtacgaactggctggcggcacaaacttttccgataccgtccaggctgatccgcagacagtgacacgcctgctgtacggctttctcatcaaagcgaataactcgtggtttcagagcatcctccgccaagacctgcgcagttatttgggcgacggccctttgcagcactatatcgcggttagtagtcccactaacacaacttatgtcgtgcaatatgctttggcaaatctgacaggaacagtggtcaacctgacccgcgaacaatgccaagacccctctaaagtgccttcagagaacaaagacctgtacgagtacagttgggtgcagggaccactccacagcaatgaaacagacaggctgccacggtgcgtcagatcaacagccagacttgcgcgggctctaagcccagctttcgaactgagtcagtggtcctctactgaatattcgacttggacagagtcccgatggaaggacatccgggcgagaatcttcctgatagcatcaaaagagttggagctgatcacactcaccgtggggttcggcatccttattttctcattaatcgtgacctactgtattaatgcaaaggctgacgtgcttttcatcgcgccacgggagccgggcgctgtctcttactag

SEQ ID NO: 197267 - DNA, 768 bp, synthetic construct
  misc_feature 1..768: note = Description of Artificial Sequence: Synthetic coding sequence
  source 1..768: mol_type = other DNA
atggccaccgccggcggcggcagcggcgccgaccccggcagccggggcctgcttagattgctttccttctgcgttctcctggcggggctgtgccggggaaattcagtggagagaaagatttacatccccctgaataagaccgctccctgtgtcaggctgttaaacgctacacatcagattggctgccaatctagcattagtggtgacacaggagtcattcacgtggtagagaaggaagaggacttgcagtgggtgctgaccgacgggcccaatcccccttacatggtgctgcttgaatcgaagcacttcaccagggacctcatggagaagctgaaagggcggacgagcagaatcgctggccttgcagtgtcactgactaaaccatcaccagcctcaggcttttctccctctgtgcagtgtcccaatgacggatttggtgtttactcaaatagctacggtccagagtttgcccactgccgggaaatccagtggaactcgttaggaaatgggctggcatacgaagactttagcttccctatattccttctggaggatgaaaacgagactaaggtcatcaagcaggaaacatttgactatatcgggagctcaaggatggtatacgatatggaaaaggggaagttccctgttcagctggaaaatgtcgatagctttgttgaattagggcaggtagctctgcggacctcactagagctgtggatgcacactgaccctgtcagtcagaagaacgagtccgtccggaatcagtag

SEQ ID NO: 197268 - DNA, 963 bp, synthetic construct
  misc_feature 1..963: note = Description of Artificial Sequence: Synthetic coding sequence
  source 1..963: mol_type = other DNA
tgaggcttcggcgtgtacagcaacagctacggccccgagttcgcccactgtagagagatacagtggaactctctcggcaatggtctggcgtatgaagatttctcttttccgatctttcttctggaagatgagaatgaaacgaaagtgattaagcagttattttcacatatgcatgcagtgatttcaaccgctacatgtatgagacgtagctctattcagtccacgtttagtattaatcccgagattgtctgcgacccactgagtgattacaacgtatggtcgatgttaaagcccatcaacaccacagggaccttaaaacccgatgacagagtggtggttgctgctaccaggcttgattcaaggagttttttctggaacgtggcacccggggctgagtcagcggtggcctcctttgtaactcagcttgcggctgcggaagccttacagaaagctccagacgtaaccactcttcccaggaatgtgatgttcgtgtttttccaaggagagaccttcgattatatcggcagctctcgcatggtctacgatatggaaaagggcaaatttcccgtgcagctcgaaaacgtggacagtttcgtggaactaggccaggtcgcactcaggacatctctggaactgtggatgcataccgatccagtctctcagaagaacgaaagtgtgcggaaccaagttgaggaccttctggctacactagagaaatccggggcaggagttccggctgtcattcttagaagacccaatcaatctcaaccattgcccccctccagcctgcagcgttttctcagggcacgcaacatctcgggagttgtgctggccgaccattcgggcgccttccataataagtattaccagtctatttacgatacagccgagaatattaacgtcagctaccctgaatggctgtcacccgaggaggacctgaattttgtcacagataccgcctag

SEQ ID NO: 197269 - DNA, 660 bp, synthetic construct
  misc_feature 1..660: note = Description of Artificial Sequence: Synthetic coding sequence
  source 1..660: mol_type = other DNA
cggagcagcatccagagcaccttcagcatcaaccccgagatcgtgtgcgacccacttagcgattataatgtctggtccatgctcaagccaatcaatacaactggcaccctgaagccagacgaccgcgtggtcgtagctgccaccagacttgcagctgcagaggccctacaaaaagcgcccgacgttactactctcccaaggaacgtgatgtttgtgttctttcagggcgaaaccttcgactacatcgggtcctcccgcatggtgtacgacatggagaagggaaagttccccgtccagcttgagaatgttgactcgtttgtcgaactcggacaggtggctctgcggacgtctctagaactctggatgcacacagacccagttagtcaaaagaatgaaagcgttagaaaccaagtggaagatctcctggccaccctcgaaaaatctggtgccggagtgcccgccgtaatactaaggaggccaaaccagtctcagccactcccgccaagctcactgcagcgattcttgagagctcgcaatattagcggcgtcgtgctggcagaccactctggagcattccacaacaaatattatcaaagcatatatgacaccgcagagaacatcaatgtatcctaccccgagtggttgagtcccgaagagtag

SEQ ID NO: 197270 - DNA, 828 bp, synthetic construct
  misc_feature 1..828: note = Description of Artificial Sequence: Synthetic coding sequence
  source 1..828: mol_type = other DNA
tgaaacgtggcccccggcgccgagagcgccgtggccagcttcgtgacgcagctggcagccgccgaggcattacagaaggcacctgacgtgacaaccctccctaggaacgtcatgttcgtgttcttccaaggcgtggctcttaggacctcactggaattatggatgcacaccgatccagtgtcacagaagaacgagtccgtgagaaaccaggtggaagaccttttggcgacgctcgagaagtctggcgcaggagtgcctgctgtgattctacggcggccaaaccaaagtcagcctctcccaccaagctcgctgcagaggtttttgcgcgcacgcaacatctctggcgttgtgctcgcagaccattcaggggcttttcataataagtattatcagtctatctacgacactgccgagaacattaatgtcagttacccggagtggctgtcaccggaagaggatcttaacttcgtcacagataccgcaaaggcactggcagacgttgccacagtcctgggtagggccttgtacgagctggccggcggcactaacttcagcgacacagtgcaggctgatccccaaacggtgacacgcctgctctacggattcctcataaaagccaataacagttggttccagtctattctgcgccaagatttgcgatcttatctgggagatggccctctccagcattacattgctgtctctagtcccactaacactacgtacgtggtgcagtacgccctggctaacctaaccgggactgtagtcaatctaactagggaacaatgtcaggatccctctaaagtgcctagtgaaaacaaggattag

SEQ ID NO: 197271 - DNA, 405 bp, synthetic construct
  misc_feature 1..405: note = Description of Artificial Sequence: Synthetic coding sequence
  source 1..405: mol_type = other DNA
atggccaccgccggcggcggcagcggcgccgaccccggcagccgggggctgctacggctactatctttctgtgtgctgttggccgggttgtgccgagggaactccgtggagaggaaaatttacatccctctgaataaaaccgccccgtgtgtccgcctgctgaacgcaacacatcagataggttgccagtcatccatttctggagacacaggcgtgatacacgtcgtcgaaaaggaggaagatctgcagtgggtgctcaccgacgggcccaatccgccttatatggtactccttgagtctaaacactttacgaggcagaacgtgcgcctgagtgatacttttctgtgcagcttcatggaatttttgtcttatagccgtgacctcatggagaaactgaagggatag

SEQ ID NO: 197272 - DNA, 699 bp, synthetic construct
  misc_feature 1..699: note = Description of Artificial Sequence: Synthetic coding sequence
  source 1..699: mol_type = other DNA
atggccaccgccggcggcggcagcggcgccgaccccggcagccggggactgctccgacttttatcgttctgcgtattgttggcgggtttgtttctagactttgaaccagaccctctacctctgtgcccggacgtctctttttttccccaaccccaaccacctactccacagtcaaagggcactggcctgtgccgcgggaattccgtggagcgaaaaatctacatcccactcaacaaaactgcaccctgcgtcaggcttttgaacgccacccaccaaatcggatgtcagtctagcataagtggcgatactggcgtgatccatgtggttgagaaagaggaggacttacagtgggtcctcaccgacggtcctaatcctccctatatggtgctgcttgagagcaaacacttcacaagagaccttatggagaaactgaaagggcggacctccagaatcgcaggcctggccgtgagtcttacgaagccttcccccgcgagtgggttcagtccgtccgttcaatgcccgaatgatggcttcggagtgtattcaaatagctacgggcccgaatttgcacattgtcgggagattcagtggaattcccttggcaatgggctcgcctatgaggactttagcttccccatctttctgttggaagacgaaaatgaaacaaaggtgatcaaacagtgttaccaggatcactag

SEQ ID NO: 197273 - DNA, 1716 bp, synthetic construct
  misc_feature 1..1716: note = Description of Artificial Sequence: Synthetic coding sequence
  source 1..1716: mol_type = other DNA
atggccaccgccggcggcggcagcggcgccgaccccggcagccggggacttctgaggctgctgagtttctgcgtgcttctggctggattgtgcaggggaaacagcgtggaaaggaagatctacattccactcaacaagaccgcgccttgcgtgcgtcttttgaacgcaactcatcagatcggctgccagtcttctatttctggtgacactggtgtgattcacgttgttgagaaagaagaggacctacagtgggtactgaccgacggccctaacccaccttacatggtactacttgagagcaagcacttcacccgagatcttatggaaaagctgaaagggcgcaccagtaggatcgctgggctcgccgtctccttgaccaagccgtcgcctgcttctggctttagcccctccgtgcagtgccctaatgatggtttcggcgtgtatagcaatagctatgggccagaattcgcccactgtcgagagatccagtggaattctctcgggaatgggttggcttatgaggacttcagcttccccatcttcttgctcgaagacgagaacgaaacaaaggttattaagcaggaaactttcgattacataggcagcagcagaatggtctacgacatggagaagggtaaatttcctgtgcagctcgagaacgtcgactctttcgtcgagctcggccaagtggctctgcgcactagccttgaactgtggatgcacaccgacccagttagccagaaaaacgagtctgtgaggaaccaggtagaagatcttctggccacactggagaagagcggcgcgggggtgcccgccgtcattctgcgccgccctaaccagtctcagcccctgccaccttcttccctgcagcgcttccttagagccaggaatatctccggcgtcgtcctggcggatcactctggagcattccacaataagtattatcaaagcatttatgatacagctgaaaacattaatgtgtcataccccgagtggctcagtccagaggaggacctgaacttcgtaaccgataccgccaaggccttagcagacgtcgccacggtattaggtcgggctttgtacgaattggcaggaggaacgaactttagcgacaccgtgcaggcagatccccagacagtaacacgactgctgtatggctttctcatcaaagctaacaatagctggtttcaatccatacttcggcaggacctgagaagttatctgggcgatggccccctacagcattacattgcggtgtcctcacccacaaatacgacctatgttgtgcagtacgccctcgctaatcttactgggaccgtcgtaaatctaacaagggagcagtgtcaagatccgtccaaggtacccagtgagaacaaagacttgtatgaatacagctgggtgcagggacctctgcacagtaacgaaacagaccgtttaccccgctgcgtaaggtctaccgctcgacttgcgcgggccctgagtcccgcgtttgagctgtcccaatggtctagcacggaatattccacctggaccgagagcagatggaaagacatcagggctagaatctttttaattgcgagcaaagagctcgaattaattacattgacagtgggattcggaattttgattttcagtttaatcgttacgtattgtataaatgccaaagcggatgttctattcatcgccccccgggagccgggagccgtctcctactag

SEQ ID NO: 197274 - DNA, 642 bp, synthetic construct
  misc_feature 1..642: note = Description of Artificial Sequence: Synthetic coding sequence
  source 1..642: mol_type = other DNA
atgagccgggtgctggtgccctgccacgtgaagggcagcgtggccttacaagtcggggacgtgagaactagccagggccggccaggcgttctagtaattgatgtgacatttcccagtgtggcgcccttcgagctgcaggagatcacatttaaaaactactatacagcattcctatcaatcagagtcagacagtacacttccgctcacaccccagccaaatgggtcacatgcttaagagattattgtttgatgccagacccacacagtgaagaaggcgcacaggagtatgtgtctctgttcaagcatcagatgctctgtgatatggcacggatctccgagcttcgcctgattttacggcaaccaagcccactgtggttgagctttaccgttgaggagttacagatttaccaacagggtcccaaatctccctcagtgacttttcctaaatggctgagtcaccccgtgccatgtgaacaacctgccctcctaagggagggcctgccagacccctcacgcgtctcttcagaggttcagcagatgtgggcacttaccgagatgatacgggctagtcatacctcagcccggattggtcgcttcgatgtggatggctgttatgacctgaaccttctgagttacacctag

SEQ ID NO: 197275 - DNA, 642 bp, synthetic construct
  misc_feature 1..642: note = Description of Artificial Sequence: Synthetic coding sequence
  source 1..642: mol_type = other DNA
atgagccgggtgctggtgccctgccacgtgaagggcagcgtggccttgcaggtaggcgacgtgcgcacgtcacaggggagacccggggttctggttatcgatgtcacctttcctagcgtggcgccgtttgagctgcaagagatcacattcaagaattactataccgctttcctcagcatccgggtgagacagtatacatctgcccacacacctgccaagtgggtcacctgtctgcgggattattgcttgatgccagaccctcacagcgaggagggcgcccaggagtatgtctcactatttaagcaccagatgttgtgtgacatggcccggatctccgagctaaggctgatcctgagacagcctagccccctgtggttatcatttactgtggaggaactccagatctatcaacagggacccaaatctccctcagtgacattccccaaatggctttcacatcctgttccatgtgagcaaccagcgcttctcagggagggcctgcccgatccgagccgggtgtcatctgaagtccagcagatgtgggctctgacagagatgatcagagcctctcacacaagcgcccgcatagggaggttcgatgtcgacgggtgctatgatcttaacctgctaagctacacatag

SEQ ID NO: 197276 - DNA, 528 bp, synthetic construct
  misc_feature 1..528: note = Description of Artificial Sequence: Synthetic coding sequence
  source 1..528: mol_type = other DNA
atgagccgggtgctggtgccctgccacgtgaagggcagcgtggccctgcaggtgggcgacgtgagaacatcccagggacgccccggggtgctggtcattgatgtgacgttcccgagcgtggctcctttcgaactgcaggagatcacctttaaaaactattacactgctttcctctctattcgggtcagacagtatacttctgcccatactccagccaagtgggtcacttgcctgcgggattactgtctaatgccagacccccacagcgaggaaggcgcccaggaatacgttagtctgttcaagcaccaaagcccaagcgttaccttccccaagtggctttcacaccctgtgccttgcgagcagcccgcacttttgcgagagggattgccagatcccagcagggtttccagcgaagtgcagcaaatgtgggcactgaccgagatgatccgtgcatcccacacctctgctcggattggccgattcgatgtcgatggatgttacgacctgaatctgctcagttacacttag

SEQ ID NO: 197277 - DNA, 795 bp, synthetic construct
  misc_feature 1..795: note = Description of Artificial Sequence: Synthetic coding sequence
  source 1..795: mol_type = other DNA
atggagagcggcttcaccagcaaggacacctacctgagccacttcaatccgcgggattacttggagaaatactacaaattcggctccagacatagtgccgagagccagatactgaaacaccttcttaagaacctgttcaaaatcttctgtttggatggagttaaaggggatctcctcatcgacatcggatccggccctacaatataccaattgctgagcgcatgcgaaagcttcaaagaaatagtggtaacagattactcggaccagaatctgcaggaactggaaaaatggttaaagaaagaacccgaagccttcgattggagcccagtggttacatatgtgtgcgatttagagggcaacagggtaaaaggtcccgaaaaagaagagaagctcagacaggctgtgaaacaggtactcaagtgtgacgttacacagtctcaaccactgggcgcggtgcccctgcctcctgcagactgcgtactgtcaaccctgtgcctcgacgcggcttgcccagaccttcccacctattgtcgagcactgcgtaacctgggatccctcctgaagcctggcggtttcctggtcatcatggatgccctcaagtccagttattacatgatcggtgaacagaaattttcctctctgcccctcggacgggaagccgtcgaagccgctgttaaggaggctggatatacaatcgagtggttcgaggtaatatcacagtcatactctagcactatggcaaacaatgagggcctgttctcactcgtcgctaggaagctatccaggcccctgtag

SEQ ID NO: 197278 - DNA, 795 bp, synthetic construct
  misc_feature 1..795: note = Description of Artificial Sequence: Synthetic coding sequence
  source 1..795: mol_type = other DNA
atggagagcggcttcaccagcaaggacacctacctgagccacttcaacccccgtgattatttggagaagtattataaattcggcagtagacactctgccgaatctcaaatcctcaagcacctcctcaaaaacttgttcaagattttttgccttgatggggtgaagggggatcttctaatcgatattgggagtggccctacaatctatcagctgctatccgcctgtgagtccttcaaagagatcgtcgttacagactattccgaccagaacttgcaggagcttgagaagtggttaaaaaaggagcctgaagctttcgactggagccccgtggtgacatacgtatgcgatcttgagggtaatagggtaaaagggcctgaaaaggaggaaaagctgagacaggccgtgaagcaggtattaaaatgtgacgttactcagagtcagcccctaggcgctgtgccgcttcccccagccgattgtgtgctgtcaactctctgtttagacgctgcctgccccgacttacccacctactgccgggccctgcgcaatctcgggagcttattaaagcccggagggttcctggtcatcatggacgcacttaaatcttcatattacatgatcggcgaacagaaattttcaagcctgcccttgggtagggaagccgtggaggccgcagttaaggaagctggctatactatagaatggttcgaagtcattagccagtcatactcgtcaactatggcgaataatgaaggactgttttcactggtagccagaaaactctctaggcccttgtag

SEQ ID NO: 197279 - DNA, 759 bp, synthetic construct
  misc_feature 1..759: note = Description of Artificial Sequence: Synthetic coding sequence
  source 1..759: mol_type = other DNA
atgaagagccggatccccgtggtgctgctggcctgcggcagcttcaatcctattacaaatatgcatctgcgaatgtttgaagttgccagagaccacctccaccagacaggaatgtatcaagtgatccagggcattataagccccgtcaacgacacctacgggaagaaagatctcgccgctagtcatcaccgggtagccatggctcggttagctctccagacatctgactggatccgcgtcgacccctgggagtcagaacaagcccagtggatggagaccgttaaggtcttgagacaccatcatagcaagttgctgaggtcgccccctcagatggagggtccggatcatggcaaggccctgttttcaactcccgctgccgtgcccgaactcaagctcctctgtggtgccgatgtcctgaagacttttcagactcctaacctgtggaaggacgcgcatattcaggagatagtagagaagttcggtttagtttgcgtcggcagggtgggacatgaccccaagggctacattgccgaatcccccattttaaggatgcaccaacataatatccatctcgctaaagagcctgtgcagaatgaaatcagtgcaacatacatccggcgggcactggggcagggacaaagtgtgaaatacctcatccctgatgcagtaataacgtatattaaggaccatggactatatacaaagggctcaacatggaaaggaaagtccacacagagtaccgaaggcaagaccagctag

SEQ ID NO: 197280 - DNA, 648 bp, synthetic construct
  misc_feature 1..648: note = Description of Artificial Sequence: Synthetic coding sequence
  source 1..648: mol_type = other DNA
atgtaccaggtgatccagggcatcatcagccccgtgaacgacacctatggaaaaaaggacttagccgcatcgcatcaccgtgtggccatggctagacttgccctccaaactagcgattggatcagagtcgacccctgggagtccgagcaagcacagtggatggaaacagttaaagtgctgcgacaccatcattccaagctcttaagatcccccccccagatggaaggccccgaccacgggaaagctctgttttccacgccagccgctgtgcctgagctcaaactcctatgtggggccgatgtccttaagaccttccagacacccaacctctggaaagacgcgcatatccaggagatcgtggaaaaatttggactggtgtgtgtggggcgcgtggggcacgatcccaaagggtatattgcggaaagtcctatcctgaggatgcaccagcacaacattcacttagcaaaggagcccgtgcaaaatgagatcagcgcaacgtacatcaggcgcgctctcggtcaggggcagtcagtcaagtatctcatccctgatgccgtgataacgtatatcaaagaccacggactctacaccaaaggttcaacctggaaaggcaagagcacgcagagtacagaaggcaagacctcctag

SEQ ID NO: 197281 - DNA, 648 bp, synthetic construct
  misc_feature 1..648: note = Description of Artificial Sequence: Synthetic coding sequence
  source 1..648: mol_type = other DNA
atgtaccaggtgatccagggcatcatcagccccgtgaacgacacctacgggaaaaaagaccttgctgccagccatcaccgtgtggcaatggcacgcttggcccttcagacgagcgattggatccgagtcgatccatgggaaagtgaacaggctcaatggatggagacagtgaaggtcttgaggcaccatcactccaagctgctgaggtctcctccacagatggagggccccgaccacggcaaggccctattctctacacctgcagctgtgcctgaacttaaactcctctgtggtgcagacgtcctaaagacattccagacgccaaatctgtggaaggatgctcacattcaagaaattgtggagaagttcggtcttgtgtgcgtaggccgtgttggccacgatcctaagggttacatagctgaatctcccatcctccgcatgcaccaacacaacatacatctggcgaaggaaccagtgcaaaatgagatatccgccacttacatcaggagggctctgggccaggggcagtccgtgaagtacctgatcccagacgccgtgatcacctacattaaagaccacgggctatatacgaaaggcagcacctggaagggcaagagtacacagagtactgaaggaaaaacctcttag

SEQ ID NO: 197282 - DNA, 429 bp, synthetic construct
  misc_feature 1..429: note = Description of Artificial Sequence: Synthetic coding sequence
  source 1..429: mol_type = other DNA
atggagggccccgaccacggcaaggccctgttcagcacccccgccgcagtcccagaattgaagcttctgtgcggagcagatgtactgaagacattccagacccctaatctgtggaaagatgcacacatacaagagattgtggaaaagtttggtctggtgtgcgtgggccgcgtgggtcacgatcctaagggctatattgctgagagccctattcttaggatgcaccaacataatattcatctggccaaggaaccagttcagaacgaaattagtgccacatacatccggcgggccttaggacagggccaatccgtgaaatatttaataccggacgccgttatcacctacatcaaggaccacggcttatacactaaggggtctacatggaaggggaaatctacacaatccacggaaggcaaaactagctag

SEQ ID NO: 197283 - DNA, 345 bp, synthetic construct
  misc_feature 1..345: note = Description of Artificial Sequence: Synthetic coding sequence
  source 1..345: mol_type = other DNA
atgaagagccggatccccgtggtgctgctggcctgcggcagcttcaacccaattactaatatgcacctccggatgtttgaggttgcccgcgatcatttgcaccaaaccggcatgtaccaggttatccaggggattatctctccagtcaacgatacctacggcaagaaggatctggcggcctctcaccacagggtcgccatggccagacttgctctccagactagcgattggatacgggtggatccttgggagtcagagcaagcccagtggatggaaacagtcaaagtcctcagacatcatcattccaagctgcttcgctccccacctcagatggaggggccctag

SEQ ID NO: 197284 - DNA, 492 bp, synthetic construct
  misc_feature 1..492: note = Description of Artificial Sequence: Synthetic coding sequence
  source 1..492: mol_type = other DNA
atgaagagccggatccccgtggtgctgctggcctgcggcagcttcaatccaatcaccaatatgcacttaagaatgttcgaggtagctcgggatcatctccaccagacggcggtgccagagctcaagctgctatgtggtgctgatgtgctgaaaaccttccaaacacctaatctctggaaggatgcccatattcaagagatcgtcgagaagtttggcttagtgtgcgtcgggcgggtcgggcacgatccgaaaggatatatagcagaatcaccgatattgcggatgcaccaacacaatattcatcttgcaaaggaaccagttcagaatgagatttccgcaacttacattcggcgagctcttgggcagggccagtccgtgaagtacctcatccccgatgcagtgatcacttacatcaaggaccacgggttgtatacgaaaggatctacatggaaaggaaagtccacacagagcactgagggtaaaactagttag

SEQ ID NO: 197285 - DNA, 3261 bp, synthetic construct
  misc_feature 1..3261: note = Description of Artificial Sequence: Synthetic coding sequence
  source 1..3261: mol_type = other DNA
atggccaacctgctgaagaccgtggtgaccggctgcagctgcccccttctgtccaacttaggctcatgtaagggccttcgcgtcaagaaggattttctgcgtaccttctacacccaccaggagctgtggtgtaaggcaccagtaaagccaggaatcccctataaacaattgaccgtgggggtgcccaaggagatctttcagaatgagaagcgggtagcgctttcaccggcaggcgttcagaacctggtgaaacaaggtttcaacgtcgtggtggagagcggtgcaggcgaggcctctaaattctccgatgatcattatagggtggctggggcccagattcagggggccaaagaggtgctcgcaagcgacttagttgttaaggttcgcgccccaatggtcaaccctaccttgggcgtccatgaggccgacctgctgaagacatccggtactttgatctccttcatctaccctgcccagaaccctgagttattaaataagctgtcccagcgaaaaactaccgtcctcgccatggaccaagtcccacgagtgaccatagctcagggatatgacgcgctttcctccatggctaacatcgctggttataaggcagtggtgctcgcagcaaaccatttcgggaggtttttcactggccaaatcacggccgctggcaaggttccacctgcgaagatcctcattgtgggagggggagtggctgggctcgcttcagctggtgccgctaagtccatgggggccattgtgcggggctttgacacccgggctgccgccctggaacagtttaagtctctgggcgctgagcccctggaagtggacctgaaagagtctggcgagggccaaggcggctatgcaaaggaaatgtctaaagagttcatcgaggcggaaatgaagctgttcgcccaacagtgtaaggaggtcgatatcctgatttccaccgcccttatccccgggaaaaaagccccagtgctgttcaacaaagaaatgatcgaaagcatgaaggaaggcagtgtggtcgtggacctagccgccgaggcaggtggcaattttgagacaaccaagcctggtgagctgtatatccataaggggattacacacatcggttacaccgatctcccgtccagaatggctacacaagcatccactctctacagtaacaatataaccaagctattgaaagctatttcaccagataaggataacttttacttcgatgtgaaggatgattttgacttcggaaccatgggccacgttatcagaggcacagtggtgatgaaggacggcaaggtgatatttccagctcctacccctaagaatatcccccaaggcgcgcctgtgaagcagaaaaccgtggccgaactggaggcagaaaaggccgctacgatcaccccgttccgcaagactatgagcacagcctccgcctataccgcaggtttgactgggattctgggccttggcatagcagcgccaaatctggcatttagccagatggtgaccacattcgggctcgcaggcatcgtaggataccacaccgtttggggcgttacccccgctctgcacagccctctaatgtcagtgactaacgctatctctggccttaccgcagtcggcggcttggccctaatgggaggacacttgtacccaagcactacctcccagggactggccgccttagccgccttcatttcttcagtgaatatcgccggtggcttccttgtgacccaaaggatgctggacatgttcaaaaggcctaccgatccgcccgaatataactacctctatttactgccagccggcacgttcgttggcggttatctggcggcactctattccggatacaacattgagcagatcatgtatcttggctcaggactctgctgtgtcggtgcactggcaggactcagcactcagggcaccgcaaggctcggcaatgccctggggatgatcggtgtggcggggggcttggcagctactctaggagtgctgaaacccggtcctgagctgctggcacagatgtcaggcgcgatggcgctgggcggcaccatcggtttgactatagccaagcggatacagatctcagatctcccacaactcgtggccgcttttcacagtttggtcgggttggccgcagttctcacgtgtattgcggaatatataattgaatacccacatttcgctaccgatgccgccgcaaatttgaccaaaatcgttgcatatctcggcacttacatcggcggtgtcacattctctgggagccttatcgcatacggcaagctgcagggattgctcaaaagcgcaccacttcttctgcctggccgccatctgctcaatgcagggctgctggccgcctccgtgggcggcattatcccatttatggttgacccaagtttcaccactggcatcacttgcctgggttccgtttcggccttgtcagctgtaatgggagtgaccctgacagcagccattggtggggccgatatgcctgtagtgatcacagttctgaacagttattcaggttgggcgttgtgcgccgagggctttcttcttaacaataacctattgaccatcgttggcgctctgatcggaagtagcggcgccattttgtcatacataatgtgtgtcgccatgaacagaagccttgctaacgtcattctgggcgggtatggcactacatctaccgcaggcgggaagcctatggagatctctgggacacacacagaaattaacctggacaacgccatagatatgattcgtgaggctaactcaataattatcactccagggtacggtctgtgcgcggctaaggcgcaatatcccatcgctgaccttgttaaaatgctgaccgaacaaggaaagaaagtgcgcttcgggatccaccccgtggccggaaggatgccggggcagctgaacgtgctgctggcagaggccggagtaccctatgacatcgtactcgagatggacgagattaaccatgacttccccgatacagacttggttttggttatcggcgctaatgatacagtgaattcagctgcccaggaagatcccaattccatcatcgcaggaatgcctgtcctggaggtgtggaaatctaagcaggtaatagtgatgaaaagaagcctgggcgtcgggtacgccgcagtggacaatcccatcttctataagcccaacaccgccatgttactgggagacgccaaaaaaacttgtgacgctctgcaggcgaaagtgcgggagtcgtaccaaaagtag

SEQ ID NO: 197286 - DNA, 3261 bp, synthetic construct
  misc_feature 1..3261: note = Description of Artificial Sequence: Synthetic coding sequence
  source 1..3261: mol_type = other DNA
atggccaacctgctgaagaccgtggtgaccggctgcagctgccccctgctgtctaatttaggtagctgtaagggactgagagtgaagaaagattttctgagaaccttttacacccaccaggaactgtggtgcaaggcacccgtcaagcccggaatcccgtacaagcagctgactgttggagtgcctaaagagatcttccagaacgagaaacgcgtggcgctcagccccgctggagtgcagaatttagtgaaacaggggtttaacgttgtcgtggaatcgggagctggcgaagcaagcaagtttagcgatgaccactaccgggtggcaggagctcaaatacagggagcaaaggaggtgctggcttcagacttggtagttaaagtgcgggcaccaatggtgaaccctaccctgggagtgcatgaagcagatttgctgaaaacaagcgggacactgattagcttcatctaccctgctcagaaccccgaactgctgaacaagctgagccagcgcaagactaccgtgctggccatggatcaggttcctcgcgttacaatagcacagggctacgatgcattatcatccatggctaatatcgcgggctataaggcagtcgttttggccgcgaatcactttggacgcttctttaccggacagatcactgccgccggcaaggttccccctgccaagattctgatcgtcggggggggagtcgccggcctcgccagtgctggcgccgccaaaagcatgggggccatcgtcagaggctttgacactagggcagcagccctcgagcaatttaagagcctgggtgccgaacccctggaagtggacctgaaggagtctggagaggggcaggggggatatgcaaaggaaatgtccaaagagtttatcgaagccgagatgaagctattcgcacagcagtgtaaagaggttgatattctgatctccactgcgctgatccccgggaaaaaggcacctgtactgtttaacaaagaaatgatcgagtcgatgaaagagggttctgtagtggtggacctggctgctgaggccggaggaaactttgagactactaaacctggggagttgtacatccacaaaggcattacccatatcggatatactgacctgccatctcggatggccacacaagcctccaccctttactccaataatattactaagctcctaaaggctatctctcccgacaaagataacttctacttcgacgtgaaggatgactttgacttcggaactatgggacatgtcatccgaggaactgtggtgatgaaggatggtaaagtgatcttccccgctccaacgcctaaaaatatcccacagggtgcacccgtcaagcagaaaactgtggctgagctagaggcagagaaggcagcaacgatcacgcccttcaggaaaactatgtctacagccagcgcctataccgcaggactaacaggtatcctgggtttgggaattgcggcccccaacctcgccttctcacagatggtcaccaccttcggcctggctgggatagtcggttatcacacagtatggggggtgactcccgccctgcattcccccctgatgtcagttactaacgctatatccgggctcacagcggttggtgggctcgccttaatgggtggccatctttacccctccacaactagccaagggctcgccgctttggcagcatttatttccagtgtgaacattgccgggggcttcctggtaacccagcgaatgctcgatatgttcaagagaccaacagacccccccgagtacaactacctgtacttgctcccggctggaacctttgtcggcggatatctagctgccctctattctgggtataacatcgagcagatcatgtacttagggagcgggctgtgttgtgtgggggcccttgcgggactgtccactcagggaacggctaggctcggaaatgcattaggtatgatcggcgtggccggcggcttagctgcgaccctcggcgtacttaagcccgggccagagctgctagctcagatgtcaggcgcaatggccctgggcggaaccatcggtttgaccatagctaaacgaatccaaatatccgacctgccacagctggtcgccgccttccactccttagtgggtctcgccgcagtgcttacatgtatcgcagagtatatcatcgaatatcctcatttcgcgacggacgcagccgctaatttgacaaagatagttgcctacctggggacatatattggaggcgttactttctccgggagtctgattgcatacggcaagctccagggcctgttaaaaagcgcccctctgctgctgcccggtagacatcttttaaacgcaggcctcctcgcggcctctgtgggcggcatcatcccctttatggtggacccatccttcactactggaatcacatgtctggggagtgttagcgccctctcagctgtaatgggagtgaccttaactgctgcaataggaggcgcagacatgcccgtcgtgattacagttctgaacagctactcaggctgggctctgtgcgctgaaggctttctgctcaataacaatttgctgaccatcgtcggcgcactaataggcagttcgggggccattctgtcttatataatgtgcgtggccatgaaccggtcactcgccaatgtcatcctaggggggtatgggaccactagcaccgcgggtggaaagcccatggaaatctctggcactcatacggaaattaatctggacaacgccattgacatgatccgcgaggctaatagcatcatcataacccctggttacggcctgtgtgccgcgaaggcccaatacccaattgccgatctggtgaagatgctgaccgagcagggaaaaaaggtcagatttggaattcatcctgtagcagggcgcatgcctggccagctgaacgtccttcttgccgaggcaggagtgccctacgacattgtactggagatggatgagataaatcatgactttccagacacagacttggtgttggtcataggcgcgaatgacacagttaactccgctgcacaggaagatcccaactcaataatcgctggtatgcccgtactggaggtttggaaatccaagcaggtaatcgtgatgaaaagatcattgggggtgggctatgcagcagttgataaccctatcttctataaacctaatacagctatgctgctgggtgatgcaaaaaagacttgcgatgcattgcaggctaaagttcgggagtcctatcagaagtag

SEQ ID NO: 197287 - DNA, 600 bp, synthetic construct
  misc_feature 1..600: note = Description of Artificial Sequence: Synthetic coding sequence
  source 1..600: mol_type = other DNA
atggccaacctgctgaagaccgtggtgaccggctgcagctgccccttgctctcaaatcttggatcttgtaaaggcctgagggtcaagaaagacttcttgaggaccttctacacccaccaggaactgtggtgtaaggctccagtcaagccggggattccctataagcagctgacagtaggggttcctaaagagatctttcagaacgaaaagcgggtagccctgtctccggccggagtgcagaaccttgttaagcagggatttaacgtagtggtggaatctggggcaggcgaagcaagcaagtttagcgacgatcactatagggtcgccggtgcacagatacagggggctaaggaggtgcttgctagcgacctggttgtgaaggtgagagcccctatggtgaaccctaccttaggcgtgcacgaagccgacctgctgaagacctctgggaccctgatcagctttatttatcctgcccagaatccggagctcctgaataagctgtcacagcgaaagaccaccgtcctagcaatggaccaagtacccagagtcactatagcccaggggtacgacgccctgagttccatggccaatatcgcatag

SEQ ID NO: 197288 - DNA, 654 bp, synthetic construct
  misc_feature 1..654: note = Description of Artificial Sequence: Synthetic coding sequence
  source 1..654: mol_type = other DNA
atggccaacctgctgaagaccgtggtgaccggctgcagctgccccctgttgtctaacctggggtcctgcaagggcctgcgagttaagaaggacttcctgagaacgttctacacgcatcaagaactgtggtgcaaggctccagttaagcctggaatcccttacaagcagctgacggtgggagtgcctaaagagatattccaaaacgagaagcgtgtggccctgtcccctgcaggcgtccaaaaccttgtgaagcagggattcaatgtcgttgtggagtccggggccggcgaggcttcaaagtttagtgacgaccattatcgggtggctggtgcacagatccagggagccaaagaagtcctggcctcggatctcgtggtcaaggtgagggcaccaatggtgaaccccactttgggggtgcacgaggcggacctcctcaaaacaagcggcacccttataagtttcatttaccccgcgcagaacccagagcttctcaataaactttctcagcggaaaactactgtcttggctatggatcaggtgccaagggtgacgatcgcccaggggtacgacgctctgtcctccatggctaacatagccggctataaggccgtggttctggccgccaatcatttcggaagatttttcactggttag

SEQ ID NO: 197289 - DNA, 1806 bp, synthetic construct
  misc_feature 1..1806: note = Description of Artificial Sequence: Synthetic coding sequence
  source 1..1806: mol_type = other DNA
atgctgagctggaaccgggtgcgggccaagctgcccagcagccagatggtcaccacctttggcttggccggtatcgtgggatatcacacagtttggggggttacaccggccctgcacagtcctctgatgtcagtcactaacgctatcagcgggctgacagcggtgggcgggcttgctcttatgggcggacatctctacccctcaacgacatcccaaggacttgcagctctggccgcatttatcagctctgtgaatatagccggcggtttcctggtgacacagaggatgctggatatgttcaagcgacccactgaccctccagaatataattatctatatttgcttcccgccggcaccttcgtcggcggataccttgcagccctctactcaggctacaatattgagcagattatgtacctgggctccggtttgtgttgcgtgggagcactggccggactgtcaactcagggcacagccaggctcgggaacgcactcggaatgatcggggtagcggggggtctggccgccactctgggcgtgcttaagccagggcccgagttgctggcacaaatgtccggggccatggccctgggcgggacgattggactgacaatcgccaaaagaatccagatctctgatttaccacaactcgtggcggcctttcacagccttgtgggactggcagctgttttgacctgtatagccgagtatatcatcgagtatccgcattttgctaccgacgcagccgccaatctgacgaagatagtagcgtatctcggaacctatatcggcggagttacattttctggaagcctcatcgcatacggcaagttacagggcctgctgaaatcagccccactgcttctccccggtagacacttgctgaatgcaggattgctcgctgccagtgtgggtggaattatcccttttatggttgatccgtcctttaccaccgggatcacttgccttgggtcagtttccgctctctctgctgtgatgggtgtgaccctcacagccgcaatcggcggtgcggacatgccggtcgtcattactgtcctgaattcctacagtggctgggcactttgtgctgagggtttcctgctgaacaacaacttgttaacaatcgtgggagcacttattggctctagtggggcaatcctgtcgtacattatgtgtgtggctatgaaccggtctcttgccaacgtcatcttaggcggctacggaaccacctccacagccgggggcaaaccaatggaaatctccggtacacacactgaaatcaacctggacaacgccattgatatgatccgcgaagctaacagtataatcattactcccggatacggcctatgcgcagctaaagctcaatatcccatcgctgatctggtaaagatgctaacagagcagggcaaaaaagtacgcttcggtatccatccagtcgccggccggatgcccggacagttgaatgtgctgctggctgaagctggcgtaccctacgacattgtcctggagatggacgaaattaaccatgatttcccggatacggatttggtgctggtcatcggagcgaacgacacggtgaactctgctgcgcaggaagatcccaattccattattgcggggatgcccgttttggaggtctggaaaagtaagcaggttattgtaatgaagagatccctgggggtgggatacgcggcagtcgataacccgatcttttacaagcctaacaccgcgatgcttcttggggatgccaaaaagacttgtgacgccctgcaggcgaaggtgcgcgaaagttaccaaaagtag

SEQ ID NO: 197290 - DNA, 357 bp, synthetic construct
  misc_feature 1..357: note = Description of Artificial Sequence: Synthetic coding sequence
  source 1..357: mol_type = other DNA
atgcggcgggccggcctgggcgagggcgtgccccccggcaactacggcaattacggttacgctaattccggttactctgcctgcgaagaagagaatgagaggctgacggaatccttacgatctaaagtgacggccattaaatccctgagcattgagatcggccacgaagttaaaacacagaacaagctgctcgccgaaatggacagtcagttcgactctaccaccggctttctgggcaaaactatggggaagctcaaaattcttagccgcgggtctcaaactaaactcttatgttatatgatgcttttctctctcttcgtgttctttattatttactggattataaaattacgctag

SEQ ID NO: 197291 - DNA, 1107 bp, synthetic construct
  misc_feature 1..1107: note = Description of Artificial Sequence: Synthetic coding sequence
  source 1..1107: mol_type = other DNA
atgaaccccgccgccgaggccgagttcaacatcctgctggccaccgactcttacaaagtcacccattataagcagtacccccctaataccagcaaggtgtattcttattttgaatgcagagagaaaaaaactgagaatagtaagctgcgaaaagtgaagtacgaagaaaccgttttctatgggctgcaatatatcttaaataaatatttgaagggaaaggtcgtgacgaaagaaaagatccaggaggccaaggacgtgtataaggaacactttcaggacgacgtatttaatgagaaggggtggaactacatcctggagaaatatgatggccatttacctatcgaaatcaaggctgtcccagaggggttcgttatcccccggggaaatgtccttttcaccgtggagaataccgaccccgagtgttactggctgacgaattggatcgaaacaatcttggtccagtcttggtacccaattaccgtggcaacaaactctagagaacagaagaagatcctggccaagtacttgctcgagacatcgggtaacctggacggtttagaatataagctgcatgactttgggtaccggggcgtctcctcccaggagacggccggaattggtgcaagtgcccacctggtgaactttaaaggaaccgacaccgtggccgggctggcattgatcaaaaaatactatgggactaaggatcccgtgcctggctactcagttccagccgccgaacatagtacaattaccgcctggggcaaagaccacgagaaggatgcgttcgagcacatcgtgacccaattcagttcagtgcctgtgtctgtcgtgtccgattcatatgacatatacaatgcttgtgagaagatctggggcgaggacctgaggcatttaatcgtatccaggtccacccaggcgccccttattatacggccagattccggcaaccccctcgacactgtacttaaggtgctggagatactggggaaaaaatttcctgtcaccgagaactcaaagggctataagctcctgcccccttacttgagggtgattcagggggacggagtggacattaatacactacaggaagtgtgcgtgctttactag

SEQ ID NO: 197292 - DNA, 183 bp, synthetic construct
  misc_feature 1..183: note = Description of Artificial Sequence: Synthetic coding sequence
  source 1..183: mol_type = other DNA
atgaaccccgccgccgaggccgagttcaacatcctgctggccaccgacagctacaaagtaacccattacaagcagtaccccccaaatacgtccaaagtctactcgtatttcgagtgccgagaaaagaagaccgagaatagtaagctgcgcaaggtgaaatacgaagagaccgtgttttactag

SEQ ID NO: 197293 - DNA, 267 bp, synthetic construct
  misc_feature 1..267: note = Description of Artificial Sequence: Synthetic coding sequence
  source 1..267: mol_type = other DNA
atgaaccccgccgccgaggccgagttcaacatcctgctggccaccgattcttataaagtcacccattataaacaatacccgccaaacacatccaaggtctattcttattttgaatgccgcgagaaaaagacagagaattccaaactccggaaagtgaaatatgaagaaactgttttttacggactgcagtatattctcaacaaatatctaaaaggcaaggttgtcacaaaagaaaaaattcaggaagcgaaggacgtttataagtag

SEQ ID NO: 197294 - DNA, 1701 bp, synthetic construct
  misc_feature 1..1701: note = Description of Artificial Sequence: Synthetic coding sequence
  source 1..1701: mol_type = other DNA
atggccgccgagcaggaccccgaggcccgggccgccgcccggcccctactgacggatttgtatcaagcgacgatggcccttgggtattggagagcaggaagggcaagagacgcggctgaattcgagttattcttcaggagatgtccgttcgggggcgcattcgccctcgcggccgggttaagagactgcgttcgcttccttagagctttccgactacgggatgctgatgtgcagtttctagcctccgtgctgccaccagacacagaccctgctttcttcgagcatcttcgggctctggattgttccgaagtgactgttagagctctcccagaagggtctctggcatttccaggcgttccactactgcaggtgtccggacctctgctggtagttcagcttctggaaactcctttactctgcctcgtctcctacgcaagcctggtggccacgaacgcggcaagactccgattaatcgccggccctgagaagcgtctcttagaaatgggtttaaggcgagcccaaggccctgatggtggcctcactgccagcacgtactcttacttggggggttttgactcctcttccaatgtcctggccgggcaactgcggggtgtgccggtagccggcacgctggctcatagcttcgtcacctcattctccggaagtgaagtcccgccggatcccatgctcgcacccgccgctggggaagggccgggtgtcgaccttgctgccaaggcccaagtctggctcgaacaggtgtgtgctcacctagggctgggggtccaggaaccacatccgggggagcgagccgcatttgtggcttacgcactcgcatttcctcgcgcgttccaggggctgcttgacacatattccgtttggcgcagcggactgcctaactttctggctgtcgctctggcgctcggcgaattgggataccgggccgtcggagttaggctagattccggtgatctgcttcagcaggcccaagaaattcgtaaagtgttccgcgccgccgcggcacagttccaggtaccctggctggagtctgtgctcatcgtggtgtctaacaatattgatgaggaagctctcgcccgacttgcccaggagggatccgaagtgaacgtgatcggcattggcacatctgtcgtgacctgcccacaacagcccagccttgggggagtttacaaattagtcgctgttggaggtcagccccgaatgaagctgaccgaggatccagagaagcagactctgcccggctctaaggccgcttttaggttactgggtagtgatgggtcccctttgatggacatgctgcagttagcagaggagcctgtcccacaggctggtcaagagttacgcgtctggccgcccggagcccaggagccatgcaccgtacgacccgcgcaagtggaacctctcctcagactctgtctgcaacaaggccagctttgcgagccgttgcccagcctggctgagtcgcgtgccctcgcacagctgtcactcagtaggctgtcaccagagcaccggcgtttgcggtcccctgcccagtaccaggtgggtggcggccccccatgccattccgcactttgcgcaccggctctgaccctccccaccgcacctgttttatgctccctccaagtggtactgtctgagagattacaggccctcgttaactccctctgtgctggacagagcccatag

SEQ ID NO: 197295 - DNA, 1578 bp, synthetic construct
  misc_feature 1..1578: note = Description of Artificial Sequence: Synthetic coding sequence
  source 1..1578: mol_type = other DNA
atggccgccgagcaggaccccgaggcccgggccgccgcccggcccctcctaaccgacctctaccaagctacaatggcattagggtattggagggccggcagggctagagatgccgcagagttcgaacttttcttccggaggtgccctttcggcggtgcgttcgcacttgccgccgggcttcgcgactgtgtgcggtttttaagggcttttcgactgagagacgctgatgtacaattcctggcttctgtgctgccgcccgatactgaccctgccttctttgaacatctgcgtgcactggactgctccgaggttacagtccgcgccctgcctgaaggctccctggctttcccaggggtgcctctcttgcaggtaagcggccccttgctggttgtgcagctgctcgagacccccctcctgtgtctggtgtcttatgcaagcctggttgccacaaacgccgcacgattgagactcatcgccggccccgaaaaacgtcttctcgaaatgggattgcgtcgggctcaagggccagacggaggcttgactgcaagtacctacagttatctgggtggttttgattcttcgtctaacgtgctggctggacagctgcgaggagtgccagtggccggcacactggcccactctttcgtaactagcttcagcggaagcgaagtcccaccggatcctatgctggcccctgccgctggcgagggaccaggggtcgatctcgcagctaaggctcaggtctggctagagcaggtttgtgctcatctgggattaggcgtgcaggagcctcatcctggggagcgcgcagccttcgtcgcctatgcattagcttttccccgcgcctttcaagggctactcgacacctactccgtgtggagaagcgggctccctaatttcctggcggtggcccttgctttaggagaactgggatatagggccgtgggggtccgcctggacagtggtgatctactgcaacaggcccaggagatccgcaaagtgtttcgggccgctgctgcccagtttcaggttccttggttggagtctgtgctgatcgtagtctctaacaacattgatgaagaagctctggctcggctggcacaggagggcagcgaggtgaacgttataggcatcgggactagcgtcgttacatgcccgcaacagccgtctctgggaggggtgtataagctagtggccgtgggcggacagcccaggatgaagctaactgaagaccctgaaaaacaaacactccctggttcgaaggctgctttcaggttgttgggctccgacggctcccctctgatggacatgcttcagctggccgaggaacctgttccgcaagccggtcaggaactacgagtgtggccccctggcgcccaggaaccatgtactgtgaggccagcccagctgtgcgagcctctgccctcacttgccgaatctcgcgctctcgctcagctgagcctgtctaggctgagtccggaacacaggcggctcaggtcaccggctcagtaccaagttgtcctcagcgaaaggctgcaggccttggtcaattccttgtgcgccggccagtcaccttag

SEQ ID NO: 197296 - DNA, 1473 bp, synthetic construct
  misc_feature 1..1473: note = Description of Artificial Sequence: Synthetic coding sequence
  source 1..1473: mol_type = other DNA
atggccgccgagcaggaccccgaggcccgggccgccgcccggcccttgttaactgacctatatcaagcgaccatggcccttgggtattggagggccggacgtgctcgggatgctgccgagtttgagctgttcttccgtagatgtccctttggcggtgcttttgccctggcagcgggcctgagggattgtgtacgtttccttagagcatttcggctgcgtgatgcagacgtccagttcctagcctctgtgcttcctcccgatacggacccagcgtttttcgaacatctcagggcactcgactgcagcgaagtaaccgtgcgggccctgccagaaggcagcctggccttccccggcgtccccctcttgcaagtctcggggcctcttctggtcgtccaactgctcgaaacccctctgttgtgcctggtgagctatgcctcactggtggcaactaacgccgctcgacttcggctaatcgccgggcctgagaaacggctgctcgaaatgggactacggagagcacagggcccagatggaggcctgactgccagtacatatagttacttaggaggcttcgatagctcctcaaatgtccttgccgggcaactccgaggagtcccggtggccgggacactggcgcattctttcgtgacaagcttctccggcagcgaagtgcctcctgatccaatgcttgcccccgcggccggggaggggccaggtgtagatctggcggccaaggcgcaggtttggttggaacaagtctgtgcacacttgggtctcggagtacaggaaccgcacccgggggagagggcagcctttgttgcctacgccctcgcgttccccagagcctttcagggtttgttggacacctactctgtttggagatctggcctgcctaatttccttgccgtggcccttgccctcggagaactcggatatagagccgtaggagttcgattagactccggcgacctgctgcaacaggcacaggaaattcgaaaggtgtttcgcgcagcagccgctcagtttcaagtaccttggctggagtcagtcctgattgtggtctctaataatattgatgaagaggctctcgcccgtctcgcccaggaggggagtgaggtaaacgtcatagggattggaacatcagtcgtgacatgcccccaacagccaagcctcgggggcgtgtacaagttggtagccgttggtggacagccgcgcatgaagttgaccgaggatccagagaaacagacactgcccggatcgaaggcagcttttagacttttgggaagcgacggctccccgctgatggacatgttacagctcgccgaggaacctgtgccccaggcgggccaggaattgagggtttggcctccaggcgctcaggaaccatgcaccgtgcgtccagcccaggtggaaccactattaaggctttgcctgcagcagggccaggtcgccgcacctcctccgagttcttag

SEQ ID NO: 197297 - DNA, 1617 bp, synthetic construct
  misc_feature 1..1617: note = Description of Artificial Sequence: Synthetic coding sequence
  source 1..1617: mol_type = other DNA
atggccgccgagcaggaccccgaggcccgggccgccgcccggcccctgttgaccgatctgtatcaagcaacaatggccctcggttactggcgggcggggcgggcccgggacgccgccgaatttgagctgttctttcgtcggtgtccctttgggggagcatttgctttagctgcaggcctgcgagactgtgtgcgcttcctccgggcctttaggttgcgcgacgcggacgtccagtttctggcaagtgtccttcccccagacacggaccccgcgtttttcgagcaccttcgtgccctggactgttctgaggtgaccgttagagctttgcctgaaggttccctcgctttcccaggtgtccccctccttcaggtgtcaggacccctgctggtcgtgcaactcctggaaaccccattattatgtctcgtcagctatgcatccttggtggctactaatgcagcacggctgcgtttgatagccggccccgagaaaagattgttagaaatgggattgcggcgggctcagggtcctgatggggggctcaccgcctctacttactcatacctcgggggcttcgacagttcctccaatgttctggctgggcaactgagaggggtgcctgtggccggcactctggcacatagctttgtgacttctttttccggttctgaagtgccacctgacccgatgctcgctcccgcagctggcgaagggcccggagtggacctagcagcgaaggcacaggtgtggctggagcaggtctgtgctcacttggggctcggtgtacaggagcctcaccccggtgaaagagctgcctttgttgcctacgctcttgcctttccaagagcatttcaggggcttcttgacacatattccgtatggcgcagtgggctgccgaacttcctagccgtcgcactcgccctgggcgagctggggtaccgagctgtcggcgtacgattggacagcggcgaccttctccagcaggcacaggagatccgaaaggtgtttcgggctgccgcagctcagttccaggtgccttggttggagtctgtgctgatcgtcgtgtctaataatatagatgaggaagcactggcgagactggcgcaggagggctccgaggtcaacgtgatcggcattggcacctccgtcgtcacatgtccacagcagcctagtttgggtggtgtttataagctagtagccgtggggggacagccaaggatgaagctcacggaggacccagagaaacagacgttacccggttccaaagctgccttcaggttgcttggcagcgacggctcccccttgatggacatgttgcagctcgctgaggaaccagttccacaagccggtcaagaactgcgcgtgtggccgccgggagcacaggagccatgtactgtgcgccctgcacaggtcgaaccccttctgcgcctctgccttcagcagggacagctgtgcgagccgctcccatccttggctgagtctagggcgttagcccagctctcattaagtcggttgtctccagagcacagacgcttacggtcacccgctcagtaccaggttgtgctgagtgaacggttacaggcactggtgaattctctctgcgcaggacagagcccgtag

SEQ ID NO: 197298 - DNA, 2199 bp, synthetic construct
  misc_feature 1..2199: note = Description of Artificial Sequence: Synthetic coding sequence
  source 1..2199: mol_type = other DNA
atgcccgaggagacccagacccaggaccagcccatggaggaggaggaggtcgaaacttttgcttttcaagctgaaatcgctcagctgatgagcctgatcataaacaccttctatagcaataaggagatcttcctccgagaactaatctctaactcatctgatgcactggataagattaggtatgagagcttaaccgacccctccaagcttgactcgggaaaagagctccacattaatctgatacctaataagcaggatcgaaccttgacaatcgttgatactggcatcgggatgacaaaggccgacctgattaataatctcgggacaatcgcaaaaagcggtacaaaggcctttatggaagccctacaggcaggggccgacatttcaatgataggacagtttggggttggattttactcagcctacctggtggccgaaaaggtcacagtgataaccaagcacaacgacgatgagcagtatgcatgggaatccagcgctggaggatcctttacggtcaggacagatactggggagcccatgggcagagggacaaaagtgatcctgcacctcaaggaagaccagacagaatatctcgaagaaaggcgcatcaaagagatcgtaaagaagcacagccagttcataggttatcccattaccctgtttgtcgagaaagagcgagacaaagaagtgtctgatgatgaagcagaggagaaagaggataaagaggaggagaaagagaaggaagaaaaggagtctgaggacaaacctgaaattgaggatgtggggtcagatgaagaagaggaaaagaaagatggagacaaaaagaagaagaagaagataaaagagaagtacatagatcaggaggaactaaacaaaacaaaaccaatatggaccagaaatcccgatgatattactaacgaagaatatggagagttttacaagtctttaaccaacgattgggaagaccacttggccgtgaagcacttctcggtggagggacagctggaatttcgggcacttctgtttgtgcctcgtagagctccctttgacctgttcgagaatcgaaagaagaaaaataacattaagttgtatgtgcgccgagtctttattatggataactgtgaggagctcataccggaatatttaaatttcattcggggcgttgtagactctgaggacctgcccctgaacatttccagggagatgttacagcagagcaagattctcaaggtaatcagaaagaatttggtgaagaagtgtttggaactgttcacagaactagccgaggataaagagaactataagaagttttacgagcagtttagcaagaatattaaactgggcatccacgaagacagccagaatagaaagaaactgtcggagctgcttcggtattacacctcggcttcaggagatgagatggtgtctctaaaggattactgcacaaggatgaaggaaaaccagaaacatatctactatatcacgggcgaaacaaaagatcaggtcgcgaacagcgcgttcgtcgaacggctgcgaaaacacggcttggaggtgatttacatgatagagcccatcgatgagtattgcgttcagcagctgaaggaattcgaagggaagaccctagtgtccgtaacgaaagaaggcctggaattgcctgaggatgaggaagaaaaaaaaaagcaagaggagaagaaaaccaagttcgagaatctgtgtaaaatcatgaaggacattctggaaaaaaaagtcgagaaggtcgtagtgtcgaatagactggtgactagcccttgctgcattgtgacctcaacctacggatggacagcaaatatggagagaatcatgaaggcccaagcgctccgcgataactcaactatggggtatatggcagcgaagaaacacctggagattaatccggaccattccattattgagaccctgcgccaaaaagcagaagccgataaaaatgataagtctgttaaggacttggttatcctgttgtacgagactgctctcctgtcttcaggttttagtcttgaagacccgcagacacacgccaatagaatctacagaatgatcaagttaggtctgggcatagatgaggatgaccctaccgcggacgacacatccgctgccgtcactgaagagatgcctcccctggaaggcgacgatgacacgtcccggatggaagaagtggattag

SEQ ID NO: 197299 - DNA, 2910 bp, synthetic construct
  misc_feature 1..2910: note = Description of Artificial Sequence: Synthetic coding sequence
  source 1..2910: mol_type = other DNA
atggagggcgaccgggtggccggccggcccgtgctgagcagcctgccagtcttgttgctactgccgctgttgatgctacgggcggctgctctgcacccagatgagctgtttcctcacggcgagagctggggtgatcagctcctgcaggaaggtgatgatgagtcatccgccgttgtgaaactcgccaaccctttgcatttctatgaggcccggtttagcaacctctacgttggcaccaacggcattatttcgacacaggacttcccccgggaaacccaatacgtcgactacgattttcctaccgactttccagcaatcgctccttttctcgccgacattgatactagtcatggaagaggcagggtgctatatcgcgtaaatggaaaagtctcaggacacttgcacgtcgggcatacccctgtccacttcactgatgtggacctgcatgcatatatcgttggcaatgacggcagggcctacactgcgatctcacatatcccccagccggcagctcaggcgttgctccccttgacccccatcggtggcctgtttgggtggctgttcgccctcgagaaacccggctcggagaacggctttagcttggcgggcgctgctttcacacacgacatggaggtaaccttttacccgggagaggagactgtgcgtatcacccagacagctgaggggctagacccagagaactacctgtccatcaaaaccaacatccagggccaagtgccttacgtctcagctaacttcaccgctcatatatctccttataaggagctgtaccactacagcgattccaccgtgacatctactagttcccgagactactccctgacatttggcgcaatcaatcagacatggtcttataggatccatcagaacatcacataccaagtatgtaggcacgctccacgtcatccatcttttcccaccacccagcaactcaacgtcgatcgggtcttcgctttgtacaacgatgaggaacgtgtgctgcgcttcgccgtgactaatcaaataggccctgtgaaagaggattctgatccaactcctggtaacccctgctatgatggaagccacatgtgtgataccaccgccagatgtcaccccggaactggggtggattacacctgcgaatgcgcatccggttaccaaggcgacgggcggaactgtgttgacgagaacgaatgcgctacaggattccaccggtgcgggccaaactccgtgtgcatcaacctgcctggtagctaccggtgcgagtgcagaagcggttatgagttcgcagacgaccgacatacatgcattctaatcacgcctccagcaaacccctgtgaagatggcagtcatacttgcgcacccgcaggccaggcgcgttgtgtgcaccacggaggaagtacgtttagttgcgcctgcctgccagggtatgccggtgatggtcatcagtgcacagatgttgacgagtgcagcgaaaataggtgccaccctgccgcaacttgctacaatacgcctgggagctttagctgtaggtgtcaacctgggtattatggagatggttttcagtgcattccagacagtactagttccctcacaccctgcgagcagcagcaacgccatgcccaggcacagtacgcataccctggagctagatttcacattccacagtgcgatgagcaagggaactttcttcccttacagtgccatgggagtacagggttctgttggtgtgtagatcctgatggtcatgaagtcccaggcacacagactcccccaggaagtacacccccacactgtgggccaagcccagaacctacccagagaccccccaccatctgcgagcgatggagagagaacctgttggagcattacggaggcactccccgcgacgaccagtatgtgccccaatgtgatgacctcggtcacttcatccccttgcagtgtcacggcaagagtgacttctgctggtgtgtagataaagacggccgggaagtgcaagggactaggtcccagccagggacaacaccagcctgcatccccaccgtggccccacctatggtgcgacctacgcccagacctgatgtgaccccgccttccgtgggcacattccttctgtatactcaggggcagcagattggctacctgcctctcaacggcaccaggctccaaaaggatgctgccaaaacgctcttatcgctccatgggtcaattattgtgggaattgactacgactgccgggagaggatggtgtactggactgacgtggcaggcagaaccatatctagagctggactggagcttggagccgaaccagaaactatcgtgaactcaggcctcataagcccggaggggttggccatcgaccacatccgaaggacgatgtattggaccgactcggtgctcgacaaaatcgagagtgcactgttggacgggtccgagagaaaagtacttttttacaccgatttagtgaacccacgcgccatcgcagtagatccaatcaggggtaatctgtattggaccgattggaaccgagaggctcccaagatcgagacatccagcctggatggagagaaccgcaggatcctgatcaataccgatatcgggctgccaaacggactgacctttgatcctttctcaaaactgctctgctgggccgacgctggaaccaagaaactggagtgtaccctcccagatggaaccggcagaagggtaatacagaacaacctcaaataccccttcagtattgttagctacgcagaccacttttaccacactgattggcgacgcgacggcgttgtgtctgtgaataagcactcggggcagttcaccgatgagtatcttcccgagcagcgcagccatctctatgggatcactgctgtatacccctactgtccgaccggaagaaagtag

SEQ ID NO: 197300 - DNA, 3543 bp, synthetic construct
  misc_feature 1..3543: note = Description of Artificial Sequence: Synthetic coding sequence
  source 1..3543: mol_type = other DNA
accccccagaccgagcggatcacccacagcagcatcagctggagcttcctgcttagattttccaggggcaagctgctgatgctgcgtgctgctgctctccacccagacgagctctttccacacggggaaagttggggagatcagctccttcaggagggcgacgacgagtcttctgctgtcgtgaagctggctaatcctttgcacttctacgaagcccggttctccaatctgtacgtcggcacgaacggtatcatctctacacaggacttccctcgggagacacagtacgtcgactatgacttccccaccgacttcccagccatcgctccatttcttgctgacatcgatacctcccacggcagaggccgcgtcctttatagagaggacacctctccagccgtgctagggttggccgcccgttatgtccgcgctgggttcccaagaagcgcaagatttaccccaactcatgctttcctcgccacctgggaacaggtgggcgcatacgaggaggtgaaacggggcgcgctgcccagtggcgaactgaacacgttccaagctgttttggcctccgacggttctgactcttatgcgctctttctctacccagcaaatggactgcagtttttaggcacacggccgaaagagtcatataatgtgcaactgcagttacctgcccgggtgggattttgtagaggtgaggcagacgatctgaaatcagagggcccatactttagcctgacctcgaccgagcagagcgttaagaatctgtatcagttgtccaatctgggaataccaggagtgtgggccttccatatcggttcgacctctcctttagataacgtgcggcccgccgctgtgggcgatctgtctgccgctcattcctcggtgccactggggcgctcattcagccatgccacggctctcgagtcagactataacgaggacaacttggactattatgacgtgaatgaggaagaggccgagtacctgcccggcgagcccgaggaagccctgaatggacatagttcaatcgacgtctcattccagtcaaaagttgacaccaagcccctggaagaaagtagcactctggacccccataccaaggagggaactagtctcggcgaggtgggagggccagacctgaaaggccaggtggagccttgggacgagcgagagacacgctcacctgcaccccctgaggtagacagggactcgctggccccctcttgggagacgccccctccttatcctgaaaatgggagcattcagccttaccccgatggcggaccggtgccttccgagatggatgtgccaccagcacatcctgaggaagaaattgtgctgagaagctatcccgccagtggtcatacaacgccactttccagagggacctacgaagtggggctcgaagacaatattggcagcaacacagaagtgtttacatacaacgcagcaaataaggaaacctgtgagcacaatcaccggcagtgctctcgccacgcattctgtacagattatgctacagggttctgctgtcactgccagtctaagttctatgggaacgggaagcactgcctccctgaaggcgcgccccacagagtcaatggcaaagtgtcgggacacctgcatgtcggccacaccccggttcactttacagatgtggacctccacgcatatatagtcggaaatgatgggagagcatataccgccatctctcacattccccaacccgcagctcaggctcttcttccccttactccaattggtggactgtttggatggctcttcgccttggaaaaacctggcagtgagaacgggttctcactcgctggggctgcctttacgcacgatatggaggttaccttctacccaggcgaagaaactgttcggatcacacagaccgctgagggtctggaccctgagaattacctctccattaagaccaacatacagggccaggtgccttatgtgtcggcaaatttcaccgcccacatttcaccctataaagagttgtaccactattcagattctacagtcacatctacatcttcaagggactacagcctcacattcggcgccatcaatcagacctggagctacaggatccaccagaatatcacctaccaggtgtgtcgccacgcaccccggcacccatctttcccaacaacgcagcagctcaacgtcgaccgagtctttgcactgtacaatgatgaagaaagggtgttgcggttcgccgtcacaaaccagattggccctgttaaggaggacagtgacccaacccccggaaatccctgctacgacggaagccacatgtgtgatactacggctaggtgccaccctgggacaggggtggactacacctgcgagtgtgcctcaggttaccagggtgacggcaggaattgtgttgatgagaacgagtgcgctactggttttcatcgctgcgggcctaactcggtctgtataaacttacccggatcttaccgctgcgagtgccggagcggatatgaattcgccgacgatcggcacacctgtatcctcatcacaccacccgctaatccttgcgaagatggaagtcacacttgcgcgcctgccggacaagcccggtgcgtacaccatggcgggtctacattctcttgtgcctgtttgcctggatatgccggggatgggcatcagtgcaccgatgtcgacgagtgtagtgaaaacagatgtcatccggcagcaacttgctacaatactcctgggagcttcagttgtcgatgtcagcctggctactacggggatggattccagtgcatccccgacagtacctcgagtctgactccctgcgaacagcaacagagacatgcgcaggcccagtacgcttacccaggtgccagatttcatatccctcagtgtgacgagcagggtaactttttgccattgcagtgtcacggatctaccggtttttgttggtgtgtggaccctgacggtcacgaagtccctggcacccagacaccgcccgggagtacccccccacactgcggaccctctccagagcccacacaacgcccccctacgatatgtgaacgatggcgagagaacctgcttgaacattatgggggtacacctcgggatgatcagtatgtgccccagtgcgacgacctgggacactttattccgctccaatgtcatgggaagtccgatttttgttggtgtgtggacaaggacgggcgagaggtgcagggaacacggagccagcccggcactacccccgcttgtatccccacggttgcccctcctatggtcagaccaactcctcggcccgacgtgactccgccctctgtaggtaccttcctgttatacacccaggggcagcagatcggatacttgccactcaatggcacgcggctccaaaaggacgcagcaaaaactctgctgagcctgcacgtgaagtggatctcacctgtcggcggccgagcggcgtggctttcacagtgggaacccccgcatcgtccctgttgttctgaggtggactggtgccgcgaggtgctagagggattttag

SEQ ID NO: 197301 - DNA, 3825 bp, synthetic construct
  misc_feature 1..3825: note = Description of Artificial Sequence: Synthetic coding sequence
  source 1..3825: mol_type = other DNA
atggagggcgaccgggtgaagctggccaaccccctgcacttctacgaagccagattcagcaatctgtacgtcggaacaaacgggatcatttccacgcaagactttccacgggaaacacagtacgtggattacgacttcccaaccgactttcccgcgatagccccttttctcgctgatatcgacacgagtcatggtcgtggccgagtactgtatcgtgaagacacgagccctgctgtccttggcttggcagctcggtatgtccgggccgggtttcctagatccgcccgcttcacgccaactcacgccttcttggcaacctgggaacaggtgggtgcttacgaagaagtgaaacggggcgcactcccgagcggagaactgaacaccttccaggccgtgctggccagtgatggcagcgacagttacgctctttttctgtacccagccaacggtctgcagttcctgggtacccggccaaaagagagttacaacgtgcagctgcagcttccggcacgggttgggttctgcagaggggaagccgatgacttgaagagtgaaggaccctacttttcgttgacctccacagaacagtctgtgaaaaacctctatcagctgtccaatctggggattcctggcgtttgggcctttcacattggtagcaccagccccttagacaacgtgagaccagcagctgtcggcgatctcagcgcggcgcatagtagcgtcccccttggacggtcattctctcatgccaccgctctggagtctgattataatgaggacaatctggattactacgacgtgaacgaggaagaagcggagtacctaccaggggagcctgaagaggctctgaatgggcactcctcgatcgacgtgagcttccagagcaaggtagacaccaagcccctggaagaaagctctaccctcgatcctcataccaaggaaggcactagcctgggggaagttggtggacctgatctgaaggggcaggtggagccctgggacgaaagagaaacaaggagccccgcgccccccgaagttgaccgggatagcctggccccctcatgggaaacgccccctccataccccgagaacggctcgattcagccatatcctgatggcggacctgtaccctccgaaatggatgtgccacctgcccatcccgaggaagagatcgtcctgcgctcatacccagcaagcggacacacaacacccctttcccgcggaacatatgaggtgggtctagaggacaatataggttccaatactgaggtcttcacatataatgcagcaaataaagaaacatgcgagcacaaccatcgacagtgcagtagacacgctttctgcactgattatgctaccggtttttgctgtcactgccagtcaaagttttatgggaacgggaagcactgcttacctgagggtgccccacatcgcgtgaatgggaaggtttctggccacttgcacgtgggccatacgcctgtgcattttacagacgtggaccttcacgcctacatcgttgggaacgatggccgcgcctatactgccatatcgcatattccgcaaccagcggcacaggctttgctgcccttgactccaatcggaggtctgttcggctggttgtttgcattggagaaacctggcagtgaaaacggcttcagtttagccggcgctgcattcactcacgatatggaggtgaccttctatcccggggaagagaccgtccgaatcacacagaccgccgagggccttgaccctgagaattacctgtcgattaagactaatatacagggccaggtgccttacgtatcagccaatttcaccgcacacatctccccttataaggagttgtaccactattccgacagcacagtgacctccacgtcctctcgggattattcactcacatttggggccataaatcagacctggtcctataggattcatcaaaacatcacctatcaggtatgtcggcacgcccccaggcatccctcctttcctacaacccagcagttgaatgtggatagggtctttgccctgtataacgatgaagagcgggtgctgagattcgccgtgacaaatcaaatcggccctgtgaaagaagactccgaccctacaccaggaaatccttgctacgatggctcgcatatgtgcgatacaaccgcacggtgtcatcctggaactggtgttgattatacctgcgaatgtgcttcagggtatcagggcgacgggaggaattgcgtggacgagaacgagtgcgcaactggctttcatcgctgcggcccaaactccgtctgcatcaatcttcccgggtcctatcgctgcgagtgcagaagcgggtatgaatttgcggacgatcgtcacacgtgtatttacgtcgatgagtgcagtgagaacagatgccaccccgcagccacctgttataacactcctggcagtttttcatgcagatgccagcccggctattatggggacgggttccagtgcatacctgactcaacttcatccttgacaccctgcgagcaacagcagcgacatgctcaggcgcagtacgcttatccaggggcacggtttcacatccctcagtgtgacgaacagggaaatttcttacccctgcaatgccacggcagtacgggtttttgctggtgcgtggacccagatggacacgaagttccgggcactcagaccccgcctggctcaacacccccacattgcgggccatcaccagaacctactcagcgcccacccaccatctgtgaaagatggcgcgagaatctcctcgaacactatggcgggacacctagggatgaccagtacgtcccccagtgcgatgacctcggccacttcattccgctgcagtgtcatggtaagagtgatttttgctggtgcgttgataaggacggacgtgaagtgcagggtaccaggagtcaaccaggcactacacccgcctgcatccctactgtagcgcctccaatggtgagaccgacgccacggccggatgtgacccctccatctgttggtacatttctactttatacacaaggtcagcaaatcggatatttacctttgaacgggacaaggttgcaaaaagatgccgcaaaaaccctgctttcactgcatgggagcattattgtcggcatagactatgactgcagggaaaggatggtgtattggacagatgtagctgggcgcaccatcagtcgggcaggactcgagctgggggccgaacccgagaccatcgttaacagcggcttaattagtcctgagggactggctattgaccatattaggcgcaccatgtattggacagacagcgtccttgataagattgagagtgcactgcttgatggatccgaaaggaaagtcctcttctacacagacctcgtgaaccctcgcgcaatagccgtcgatccaatccggggcaacctttattggaccgactggaaccgagaagcccccaagatcgaaaccagctcacttgatggagagaaccggagaatactcattaatacagatatcggactgccaaatgggctgacattcgaccctttctctaagctgctgtgctgggcagacgcaggcactaagaagctggagtgtaccctccccgacggcacggggaggcgggtgattcagaataatcttaagtaccctttttccatcgtatcgtatgcagaccatttctatcacacagattggcggcgggatggtgtcgtctccgtcaataaacacagcggacaattcacggatgaatacctgcccgagcagcgttcccatttgtacggcatcaccgctgtgtacccctattgtccaacaggaagaaagtag

SEQ ID NO: 197302 - DNA, 3837 bp, synthetic construct
  misc_feature 1..3837: note = Description of Artificial Sequence: Synthetic coding sequence
  source 1..3837: mol_type = other DNA
atgaccgcccggggcctggccctgggcctgctgctgctgctgctgtgtccagcacaagttttctctcagagttgcgtttggtatggagaatgcggtatagcctacggtgacaaacgttataattgcgagtatagtggccctcctaaacccctcccgaaagacggatatgatctcgtgcaggagttgtgccccggttttttttttggaaatgtgtctttgtgttgcgatgtgaggcagcttcaaactctcaaggacaatctccaactgccattgcaattcctcagccgctgcccatcatgcttctataatctcctcaacctgttctgcgaacttacgtgcagccctcggcagagtcagttcctgaatgtcacggccaccgaagactacgtagatccagtgacgaatcagacaaagacaaatgtcaaagagctgcaatactacgtggggcagtctttcgccaacgcaatgtataatgcctgtagagacgtggaagccccctcaagtaacgataaggctctgggattactgtgtggtaaagatgccgacgcgtgtaacgcaaccaactggattgaatacatgtttaataaggacaacggccaggcgccgttcaccatcacacctgtgttcagcgactttcctgtccatgggatggaaccaatgaataatgcaacaaaagggtgcgacgagtccgttgatgaggtaactgctccttgtagctgtcaggattgctctatcgtatgcgggccaaagccacagccccctccgcccccagccccgtggacaattctagggcttgacgcgatgtacgtcattatgtggattacttatatggctttcttgctggtgttctttggagcgttttttgcagtatggtgttacagaaagcggtacttcgtttccgagtacaccccaatcgactccaatatagcattcagcgtgaatgctagcgataaaggtgaagccagctgttgcgatccagtcagtgccgctttcgaagggtgcctccgaaggctgttcactaggtggggaagcttctgtgtgaggaaccctggttgcgtgattttcttctcgttggtatttatcactgcatgttcctcgggacttgtatttgtgcgcgtcaccactaaccccgtagacctgtggtcagctccttccagccaagcccgactagagaaagagtacttcgaccaacactttggaccgttctttcgcactgagcagctaataatcagagcacccttaactgataaacatatttatcagccttacccaagcggagcagacgtccccttcggcccacctctggatatccaaatccttcatcaggtgttagatttgcaaatagccatcgaaaacatcaccgcctcctatgacaacgagactgttactctgcaagatatctgcctggccccactgtctccctacaatacaaactgtaccatcttatccgtgcttaactattttcagaacagtcattccgtgctagaccataaaaagggagacgatttctttgtgtatgcggactaccatacccacttcctttattgtgttagggcaccagcatctctcaatgataccagcctgctccacgatccttgcctggggacattcggcgggcccgtgttcccctggctggtgctaggaggctacgacgatcagaactataataatgctactgcactcgttatcacatttccagtaaataactactataatgatacagagaaactgcaacgcgctcaagcatgggagaaggaattcattaattttgtgaaaaactataaaaatccaaaccttacaatttctttcactgccgaacgcagtatcgaggatgagctgaatagagaatcagacagcgatgttttcaccgtagtgatcagctacgccatcatgtttctgtacattagcttggcactgggccacatgaagtcatgcaggcgcctcctcgtagattccaaggtgagccttgggatcgctggtatactcatagtgctcagttcggtggcatgcagcctgggagtgttctcgtacataggacttcccctcaccttgatcgtcattgaggtgatcccatttctcgtattagctgtcggggttgataatattttcatattggtccaggcataccagcgagacgagaggcttcagggcgagacattggatcagcaactggggagggtcctgggagaggtggccccctcaatgtttctgagctcattcagcgaaaccgttgcattcttcttaggcgccctctcagtcatgcctgccgtccacactttttctctgtttgccggcctggcggttttcatcgactttttactgcagattacgtgtttcgtctcgctgttggggcttgacatcaagaggcaagagaaaaatagactcgacatcttctgctgtgtccgaggcgcagaagacgggacttccgtacaggccagtgaatcctgcctctttcgatttttcaagaactcttacagtcccctgctgttgaaagactggatgcgccctatcgtgatcgccatattcgtgggagtgttgtcattctccatcgccgtgctcaacaaagtggacatcggtttggatcagtctctgtccatgcccgacgatagctacatggtggattatttcaagagcatatcccagtatctccacgcagggccacccgtctatttcgtgctcgaggagggccacgattatacttccagtaaggggcagaacatggtttgcggaggaatgggatgcaataatgatagtctggtgcagcaaatctttaatgctgctcagctagacaactacacccgcatcggctttgccccatccagttggatcgacgactatttcgactgggttaaacctcagagctcttgttgcagggtagataacatcacagatcagttttgcaatgcctcagtcgttgaccccgcatgcgtgagatgccgaccattaacccccgaaggaaagcagaggccccaggggggcgactttatgaggttcttgccaatgtttcttagtgacaaccccaaccctaagtgcgggaagggtggccatgcagcttattctagtgccgtcaacatacttctagggcacggaacaagagtaggggcaacatattttatgacttaccacaccgtgctacagacctcagccgattttatcgacgctctgaagaaagccagattgattgcatccaacgtgaccgagacgatgggaatcaacggttcagcataccgtgtattcccatattctgttttctacgtcttctatgaacagtacctcactatcattgacgacaccatctttaacttgggtgtgtctctcggagccatttttctggttaccatggtcctcctgggctgtgagctttggtctgccgtcatcatgtgtgctactattgccatggtcctggtgaacatgttcggcgtgatgtggctgtggggaatcagcctgaatgcggtcagtctggtaaatcttgttatgtcgtgtggcataagcgtggagttctgttctcatataacacgcgctttcacggtgagcatgaaaggttctcgcgtcgagcgggccgaagaggcactggcgcacatggggagctctgtgttttccggcataactctcactaagtttgggggtatcgtggtgctggcttttgcaaagtctcaaatctttcaaattttttatttccgcatgtatttagccatggtgctgctgggcgcaacacacgggctgatcttcttgccagtactgctctcatacattggccctagcgtcaataaggccaaatcgtgtgctacagaggaaaggtataaaggtaccgagcgtgagcgcttgctgaatttctag

SEQ ID NO: 197303 - DNA, 2883 bp, synthetic construct
  misc_feature 1..2883: note = Description of Artificial Sequence: Synthetic coding sequence
  source 1..2883: mol_type = other DNA
atgtacgtgatcatgtggatcacctacatggccttcctgctggtgttttttggcgcattttttgccgtgtggtgctacaggaaacgctacttcgtatcagaatacacaccaatcgattccaacattgccttctccgtgaatgcttccgacaagggtactgcctggttgcttacctccacatttccatcaagtcccgtgctgcctggtgaggcctcctgttgcgaccccgtgtctgccgcctttgagggctgccttcggaggctgtttactcgttggggatccttctgcgtgcgaaaccccggctgtgtcatctttttctccttggtttttattacagcttgttcatctggcttggtctttgtacgagttaccaccaatccagtcgatctttggtctgcccccagtagtcaggctcggttggaaaaggagtactttgaccagcatttcggccccttttttaggaccgagcagctgatcataagagccccactcacagataagcatatctatcagccatatcccagtggtgccgatgttccgttcggaccgccgctagatatacagattctgcatcaggtcttggacctgcagatcgcaatcgaaaatattactgcatcttatgacaatgagaccgttacgctgcaggacatctgcctagcccccctcagcccctacaacacaaattgtacgattctcagcgtcctgaactactttcagaactcacattccgtgctggatcacaaaaagggggatgacttcttcgtgtatgccgactaccatactcatttcctctattgcgtgcgctttatcaattttgttaagaactacaaaaaccctaacctgaccatcagcttcacggctgagcgaagcatagaggatgaactgaatcgggagtcagattccgacgtgttcacggtagtgatatcatacgccatcatgttcctgtacattagcctggcacttggccacatgaagtcgtgtcgccggctgctggtcgactcaaaggtgagcctggggatagcaggcattctcattgtgttgtccagcgtggcttgcagccttggggtattttcgtacataggtctgccccttaccctgatcgtgatcgaggttatcccctttctggtccttgccgtgggggtggacaatattttcatactagtccaggcatatcaaagagacgaaagactgcagggagagaccttggatcagcagttgggcagggtcttgggcgaagtggcgcctagcatgttcctctcaagtttcagtgaaaccgtggccttctttctaggagcactaagtgtgatgccagcggtccacacctttagtctgttcgctggattagccgtgtttattgactttctgttacaaattacctgcttcgtctccctgctagggctggatatcaaacgccaggagaagaaccgccttgatatcttttgctgtgtccgaggcgccgaagacggcacttcagtccaagcctccgaaagttgcctgttccggtttttcaaaaacagctatagccccctgcttctcaaggattggatgaggccaattgttatcgccatctttgttggggttctgtcgttctcaatcgccgtcctcaacaaggttgacatcgggcttgatcagtcactctctatgcctgatgactcttatatggtagactattttaagtctatttcccaataccttcacgcgggaccccccgtgtactttgttttagaggagggtcacgattatacgtcaagcaaggggcagaacatggtgtgcggagggatggggtgtaacaatgactccttagtgcagcaaatctttaacgccgctcagctggataactatacccgtatcggatttgccccttcttcgtggattgatgattactttgactgggtgaaaccccagagctcttgttgtcgggtggacaacattacggatcagttctgcaatgccagcgttgttgatcctgcatgtgttaggtgccgaccactgacaccagaggggaagcagcggccacaggggggggactttatgaggtttctgcccatgttcctctcggataatcctaatccaaaatgcgggaagggcggtcatgccgcctactcatcagccgtcaatatcctcctgggccacggcacccgggtgggtgccacatacttcatgacttatcacacggtgctccagaccagtgcagatttcattgacgctttaaagaaggcccggcttattgccagcaacgtgaccgaaaccatggggattaacggatcagcttaccgggtcttcccttactctgtattctacgtcttttacgaacagtacttaaccatcatagatgacactatcttcaatctgggggtctcccttggcgcaatttttcttgtgactatggttctgttgggctgcgagctctggtcagctgttatcatgtgcgcgacgattgctatggtactggtcaatatgtttggggtcatgtggttgtggggaatatcgctcaacgccgtatcactcgtaaatctggtaatgtcctgcggaatctctgtcgaattctgctctcacatcacacgcgccttcacagtttctatgaaaggcagcagagtggaaagggccgaggaggccctcgcacacatgggctcaagcgtgttctcaggcatcactctcacaaaatttgggggcattgtggtcctagccttcgctaagagtcagattttccagatcttctatttccgcatgtacctggccatggtgcttctcggggctacacatggtctcatctttctcccggtgctcctgagttacatagggccgtcagtgaacaaggccaagagctgcgctacagaagagcgctataaaggcacagagcgtgaacgcctgctgaatttctag

SEQ ID NO: 197304 - DNA, 2331 bp, synthetic construct
  misc_feature 1..2331: note = Description of Artificial Sequence: Synthetic coding sequence
  source 1..2331: mol_type = other DNA
atgtacaacgcctgccgggacgtggaggcccccagcagcaacgacaaggctctggggttgctatgtgggaaggacgctgacgcctgtaatgccactaattggattgagtatatgttcaacaaagacaatggtcaagccccctttaccatcacgccagtattttcagactttccagtacacggaatggagccaatgaacaatgctacgaaggggtgtgatgagagcgttgacgaggtgactgcgccatgttcttgtcaggattgctccatcgtgtgcggccctaaaccacagccacctccaccgccggcaccctggacaatccttgggctcgacgccatgtatgtgattatgtggattacctacatggcattcctcttagtgttttttggggccttcttcgctgtctggtgttaccgcaagcggtacttcgttagcgaatacactcctattgattccaatattgccttctccgtcaatgcctctgataagggcgaggcttcttgctgtgatcccgtgtcagcagcttttgaaggctgcctgcgcagactgtttacccgctggggctctttttgcgttaggaaccccggatgcgtgattttcttcagtttggttttcatcactgcctgctccagcggactggtgtttgtgagggtcaccacaaacccagtggacctgtggagtgcaccttcctctcaggcccggctcgaaaaggagtatttcgatcaacacttcggccctttttttcggaccgagcaactgattatccgcgcgcccctgactgacaagcatatctaccaaccatatccttctggcgctgacgtacccttcggaccccctttggacatccagattctccatcaggtcctggacttacaaattgccattgagaatattacagcctcatacgataatgaaacggtgacgttgcaggacatctgcctggccccactctctccatacaataccaactgtactatcctgtccgtgttaaactacttccagaactctcactctgttttagaccacaaaaaaggcgacgacttctttgtttatgcagattaccatacacactttctgtattgtgttagagcccccgccagtctcaatgataccagtcttctacatgacccatgtctcggcaccttcggaggtccggtgttcccgtggctagtgcttgggggctacgatgaccagaattataacaatgccaccgcattggtaattacctttcccgtcaataactactacaatgacacggaaaaattgcagagagctcaggcatgggaaaaggagttcattaatttcgtgaaaaattacaaaaaccctaacttgactatcagcttcacggcagaacggtccatcgaggatgagttgaaccgcgagtctgattccgatgtgttcacggtggtgatctcttacgcaattatgttcctgtatatctcccttgctctaggccacatgaagtcgtgccgaaggctgctcgtggactccaaggtgagcttgggaattgcgggaatattaatcgtgctctcatcagtggcgtgttcattgggagtcttctcctacattggtctgccattaacactgatcgtcattgaggtcattccttttcttgtcctcgccgtcggcgttgacaatatcttcattctcgtgcaggcttatcagcgtgacgagcggctgcagggtgaaaccctagaccagcagttaggtcgagttctcggcgaagtcgcccctagtatgtttctctcatcattttccgaaaccgttgctttctttctgggcgccttatccgtcatgcctgccgtgcataccttttccttgttcgccggcctggctgtctttatcgactttctgctgcagatcacatgctttgtgagcttgcttggcttggacatcaagcgacaagaaaaaaaccgactcgacattttctgttgcgtgcgaggagctgaagatggcactagtgtacaagcatccgaatcatgtctgtttaggttcttcaagaattcctactcacccctcctcctgaaggactggatgcgccctatcgtcatagcgatttttgtaggggttttgtcattctcgatcgccgtgttgaacaaagttgatatcggcctcgatcagtcattatcaatgccagacgatagctacatggtggactattttaaaagtatcagtcagtaccttcatgccggccctccagtttacttcgtcctcgaggaaggccatgactacacctcctcaaaaggccaaaatatggtgtgtgggggaatgggttgcaacaatgacagcctggtgcaacagatttttaacgcggcccaactcgacaattag

SEQ ID NO: 197305 - DNA, 369 bp, synthetic construct
  misc_feature 1..369: note = Description of Artificial Sequence: Synthetic coding sequence
  source 1..369: mol_type = other DNA
atgcggttcctggccgccaccttcctgctgctggccctgagcaccgcggcccaggctgagcccgtgcagttcaaagactgcggtagtgtagacggagtgatcaaagaggtgaatgtgtccccgtgccctacccagccctgccagctgtcaaaaggccaatcatactccgtgaacgtaacatttacctcaaatattcagagtaagtccagcaaagcagtagttcacggtatcctaatgggggtgcccgtgccttttccaattccggaaccagacggctgcaaatctgggatcaactgtccaatacagaaggacaaaacctatagttatctgaataagctgcctgtgaaatccgagtatccatctgtttag

SEQ ID NO: 197306 - DNA, 456 bp, synthetic construct
  misc_feature 1..456: note = Description of Artificial Sequence: Synthetic coding sequence
  source 1..456: mol_type = other DNA
atgcggttcctggccgccaccttcctgctgctggccctgagcaccgcagcacaagcagagcccgttcaatttaaagattgtggctcagtcgatggggttattaaggaagtgaacgtgagcccctgccccacacaaccatgccagctgtcaaagggtcagtcgtattccgtgaacgtaacatttacctcgaatattcaatccaaatcctccaaggcagtcgttcatggaatccttatgggcgtgcctgtgccttttcccataccagagccagatggctgtaagagtggaataaattgccccatccagaaagacaagacatatagctacctgaacaagttaccagtgaagtcagagtacccctccataaaactagtggtggagtggcaacttcaagatgacaagaaccagagtctgttctgctgggagatccccgttcaaatcgtgtctcacctgtag

SEQ ID NO: 197307 - DNA, 1053 bp, synthetic construct
  misc_feature 1..1053: note = Description of Artificial Sequence: Synthetic coding sequence
  source 1..1053: mol_type = other DNA
atggacctgaaggccctgctgagcagcctgaacgacttcgccagcctttccttcgccgaatcgtgggacaacgttggtctgttggtggaacctagtcctccacacactgtgaacactctctttctgaccaacgatttgaccgaggaagttatggaagaggtcctccagaagaaggcggatttgatcctgtcttaccatccgcccatttttagacccatgaagaggattacctggaacacttggaaggagagattagtaatccgagctttagagaaccgggttggtatttacagtccccacacggcctatgacgccgcccctcagggggtgaataactggctggcgaaaggcctgggcgcatgtacgtcacggccgattcatcccagcaaggcccccaactaccccaccgaaggaaatcaccgggttgaattcaatgttaattacactcaggatctggataaggtgatgagcgctgtcaagggcatcgatggagtgtcagtgactagttttagcgccaggacgggcaatgaagaacagacgcgaattaatctcaattgcacgcagaaagcgctcatgcaggtggtcgattttctcagtaggaataaacaattgtatcaaaagacagagattctcagtcttgagaagcccctgctgctgcacacaggcatgggccgattatgtacattagacgaaagtgtctcgctcgccacaatgattgacaggatcaaaaggcatttgaaactctcacacatcagactcgcactgggtgtggggcgaactctggagagtcaggttaaggtggtagccttgtgcgcaggctccggcagcagcgtgttgcagggagttgaagccgatctgtacctgaccggagaaatgtctcaccacgatacgctggacgctgcttcccagggtatcaatgtgatcctctgtgagcatagcaatacagagagaggttttctatccgaccttcgcgacatgctggactctcatcttgaaaataaaatcaatattatccttagtgaaaccgatagagatcccctgcaggtagtttag

SEQ ID NO: 197308 - DNA, 759 bp, synthetic construct
  misc_feature 1..759: note = Description of Artificial Sequence: Synthetic coding sequence
  source 1..759: mol_type = other DNA
atgctgagcagctgcgtgcggcccgtgcccaccaccgtgcggttcgtcgactccctgatttgtaactcctcccggagctttatggatctgaaggccctgctgtcctcgttaaacgacttcgctagcctgtcttttgctgagtcctgggataatgtcggtctactggtagagccttctcctccgcacacagtgaacacgcttttcttgaccaatgacttgacggaggaggtgatggaggaagtgcttcaaaaaaaggccgacctgattctgagctaccacccgccaatattccgaccaatgaaacgcataacttggaacacctggaaggagcgtcttgtgattagagccctggagaatagagtgggcatatactccccccacactgcctatgacgcggcaccacagggagttaataattggcttgccaagggcctgggagcatgtacctccagaccaattcaccccagtaaagcccctaactatccgactgaggggaatcatcgcgttgagtttaacgtaaactacacacaggacctggataaagtaatgagtgcagtgaaaggtatcgacggggtgtcggtcacttccttttccgctcggacaggaaacgaggaacagacgagaattaatctcaactgtacacaaaaagccctaatgcaggtggtcgatttcctgagcaggaacaaacagctgtaccaaaagcaccaagacaacaccttttacaagagcgctggatgtcagctcaaattcgtgacctag

SEQ ID NO: 197309 - DNA, 1134 bp, synthetic construct
  misc_feature 1..1134: note = Description of Artificial Sequence: Synthetic coding sequence
  source 1..1134: mol_type = other DNA
atgctgagcagctgcgtgcggcccgtgcccaccaccgtgcggttcgttgactctttaatttgtaactcgagtaggtcgttcatggatctaaaggccctgctaagtagcttgaatgattttgcctctctgtcttttgccgaatcttgggacaatgtgggccttctggtggagccaagcccaccccacacagttaacacactgtttctcactaatgacctgactgaggaagtcatggaggaagtcttacagaaaaaggcagatctaatcttatcctaccatccacctatttttcgacccatgaaacgaattacctggaatacctggaaagagagattggtgattcgggccctcgagaatcgcgttgggatttattcgcctcacacagcttacgatgctgccccccagggtgtgaataattggctcgccaagggactaggcgcctgcactagcaggcccattcatccttcaaaagcacctaactacccaactgaaggaaatcatcgggtggagtttaacgttaattatacgcaggacctggataaggtaatgagcgctgtcaaagggattgacggtgtatcagtgacctcttttagtgcccggaccggaaacgaggagcagacccgcatcaatttgaattgtacccagaaagcgcttatgcaggtcgttgatttcctttcgagaaacaagcaactatatcaaaagacagagatcctcagtctggagaagccactactgctgcacaccgggatgggaaggctttgtacactagacgagtcggtatcactggccaccatgattgaccggatcaagcgacatctcaagttgtctcacattaggctggctctcggcgtcggacgtaccttagagagtcaggtgaaggttgtggctctctgcgccggcagcggaagctctgtcttgcagggagtagaggcagatctgtacctgactggggagatgtcccaccatgacaccctggacgccgcatcacagggcataaacgtgattctgtgcgaacattccaacacggagcggggattcttgtccgacctgcgcgacatgttggattcacatctcgaaaacaagataaatattatactctcagaaacagatagagatcccctgcaagttgtttag

SEQ ID NO: 197310 - DNA, 489 bp, synthetic construct
  misc_feature 1..489: note = Description of Artificial Sequence: Synthetic coding sequence
  source 1..489: mol_type = other DNA
atggacctgaaggccctgctgagcagcctgaacgacttcgccagcttgtcatttgcagagagctgggataatgttggactgctcgtggaaccctccccccctcacacggtgaacaccctttttctgacaaacgatttgaccgaggaggtgatggaggaagtactccagaagaaggccgatttaatcctctcgtaccatcccccaatttttaggccaatgaagcgcattacgtggaatacctggaaagagcgactcgtcatccgggccctggagaaccgagtcggaatctactcaccacacacagcgtacgatgccgcacctcaaggggttaacaattggctggctaagggactgggtgcctgcaccagccgccccatccacccatccaaggctcctaactaccccacggaaggaaaccatagggtggaatttaatgtgaattacactcaggacctggataaggtgatgagcgcggttaagggaatttag

SEQ ID NO: 197311 - DNA, 1134 bp, synthetic construct
  misc_feature 1..1134: note = Description of Artificial Sequence: Synthetic coding sequence
  source 1..1134: mol_type = other DNA
atgctgagcagctgcgtgcggcccgtgcccaccaccgtgcggttcgttgacagcctcatctgcaacagtagtcgatcctttatggacctcaaagctttactgagctctctgaacgattttgcatcactctcgtttgctgaaagttgggataacgttggcctgctggttgagccctcgccaccacataccgtaaacaccctgttcctgaccaacgatcttactgaagaggtcatggaggaagttctgcagaaaaaggctgaccttatcctgtcgtatcatccaccaatatttcgtcctatgaagcggatcacgtggaacacctggaaggagcgactggttattagagctctcgagaaccgtgtcggcatttacagtccgcatactgcttatgatgccgctcctcaaggcgtgaataattggttagcaaagggactgggcgcctgcacttcccggcccatacatccatccaaagctcctaattatcccaccgagggtaaccatcgagttgaattcaacgtgaactacacacaggatttggataaggttatgtccgccgtgaaaggtatcgatggggtgtctgtaacttcattctctgccagaaccgggaacgaagagcagacccgtattaatctaaattgtactcagaaggctcttatgcaggtggtagacttcctttctcgcaacaagcaactctaccagaagacagagatactgtcccttgaaaaacccctgttactgcacaccggtatggggagactctgcaccttagatgaatccgtctcactcgccacaatgatcgatcgtatcaagagacatttaaagctcagtcatatcagattggctctgggtgtaggtagaaccttggaaagtcaggtgaaagtggtcgccctatgcgctggtagtggctcttccgttctgcagggagtggaggctgatctgtacttgacaggcgagatgtcccaccatgacaccctggatgccgcttcccagggcattaatgtaatcttatgcgagcatagcaatacagaaaggggttttcttagtgatcttcgagacatgctggattcccaccttgaaaataagataaacattattctgagcgaaactgatagggatcctctccaagtcgtctag

SEQ ID NO: 197312 - DNA, 858 bp, synthetic construct
  misc_feature 1..858: note = Description of Artificial Sequence: Synthetic coding sequence
  source 1..858: mol_type = other DNA
atgctgagcagctgcgtgcggcccgtgcccaccaccgtgcggttcgtggattctctcatttgtaatagttcaagatcttttatggatttaaaagccctgctgtcttccctcaacgatttcgccagcctgtcattcgccgaatcctgggataatgtggggttgctcgtagagcctagcccccctcacacagtgaacacactgtttttgaccaacgacctcacggaagaagtgatggaagaggtgttgcagaaaaaagcagacctaatattatcttatcacccccccattttccgaccgatgaaacggattacctggaatacatggaaggaaagactagtcattagggctctggagaaccgcgtcgggatctacagtcctcacacggcgtacgatgctgctcctcaaggagtgaataactggctggcaaaagggttgggcgcttgcacatcacgtccaatccacccatctaaggccccaaactatccaaccgaagggaatcaccgggtggaattcaacgtgaattatacccaggatctggataaagtgatgagtgcagttaagggcatcgatggagtgtccgtaacctctttctcagcccgtaccggcaacgaggagcagacccggatcaatctcaattgcacccagaaggctttgatgcaggtggtcgattttctgtcacggaataagcagttataccagaaaacggagatactctcactcgagaagtccctgaagagcaaatcctggccatgcgtgctggtgctgggcgccgctttctgtagagtcttacgactaacattcacctcacaagttaggtgtcccatcatgattctgtggatgctgctgccaaaggagtag

SEQ ID NO: 197313 - DNA, 1134 bp, synthetic construct
  misc_feature 1..1134: note = Description of Artificial Sequence: Synthetic coding sequence
  source 1..1134: mol_type = other DNA
atgctgagcagctgcgtgcggcccgtgcccaccaccgtgcggttcgtggactcactgatttgtaacagttctagatccttcatggacctgaaagctctcctcagtagcttgaacgatttcgccagcctgagctttgccgagtcttgggacaacgtcgggttgctggtagaaccatctcctccccatacagtgaacaccctctttctcactaatgacctcaccgaagaggtcatggaggaagttctgcagaaaaaggccgacctcatactgagctaccatccacccatcttcagacccatgaaacgaatcacatggaatacctggaaggagcgactcgtgattagagcactggaaaacagagttgggatatactctccacacactgcatatgatgcagctccgcagggagttaacaactggctcgcaaagggactaggggcctgcacaagtagaccaatccatccctctaaggcgcccaattatccaaccgaagggaaccatagagtggaattcaatgtgaactacactcaggatctggacaaagtgatgtccgccgtgaaaggcattgacggtgtttctgtcaccagtttctccgcccgaaccggcaacgaggaacaaacccgtataaacttgaactgtacacagaaggcactgatgcaggtagtggactttctgagccggaataagcaactgtatcaaaagaccgagattctgtccctggaaaagccactacttcttcatacaggaatggggcgcctctgcacgttagacgaatcagtgagtctggctactatgattgatcgaattaagcgtcatctgaagctgagccacatacgcctagcccttggcgtgggtagaaccctcgaatcccaggtgaaggttgttgccctgtgcgcaggttctggcagctctgttctgcagggggtagaggctgatctttatctgactggagaaatgagtcaccacgataccctggacgctgcgagtcaggggatcaacgtaatcctctgtgagcattctaacactgagcgcggcttcttgtcagatttgagagacatgctcgatagtcacttagaaaacaaaatcaacattattttgagtgagacagacagagacccattgcaggtggtgtag

SEQ ID NO: 197314 - DNA, 630 bp, synthetic construct
  misc_feature 1..630: note = Description of Artificial Sequence: Synthetic coding sequence
  source 1..630: mol_type = other DNA
atggacctgaaggccctgctgagcagcctgaacgacttcgccagcctcagtttcgcggaatcctgggataacgtgggcttactggtggagccgtcccccccccataccgttaacacactgttcctgaccaatgatttaacagaggaagtgatggaagaagtgctccaaaagaaggccgatctgatcctgagctatcatcctcctatcttccggccaatgaaaagaattacctggaacacctggaaagagcgcctcgtgattagagccctggagaaccgggtgggcatatactctccgcatacagcttatgatgctgcccctcagggagtgaataattggctggctaagggcttgggggcgtgcacatcacggcccatccacccatccaaagctccgaactatccgaccgaagggaaccatcgcgtggagtttaatgtgaattacacacaggatttagacaaagtcatgtctgctgtaaaaggaattgacggggtgtcagtcacaagtttcagcgcgcgtacaggtaacgaggaacagacaaggatcaatttgaactgtacgcagaaggcgctcatgcaagtggtcgatttcctaagccggaataaacagctgtatcaaaagacagagtag

SEQ ID NO: 197315 - DNA, 492 bp, synthetic construct
  misc_feature 1..492: note = Description of Artificial Sequence: Synthetic coding sequence
  source 1..492: mol_type = other DNA
atgctgagcagctgcgtgcggcccgtgcccaccaccgtgcggttcgtcgactctctaatttgcaacagctccaggagttttatggaccttaaagcgctcctatcctcattaaacgattttgcctctttgtctttcgccgagtcctgggataatgtgggattgctggtggagccatcccccccacacacagtcaatactctttttctgacaaacgatttgacagaagaagtgatggaagaggttttgcagaagaaagcggacttgattctcagctatcacccacccatcttcaggccaatgaaaagaatcacttggaacacctggaaggagaggctggtgatccgcgccctcgagaacagagtgggtatctattcaccacatactgcctatgatgctgccccccagggggttaacaactggctcgctaagggcttaggtgcttgtacatcaaggccgatccacccttccaaagcgcctaattatcccacttag

SEQ ID NO: 197316 - DNA, 4749 bp, synthetic construct
  misc_feature 1..4749: note = Description of Artificial Sequence: Synthetic coding sequence
  source 1..4749: mol_type = other DNA
atggccggccccggcggctggcgggaccgggaggtgaccgacctgggccacctgcccgaccccacaggaatattcagtttggataaaacgatcgggcttggaacatacggccgtatatatctgggcctccacgaaaagacgggggcttttaccgcggttaaggtgatgaatgcacggaagacacctcttcccgagattggcagacgcgtgagagtgaacaaataccaaaagtctgttggttggcggtactctgatgaggaggaggatctccgcaccgagctcaacctcctccggaaatacagcttccataaaaacatcgtctcattttacggggctttttttaagctgagccccccgggacagcgccaccagctctggatggtcatggagctatgtgctgcagggagtgtcacagatgtcgtccggatgaccagcaatcagtcactcaaggaggattggatcgcatacatttgccgagagatcttacagggactggctcacctgcatgctcacagggttatccacagagacataaaaggacaaaacgtgttgttaacacacaatgccgaggtaaagcttgttgactttggggtttccgctcaggtttcccgaaccaacggccggaggaatagctttatcggaacgccttactggatggctccagaagtgatcgactgtgatgaagatccacgacgctcctatgattatcgctctgatgtgtggtccgtggggatcaccgcaattgaaatggcggagggagcgcccccactgtgtaatctccagcccctcgaggccctctttgtcattctgagggagagcgcgccaacagtcaagagtagcggatggtcaagaaaattccataatttcatggagaaatgtactatcaaaaatttccttttccgccccacatccgcaaatatgctgcaacatccctttgttagggacattaaaaatgagaggcacgtcgtggagagtctgactcggcatttaaccggcattatcaaaaagcgacagaagaaaggcattcccctgatcttcgagcgggaggaggcaataaaagagcagtacaccgttcgccgcttccgaggcccttcatgcactcacgagctcctgaggcttcccaccagttcgagatgccgaccacttagggtgttgcacggtgagccaagccaaccgcgatggctccctgatagagaggagccccaagtgcaggcccttcagcaactgcaaggcgccgcacgcgtcttcatgccccttcaggctcttgattcagcaccaaaacctcttaagggccaagctcaggctccccagcggctgcagggggcagctcgggtcttcatgccacttcaagcacaggtgaaagcaaaagctagcaaacctctccagatgcagattaaggccccaccgcgtctccgccgcgcagccagggtgcttatgcccttacaggcccaagtcagagcccccaggttacttcaggtgcagtctcaagtaagcaagaaacagcaagctcagacacagactagtgagccccaggatctggatcaggtcccagaggaattccaaggacaggatcaggtccctgaacagcaaagacagggacaggcccccgagcagcagcaacgccacaatcaagtccccgagcaggaactcgagcagaatcaggcaccagagcagccagaagtgcaggagcaggcggcagaacccgctcaggccgaaaccgaggcagaagagcctgaaagcctgcgcgtgaacgctcaggtgttcctgccgttgctctcccaggatcaccatgtcctgctgccactgcacctggatacccaagtgcttatccctgtcgaggggcagacagaagggagtcctcaagcccaggcctggaccctggagcctccccaggctatcggctcagtccaggctctgatcgagggcctgtccagagacctactgagagcgcccaattctaacaattccaagcccctcggtcccctgcagacacttatggaaaatctttcatcaaaccgattctactcacagcccgaacaggcacgggagaaaaagtccaaggtgtccacactccgccaggctctggccaaacggttatcacccaagcgcttccgcgccaaatcatcatggcgacctgagaaattggaattatctgatctcgaggcaagaaggcaacgcagacagcgtaggtgggaagacattttcaaccaacatgaggaggagcttaggcaggtggataaagacaaggaagatgagtccagcgacaatgacgaagtctttcattctatacaggctgaagtgcagattgagccactgaagccgtacatctccaatcctaagaaaatcgaggtgcaggaaagatcgccgtcggtgccgaataaccaggaccacgcacaccatgttaagttctcctcatcagtacctcagagaagcctgctcgaacaggctcagaaacccattgatataaggcagagatccagtcagaacagacagaactggcttgctgcgtccgaaagttcctctgaggaagaaagtccagtgactggcagacgatcacagagctcgcctccatatagcacgatcgaccagaaactcctggtggatatccacgtacccgacggttttaaggtcggcaaaatcagccctcccgtgtatctgactaatgagtgggtcggctacaacgcactgagcgagatctttcgcaatgattggctaacccccgcccctgttatacaacctccggaggaagacggggattacgtggagctgtacgacgcaagcgccgacacagacggggatgatgacgatgagtctaatgatacatttgaagatacctacgatcatgcgaatggtaatgacgacctcgacaatcaagttgatcaagcaaacgacgtgtgcaaggaccatgacgacgacaacaacaagttcgttgatgatgttaacaataactactatgaagcaccaagctgcccgagagcatcttatgggcgtgatgggagttgcaaacaggacggatatgatggatcaaggggcaaggaagaagcataccgcggctatggcagccataccgctaatcgctcacacggtggtagtgccgcgtccgaggataatgccgctataggagatcaagaggagcacgccgccaatatcggctcggagcggagaggcagtgagggcgacggcggaaagggtgtagttcggacttccgaagaaagcggggctcttggacttaatggcgaggagaactgttcagaaactgatgggccaggactaaagcggcctgcttctcaggacttcgagtacctgcaagaggagcccggcgggggaaatgaggcttctaacgcaatcgatagtggagcagcaccatccgcccccgaccacgagagtgacaataaagatatctccgagagcagtactcagagcgatttctcagcaaaccacagcagcccttccaaaggctcgggcatgtccgctgacgcgaatttcgcctcagcaatcctttatgctggtttcgtggaagtaccagaggagtcccctaaacaaccaagcgaagtcaatgtaaaccctctgtacgtgtcacctgcttgtaaaaagcctctgattcacatgtatgagaaggaatttacatccgagatttgttgcggcagcttatggggggtcaatctgcttcttgggaccaggtctaacctgtatctgatggacaggtcaggtaaggccgatatcaccaagcttattaggcgaaggcctttccgtcaaattcaggtgctcgaaccgctgaaccttctcattaccattagcggacacaagaataggttgagagtataccatttaacgtggctgcgcaataagatcctgaataatgaccccgagagtaagcgacgacaggaggagatgcttaagacggaagaggcctgcaaagcaatagacaagctgacaggttgcgaacatttcagtgtcctgcagcacgaagagactacatatattgctattgccctgaagtctagtatccacttatatgcctgggcaccgaagagcttcgatgagtctaccgcaataaaggtatgcatcgatcagtctgcagatagcgaaggagactacatgtcttaccaggcctacattcggatccttgcaaaaattcaggccgctgaccccgttaatcggtttaaaaggccagacgaattgctccacttgctgaaactcaaggtatttccgactctcgatcataagccagtgactgtggacctggccattggctccgaaaagcggttaaaaatatttttttcttcagcggacggataccacctcatcgatgccgagtccgaggtaatgtcagatgtgaccttacccaagaatcccctagaaattattatccctcagaacatcataattctgccagattgcctcggaattggcatgatgctcacttttaatgctgaagcattgtcggttgaggcgaacgagcagcttttcaaaaaaatccttgagatgtggaaggacattcccagctccattgcgtttgagtgtacccagagaactactggctggggccagaaggccatagaggttcggtctctacagtcccgggttctggagtctgagttgaagagacgaagcatcaagaagctgcggtttctgtgcacacgcggggacaagctgttctttacatcaacacttagaaaccatcacagtagagtgtactttatgacactgggtaagctcgaggaactgcagtctaactatgatgtctag

SEQ ID NO: 197317 - DNA, 4752 bp, synthetic construct
  misc_feature 1..4752: note = Description of Artificial Sequence: Synthetic coding sequence
  source 1..4752: mol_type = other DNA
atggccggccccggcggctggcgggaccgggaggtgaccgacctggggcacctgcccgacccaacggggatcttctcattggacaagacaattggcctcggaacttacggcaggatctatctgggcctgcatgagaagacaggggctttcaccgccgtgaaggtgatgaacgcgcggaagacaccactgcccgaaataggtcggcgcgtgagggtgaataagtaccagaaatctgttggctggcgctactctgacgaggaggaggacctgcggactgaactgaacctcctgaggaaatactcattccataagaacatcgtgagtttctacggcgcctttttcaagctttccccccctggccagagacaccagttgtggatggttatggagttatgcgcagcaggatcagtcacagacgtggtaagaatgacatcaaatcagagcctgaaggaggactggatcgcttatatctgtcgcgagatcctacagggcctcgcacatctgcatgcccacagggtcattcaccgcgacatcaagggccagaatgtgttgttgacccacaatgcagaagtcaagctcgttgactttggggtctccgcccaggtctcccgcacgaacgggcgacggaattctttcatcggaaccccatactggatggcccctgaagtcatcgactgcgacgaagacccccgcagatcgtacgattatcgttcggacgtgtggtccgtgggaatcaccgctattgaaatggccgaaggcgctccacccctgtgcaatctccagcctctcgaggccttattcgtcattttacgagaatcggcaccaaccgtgaaatccagtggatggtccagaaagtttcataacttcatggagaagtgtacgatcaagaattttctgttccgccccacgtccgcaaatatgcttcagcacccattcgttagggacatcaaaaacgaacggcatgtagttgaaagcctaaccaggcacctaacaggaattatcaagaagcgtcagaagaagaaaggcatccctctcatcttcgagcgggaagaggccataaaagaacagtacactgttaggaggtttaggggtcctagctgcactcacgagttactccggctaccaacctcttctcgctgccgcccactccgggtgctgcacggtgaacccagccagcccaggtggcttcccgatagagaggaaccacaggtgcaggcccttcagcaactccagggcgcggctcgcgtgtttatgcccctgcaggccctagactctgctcctaaacctcttaaaggccaggcacaagccccccagaggttgcagggtgcagccagggttttcatgcccttacaagcgcaggttaaggcgaaggcgtcaaagcctttgcaaatgcagatcaaggcgccaccacgtctccggcgggcagcccgggttctgatgcccctgcaggcacaggtcagagcccctaggcttctgcaggtgcaatcccaagtgagtaagaagcagcaagcacagacacagacctctgaaccacaggatttagaccaagtgcccgaagagtttcagggacaagatcaggtgcccgaacaacagaggcagggccaggctcctgagcaacagcaaaggcacaatcaggtcccagagcaggaactggagcagaaccaggcgccggaacagccagaggtccaggagcaggccgccgaacccgcccaggctgagaccgaggctgaagaacctgaatctttgcgcgtcaatgcccaagtctttcttccactcctaagtcaggatcatcacgtgctgttaccgctgcacctagacacccaggtcctcatcccggtggagggccagaccgaaggaagtccccaggctcaggcttggacattggaacctcctcaggcgatcggctcagtgcaggccctgatcgaaggacttagcagagacctcctgagagcgccaaattctaataatagtaaaccactagggccactgcagacgttaatggagaatctctcgtctaatcggttctactcccaaccagaacaggctagggaaaaaaagtctaaggttagtacactccgccaagcactggcaaaaagactatcccctaagaggttcagagcaaagagctcgtggagaccagaaaaactcgaactgtctgacctggaagccagaagacagagacgccagaggcgatgggaggatatctttaatcagcatgaggaagagctgcgacaagtcgataaagacaaggaggacgagagtagcgacaatgatgaggtctttcattctatccaggctgaagtgcagatcgaacccctcaagccgtatatcagcaatcccaagaagattgaggtgcaggaaaggagcccatctgtgcctaataatcaagaccacgctcatcatgtcaagtttagcagcagcgtaccgcagcgctctttactcgagcaggcacaaaaacctatcgatatacgccagcgatcttcccagaaccgacaaaattggctggcagcctcagaatccagtagtgaggaagagtctccggtcaccggcagacggtcccaatcttcgcctccatactccaccatcgatcagaagctgctggttgacattcacgtccctgatgggtttaaagtggggaagatttccccaccagtgtatctcactaacgagtgggtgggatacaacgctcttagcgaaatattccgcaatgactggctaacaccagcacctgtgatccagccccctgaagaggatggggactacgttgagctttatgacgcctctgccgacaccgacggggacgatgatgacgaatctaacgacacattcgaagacacttatgatcatgccaacgggaatgacgatcttgataatcaggtggatcaggctaacgacgtgtgcaaggaccacgatgacgacaataataagttcgtggatgacgtcaataacaactactacgaggctccttcatgccctcgggcttcctacggtcgagacggctcctgcaagcaggatggctatgacggctcgagaggcaaggaagaggcgtaccgcggttatggctcccatactgctaacagatcccatggggggtccgccgccagcgaggacaacgccgccatcggggaccaagaggagcatgcggccaatatcgggagcgaacgtagaggatctgaaggagatggcgggaagggcgttgtccggaccagtgaggagagcggggcattaggcttgaacggcgaagaaaattgctcagaaaccgacggaccagggcttaaacgtccagcctcacaagattttgagtatttgcaagaggagcctgggggaggcaatgaggcttccaatgcaattgactctggcgccgctccctcggcacctgatcacgaatccgacaacaaggacatcagtgagtcctctactcaatccgatttttccgcaaatcatagttcaccctcaaagggaagtgggatgtctgccgacgccaattttgcctccgctattctatacgctggctttgtagaggtcccagaggaaagcccaaagcaaccgtccgaggtgaacgtgaatcccctgtatgtgtcccccgcatgtaagaagcctctaattcacatgtacgagaaggaattcactagcgagatatgttgtggttcactgtggggcgtcaacctgctattgggcacccgcagcaatctgtacctaatggaccggagcgggaaagccgatattactaagctgatcaggcggcgcccctttcgccagatccaggttctggaaccccttaatttgctgataacgataagcgggcacaagaatcgactccgagtctatcatctcacgtggttgagaaacaaaatcctgaacaacgatcctgaaagtaagaggcggcaggaggagatgctgaagacagaagaggcatgcaaggctatagataagctgacaggctgtgaacattttagcgttttgcagcatgaggaaaccacttacatcgctattgcactgaagtcttccatccatttatacgcctgggcgcccaagtcattcgatgagtcaaccgctatcaaggtgtgtattgatcagagtgctgattccgagggggactatatgtcataccaggcctacattagaatcctggccaagatccaggcggcagacccggttaatcgattcaagagaccggacgagctgctccatctacttaagctgaaagtctttcccacactggaccacaagcctgtcacagtcgatctggccatcggctcagagaagagactcaagattttcttttctagcgccgatggataccacctgatcgacgctgagagcgaagttatgtccgatgtaactctgcccaagaatccgctggagattattatcccccagaacattatcattcttcccgactgtttgggtataggcatgatgctgacgtttaatgcagaggctttatcggtggaagccaacgagcagctgttcaagaagatcctggaaatgtggaaggatattccgtcctctattgcttttgagtgtacccaaaggacgacaggctgggggcagaaggctatcgaggtacggtctctccaatcacgagtgctggaatccgagcttaaacgtaggtccatcaagaagctgcgcttcctttgtacgcggggcgacaaactgttctttacctcaaccctgaggaaccaccacagcagggtttactttatgacactgggaaaacttgaggaactgcagtctaattatgacgtctag

SEQ ID NO: 197318 - DNA, 567 bp, synthetic construct
  misc_feature 1..567: note = Description of Artificial Sequence: Synthetic coding sequence
  source 1..567: mol_type = other DNA
atggccggccccggcggctggcgggaccgggaggtgaccgacctggggcatctccccgacccgaccggtatcttctctcttgataaaactattggcctcgggacatacggaaggatctatctgggcctccacgagaaaacgggagcttttacagccgttaaagtaatgaacgcccggaagacgccactgcccgagatcggacggagagttcgtgtgaataagtaccagaagtctgttggttggcgctacagtgacgaggaggaggacctgaggactgaactgaaccttctgaggaaatattccttccacaaaaatatcgtgtctttctacggtgcgttcttcaagctgagcccccccggacagaggcatcagctctggatggttatggagctctgtgccgccggttctgttacggacgtggttcgtatgacctcgaaccagtccctaaaggaggactggatcgcttatatttgccgtgagatccttcagcctaaggtcatctttttagggactggatgtagcgacagcagcctcaaaaaggagctgtgcttgaaacatcagaactag

SEQ ID NO: 197319 - DNA, 492 bp, synthetic construct
  misc_feature 1..492: note = Description of Artificial Sequence: Synthetic coding sequence
  source 1..492: mol_type = other DNA
atgcaggtgccccgggagcggatcaagatcgccttccggctgtggatcccgatcctggttatcagaatcgttgtggccggaacatggcctcaagcaccagggctgtccaccctcgggctaaacattatcatacttccagactgcctcggtatcggaatgatgctgacgtttaatgcagaggctctttcggtagaggccaatgagcagctcttcaaaaaaattctcgagatgtggaaagatataccctcctccatagccttcgagtgtactcaacggaccacggggtggggtcagaaagccatcgaagtgcgttctctccagagtagagttctggaatctgagctgaagcgaaggtcgataaaaaagttacggtttctgtgtactagaggtgataaattatttttcacctccactctgcgcaaccaccattcaagagtgtacttcatgacactgggcaaactagaggaactccagtctaattatgacgtgtag

SEQ ID NO: 197320 - DNA, 1449 bp, synthetic construct
  misc_feature 1..1449: note = Description of Artificial Sequence: Synthetic coding sequence
  source 1..1449: mol_type = other DNA
atgctgaagttccaggaggccgccaagtgcgtgagcggcagcaccgcgatctccacttatcccaaaacattaattgctcgacgatacgtgctacagcaaaaacttgggtcaggctcattcggaaccgtgtacctggtctctgataaaaaggcaaaaaggggcgaggaacttaaggtgctaaaagaaattagcgtgggggaactgaatccgaacgaaacggtgcaggcaaacctcgaagcccagctgctcagtaagctagatcaccctgccatcgtcaaattccacgccagctttgtagagcaggataatttctgcatcattacagaatactgtgaggggagggacctggatgataagatccaggagtataaacaggcaggtaaaatattccccgaaaatcagattattgagtggtttatccagctgttactcggtgtggattacatgcatgagcggaggatcctacacagggatctcaagagtaagaatgtgtttctgaagaacaatctgcttaagataggagattttggcgtgagccgactcctcatgggttcatgcgacttagctacaacactgacgggcaccccgcactacatgagccctgaggcactgaagcaccagggttacgacacgaaatccgacatctggtcgctcgcatgcatcttgtacgagatgtgttgtatgaaccacgcatttgcaggttctaattttctgagcatcgtgctcaagattgtggagggtgacactcctagcctgcccgaacgttaccctaaggagctcaacgccatcatggaatccatgcttaataaaaatccttcccttaggccctcggctatcgagatccttaagatcccctacttagatgagcagctccaaaacctcatgtgtcgctactccgaaatgacactggaggacaaaaatctggactgccagaaagaggcggctcacatcatcaatgcaatgcagaaaaggatccatcttcagactctacgtgcacttagtgaagtgcagaagatgactccaagggaaagaatgagactccgcaaactccaggctgctgatgagaaggcgcgcaaactcaagaagatagtcgaggagaagtacgaagagaattcaaagcggatgcaggaactcagaagccgtaatttccaacagctatcagtggacgtgctccacgagaagactcatcttaagggaatggaggagaaagaggagcagcctgagggccgtctttcctgctccccacaagacgaggatgaagagcgttggcaaggacgggaggaggagtccgacgaacctacactcgaaaacctaccggagagccagcccattcccagtatggatctgcatgagttagagagtattgttgaagatgcgacttctgatttggggtatcatggagattgcaacttgatctccctggacgagtactggaaaaatgagaaatag

SEQ ID NO: 197321 - DNA, 1938 bp, synthetic construct
  misc_feature 1..1938: note = Description of Artificial Sequence: Synthetic coding sequence
  source 1..1938: mol_type = other DNA
atgctgaagttccaggaggccgccaagtgcgtgagcggcagcaccgcgatcagcacttatcctaaaactctcatcgcgagacggtatgtactccagcagaaactgggctctggatctttcgggactgtatatctggtgagtgacaaaaaggccaaaaggggcgaggaactcaaagtgctcaaagagatcagcgtgggtgaactaaacccaaacgaaactgtccaggccaacctggaggctcagctgttgtcgaagttggaccatccggctatagttaagtttcatgctagctttgtcgagcaggataatttctgcatcattaccgaatattgtgagggtcgcgatctggacgacaaaattcaggagtataaacaagcaggtaagatctttcccgaaaatcagataatcgagtggtttatacaacttttattgggcgttgactacatgcatgagcggcggatcctacatcgcgatttgaaatctaaaaatgtgtttttgaagaataatctccttaaaattggtgactttggcgtcagcagactactgatggggtcctgcgacctggctaccacattaaccgggacaccacactatatgtcacccgaggctttgaagcaccagggttacgacacaaaatctgacatttggagcttagcatgcatcctgtacgagatgtgttgcatgaatcatgctttcgcgggctccaacttcctgtctatcgtgctcaagatagtcgagggggacacccccagcttgccggagcggtacccgaaggagctcaatgccattatggaaagcatgttgaacaagaatccgtcactgaggcccagtgccatcgagattttaaagattccttatctggatgagcagctgcagaatctgatgtgtagatattcagaaatgactctcgaggataaaaatctggactgccagaaagaagctgcccacatcatcaatgctatgcaaaaaaggatccaccttcagacgctacgcgctttgtctgaagtccagaagatgacccccagggaacgtatgaggctgaggaagctccaggcagcagacgaaaaagctaggaagttaaagaagatcgtcgaggagaaatacgaagagaattctaaacggatgcaggaactacggtcccggaactttcagcaactttcagtcgatgtcctccacgagaagacccaccttaaaggaatggaagaaaaggaagagcaacccgaaggtcggctgtcatgttctccgcaggacgaggacgaggagagatggcagggcagagaggaagaatcagacgaaccgaccctggaaaacttaccggagtcccaacccatcccgtcaatggacctgcacgagctggagagcatcgtggaggatgctaccagcgacttaggataccacgaaatcccagaggacccactggtggctgaagagtactacgcagatgcttttgatagctactgcgaggagtctgacgaggaggaggaggaaatcgccctcgaaagacctgaaaaggaaatcaggaatgagggctcccagccagcatatcgcacaaaccaacaggacagtgatatagaggctctggcccgctgtctggagaacgtgctcggttgtacatcgttagacacgaagactatcactacaatggcagaagacatgtctccaggtccgccgatctttaactccgtgatggcacggacaaagatgaaaaggatgcgtgaatcagctatgcaaaagctaggaacagaggtatttgaggaagtttacaactacctgaagcgtgccaggcatcagaacgccagtgaggccgaaatcagggaatgcttggagaaagtggttccacaggcatctgattgtttcgaggtggaccaattactgtatttcgaggaacagttgctgatcacaatgggcaaagaaccaaccctccagaaccatctctag

SEQ ID NO: 197322 - DNA, 1386 bp, synthetic construct
  misc_feature 1..1386: note = Description of Artificial Sequence: Synthetic coding sequence
  source 1..1386: mol_type = other DNA
atgcacgagcggcggatcctgcaccgggacctgaagagcaagaacgtatttctgaagaataatctgctaaaaatcggtgattttggcgtttcccgcttacttatgggaagctgtgatctcgccacaaccctaaccggtacaccccactatatgtctcccgaagctttgaagcaccagggttacgacacgaagagcgatatttggtctctggcatgcattctttatgagatgtgctgtatgaaccacgctttcgccggatctaatttcctgagcatcgtgctcaagatcgtggaaggagacaccccgagtcttcctgaaaggtaccccaaggaactcaatgccatcatggagagtatgctcaacaaaaatccgagcctgaggccaagcgccatcgagatactcaagataccctaccttgatgagcagctgcagaatttgatgtgccgatacagcgagatgaccttagaggataaaaacctggattgccagaaggaagccgcccatatcataaacgctatgcagaagcgcattcatcttcagacattgcgtgccttgtccgaggtgcagaaaatgacacctcgtgagcgcatgcgcctcagaaaactccaggccgccgacgagaaagcacgcaagctgaagaagattgtcgaggagaagtacgaagaaaattctaagcgcatgcaggaactccgcagtaggaacttccagcaattaagtgtagacgtcctgcacgaatccgacgagcccacattggagaatctgccagagagccagcctattcccagcatggatctccatgaattggaatctatagttgaagacgctacctcagatcttggctaccatgaaattccggaggacccactggtcgccgaggagtattacgcggatgcttttgacagctactgtgaagagtcggatgaggaggaagaggaaatcgctctggagaggcccgaaaaggagatcagaaacgaagggtcacagcccgcatataggacaaaccagcaggacagcgacatcgaggcccttgcccggtgccttgagaatgtgctgggttgtacctctctcgacacaaagacaattactaccatggctgaggacatgtccccaggacctccgatctttaacagcgtgatggcccgaactaagatgaagcggatgcgcgaaagcgctatgcagaagcttggcactgaagtctttgaagaagtttacaactatctgaaacgggccaggcaccaaaatgcttcagaagctgaaatccgcgagtgtctggaaaaagtggttccacaagcctcggattgcttcgaggtcgaccagctactctacttcgaggagcagcttctgatcacaatggggaaggaacccacattacaaaaccacctgtag

SEQ ID NO: 197323 - DNA, 1938 bp, synthetic construct
  misc_feature 1..1938: note = Description of Artificial Sequence: Synthetic coding sequence
  source 1..1938: mol_type = other DNA
atgctgaagttccaggaggccgccaagtgcgtgagcggcagcaccgcgatcagtacataccccaagacacttattgcccgtcgttatgtgttacagcagaagttggggtccggcagtttcggcaccgtgtacctggtcagtgacaaaaaggccaagcggggggaagagcttaaagtactgaaggagatctctgtcggggagctcaaccctaatgaaacagtccaggcaaatttggaggcccagttgctatcaaagcttgaccatcccgcgattgtgaaattccatgcctcttttgttgaacaggataatttctgcatcatcacggagtactgcgagggcagggacctggacgacaagattcaggagtataagcaggccggaaagatatttccggaaaatcaaatcatcgaatggtttatacagttgttgctgggcgtggactacatgcatgagagacggatattacaccgggatctgaaatctaaaaacgtcttcctgaagaataatctgctcaagatcggagatttcggcgtctcccgccttctgatgggatcatgtgacttagccaccacactcactggtaccccacactatatgtctccagaggccctcaaacaccaaggctatgatacaaagtccgatatttggtccctggcgtgcatcctctacgaaatgtgttgtatgaatcacgctttcgccggatccaacttcctgtccatcgttttgaaaatcgttgagggggacacacccagcctccccgagcggtatccaaaggagctcaacgctattatggagtccatgcttaataagaacccaagcttaagaccatcagcgatagagatactgaagatcccttatcttgatgaacagctacagaacttgatgtgccgatattccgaaatgactctcgaggataaaaaccttgactgccagaaagaggcggcacacattatcaacgcgatgcaaaaaaggatacacttgcagacacttcgagcactgtccgaagttcagaagatgactccaagagagcggatgcgcctacgcaaactccaggccgcagatgagaaagcccggaagctaaaaaagatcgtcgaggaaaagtatgaagagaattcgaaacggatgcaggagctgagatccagaaatttccagcagctgtcagttgacgtgttacatgagaaaacacatctgaagggcatggaagaaaaagaggagcaacctgaagggagattgagctgctccccgcaagatgaagatgaagagaggtggcagggcagggaggaagagtcggacgagccaacactcgaaaacttgccagagtctcaaccaattccaagtatggaccttcacgagctggaaagtatcgtcgaggacgccactagcgatctgggataccatgagatccccgaagaccctctggtggctgaagaatactacgccgatgcctttgacagttactgtgaagagtcagacgaagaggaggaagaaattgctcttgaacgacctgagaaagaaatccgcaacgaaggaagccagcccgcttatcgcactaatcaacaggacagcgacatcgaagccctggcgcgctgcctcgagaacgtgctcggctgcacctccctcgataccaagactataacgacaatggccgaagacatgtctcctgggcctccaatatttaattcagtcatggccagaaccaaaatgaagaggatgagagaaagcgctatgcagaaacttggtaccgaggttttcgaggaagtgtacaactatctgaaacgagcaaggcaccagaatgctagcgaagcagaaatcagggagtgccttgagaaggtggtgcctcaagcatcggattgcttcgaggtggatcaactactgtattttgaggaacaactgctcatcacaatgggtaaagaaccgaccctgcagaaccacctctag

SEQ ID NO: 197324 - DNA, 1449 bp, synthetic construct
  misc_feature 1..1449: note = Description of Artificial Sequence: Synthetic coding sequence
  source 1..1449: mol_type = other DNA
atgctgaagttccaggaggccgccaagtgcgtgagcggcagcaccgccatcagcacctacccaaaaacactcatcgctcgtcgatacgttttacaacaaaagttgggttcaggcagctttggcaccgtgtacctagtgtcagataaaaaggcaaagaggggagaggagctgaaggtgcttaaggagatttcagtaggcgagttaaatccgaacgagaccgtgcaagccaatttagaagcacagctgctgagtaaactggatcatcccgcgatcgtgaaattccatgcgagcttcgttgagcaggataacttttgtataattaccgaatactgtgaaggcagggatcttgatgacaaaattcaagaatacaagcaggctggcaagattttccccgagaaccagataattgagtggtttattcaactcttgcttggggtagattatatgcatgaacggagaatcctgcatcgtgatttaaaaagcaagaacgtatttctcaagaacaacctgctgaagattggagacttcggtgtctcccgccttttgatgggatcatgcgatttagctacgaccctgacaggcacaccccactacatgtcacctgaagcactaaagcaccaaggttacgacactaagagcgacatatggtccctagcgtgtatcctgtacgagatgtgctgcatgaaccacgctttcgctggcagcaatttcttgtcaattgttttaaagatagtcgagggcgatacccccagcttgccggagcgttaccccaaggagcttaacgccatcatggaaagcatgctgaataagaatccgtcgctgcggcctagcgctatcgagattttaaagattccctacttggatgaacagttgcaaaatttgatgtgtcggtactccgagatgacgctagaagataaaaacctggattgtcaaaaagaggccgcccacataatcaatgccatgcagaagagaatccatctgcagaccctgagagcccttagcgaggtccaaaagatgacgccacgtgaacgcatgcggctcagaaagctacaggcggcggatgagaaggctcgcaagctcaaaaagatagtagaggagaagtacgaggagaacagcaaaagaatgcaagagctccgcagcagaaactttcaacaactgagtgttgacgtgctgcacgagaaaacccatctcaaggggatggaagaaaaggaagaacagcccgaaggcagattatcttgcagtccgcaggacgaggatgaggaacggtggcaagggagagaggaagagagcgacgagccaacactagagaatctgcccgagtcccagccaataccctctatggatctgcacgaactggaatccatcgtagaggatgctacctctgatttgggctatcatggagactgcaacctaattagtctggacgaatactggaaaaatgagaagtag

SEQ ID NO: 197325 - DNA, 1938 bp, synthetic construct
  misc_feature 1..1938: note = Description of Artificial Sequence: Synthetic coding sequence
  source 1..1938: mol_type = other DNA
atgctgaagttccaggaggccgccaagtgcgtgagcggcagcaccgccatcagtacctatcctaaaactctcattgcacgacgatatgtactgcagcagaagctgggcagcgggtccttcgggacggtctacttagtttcagacaagaaggccaaaaggggagaggaactgaaagtgttgaaagaaatttccgtgggagagttaaatcccaacgaaacagtgcaggccaacttagaagcacagttgctgtcaaaactggatcatcctgctatagtgaagtttcacgcttcattcgtggaacaggataacttctgcattattaccgaatactgtgaagggcgagacctggatgacaagattcaggagtacaaacaggctgggaaaatcttccctgagaaccagatcatagaatggtttatccagctgctgttaggagttgactacatgcatgagcgtaggatcctgcaccgggatcttaaaagcaagaacgtcttcctcaaaaataacttgttaaagatcggtgatttcggtgtgtctaggctcctcatggggtcttgcgacctggccactactctcactgggactccacactacatgtcccctgaagccctgaagcaccagggatacgacacaaaatccgacatttggagtctggcatgtatcttatatgagatgtgttgtatgaaccacgccttcgccggatcgaatttcttgagtattgttctgaagattgtagaaggagatacaccaagcctccccgagagatatccaaaggagctgaacgcaattatggagagcatgctgaacaaaaaccctagcctgcgacccagcgccattgagatcttaaaaattccttacttggacgagcagttgcagaatctgatgtgtagatattctgaaatgacacttgaggataaaaatttggattgccagaaggaggccgcccatatcatcaatgccatgcagaaaagaatacacctgcagactctgcgagcacttagcgaggtgcagaagatgactcctcgcgaaagaatgcgcctcagaaagcttcaggccgcagacgaaaaagccaggaaactcaagaaaatcgtagaggagaagtacgaggaaaacagtaagaggatgcaggagctaaggtccagaaacttccagcagctgagcgtggacgtcctccacgagaagacgcacctgaagggcatggaagaaaaggaagaacaaccggaaggcaggttgtcttgtagcccccaggacgaggacgaggagcgctggcaaggacgcgaggaggagtcagacgaaccgaccctggaaaatcttccagagtctcagccgatcccttctatggatctgcacgagctagagtccatcgtggaagacgctaccagcgacctaggctaccatgagattccggaagatcccttggttgctgaagagtactatgccgatgcttttgacagttattgcgaggaaagcgacgaagaagaggaggagattgctctggaacggcctgaaaaagagattcgaaacgaaggcagccagcccgcttaccggaccaatcaacaagactccgatatcgaagccctggctagatgtctcgagaacgtgctcggttgtacatctttagacaccaaaaccataaccacaatggcggaggatatgtcccccgggcctcccatctttaattcggtgatggcccggaccaagatgaaaaggatgcgtgagtcagctatgcagaaactaggtacagaagtgttcgaagaagtttacaactacctcaaaagagccaggcatcagaatgcctcagaggccgagatacgagagtgtctagaaaaggtcgtgcctcaggccagtgattgtttcgaagtcgaccaactcctctattttgaggaacagcttctcataactatggggaaagaaccaacgctacaaaaccacctgtag

SEQ ID NO: 197326 - DNA, 1413 bp, synthetic construct
  misc_feature 1..1413: note = Description of Artificial Sequence: Synthetic coding sequence
  source 1..1413: mol_type = other DNA
atgctgaagttccaggaggccgccaagtgcgtgagcggcagcaccgcaatttcgacatatcctaagactcttatagcacgcagatacgtgctccagcaaaagttgggtagcggcagctttggcaccgtgtacctggtgagcgataagaaagccaagcgaggggaagaactgaaggtgctgaaggaaataagcgtgggcgagttaaaccccaatgagacagtccaagccaatctggaggctcagctgttatcaaagctggaccaccccgctatagtcaaatttcatgcttcattcgtcgaacaggacaacttttgcattattacagaatattgtgagggcagggatctggacgataagattcaagagtataagcaggcgggcaagatctttcccgaaaatcagataattgagtggtttatacagctgctgctaggcgtggattatatgcacgaacggcgcattttgcacagggatctgaagtccaagaacgttttcctgaaaaataacctgctgaaaattggagacttcggcgtctcccggcttctgatgggctcatgcgaccttgcaacaactttgacagggacaccccattacatgtctcctgaggctttaaagcaccaaggctacgacaccaaatctgacatctggtcactggcctgtatcttatacgagatgtgttgcatgaatcacgcattcgctggctccaatttcctgtcaattgtactcaaaatagtggaaggtgacactccttctctccccgaacgctaccctaaggaactcaacgccattatggaaagcatgctcaataagaaccccagcttacggcctagtgctattgaaatcctgaagattccctatctcgatgagcagttacagaacttaatgtgtcggtacagtgagatgaccctcgaagacaaaaaccttgattgccaaaaagaggccgcacacatcataaatgctatgcaaaaacgaatacatctgcaaaccttgcgggcactttcagaggttcagaagatgacacccagagaacgcatgcggttaaggaaactgcaagcggccgacgagaaggcgcgtaagttgaaaaagatcgtggaggagaagtacgaggaaaattccaagcggatgcaggagctcagatccaggaattttcagcaattgtcagtagatgtgctccatgaaaaaacacacttgaaaggaatggaagagaaggaggagcaacctgagggacggctgtcctgtagcccacaagatgaagatgaagaaagatggcaggggagggaggaagagagtgatgagccgacgctcgagaatttgcctgaatctcagcctattccatctatggatcttcacgaactggaaagcattgtcgaggatgccactagcgacctgggctaccacgccactcattcttag

SEQ ID NO: 197327 - DNA, 2079 bp, synthetic construct
  misc_feature 1..2079: note = Description of Artificial Sequence: Synthetic coding sequence
  source 1..2079: mol_type = other DNA
atggagaagtacgagcggatccgggtggtgggccggggcgccttcggtatagtgcatctgtgcctgcgcaaggctgaccagaagctcgttattatcaaacagatccccgtggaacaaatgaccaaagaggaacgtcaggcagcacagaatgagtgccaggttctgaagttacttaaccacccgaatgtaattgaatactacgaaaacttcttggaggacaaggcccttatgattgccatggaatacgcgcctggagggacgcttgcggagtttattcagaaaagatgtaacagcctgctcgaagaagagacaatcctccacttttttgttcagatcctgctggcgctgcaccacgtccatactcacctgattctccatagagatttgaagacccagaatatcctcctcgataagcacaggatggttgtgaaaattggagatttcggcatcagtaaaatactgagtagcaagagcaaggcttacaccgtggtgggaacaccgtgctatatttcacctgagctgtgtgagggaaaaccgtataaccagaagtccgatatttgggccctggggtgtgtgctgtatgaactggccagcttgaagagggctttcgaagccgcaaatctgccagcgcttgtgctcaagatcatgtccggaactttcgccccgatttctgaccgctattcccccgaactgcgccagctagtactcagtttactgtcacttgaaccagcacaaagacctcctctgtcccacataatggcccagccgctctgcattcgcgcattgctgaatttgcatacagatgtgggttctgtgaggatgaggagagcagaaaagtcagtggcaccgtccaacactggcagccgcacaacgtcagttaggtgccgagggatccccagaggtcccgtcagaccggctattcctcctccactgtcttcagtttatgcttggggcggcggccttggaacacccctacggttgccaatgctcaacacagaagtcgtccaggtcgccgccggccgtacacagaaagcgggcgttactcgctcaggaaggctcatcctgtgggaggcacctcccctgggggcgggcgggggaagcctcctgcctggagccgttgagcagccacagccacaatttattagtaggttcctcgaagggcaatccggtgtgaccatcaagcatgttgcatgtggggacttttttactgcttgcctcacagataggggcatcatcatgaccttcggctccggttccaatggttgcctcggacatggctccttgaccgacatctctcagcccaccattgtggaggcattgcttggatatgaaatggtgcaggtagcatgcggggcgagccatgtccttgcactgtcaaccgaacgtgaacttttcgcgtggggccgcggcgattcaggtcgtttgggccttggcactagagaaagccattcctgtccacagcaggttccgatgccccctggccaggaagctcagcgcgtcgtatgtggcatcgattcgtcgatgattctcaccgtacctgggcaggctctggcatgtgggtctaacagattcaacaagctggggctggaccatctaagtcttggcgaggagcccgtgccacaccagcaggtggaagaggccctgtcctttaccctccttggctccgctcccctggaccaggagcccttgctgtctatcgatctaggtacagcccactctgcagctgtgaccgcatctggtgattgctacacgttcggtagtaaccagcacggccaactgggcacaaacacccggcgaggctcaagagccccatgcaaagtccagggactcgaaggcattaaaatggccatggtggcttgtggtgatgcttttaccgttgcgattggagctgagtcagaagtctattcttggggcaagggcgctcgaggtcgtttaggtcgcagagacgaggacgccggattaccccgtccagtgcagctggatgaaactcacccgtatactgtaacatccgttagttgctgccacgggaacaccctgctggcagtccggagcgtgaccgatgagcccgttcctccctag

SEQ ID NO: 197328 - DNA, 1383 bp, synthetic construct
  misc_feature 1..1383: note = Description of Artificial Sequence: Synthetic coding sequence
  source 1..1383: mol_type = other DNA
atggagaagtacgagcggatccgggtggtgggccggggcgccttcgggatagtgcatctgtgcctcagaaaggctgatcagaagttagtcataattaagcagatcccggtagagcagatgactaaggaggaacgacaagcagctcaaaatgaatgccaggtcctaaagttactgaatcaccccaacgtcatcgaatactacgaaaacttcctcgaggacaaagccctgatgattgccatggaatacgcccccggcggcacactggctgaatttatccagaagagatgtaattcccttctggaagaggaaacaattctgcattttttcgtccagatccttctcgcgcttcatcacgtgcacacccaccttatcctccatagagacctcaagacccagaacatcctcctcgataagcaccgcatggtcgttaagattggggacttcggcatcagcaagatcctttcttctaagtctaaagcctacacagtggtcggtactccatgttatatctctcccgaactctgcgaaggcaagccttataaccagaagagtgatatttgggctttgggttgcgtcctgtatgagcttgctagcctcaagagggcattcgaggccgcaaacctgccagcgctggtcctcaagatcatgagtggtactttcgctcctatttccgaccgctatagtcctgaattgagacagcttgtcctcagcttgctgtccctagaaccagcacagcgaccccctctgtcccacataatggctcagcctctctgtatccgggccttgctgaatcttcataccgacgtgggcagcgttcggatgcgaagaccagttcaggggcagcgggccgtcctgggcggacgggtttgggcaccgagcggaagcacagggggcctgcgccaacgcgagacatggggaaagtccagtctgcccgcatgccgaaatgtgcggcgagtgttcgttcttaggccgccatctgtactgcagggcagagaggttagaggcccccagcagcaccgcgagcaggaccaccagtgtcctttgcagagatacccaccagggacatgcgaggcgtcacaccctactacaacagtggtcagcgtatgcctgggatggtgggcaggacatccacccgcggcagccaatgcccagcatcggggcggccccggcggcagttgggcgcatgccgagagtaggagacatgcactgtgggcaagccaccccgtggggggtccaaccccacgctgtcggcgaagacagagtccatcctggggcagtggggctgctaccgctcctgtgcatctcgcatttcccgggggcccagtcggatgtgaccatcaggctcgaggactttggggcctgctgcactgccttcctgattag

SEQ ID NO: 197329 - DNA, 2940 bp, synthetic construct
  misc_feature 1..2940: note = Description of Artificial Sequence: Synthetic coding sequence
  source 1..2940: mol_type = other DNA
atgagcgtgctgggcgagtacgagcggcactgcgacagcatcaacagcgacttcggcagcgaatccggaggttgcggggattctagccccgggccctctgcgtcacaaggacctagagcaggaggcggggcggccgaacaggaagaactgcactatatccccattcgtgtacttggcaggggagcctttggggaggcgaccctgtaccggaggacagaagatgattcgcttgtcgtatggaaagaggtcgacctgactagactgtccgagaaggaaaggagagatgccttgaatgagatcgtgatccttgccctccttcagcacgataacataattgcatattacaatcatttcatggacaacacaactctgcttatcgaattggagtattgtaacggaggtaacctgtatgacaaaatactccggcagaaggacaaattattcgaagaggagatggttgtgtggtacctctttcaaatcgtgagtgccgtttcatgtatccacaaggcaggaatcctgcacagagatatcaagactctcaatatcttcttgactaaagcgaatctgattaaactaggagactatggacttgctaagaagctgaacagcgaatattccatggctgaaaccttggtcggtaccccttactatatgtccccagaactgtgccagggggtgaagtacaatttcaaatctgacatatgggcagtcggctgcgttatcttcgagcttctgacactaaagcgcacttttgacgctaccaacccgctgaatttgtgcgtgaagatcgtccagggaatacgagctatggaagtcgatagcagccagtactccctggagctgatccagatggtccacagctgcctggaccaggacccagagcaacggcctaccgccgacgaactccttgaccggcctctgctccgcaagcgcagacgcgagatggaagagaaggttaccttgctgaatgctcctacgaagcgccccaggagtagcaccgttactgaagctcccattgccgtagtcacgagtcgaacctccgaagtgtacgtatgggggggaggaaaatctacccctcagaagctggatgtcattaagtccggctgttcggctcggcaggtctgtgccgggaacacacacttcgctgttgtcactgtggaaaaagaactgtacacatgggtcaacatgcaggggggtacaaaacttcacggacaattgggacacggagacaaggcatcttacagacagccgaaacacgtggagaaactccagggaaaagccatccgtcaagtgagttgcggggatgattttaccgtctgtgtgacagacgaagggcagctatacgcgtttgggtccgactattatggatgcatgggagtggataaggtcgcgggccctgaggttctagagccaatgcagctcaatttctttttgtccaatccagtagagcaagtctcttgcggtgacaaccacgtggtggtgctcactcgcaacaaagaagtctacagttggggctgtggtgagtacggacggttgggtctagactccgaggaagactattataccccccaaaaagttgatgttccaaaggcattaataattgtggctgtccagtgtggttgcgatggcacatttcttctcacccaatccggcaaagtcttagcctgcggcttaaatgaatttaataaattaggcctcaaccagtgtatgagtggaatcattaatcatgaagcctaccacgaggtgccttacactacatcattcaccctggcaaagcagctttcattctataaaatacgtactatcgcgcctggaaaaactcacactgccgccatcgatgaaagaggcagactgctaacctttggatgtaataaatgtgggcagcttggtgtggggaattacaagaaacggctggggattaatctgctaggcggcccactgggaggcaagcaggtcatccgggtctcatgtggcgacgaattcactatcgccgccacagatgataaccacatcttcgcctggggcaatggcgggaacggacgcctggccatgacacctaccgagcgcccacacgggtccgatatttgcacttcttggcctcgtcccatcttcggtagcctccatcacgtgccagacttatcctgtcgtggatggcacaccattcttatcgtggagaaggtgctgaatagcaagaccataaggtcgaattctagcggtctttcaattggcacggtgtttcagtcttcctctcccggtggaggaggggggggcgggggtggcgaagaggaggattcccagcaggagtcagaaacccccgaccctagtggggggtttcggggaacgatggaagcggatagaggtatggagggactcatttctccaacagaagccatggggaactccaacggcgcttctagctcctgtccaggttggcttagaaaggaactagaaaacgctgaattcatccctatgcccgacagccctagccctctgtcggcagctttctccgagagcgagaaggacacccttccatacgaggagctgcagggcctcaaagtcgcctctgaggctcctctggagcataagccgcaggtggaagcaagctcaccccggttgaacccagctgttacatgtgccggcaaaggtacccctcttacaccgcccgcatgcgcttgttcctcccttcaggttgaagtggagcggctccagggactggtcctgaagtgcctggcagagcagcaaaagttgcagcaggaaaacctgcagatattcacccaattgcagaagctgaacaagaagttagagggtggccaacaggtgggcatgcactctaaggggactcaaaccgccaaggaagaaatggagatggatcctaaaccagacttggatagcgattcctggtgtcttctgggaaccgactcgtgtaggccgtccctttag

SEQ ID NO: 197330 - DNA, 1545 bp, synthetic construct
  misc_feature 1..1545: note = Description of Artificial Sequence: Synthetic coding sequence
  source 1..1545: mol_type = other DNA
atgagcgtgctgggcgagtacgagcggcactgcgacagcatcaactctgacttcggaagcgagtcaggagggtgtggcgatagctcccccgggccttctgccagccaggggcctagggctggtggcggagcatttggcgaggccacactgtaccggaggaccgaagatgactctctcgtggtctggaaagaggtggaccttaccaggctgtcagagaaagagcggcgggacgcgctgaacgaaattgtgattcttgctttgctgcagcatgataatatcatagcctactataatcatttcatggataacaccacattgcttatcgagcttgagtactgtaacgggggaaacctgtacgataagatcttgcgccagaaggataaactattcgaggaagagatggtagtttggtacctattccaaatcgttagcgcggtatcgtgcatccacaaggcaggaattctgcaccgggatatcaaaacacttaacatcttcctgaccaaagcaaacttgatcaagcttggcgactacggactggccaaaaaattgaatagcgaatacagtatggcagagaccctcgtaggcactccttattatatgtcacctgagctctgtcaaggcgtgaagtacaactttaagagtgacatatgggcagttggctgcgttatatttgagcttcttaccctgaagagaacatttgatgccactaatccgctaaacctgtgcgtgaagattgtgcaagggattagggccatggaagttgacagctcacaatacagcctggaacttattcagatggtgcactcttgcctggatcaggaccctgagcagcgccctaccgccgacgaactcctagaccggcctctgcttagaaagagaaggagggagatggaagaaaaggtaaccctgctcaacgctccaaccaaaaggcccaggtcaagcaccgttactgaggctcctattgcagtagtgacaagccggacatctgaagtgtacgtatggggggggggtaaatcaactccacagaaattagacgtgattaaatcgggctgttctgcccgccaggtgtgtgcaggaaatactcactttgcagtggtgactgtagagaaggaactgtatacctgggtcaatatgcagggaggaaccaagctgcacggacagctcgggcatggggacaaagcttcctatagacagccgaaacacgtggagaagctgcaggggaaggccatacgacaggtgtcctgcggagacgacttcacagtatgtgtcacagacgaggggcagttatatgcctttggctcagactactatggctgcatgggcgtggataaagtggctggcccggaagtgctggagcctatgcaattgaactttttcctgtcaaaccctgtggagcaggtctcatgcggcgacaatcatgtggtcgtgctgacacgtaacaaggaggtgtactcctggggctgcggagaatatggtcgtggatctctggtctcagtgcattttttcactgggattcaaccagactttaaagtggtatgcatttag

SEQ ID NO: 197331 - DNA, 3777 bp, synthetic construct
  misc_feature 1..3777: note = Description of Artificial Sequence: Synthetic coding sequence
  source 1..3777: mol_type = other DNA
atggagaagtacgtgcggctgcagaagatcggcgagggcagcttcggcaaagccatcctggtgaagtctaccgaagatgggcgacagtacgtgatcaaggaaataaatatcagcaggatgtcttccaaggagcgcgaagagtccaggagagaggtggcagtgttggcgaacatgaaacacccgaatattgtgcagtatagagagtcctttgaagagaacgggagcctttatattgtgatggattactgtgaaggcggagatttatttaagcggattaatgctcaaaagggggtactgtttcaagaggatcagattctagactggtttgttcaaatttgtctcgctttgaagcatgtgcacgatcgaaaaattctccatcgagatattaaaagccaaaatatcttcctgacaaaagatggtacagtgcaactgggcgacttcggtatagctcgggtactgaattcgacggttgaactggctcggacttgtatcggcactccttattatctgtcgcctgagatatgtgagaataaaccctacaacaacaaatcagacatttgggctctcgggtgtgtcctctacgagctctgtactctcaagcatgcatttgaggcagggtccatgaaaaatctggtgctcaaaataataagcgggagctttcccccggtgagtctgcactactcatacgacctgaggtcactggtaagtcagctctttaaacgcaatcccagagaccgcccatctgtgaacagtatattagaaaagggatttattgcaaaaaggatcgagaagtttttatccccccaattaattgcagaggagttctgtctcaagactttttcgaagtttggctcacaacctataccagccaaaagacccgcatcgggtcagaactcgatctctgtaatgccagcacagaagattaccaaacccgcagccaaatacgggattccactggcgtataagaaatacggggacaagaagctgcacgagaagaagcctcttcagaaacataaacaagctcaccagactccggaaaaacgcgtgaacaccggcgaagaacgccgcaagatcagtgaagaggccgctcgcaaaagaagacttgagtttattgagaaggagaaaaaacaaaaagatcaaataatatccctgatgaaagctgaacagatgaagcggcaggaaaaggagagactggaaaggatcaatagagccagagagcaaggctggagaaatgtcttgagtgccggcgggagcggagaggtgaaagcaccctttctcggttctggagggacaattgccccttcttcctttagctcacgcgggcagtatgaacattatcatgcaatcttcgaccaaatgcagcagcagagagcagaagacaatgaggccaaatggaaacgggaaatttacgggcggggactgcccgagcgcgggattctgcctggtgtgcgacctggatttccatacggagcggcaggacaccatcactttcccgatgctgatgatatacggaaaactttgaaacgcctgaaggctgtctccaagcaggctaacgctaataggcagaaggggcaactcgccgtggagcgggccaagcaggtagaggagttcttgcaacggaagagggaagccatgcagaacaaggctcgagcagagggacatatggtgtatctcgcgcgactgagacagatccgtctgcagaattttaacgaacgacaacagattaaggctaagctgcgcggagagaagaaagaagccaatcactccgaaggtcaggagggcagtgaggaggccgacatgcggagaaagaagatcgaaagcctgaaagcgcacgccaacgctcgtgccgccgtgctgaaagagcagctggaacgcaaaaggaaagaagcctatgagcgggagaaaaaagtctgggaagaacacctggtcgctaaaggggtgaaaagttctgatgttagccctccactgggtcaacacgaaacaggtggctctccaagcaagcagcagatgcgctctgtgatctctgttactagtgcgctgaaggaagtcggagtggactccagcctcactgacacccgcgaaacatccgaagagatgcagaagactaacaatgccatcagttcgaagcgggagatcctcagacggctcaacgagaatttgaaagcccaagaggacgagaaaggaaagcagaacctgagcgataccttcgaaattaatgtacacgaggatgctaaagaacacgagaaggagaagtcagtgagctctgaccgcaagaagtgggaggccggaggccagctcgtgattccgctcgacgaacttacgttagatacgtcattttccactactgagcgccataccgtcggggaggtgataaagttagggccgaacggcagcccacgacgagcatggggcaaatctcccaccgattctgtcctaaagattttaggggaagcagagcttcagcttcaaaccgagctcctggagaacaccacaattcgatccgaaatcagcccagagggtgaaaagtataagccgctcattactggcgagaagaaggtgcagtgcattagtcacgagattaacccaagcgccatagtagactcacccgtggaaacaaagtctccagaattctctgaagctagccctcaaatgtctctgaagctggaaggtaacctggaagaacctgatgacctggaaacagaaatcctgcaggagcctagtggaaccaacaaggatgaaagcctgccttgcacgattacggacgtatggataagcgaagaaaaggagactaaggaaacacaatccgcagacaggattacaattcaggaaaacgaagtctccgaagacggcgtgtcctcaaccgtggatcagctttctgacatccatatcgaacccggcaccaacgactcacagcacagtaagtgtgacgtggataagagcgtccagcccgagcccttttttcataaagtggtccattctgagcacctgaacctcgtgcctcaggtccagtcagtgcaatgttcacccgaggaaagtttcgcattcaggagtcactctcatctgcctcctaagaacaaaaataaaaactcactcttgatcggactctccaccggcctgttcgacgctaacaaccctaagatgctgcgcacatgctctctgcccgaccttagcaaattgtttaggacccttatggacgtgccaactgtaggcgatgtgcgacaggataatctggaaattgacgagattgaagacgagaacattaaggagggtcccagcgattcggaggacatcgtgtttgaggaaaccgatacagatctgcaggagttgcaggccagcatggagcagctcctgcgcgaacaaccgggcgaagagtattccgaagaggaagaaagtgtccttaagaacagcgatgtcgagccgaccgctaacgggacagatgtggcggacgaagatgataacccatccagcgagagcgcattgaatgaagaatggcactccgataactctgatggcgaaattgcatctgaatgtgaatgcgatagcgttttcaaccatctcgaagagcttcgattgcacctcgaacaagaaatgggcttcgaaaagttctttgaggtttatgagaagataaaggccatccacgaagacgaggatgaaaatattgagatttgctccaagattgtccagaatatattgggaaacgaacaccagcatctctatgctaaaattctgcacctcgtgatggcggatggcgcatatcaagaagataacgatgaatag

SEQ ID NO: 197332 - DNA, 3861 bp, synthetic construct
  misc_feature 1..3861: note = Description of Artificial Sequence: Synthetic coding sequence
  source 1..3861: mol_type = other DNA
atggagaagtacgtgcggctgcagaagatcggcgagggcagcttcgggaaagcaatcctagttaagtccacggaagatggacgccagtacgtgatcaaagaaattaatatatcacgaatgtcttcaaaagagcgagaggaatctcggagagaggtcgcagtgctggcaaatatgaaacatcctaacattgtccagtatagagaatccttcgaggagaatggttccctttacatagtgatggactactgcgaaggtggggacctgttcaaaaggattaacgcacagaagggcgtgctgttccaggaggaccaaatcctggactggttcgtgcagatttgcctggcgctgaaacatgtacatgatagaaagatcctccacagagatattaagtcccagaacattttcctgactaaggacggcaccgtccaactcggggactttgggatcgcccgggtcctcaatagtactgtggagctcgctcgaacatgcatcgggactccttattacctgagcccggaaatttgtgagaataagccatacaacaacaagagcgatatttgggccctgggatgtgtgctgtacgagttatgtacactgaagcatgctttcgaagctggcagtatgaaaaatctagtgctgaaaatcatctcaggctcctttccaccagtgagccttcactattcttatgatctccgctccttagtgtcgcagctgtttaaacggaatcctagggatcggcccagcgttaacagtatcctggaaaagggatttattgctaaacgcatcgaaaagtttctcagccctcagctgatcgcggaagaattttgtttgaagacattctcaaaatttggaagccaacccataccggcgaagcgccccgcctcaggccaaaactctatcagcgtgatgcctgcccaaaagatcaccaaaccagcagccaaatacggcattcctctggcatataagaaatacggcgacaaaaaactgcacgagaaaaaacccctgcagaagcataagcaagcccatcaaacccctgagaagagagtcaatactggcgaggaacgaagaaagatttcagaagaagctgccaggaagcggcggctggaatttatcgagaaggagaagaagcagaaggaccagattatctccctgatgaaggctgaacagatgaagagacaggaaaaagaacgattagagcgcattaaccgtgcgagagaacaggggtggcggaacgtgctttccgccggcggatcaggagaagttaaggccccgttcctcgggtcgggtggcaccatagccccttcatccttctccagccgggggcagtacgaacactatcacgccattttcgaccaaatgcagcaacagagagccgaggacaacgaggcaaagtggaagcgcgagatctatggccggggactgcctgagcgcggaattctgcccggagtccgcccaggattcccgtatggtgcagccggccatcaccacttcccagatgccgatgacatccgaaaaaccctgaagcggctgaaggctgtttctaagcaggccaatgcaaatagacagaagggccagcttgccgtcgaaagggcaaagcaggttgaggagtttttacagcggaaaagagaggcaatgcaaaataaggcgagggcagagggtcacatggggatcttgcagaacctggctgccatgtacggaggccgccccagtagctcccggggagggaaacctagaaacaaggaggaggaggtatatcttgcacgcttgaggcagattcgattacagaactttaatgaacgccagcagataaaggccaaattgagaggcgaaaagaaggaagccaatcattctgagggacaagaaggtagcgaagaggccgatatgaggcgtaaaaagatagaatctctgaaagcccatgctaacgcaagagcagccgtactgaaggaacagcttgaacgaaaacgtaaggaggcgtacgagcgggagaaaaaggtttgggaggagcatctggttgcaaagggcgtaaagtcatcggacgtttcaccgcccttgggccagcatgagacaggaggttcccccagcaaacagcagatgcgctccgtcatatctgtgacgtctgccctcaaagaggtgggtgttgattccagcctcacggatacccgtgaaacttccgaagagatgcagaaaactaacaatgccatctcatctaaacgagagattcttagacggctgaacgagaatttgaaagctcaggaggatgagaaaggtaagcagaacttaagcgatacgtttgagatcaacgtgcacgaggatgccaaggaacacgaaaaagaaaagtctgtcagcagcgaccggaagaagtgggaggccggaggacagttagttattcccctggatgagctaactctggacacttccttttccacgacggagcggcacaccgtcggtgaagtcatcaagctaggacccaatggatctccgcggcgggcctggggcaaatcacctacagatagcgtgttgaagattctgggggaggccgagctgcagttacagactgagctcctggagaacacaaccattcgctcagaaatttcgcctgaaggcgagaagtataagccacttattacaggcgaaaagaaagttcagtgcatctcacacgagataaatcccagcgcaatagtcgacagtcccgtggagaccaaaagtccagaatttagcgaggcttctccgcagatgtccctcaagctcgaggggaatttggaggaacctgatgacctggagactgagatattgcaggagccctccggtaccaataaagacgagagtctgccgtgcaccattactgacgtgtggatctctgaggagaaagagacaaaagaaacgcagtccgccgatcgtatcaccatccaggaaaacgaggtgagtgaagatggagtgagctccactgtggaccagctgtcggacatacacatcgagccggggacaaacgactctcagcacagcaagtgcgatgtagataagagcgtgcaacccgagccgttcttccacaaggtagtgcactccgagcacctgaacctcgttccccaggttcagtccgtgcagtgtagcccagaagagtctttcgcctttcgcagccactcccacttgccgccaaaaaacaaaaataagaactctctgctgattggtctctcgaccgggctttttgatgctaataatcccaagatgctgcgaacctgtagtctacccgatctaagtaagctctttagaactctgatggatgtgccaactgtgggggacgtgcgccaggataacctggagatcgatgaaattgaggatgagaacatcaaagaggggcccagcgattctgaggatattgtttttgaggagacagacactgatcttcaggagctgcaggcctcgatggagcagcttttgcgggaacagccaggcgaggaatatagcgaagaggaggaatccgtcctgaagaattccgacgttgagcccaccgccaatggaacggacgtcgcggacgaggacgacaacccgagttccgagtccgctctaaacgaggagtggcactcagataactctgatggagaaatagcctctgagtgtgaatgcgattccgtgttcaaccacctggaagagctccgtctacacctggaacaggagatgggctttgaaaagttctttgaggtttatgaaaaaataaaggccatccatgaggacgaggacgaaaacattgagatatgctctaaaatcgtgcagaacatcctcgggaatgaacaccagcatctgtacgccaaaatcctgcacctggtgatggccgatggtgcttatcaagaagacaatgatgaatag

SEQ ID NO: 197333 - DNA, 3645 bp, synthetic construct
  misc_feature 1..3645: note = Description of Artificial Sequence: Synthetic coding sequence
  source 1..3645: mol_type = other DNA
atggagaagtacgtgcggctgcagaagatcggcgagggcagcttcggtaaggccattctggtgaagtctacagaggacgggcggcaatatgtaatcaaagagattaatatcagccgcatgagcagcaaggagcgggaagagagccggcgggaagtggccgtgctggctaatatgaaacatcccaatatcgtgcagtacagggagagtttcgaagagaacgggagcttgtacattgtcatggactactgtgagggcggagatctctttaagcggatcaacgcccagaaaggcgtactattccaggaagatcagatcttggattggttcgttcagatttgtctggcactaaagcacgtccatgacagaaagatcctccaccgtgatatcaagtcccagaacattttcttgaccaaggacggaacggtccagttgggagattttggtatcgcaagagtgctgaattctacagttgagctggctcgcacctgcatcggcaccccctattacctgtcaccagaaatttgcgagaataagccttataacaacaaaagtgatatttgggccctcgggtgcgtgttgtatgaactgtgcaccctcaaacacgcctttgaggccgggtccatgaaaaacctggtactgaagatcatctccggaagctttccccctgtttcacttcattatagctatgatctgaggagcctagttagccaacttttcaaacgcaatcccagagatcggccaagcgtgaattctattctcgagaagggtttcattgccaagagaattgagaagttcctgtccccacaactgattgccgaagaattctgcctcaagacattcagcaaattcggctctcagccgatccccgccaagcggccggcaagtggccagaatagcatcagtgtgatgccagctcagaagatcacaaagcccgctgctaaatatggcattcccctggcttataagaagtatggggataaaaagttgcatgagaaaaagcccctgcagaaacataagcaagctcatcaaacccctgaaaaaagggttaacacaggcgaggaacggcgcaaaattagtgaagaggctgccagaaagcgacgcctggagtttattgaaaaagaaaaaaagcagaaggatcaaataatttccctaatgaaggctgagcaaatgaaaagacaagaaaaggaacgtctggagcgcataaatagggctcgcgagcagggctggcgcaatgtcctctcagcaggtggctcgggcgaagttaaggcccccttcttgggttctggaggcaccatcgctccatcctcgttctcatcgcgggggcagtacgagcattaccacgccatcttcgaccagatgcagcaacagagagctgaagataatgaagccaaatggaaacgtgagatatatggacgcggcctacctgaaagacagaagggacagttagcagtcgaaagagccaaacaggtcgaggagttcctgcagaggaagcgcgaagcaatgcagaataaggctcgagccgaaggacatatggtatatctcgctaggttgcgacagattaggcttcagaattttaacgaacgtcaacagataaaggctaaacttaggggtgagaaaaaggaggcgaatcacagcgagggccaggaaggatctgaggaggccgatatgcgccgtaaaaaaatcgaatccctcaaggcccacgcgaatgcccgcgccgctgtgctcaaggagcagctggaaagaaaaagaaaagaggcctacgaacgagagaaaaaggtctgggaggaacacctggtggccaagggggttaaatcctcagacgtgagtcccccattaggacagcacgaaaccgggggctcaccctccaaacagcagatgaggagcgttatcagtgtcacatcggctctgaaagaagtcggcgttgattcctccttgaccgatacacgcgagaccagcgaagagatgcaaaagaccaacaatgctatcagctcaaagcgcgaaattctgaggcgcctaaacgaaaacctgaaggcccaggaggatgagaaaggaaagcagaacctgagtgacaccttcgagattaatgtccacgaagacgctaaggagcacgagaaggagaaaagcgtttcaagcgacaggaagaaatgggaagccggcggacagcttgttattcccctagacgaattaactctggacacctctttctccacaaccgaacgtcataccgtgggagaagtgattaagcttgggcctaatggatccccgcggagggcttggggcaaatctcctaccgattcggtcctgaagatcctgggcgaagccgagctccagttgcagactgaactgttagaaaacaccacaatccgctctgagatctccccagaaggcgaaaagtacaaacccctcattacgggggagaagaaagtgcaatgtatttctcacgaaatcaacccctctgcaatcgtcgatagtccagttgagactaagtcacctgagttttctgaggcgtctccccaaatgagcctgaaactggaagggaatctggaagagccggacgatctcgagaccgaaattttgcaggagccctccggcaccaacaaggacgagagcctcccatgcactatcactgacgtgtggatctctgaagagaaagaaaccaaagaaacacagagcgccgacagaatcacgatccaggaaaacgaggtaagtgaggacggagtgtccagtacagtagaccagctgagcgatattcatatcgagcctggcaccaatgactctcaacatagcaagtgcgatgtcgacaaatcagtgcagccagaacccttcttccataaggtggtgcatagcgaacacttaaaccttgtgccacaggtacagtcagtgcaatgttccccagaagagtcctttgcattccggtcacacagccatcttccacctaagaataaaaacaagaattctctattaattgggctgagtacagggctattcgacgctaataaccccaaaatgttgaggacctgtagccttcctgatctgagtaagctgtttagaaccctcatggacgtcccaactgtgggagatgtgcggcaggacaatctggagatcgacgaaattgaagatgagaatatcaaagagggcccatccgatagcgaggatatagttttcgaggagacagacacagacctacaagaactgcaggctagtatggagcagctgctgcgggaacagcccggagaagagtacagtgaagaagaggagagcgtgctcaaaaactccgatgttgagccaacagctaatggtaccgacgtggcagacgaagatgacaatcccagctccgagagcgcactaaatgaagaatggcacagtgacaattctgacggcgaaatcgcctccgagtgtgaatgtgacagcgtgtttaatcatctagaggagctgagattgcacctggagcaagaaatgggcttcgagaaattttttgaagtatacgaaaagattaaagccattcacgaggatgaggatgagaacatcgagatttgttcaaaaattgtgcagaacatattgggaaacgaacaccagcacctttacgctaagatcctgcatctggtcatggcagatggagcctatcaggaggacaatgatgagtag

SEQ ID NO: 197334 - DNA, 3570 bp, synthetic construct
  misc_feature 1..3570: note = Description of Artificial Sequence: Synthetic coding sequence
  source 1..3570: mol_type = other DNA
atggagaagtacgtgcggctgcagaagatcggcgagggcagcttcggaaaagcaatcctggttaagtctacagaagatggtcgccagtacgtgatcaaagaaataaatatctctagaatgagctcaaaagagcgggaagagagcagacgcgaagtggctgtgctcgcgaatatgaaacaccctaatattgttcaatatagagagagttttgaagaaaatggctccctgtatattgtcatggactactgtgagggcggggacctattcaaacgcatcaacgcccagaaaggagtgctcttccaggaagatcagatactggattggtttgtccagatttgcctagccctaaaacatgttcacgataggaagatcctgcatagggacatcaaaagtcaaaacatcttcctcaccaaagatggcaccgtgcagctcggagacttcgggatcgctcgggtgctgaactcaacagtggagctggcccgcacctgcataggcacaccgtactatctgtcacccgagatatgcgagaataagccatataacaacaaaagtgacatttgggctttggggtgtgtgctgtacgaactgtgtacccttaagcacgccttcgaagccggtagcatgaaaaacctggtgctcaagataatttcaggctccttccccccggtctctctccattacagttacgatctgaggagtctggtcagtcaactattcaaaaggaatcctcgtgatcgaccatccgtgaactctatcctggaaaaggggtttattgcgaaaaggattgagaagttcttgtcaccacagctcatcgctgaagagttttgcctgaaaacattctctaaatttggatctcagcctatcccagctaagaggccagcctctggccaaaactccatatctgtcatgccagcgcaaaaaatcaccaaaccggccgcaaagtacgggattcctcttgcctacaaaaaatatggggataagaaactgcatgagaagaaaccgctgcaaaaacacaaacaggcacaccagaccccggaaaagagggtgaacaccggggaggaacgaagaaagatcagcgaggaggcagcccgaaagagacggctcgaattcatcgaaaaagagaagaagcagaaagaccagattattagcttaatgaaagcagaacagatgaaacgccaagaaaaagaacgcgctcctttcctcggctccgggggtaccatagccccctcctccttctccagtcgaggccagtacgaacattaccatgcgatatttgaccaaatgcagcagcagcgggccgaagataatgaggcaaagtggaaaagggaaatctatggacgtggcttgcccgaacgccagaaagggcagctggccgtagaacgggcaaagcaagttgaggaatttctccagagaaaacgtgaggccatgcaaaacaaagcacgagcggaaggccacatggtctacctggcacggttaagacagataaggctgcaaaactttaatgagcggcagcagatcaaggctaaactacgcggggagaagaaggaggccaatcattctgaggggcaggaggggtctgaggaggctgacatgagaagaaaaaagatcgagagtctgaaagctcatgctaatgcccgagccgcagtgctcaaggaacaactggaacggaagcgaaaggaagcatacgagagggagaagaaagtgtgggaggaacatctagtggctaaaggggtgaagagtagcgacgtctcccctcctttgggtcagcatgagaccggagggtctccctctaagcagcagatgcgttcggtaattagcgtcacctcagccctgaaagaagtgggcgtggattcctccctaaccgatacacgagaaacaagcgaagagatgcaaaaaaccaataacgctatcagctctaaaagagaaatccttagaaggcttaatgagaacctgaaggcacaggaagatgagaagggtaaacagaacttgtctgacactttcgaaatcaatgtccatgaagacgcaaaggaacacgagaaagaaaaaagtgttagctccgatcgaaagaagtgggaggccggagggcagctcgtgattcctctggacgaactgactctggacacgagtttcagcaccaccgaacgacacacagtaggcgaggttattaaactggggcctaacggaagccccagacgtgcatgggggaagtctcccaccgacagcgtgttgaagatcctcggtgaggccgaattacagctgcaaacagaactgttagagaacaccactatccgctctgagataagccctgagggcgagaagtataagcccctgattaccggtgaaaagaaagtacagtgtatcagtcacgagatcaatccctccgctatcgttgattctcctgttgagactaagtcaccagagttcagcgaagcgagccctcagatgtcacttaagctcgagggcaacctcgaggagcccgacgatctcgagaccgagatactgcaggagccctctggcacaaacaaagatgagtcactgccttgcaccattacagacgtctggatctccgaggagaaggagaccaaagagacacaatcggccgataggatcacgattcaggaaaatgaagtatctgaagacggggtgagttccactgtcgatcagctatcagacatccatatcgaaccagggacaaacgactctcagcacagtaagtgcgacgtagataagtccgtgcaaccagagcctttctttcacaaagtcgttcattctgagcacctgaatctggtgcctcaagtccagtcagtacagtgcagcccagaagagtcttttgcctttagaagtcatagtcatctgcccccaaagaataagaataagaattccctcctgatcggcctgagcactggcctgttcgatgccaacaacccaaaaatgttgagaacttgttcacttcctgacttatcaaaactgttccgaacgctgatggacgttcccacggtgggggatgtccgccaggacaacctcgaaatagacgagatcgaagacgaaaatattaaagaaggtccctctgactctgaagacattgtgtttgaagagactgacactgaccttcaagagttgcaggcaagtatggaacagctgttaagggaacagcccggtgaggagtattcagaggaggaggagagtgttctgaaaaactctgatgtcgagcctacggctaatggtactgatgtggctgacgaagatgacaatccctccagcgagagtgccctgaacgaggagtggcacagcgataactcagacggggagatcgccagcgagtgtgaatgcgacagcgtgtttaatcacttggaggaactacggctacacctggaacaggaaatgggattcgaaaagttctttgaagtgtacgaaaagataaaagcaatccacgaagatgaagatgagaatatagagatttgctcaaagatcgtacagaatattctcggcaatgaacatcagcacctctatgctaagatccttcacctggttatggctgacggagcctatcaggaggataatgacgagtag

SEQ ID NO: 197335 - DNA, 1155 bp, synthetic construct
  misc_feature 1..1155: note = Description of Artificial Sequence: Synthetic coding sequence
  source 1..1155: mol_type = other DNA
atgcccagccgggccgaggactacgaggtgctgtacaccatcggcacaggttcttatggaagatgccagaaaattaggagaaaatccgatggcaagattctagtatggaaggagctggattacgggagcatgacagaggcagagaagcaaatgttggtgagtgaggtgaatctgctgcgagaacttaaacacccgaacatcgttagatactacgaccggatcatagacaggaccaatacaactctatatatcgtgatggagtactgcgagggcggggatctcgctagtgttataacaaagggtactaaagaacgccaatacctcgacgaggagtttgtgctcagggttatgacccaactgacactggccctcaaggagtgccaccggaggtcggatggtgggcacactgttctgcatagagatctgaagcccgcgaatgtgtttttggacggaaagcaaaacgttaaactgggcgacttcggactggcccgtatcctgaaccacgacactagcttcgccaaaacttttgtgggaactccatactacatgagcccggagcagatgaatcggatgagttacaatgaaaagtccgatatctggtctctcgggtgcttactctatgagctctgcgctttgatgcctcccttcactgccttctcccagaaggagctggcaggaaagattagagagggaaagttccgtagaataccatatcggtacagtgatgaactgaatgagattataactcgtatgttaaacctcaaggattatcacaggccttccgtggaagagattttggagaatcctcttattgcggacctcgtggctgatgaacagaggcgcaatttagagcgaagaggcaggcagctgggagaacctgaaaaaagccaggacagctctcctgtgctttcagagttgaaactcaaagagattcaactccaggagagggagcgtgccctgaaggcgcgcgaagagaggctcgagcagaaagagcaagagctctgcgtgagggagagactcgcagaggacaaactggctcgagccgaaaatctgttgaagaactattcccttctgaaggagcgtaaattcctcagcctcgcaagcaacccgggaatgcgcatcaacctggttaataggagctggtgttacaagtag

SEQ ID NO: 197336 - DNA, 1338 bp, synthetic construct
  misc_feature 1..1338: note = Description of Artificial Sequence: Synthetic coding sequence
  source 1..1338: mol_type = other DNA
atgcccagccgggccgaggactacgaggtgctgtacaccatcggcaccggcagctatgggaggtgtcagaagatccggagaaagtctgatggaaagatcctcgtgtggaaggagctagactacggatctatgaccgaggctgagaaacaaatgctcgtgtccgaggttaatctactaagagaactaaaacatccgaatattgtgcggtactacgatcggattatcgatcgaacaaacaccacactgtatatcgtgatggagtactgtgagggtggtgacctggcctctgtaattacgaagggcaccaaagagaggcagtacctggacgaggaatttgtactccgcgtcatgacccagttaaccctcgcactaaaggagtgtcaccggagatctgacggcgggcatacggttctacatcgtgacctaaaaccagcaaatgtattccttgatggcaagcaaaacgttaaactgggcgattttggcctggcaagaatactgaatcatgacacatcatttgccaaaaccttcgttggcaccccatactacatgtcacccgaacagatgaacagaatgagttacaatgagaaatccgacatctggtccttaggatgtcttctctacgagttatgcgcattgatgcccccattcacagccttctctcaaaaggaactcgcaggcaaaattagagaaggaaagttccgaagaatcccatatcggtattcggatgaactgaatgagattattacccggatgctcaacttaaaagattatcacaggccatctgttgaagaaattctggaaaacccactgattgcagacttggtggctgacgagcaaagacgaaatcttgaaagacgaggaaggcaattaggcgaacccgaaaagtcacaagactcctcccccgtgctctcggagctgaagctaaaagaaattcagttacaggagagagaaagggcattgaaagcgcgcgaggagcgactggagcagaaagaacaggagctctgtgtgagggagagactagcagaagacaagctcgctagggctgaaaacctcttgaagaattactcactgctgaaggaacgcaaatttttgagcctggcatctaaccctgaacttctcaacctacccagcagtgtcataaaaaaaaaagtgcacttttccggcgagtctaaggagaacattatgcggagcgaaaatagcgagtctcagctgacctcaaagtccaaatgtaaggatctgaagaagcgactccacgcagcccaactccgggctcaggccctttctgacattgagaaaaactaccagcttaagagccgacagatcttgggcatgagatag

SEQ ID NO: 197337 - DNA, 1209 bp, synthetic construct
  misc_feature 1..1209: note = Description of Artificial Sequence: Synthetic coding sequence
  source 1..1209: mol_type = other DNA
atgaccgaggccgagaagcagatgctggtgagcgaggtgaacctgcttcgggaactgaaacaccctaacatcgtgcgctattacgataggattatcgaccgaacaaacacgaccctgtacattgtcatggagtattgtgagggtggagacctggcatcagtcatcactaaggggactaaagagcgacaatatctagacgaggagttcgttttgagagtcatgacacagctgacactcgctctcaaggagtgtcaccgtagatcggacggaggccacacggtgctccacagggatctcaagcctgctaatgtgttcctagacggcaaacaaaacgtaaagctgggcgacttcggcctggcccgtatactgaaccacgacaccagtttcgccaaaacttttgtcggaactccctattacatgtctcctgagcagatgaatcgcatgtcttacaatgagaaatccgacatctggagcttaggctgtttattgtacgagctatgcgcattaatgcccccctttaccgctttcagtcagaaggagcttgctggtaagataagagaggggaaattccggcggattccatatcgatacagtgatgagttgaacgagattattacccggatgctgaacttaaaggattatcatcgaccttccgttgaggagattctggagaaccctttgatagccgacctcgtagccgatgaacagcgaaggaacttagaaaggcggggacgccagctgggtgagccagagaaaagtcaggatagttctcccgtgctaagtgaactgaagttaaaagagatccaactccaggagcgggagagggcattaaaggcacgggaagagcgcctcgagcagaaagagcaagaactgtgcgtgagggaacggttggccgaggacaagctggctagagccgagaacctcctgaaaaattacagcttgctcaaagaacggaagtttttgtccctagcatccaatcctgaacttctcaaccttccaagctctgtgataaagaagaaagtccactttagtggggaatcgaaagaaaacatcatgcgctccgagaattccgaatctcagctcacaagcaagtcaaagtgcaaggacctgaaaaaacgcctgcacgctgcccagctccgcgcgcaagctctgtccgacattgaaaaaaactaccagcttaaaagccgccaaattctggggatgaggtag

SEQ ID NO: 197338 - DNA, 1521 bp, synthetic construct
  misc_feature 1..1521: note = Description of Artificial Sequence: Synthetic coding sequence
  source 1..1521: mol_type = other DNA
atggacgactacatggtgctgcggatgatcggcgagggcagcttcggcagagctctccttgtgcagcacgagtcaagtaatcagatgtttgctatgaaggagattcgcctgccaaaaagtttttctaacacccagaattcgcggaaagaggccgtgctgctcgctaagatgaagcatccaaacattgtggctttcaaggaaagcttcgaagcagagggacacctttatattgtcatggaatattgcgatggaggggatcttatgcagaagatcaagcagcaaaaaggtaagttgttccccgaggacatgattttaaactggtttacacagatgtgcttaggtgtgaaccacatacataaaaagagggttctgcatagggatattaaatcaaagaatatcttcctgactcaaaacgggaaagtaaaattgggcgattttggctcagctcgcctcctctccaatcctatggcctttgcatgcacctacgtcggtacaccatattacgtgccgcccgaaatttgggagaacctgccctacaacaacaaaagcgacatttggagcttgggttgtatactttacgagctttgcactctcaagcatccctttcaggcgaacagctggaagaatctaattttaaaggtgtgccaaggatgtatctccccccttccaagccattatagctacgaactgcaattcttggtgaagcagatgtttaaaaggaatcccagccatcgaccttcagccaccaccctcttgtcacggggcatagtggcccgcctggttcaaaaatgccttcccccagagataatcatggagtatggggaggaggtactggaagagatcaagaactctaagcacaatacccctcgaaagaaggctaaccctagccgcatccgcatcgcactgggcaatgaggcttctacagttcaagaggaggagcaggatagaaagggttcgcatacggaccttgagtcaattaatgagaatctggttgagtctgcactgcggcgcgtgaacagggaggaaaaggggaacaaaagcgtgcacctgagaaaggctagttccccgaatctacacagacgccaatgggagaagaacgtgcccaatacagcccttacagccctggaaaacgcaagtatcctgacttctagcctaaccgccgaggacgatcggggaggctcagtgatcaagtattccaaaaatactactcggaagcaatggctcaaggagacaccagatacactgttaaatattctgaaaaatgccgacctcagcttagcttttcagacgtacaccatctatcgcccgggttccgagggcttcctgaagggccctctgtcagaagagacggaggcttcagactccgtggatggcggacacgatagtgtcattctggatccagagaggctggaacctggcctggatgaagaggacacagacttcgaagaggaagacgacaatccagactgggtgtcagaattgaagaaacgagccggttggcagggcctgtgcgacagatag

SEQ ID NO: 197339 - DNA, 1521 bp, synthetic construct
  misc_feature 1..1521: note = Description of Artificial Sequence: Synthetic coding sequence
  source 1..1521: mol_type = other DNA
atggacgactacatggtgctgcggatgatcggcgagggcagcttcggtcgagccctactggtacagcacgaaagtagcaatcaaatgttcgctatgaaggagatcagactgcctaaatctttcagtaatacacagaactcacggaaggaggcagtcttattggccaaaatgaagcaccctaatattgttgccttcaaggagtcatttgaggcagagggacatttatatatcgtgatggaatattgcgatggaggcgatctaatgcagaagatcaagcaacagaagggcaaattatttcccgaagatatgattttaaattggttcacacagatgtgtttgggtgttaatcacatccacaaaaaaagggtgttacatagagacataaagagcaagaacattttcctgacgcagaacggaaaggtcaaactgggagatttcgggtcggcgcggttacttagtaacccgatggcttttgcttgcacctatgtgggaacaccatactatgtgccacctgagatttgggagaaccttccttataacaacaaatctgatatttggtccctgggctgcatcctgtacgagttatgcaccctcaagcaccccttccaggccaatagctggaagaatcttatactcaaggtgtgccaaggatgcattagccctctcccctctcactactcctacgagttgcagttcttggtcaagcaaatgttcaaacgaaacccctcccaccgaccatccgccaccacactgttgagccgcggcattgttgcacgcttggtccagaagtgccttcccccggagataataatggagtacggagaagaggtcctggaggaaattaaaaactccaagcataataccccacggaagaaggccaacccatctaggattcggatcgcactagggaacgaagcatctaccgtgcaggaggaggaacaggatagaaaaggctcccacacagatttggagagcatcaatgaaaatctagtagaaagtgcccttcgaagggttaatcgggaggaaaaaggtaataagtcggtgcacctccgcaaagcgtcttcaccaaatctgcaccgcaggcaatgggaaaagaatgtgcctaacacagcccttaccgccctcgaaaacgccagtatccttacctcatctctgacagcagaagatgaccgagggggctccgttatcaaatacagcaaaaatacaacccgcaaacaatggttgaaggagactcctgacacccttctgaatattctaaagaatgcagacttgagcctcgcgtttcaaacatacacaatctacagacctggcagtgaagggtttctgaagggccccctctccgaggaaacggaagcgtcggactctgtggacgggggacacgactctgtcatcctggatcctgagagattagaacctggtcttgacgaggaggacaccgatttcgaggaagaggatgacaaccctgattgggtatcagagctgaaaaagcgagcagggtggcaaggtttgtgtgatagatag

SEQ ID NO: 197340 - DNA, 1470 bp, synthetic construct
  misc_feature 1..1470: note = Description of Artificial Sequence: Synthetic coding sequence
  source 1..1470: mol_type = other DNA
atggacgactacatggtgctgcggatgatcggcgagggcagcttcggacgggccttattagttcaacatgagtcatctaatcagatgttcgccatgaaggagatccgactacccaagagcttctcaaacacacagaattcacggaaggaggcggttctgctggctaagatgaagcatcctaacatagtagccttcaaggaaagctttgaggccgagggccacttgtatattgtcatggagtattgcgacggcggagacctaatgcaaaaaatcaaacagcagaaaggaaagctcttccctgaggacatgattctgaactggtttacgcaaatgtgcctgggcgttaatcacattcataaaaagcgagtgttgcaccgggatattaagtccaaaaacatctttctgactcagaacggcaaggtaaagttaggagacttcggttccgcaaggctgctgtcaaacccaatggccttcgcgtgcacctatgtaggcactccatattatgtgccaccagagatttgggaaaatttgccttataacaacaagagcgatatttggtccctgggatgcatactgtacgagctttgcactcttaaacatccctttcaggctaacagttggaagaatcttatccttaaggtgtgtcaaggctgtatcagccctttgccatcccattactcctacgagctgcagttccttgtcaagcaaatgtttaaacggaacccatctcaccgcccgtcagctacaacgctactctctcgaggaattgtagcacggttagtgcagaaatgtctcccaccagagattatcatggagtatggggaagaggtcctcgaggagattaagaactctaaacacaacaccccccgaaaaaaacaggaggaggagcaggatagaaaggggtctcacaccgatctggaatcaattaacgaaaatttggtggagtcggcattacggcgtgtcaaccgagaggagaagggtaataaatcggtccacttacggaaggcctctagcccaaatctacacaggcggcagtgggaaaagaatgtgcctaatactgctctgactgcccttgaaaacgccagtatactaacttccagccttaccgctgaggatgaccgcggaggatccgtgataaagtatagcaagaatacgactcggaaacagtggctaaaggagactcccgacactcttctgaacattcttaaaaatgcagacctctcccttgcttttcagacatacactatctatcgcccaggcagtgagggttttctgaaaggccccctgtcggaggagactgaagcatccgacagtgtcgatggcggtcacgatagcgttatactagatccggaacgactcgagcccgggcttgatgaggaggacacagattttgaggaggaagatgacaatccagattgggtgtccgagctgaagaagagagccggttggcagggcttgtgcgatcgatag

SEQ ID NO: 197341 - DNA, 1533 bp, synthetic construct
  misc_feature 1..1533: note = Description of Artificial Sequence: Synthetic coding sequence
  source 1..1533: mol_type = other DNA
atgcagttcggccgggcccacggcgactgcgtgagcggcgcccagctctgcgggtgtccttccatggacgactacatggtgcttcgcatgataggagaaggctccttcggaagagccctcctggttcaacacgagagctcaaaccaaatgtttgcaatgaaggagataagactgccaaagtctttctccaacacacagaattcccgaaaagaggcagtactactggcaaaaatgaagcatccaaacatagtggcctttaaagaatctttcgaggctgaaggacacctgtacatcgtgatggagtactgcgacggtggggacctgatgcagaagattaagcagcagaaggggaagttgttcccagaggatatgatcttaaactggttcacccagatgtgtctcggagttaaccatatccacaaaaaacgcgttcttcaccgcgacattaagtctaaaaacattttcctgacccaaaatggaaaagtaaaactgggcgatttcggcagcgcaaggctcctgagcaacccaatggcattcgcctgtacgtatgtgggaactccctattatgtcccacccgaaatttgggagaacctgccgtataataacaagtccgacatctggagtctgggctgtatcttgtatgagttatgtacgctcaaacacccttttcaggcgaactcctggaagaacttgatattgaaggtttgccaaggttgcatctctccccttccctctcactatagctatgagttacagttcctggttaagcagatgtttaagcggaatccttcccaccgaccatcagctactacattactcagccgtggcatcgtagctcggctcgtacagaaatgtttgcctccggagatcatcatggaatacggcgaagaggttctcgaggagataaagaattccaaacataacactcccaggaagaagcaggaagaagaacaagatcgaaaaggctctcacactgacctcgagagcataaatgagaacctcgtggaaagcgcactgagacgcgtcaatagggaggagaaaggtaataagagtgtccacctgcgcaaagccagttcacccaatctgcaccggcggcagtgggagaagaatgtacctaacacggccctgaccgcactagaaaatgcctccattcttacgagcagcctcactgctgaggacgaccgcggtggctcggtcatcaaatactccaagaatactaccaggaagcagtggcttaaggaaacccccgataccctcttaaacattttgaagaacgcagatcttagtctcgcatttcagacctatactatctaccgcccaggctccgaaggcttccttaaagggcccctatctgaggaaacagaggcctcagattcggttgatggcggtcatgactccgtgatcctggaccctgagaggctcgaacccggactggatgaagaagataccgattttgaggaagaagacgataatcctgattgggtcagtgaactgaaaaaacgcgccggctggcagggattatgtgaccgctag

SEQ ID NO: 197342 - DNA, 177 bp, synthetic construct
  misc_feature 1..177: note = Description of Artificial Sequence: Synthetic coding sequence
  source 1..177: mol_type = other DNA
atggacgactacatggtgctgcggatgatcggcgagggcagcttcgggcgggccttactggtccagcatgaatcctccaaccagatgtttgctatgaaggaaatcaggctccccaaatcctttagtaacactcagaactcacggaaagaggccgtgttgctcgccaaaatgaaatag

SEQ ID NO: 197343 - DNA, 510 bp, synthetic construct
  misc_feature 1..510: note = Description of Artificial Sequence: Synthetic coding sequence
  source 1..510: mol_type = other DNA
atggcccggggcggcgacaccggctgcaccggccccagcgagacctccgcatcgggcgcagcagccattgccttgcccggacttgagggcccggctaccgacgctcagtgccagaccttgccattgacagtattgaagtcccgctctccctctcccagaagcctgccccctgcccttagttgccctcctccacagcccgcgatgctggagcacctcagcagcctgcctacccagatggattataaggggcaaaaactggccgaacagatgtttcaggggattattttgttttctgctattgtcggatttatctatggatatgttgcggagcagtttggttggactgtgtacatagttatggcaggctttgcatttagctgcctcctgaccttgccaccatggcctatctaccgccgccaccccctcaagtggctgccagttcaggaatcaagcacggacgacaaaaaacccggagaaagaaaaattaagcggcacgcaaaaaataactag

SEQ ID NO: 197344 - DNA, 2259 bp, synthetic construct
  misc_feature 1..2259: note = Description of Artificial Sequence: Synthetic coding sequence
  source 1..2259: mol_type = other DNA
atgcccctggccgcctactgctacctgcgggtggtgggcaagggcagctatggagaggttacccttgtgaagcaccgccgggacgggaaacagtacctacacgagaagcacatccttcaccgcgatttgaagacacaaaatgtattcctcactcggaccaatataatcaaggttggagatctgggtattgcaagggtccttgagaatcattgtgacatggcctcaactttaatcgggactccttattatatgagccctgagctgttttctaacaagccctataattacaagagtgatgtgtgggcgcttggctgctgtgtttatgagatggctacactgaagcacgcgtttaatgccaaggacatgaactcccttgtgtatcggataatagaagggaagttgcccccaatgcctagggactattcccctgagttagctgagctgatccgaactatgctcagcaagagacccgaagagcggccatctgttcgctctattttacgacagccttacattaagaggcagatttcattctttcttgaggcaacaaaaattaagacctctaagaataacatcaagaacggcgactcccagagcaagccctttgctaccgtggttagcggggaggctgaaagtaatcatgaggtgatccacccccagcctctctcttccgagggaagccagacctacatcatgggggaaggaaaatgtttgtcccaggagaaacctagggcgagtggattgctcaaaagtccagcatccctgaaggcacatacatgcaagcaggatctctccaacacaacagagctggctacaatcagttccgtgaatatcgacattctgcccgctaagggcagagattcagtgtccgacgggtttgtgcaggagaaccagcctagataccttgatgcaagtaacgaattgggtggcatctgctccatcagccaagtggaggaagaaatgttgcaggacaataccaagagctcagcccagcccgagaacctgatcccaatgtggtccagcgacatcgtcactggcgaaaaaaatgagccggtgaagccccttcaaccacttatcaaggaacagaaaccaaaggaccagtctttggctctgtcacccaagctggagtgcagtgggaccatcctcgctcattcgaacctgcggctgctggggtcaagcgactctccggcaagtgcctcacgcgtggcgggcattaccggagtgtgccaccacgcacaggaccaagtggcgggggaatgcatcattgaaaaacaagggaggatacatcccgacctccagccacacaatagtggctcggaaccaagcctcagccggcaaaggaggcagaagcggagggagcagacggaacatcggggagaaaagcggcaggtaagacgcgacctgttcgcattccaggaatctccaccgaggttcctgccttcccatccgatagtgggcaaagttgatgtgacctccacccagaaagaagccgaaaaccagaggcgagtggtgacagggtccgttagtagctcacgatcttctgagatgagtagcagtaaagacagaccactcagcgcgcgtgagaggcgacgcttgaaacagagccaggaggaaatgagtagctcgggcccgtcggtacggaaggccagcttgagtgtggcagggcctggaaagcctcaagaggaagatcaaccactccccgcaaggcggctgtcgtccgattgctctgttacccaagagcgtaaacagattcattgcctctctgaggatgaactctctagttcaacaagttctacggataagtctgacggggactacggcgaagggaaggggcaaaccaacgagattaacgcccttgtccagctaatgactcagaccctcaaacttgactctaaggagtcctgtgaggacgtgccggtagctaaccccgtttcagaattcaagctgcataggaaataccgcgatactctcatcttgcatggcaaagtggccgaagaagccgaagaaatacacttcaaagaactccccagcgccattatgcctggcagtgagaaaattcgccgacttgtagaagtgttacgcaccgacgtgatccgcgggttgggtgtccaactactggaacaggtttatgacctgctcgaggaggaggacgaattcgatcgggaagtgcgcctgagagagcatatgggtgagaaatacacgacctattctgtcaaggcacgtcagctcaaatttttcgaagagaatatgaatttttag

SEQ ID NO: 197345 - DNA, 942 bp, synthetic construct
  misc_feature 1..942: note = Description of Artificial Sequence: Synthetic coding sequence
  source 1..942: mol_type = other DNA
atggccggccagcccggccacatgccccacggcggcagcagcaacaacctgtgtcacacattaggccctgttcaccctccagatcctcagcgccatccaaatacgctgtcattcaggtgcagcctggcagacttccagatcgaaaagaagatcgggcggggacagtttagcgaggtgtataaggcaacctgcctactggatagaaaaactgtcgccctgaaaaaagtacagattttcgagatgatggacgcaaaggctaggcaagattgtgtgaaggaaatcggtttgcttaagcagcttaaccacccgaatattattaagtatcttgattccttcatagaggataacgaactcaacatagtgctggaactggctgacgcaggcgacctgtcccagatgattaaatattttaaaaaacaaaagcgcctgattccggaacggaccgtctggaaatactttgtgcagctgtgcagtgcagtggaacatatgcactctcgaagagtgatgcatagagatatcaagccagccaacgtgtttataacagccaccggcgtcgtgaaactgggagatctgggtctcgggaggtttttctcatcagaaaccacagcggcccactcactggtcggcaccccttactatatgagtcccgaacgcattcacgagaacggctataacttcaagtccgatatttggagcctggggtgtctgctgtatgaaatggccgccctacagtcaccattctatggagacaagatgaatctgttctcattatgtcagaagatcgagcaatgtgattatcctccattgcctggcgaacactatagtgagaaactgagagagctggtttctatgtgcatctgccccgacccccatcaacgacctgacatcggctacgtccatcaggttgccaagcagatgcatatctggatgtccagtacttag

SEQ ID NO: 197346 - DNA, 624 bp, synthetic construct
  misc_feature 1..624: note = Description of Artificial Sequence: Synthetic coding sequence
  source 1..624: mol_type = other DNA
atggccggccagcccggccacatgccccacggcggcagcagcaacaatctgtgtcataccctggggccggttcaccctcctgaccctcagcgccaccccaacacccttagcttccggtgctcacttgcagattttcagattgaaaaaaaaataggaaggggacaattctccgaggtgtacaaagccacttgcctgcttgacagaaaaaccgtggccttaaagaaagtgcagatcttcgagatgatggatgccaaggctcggcaagactgcgtgaaggagatcggcctgcttaaacagctaaaccaccctaatatcattaagtatcttgacagttttatcgaggataatgagctgaacatagtcctggaactcgcggacgctggggatctgtcacaaatgatcaagtacttcaaaaagcagaagcggctcatcccggaacgaaccgtctggaaatactttgttcagttatgttcagccgtggagcatatgcatagtaggcgcgtgatgcatcgcgatataaagcctgcgaacgttttcatcacggccacaggcgttgttaagttaggcgacctggggctgggaagattcttcagtagtgaaaccacagccgctcattcactgtag

SEQ ID NO: 197347 - DNA, 1044 bp, synthetic construct
  misc_feature 1..1044: note = Description of Artificial Sequence: Synthetic coding sequence
  source 1..1044: mol_type = other DNA
atgccccggcgggaggtgtgctgggaggccgcccacttccggcaggaggaacagtcacttcccaggccgagggttagagcccttgtacggttggcctgtagaatggccggtcaacccggtcacatgccacacggcggttcgtcgaacaatttgtgtcataccctgggaccagtccatccacccgaccctcagagacaccccaataccctgtcatttcgttgcagcctcgccgattttcagatagagaaaaagatcggacggggccagttcagcgaggtgtataaggccacatgtcttttggaccgcaaaactgtggccctgaaaaaggttcagatcttcgagatgatggacgccaaagcccgccaggattgtgtgaaggagatcgggctgttgaaacagctgaatcaccctaacattattaaatacctcgacagtttcatcgaggacaatgagttgaacatagtcctcgagctggccgacgctggggacctgtcacaaatgatcaaatacttcaagaaacagaaaagactcattcctgagcgcactgtatggaagtatttcgtccaactgtgttctgctgttgaacatatgcactcccgtagggtgatgcatagagatatcaagccagcaaatgttttcataacggccacaggcgtggtaaagttaggcgacctgggtctcggacgatttttttcttcagagaccaccgcggcacactctctagtcggcaccccatactacatgagcccagagagaattcacgagaacggttacaatttcaaatctgatatctggtcgctgggatgcctcctttacgagatggctgcgctgcaaagcccattctacggggacaagatgaaccttttcagcctgtgtcaaaaaattgagcagtgcgattatccgcccctgccaggtgaacattactctgaaaaactacgcgaactcgtgagtatgtgcatctgccccgacccacatcagcgtccggatatcggctacgttcaccaggttgccaagcagatgcatatttggatgtcctctacatag

SEQ ID NO: 197348 - DNA, 738 bp, synthetic construct
  misc_feature 1..738: note = Description of Artificial Sequence: Synthetic coding sequence
  source 1..738: mol_type = other DNA
atggccggccagcccggccacatgccccacggcggcagcagcaacaacttgtgccataccctgggtcctgtccaccctccagaccctcagcaactcaatcaccctaatattatcaaatatctggatagtttcatcgaagacaacgaactcaacattgtgttggagctcgccgacgctggcgatctttcgcaaatgatcaaatatttcaaaaaacagaagagactgatacctgaaaggaccgtctggaagtattttgtgcagctgtgctctgctgtggagcacatgcactcaaggcgtgtgatgcacagagatattaaaccagccaacgttttcatcactgcaaccggcgtggtgaagctgggggacctaggcctgggaagatttttctctagcgagacaacagctgcacattccctggtgggaactccttattacatgtctccagagcgcattcacgaaaatggctacaacttcaaatcggatatctggagtctggggtgtctgctgtacgagatggcagcgctgcaatcacccttctatggcgataaaatgaacctcttttccctgtgtcagaaaatcgaacagtgcgactatcccccgttacccggggaacactactccgagaagctgagggagttggtgagcatgtgcatatgccccgacccgcaccagaggcccgacattgggtatgttcatcaggtggcaaagcagatgcatatctggatgagctctacttag

SEQ ID NO: 197349 - DNA, 942 bp, synthetic construct
  misc_feature 1..942: note = Description of Artificial Sequence: Synthetic coding sequence
  source 1..942: mol_type = other DNA
atggccggccagcccggccacatgccccacggcggcagcagcaacaacttgtgccacactttgggacccgtacatccgccggacccacagaggcacccaaataccctgagttttaggtgctccctagcagacttccagattgaaaaaaaaataggtaggggtcagtttagcgaggtctacaaggccacatgccttctggacaggaaaactgtggcactcaaaaaagttcaaatattcgaaatgatggacgcaaaggcgcggcaagactgtgtgaaggagattggtctgcttaaacaacttaatcaccccaacatcatcaaatatctggattcattcatcgaggataatgagttgaacatcgtgctggagctggcggatgcaggcgatctttcgcagatgattaagtacttcaagaagcagaagcgtttgatccccgagagaaccgtgtggaaatacttcgtgcagctatgctctgctgttgagcacatgcattcaaggcgtgtcatgcatagagatattaagccggctaatgtctttatcacagccactggggtcgtgaagctgggcgatctcggtctgggtcgctttttcagttcagaaacaacagccgcgcacagccttgtcgggaccccctattacatgagccccgaaagaatacacgagaatgggtacaactttaagtccgacatatggtccctcgggtgtttgctttatgagatggccgccctccagagccccttttatggggataaaatgaacctgttttccctgtgtcagaagattgagcaatgtgactatcctccccttcctggggagcactacagcgagaagcttagagaactcgtcagcatgtgcatttgtccggaccctcaccagcgcccagacatcggctacgtccaccaggtcgcaaagcagatgcatatttggatgtcctccacttag

SEQ ID NO: 197350 - DNA, 1044 bp, synthetic construct
  misc_feature 1..1044: note = Description of Artificial Sequence: Synthetic coding sequence
  source 1..1044: mol_type = other DNA
atgccccggcgggaggtgtgctgggaggccgcccacttccggcaggaggaacagtctcttcctcgccctcgcgtgcgcgcactggtgaggctcgcctgccgcatggcaggacagccagggcatatgcctcatggaggttcaagtaataacctttgtcatactctgggccccgtgcacccgcccgacccacagcgacatccaaatacactttcctttagatgctctctggctgatttccagatagagaagaagatcgggagaggtcaattttctgaggtctataaggccacatgtttactggaccgcaagacagtggcactgaaaaaagtccagattttcgagatgatggatgccaaagctcgacaggattgcgttaaagagatcggcctgctcaagcagctgaatcatcccaacataatcaagtatctcgactccttcatcgaagacaacgaactgaatatcgtgctggagctggctgacgctggagacctcagtcagatgataaagtacttcaagaagcagaagcgcctcatcccagagcgaactgtctggaaatactttgttcagctctgctctgccgtcgagcacatgcacagtcggagggttatgcatcgcgacatcaagcccgctaatgtgtttatcaccgctaccggagtagttaagctgggcgaccttggtttgggaaggtttttcagctccgagacgaccgctgctcacagccttgttggtaccccctactatatgagtcccgagaggatccatgaaaatggctacaatttcaaaagcgacatctggagcctgggctgtctcctctatgagatggccgccctgcagtcccccttctacggagataaaatgaacttgttttccctctgccaaaagattgagcagtgtgattatccccccctgccgggagaacactattctgaaaagttgagagaacttgttagcatgtgcatttgcccagatcctcaccaaagaccggacatcgggtacgttcaccaagtggccaagcaaatgcatatatggatgagctccacatag

SEQ ID NO: 197351 - DNA, 663 bp, synthetic construct
  misc_feature 1..663: note = Description of Artificial Sequence: Synthetic coding sequence
  source 1..663: mol_type = other DNA
atggccggccagcccggccacatgccccacggcggcagcagcaacaatctgtgtcatacgctgggccctgtgcaccccccagatccacagcgtcaccccaatactcttagctttcggtgtagtctcgccgactttcagatcgagaaaaagattggaagaggccagttctctgaagtttataaggcaacctgtttgctcgatcgcaagacagtcgcactgaaaaaagtgcagatctttgagatgatggacgcaaaagcgaggcaagattgcgtgaaagagataggcctgctaaagcagttgaatcacccaaatatcataaaatatcttgatagtttcatagaggataatgagctgaacatcgtgttagaattggcagacgcgggagatttatcacagatgattaagtatttcaagaagcagaaaaggctgattcccgagagaaccgtatggaagtattttgtgcagctgtgctctgctgtggaacacatgcatagtcggcgggtgatgcaccgagacattaagccggccaacgtgtttataactgctaccggggtggtgaagttgggcgatctgggcttgggccggtttttttctagtgaaactacggccgcccactctctggtggggacaccttattacatgagcccagagcggatacactag

SEQ ID NO: 197352 - DNA, 585 bp, synthetic construct
  misc_feature 1..585: note = Description of Artificial Sequence: Synthetic coding sequence
  source 1..585: mol_type = other DNA
atgccccggcgggaggtgtgctgggaggccgcccacttccggcaggaggagcagtctctgcctcgcccaagagtaagggctctggtgcggctcgcatgtaggatggctgggcaaccaggacatatgccacatggcggcagttccaacaatctctgtcacaccctcggcccggtccaccctccagatcctcagcgccacccaaataccctatcattcaggtgctctctcgcagatttccagattgagaagaagattgggcgcgggcagttttcagaggtctacaaggccacatgcctcttagatagaaaaaccgtggcactgaaaaaagtccagatttttgaaatgatggacgcgaaagcgcgtcaggattgtgttaaggagattggactcttaaagcaattaaatcacccaaacattatcaagtaccttgatagtttcattgaggacaacgaactcaatatcgtgctggagctggctgatgcaggcgatctcagtcagatgattaagtattttaaaaagcagaaaagactcataccagagaggaccgtgtggaaatatttcgttcagctgtgctcagccgtgtag

SEQ ID NO: 197353 - DNA, 669 bp, synthetic construct
  misc_feature 1..669: note = Description of Artificial Sequence: Synthetic coding sequence
  source 1..669: mol_type = other DNA
atggccggccagcccggccacatgccccacggcggcagcagcaacaacttgtgccacactttgggtccagtgcatccacccgatcctcagcggcatccaaataccctctcattccggtgcagcctggcggactttcagatcgagaaaaagatcggcaggggacagttctctgaggtatacaaggcaacctgcctgcttgaccgcaagacagtcgccctcaagaaggtccagattttcgaaatgatggacgctaaggcccgccaggattgcgtgaaggaaatcgggctactcaaacagctgaaccatcctaatattatcaaatatctcgattcattcatcgaagataacgagctgaatattgtgctagagttggctgacgcaggcgacttgtctcaaatgattaaatattttaagaagcagaaaaggctgatacccgaaagaaccgtgtggaagtacttcgtccaactgtgctcagctgtggaacacatgcattcccgacgggtcatgcaccgcgatattaaaccagcgaacgtctttataacggctactggagttgttaagttgggagatctgggtctgggcaggttttttagctccgagaccaccgccgcccatagtcttgtgggaaccccttactacatgtcccccgagcggattcacgagaattag

SEQ ID NO: 197354 - DNA, 660 bp, synthetic construct
  misc_feature 1..660: note = Description of Artificial Sequence: Synthetic coding sequence
  source 1..660: mol_type = other DNA
atggccggccagcccggccacatgccccacggcggcagcagcaacaacctgtgccataccctcggcccggtgcaccccccagaccctcaaagacaccctaataccttgtcattcagatgctctctcgcagatttccagatagaaaaaaaaattggccgcgggcaattcagcgaagtttataaggctacatgtctcctggataggaagaccgtggcacttaaaaaggtgcagatattcgagatgatggacgccaaagcccgtcaggactgcgtgaaagaaatcggtcttctgaagcaactgaaccatcccaatattatcaagtatctagattcgtttatagaagacaatgagcttaacatcgtcttggagctggccgatgcaggcgacttgagtcagatgattaaatactttaagaagcagaaacgcctgattcccgagcggacggtgtggaagtatttcgtgcagctgtgctcagctgtggagcatatgcactctcgtcgggtgatgcacagagatattaaaccagccaacgttttcatcacagccacaggcgtggtgaagctgggcgacctggggcttggtaggttcttttcctccgagaccactgcagctcattctttggttgggaccccttactacatgtcccccgagaggatttag

SEQ ID NO: 197355 - DNA, 516 bp, synthetic construct
  misc_feature 1..516: note = Description of Artificial Sequence: Synthetic coding sequence
  source 1..516: mol_type = other DNA
atggccggccagcccggccacatgccccacggcggcagcagcaacaatctgtgccacacactcggtcctgtccaccctccagacccccagcgacacccgaacaccctgtccttcaggtgttcgctagcagacttccagattgagaaaaagatcggccggggacaatttagtgaagtctataaagccacttgtttgttagatagaaagaccgtcgcactgaaaaaagttcaaatttttgagatgatggatgctaaagccagacaggattgtgtcaaggaaataggactgctcaagcagctaaaccacccaaatattataaaatacctggatagcttcattgaggacaacgaattgaatattgtccttgaactggctgatgctggcgacttgagtcagatgattaaatactttaaaaagcaaaaaaggctgatccccgagcggacggtctggaaatatttcgttcaactttgctctgcggtggagcatatgcatagcagacgggttatgcaccggtag

SEQ ID NO: 197356 - DNA, 606 bp, synthetic construct
  misc_feature 1..606: note = Description of Artificial Sequence: Synthetic coding sequence
  source 1..606: mol_type = other DNA
atggccggccagcccggccacatgccccacggcggcagcagcaacaatctgtgtcacacattgggacccgtgcaccccccagacccacagcagcttaaccatccaaatatcatcaagtacttggactcatttattgaggacaacgaactcaacatcgtgctggagcttgctgatgccggagacctatcacagatgataaagtactttaaaaagcagaaacgtcttattccggagcgcacagtgtggaaatacttcgtgcagttgtgttcagccgtggagcatatgcactcacggcgggtgatgcatagggatataaaaccagctaacgttttcatcacagccaccggagtggttaagctgggggatcttggtctcgggagattttttagctctgaaaccactgctgcacattctctggttgggacaccatattatatgtcccctgagagaatacatgagaatgggtacaattttaaatcagatatttggtctcttgggtgcttgttatatgagatggctgctcttcagtcccctttttatggagacaaaatgaacctgttctctttgtgccagaagatcgaacagtgtgactaccccccactgtag

SEQ ID NO: 197357 - DNA, 1017 bp, synthetic construct
  misc_feature 1..1017: note = Description of Artificial Sequence: Synthetic coding sequence
  source 1..1017: mol_type = other DNA
atggaggccaccggctgggacagccggtgcagccccggcacccaggtgagagctcttgttcggcttgcttgccgcatggccggccagccaggacatatgcctcacgggggatcttcaaataacctgtgccatacacttggacctgtccaccccccggatccccagcgccatccaaacacgctgagcttccggtgcagtctggctgacttccagatcgaaaagaaaatcgggagaggtcagttttctgaggtgtataaggccacttgtttactggatagaaagacagtggcactgaaaaaagtgcaaatcttcgagatgatggacgctaaagcgaggcaggattgtgtgaaggagatcggcctcctgaaacagctgaatcatccaaatatcattaagtatttggatagctttattgaggacaatgaactgaacatagttctggaactggccgacgcaggagatttaagtcagatgatcaaatacttcaagaaacagaagaggctgattccggagcgcacagtgtggaaatacttcgtgcagctgtgtagtgccgttgaacacatgcattcacgccgagtaatgcatcgtgacatcaagcctgccaacgtgttcatcacagcaactggggtcgtcaaattgggagacttgggactcggtagattcttctcatctgagactacggccgcacatagcctggtcggtactccctactatatgagccctgaaagaatacacgagaatggctacaatttcaagtctgacatatggtcccttggctgtctgctgtatgagatggcggccctgcagtcaccattttatggcgacaagatgaacttgtttagcctatgccagaaaatagagcagtgcgactaccctccactgcctggagagcattactccgagaagctgcgagagctagtaagcatgtgcatatgcccggaccctcaccagcggcctgatatcggatatgttcaccaagtagctaagcagatgcacatctggatgagttctacctag

SEQ ID NO: 197358 - DNA, 996 bp, synthetic construct
  misc_feature 1..996: note = Description of Artificial Sequence: Synthetic coding sequence
  source 1..996: mol_type = other DNA
atgggccggcggcggcccgcccccttccgggccctggtgcggctggcttgtcgaatggcaggtcagccaggtcacatgccgcatggcgggtcttccaacaacttgtgtcacacgctcgggcccgtccatccccccgacccacagcggcatcccaacactctgtcattccgttgttctctggcagactttcagatcgaaaaaaagatcgggcgcggtcagttcagcgaggtctataaagccacctgcctgttagatcggaaaactgtggcactgaagaaggtgcaaatattcgagatgatggacgccaaggctcggcaggattgcgtaaaagagataggcctactgaagcagttaaatcatccaaatataattaagtatttggactcctttattgaggataacgagctgaacattgtactcgaacttgcagacgccggcgatctgagtcagatgataaaatactttaaaaaacagaagcgcctcattcctgaacggactgtatggaagtattttgtgcagttgtgttccgctgtggaacacatgcactccagaagagtgatgcatagggacattaagccagctaacgtcttcattaccgcaactggcgtggtaaagctgggggacctgggattaggaagatttttctccagcgagacaactgctgcacatagcctcgtcggcacgccatactatatgagtccggaaagaatccatgagaatggatacaatttcaagtcagacatctggtctctgggctgtctgctttatgagatggctgccctacagtcgcccttctacggggataagatgaacctgttttcactttgtcagaagatagagcaatgtgattatccaccactgccgggagagcattattctgaaaagctacgggaattggtttccatgtgcatctgtccggaccctcatcagcgccctgatattggttatgtgcaccaggtcgccaagcagatgcacatatggatgagtagtacctag

SEQ ID NO: 197359 - DNA, 942 bp, synthetic construct
  misc_feature 1..942: note = Description of Artificial Sequence: Synthetic coding sequence
  source 1..942: mol_type = other DNA
atggccggccagcccggccacatgccccacggcggcagcagcaacaatctgtgtcacacacttgggccagtgcatccacccgatcctcagcgccaccccaacaccctcagcttcaggtgctccctggccgatttccaaatagagaaaaagatcggccgaggccaattcagcgaggtttataaggctacctgtctactcgacaggaagaccgtcgcacttaagaaggtgcagatctttgagatgatggatgctaaggcccggcaggactgtgtgaaagaaatcggcctcctcaaacaactgaaccacccgaacattatcaaatacttggatagcttcatcgaggacaatgagctgaacattgtcctggagttggctgacgccggtgacctgagtcagatgataaaatacttcaaaaagcagaaacgattaatcccggaacgcacagtgtggaaatattttgttcagctgtgtagcgctgttgagcatatgcacagccggcgagtaatgcacagggacattaaacctgctaatgttttcatcactgccacaggcgtggttaagctgggggatctgggtctgggccgcttcttctcttcagagacgactgctgcacattccctcgtcggtacgccttactacatgagcccagagaggatccacgagaatgggtacaactttaagtctgacatctggagcctggggtgcctactctacgagatggctgccctgcagtccccgttctatggggataaaatgaacctctttagcttgtgccagaaaattgagcagtgcgattaccctccactgccaggagaacactattccgagaagctgcgcgagttggtgtccatgtgcatctgtccagacccacaccagagaccagacatcggatatgtccatcaggtggcgaagcagatgcacatttggatgagttccacttag

SEQ ID NO: 197360 - DNA, 942 bp, synthetic construct
  misc_feature 1..942: note = Description of Artificial Sequence: Synthetic coding sequence
  source 1..942: mol_type = other DNA
atggccggccagcccggccacatgccccacggcggcagcagcaacaatctttgtcataccctcggccccgttcacccccccgacccacagcgccaccctaacacactgtcctttcgctgctctctcgccgacttccagatcgaaaaaaagatcggccgcggacaatttagcgaggtctacaaggccacttgcctgttagatcggaaaacggtcgcactgaaaaaggtgcaaattttcgaaatgatggacgctaaggcccgccaggactgtgtgaaggaaatcggccttctgaaacaattgaatcatcccaatatcatcaagtatctggacagtttcattgaggacaatgagttaaacatcgttttagagctggctgacgcaggcgacctgagccagatgataaagtacttcaagaaacagaaacggcttatacctgaacgaacagtttggaagtacttcgtgcagctgtgcagtgcagtggaacatatgcattcccgtcgtgtgatgcacagggacataaaacccgcgaatgtgttcatcaccgccaccggtgtcgtgaaactcggagacttgggtctcggaaggttcttttcaagtgagacaaccgccgcccacagcctggtggggactccatactacatgtcccctgagcggatccacgaaaacggatacaatttcaaatcagatatatggtctctcgggtgcctgctgtacgagatggccgctctgcaatcaccgttctacggagataagatgaacctttttagcttgtgccaaaagatcgagcagtgcgattaccctccacttcctggggagcactattccgagaagttgcgcgaattagtctccatgtgtatttgccctgacccacaccagaggccagacattggctatgtccaccaggtagcgaaacaaatgcatatttggatgtcctctacatag

SEQ ID NO: 197361 - DNA, 909 bp, synthetic construct
  misc_feature 1..909: note = Description of Artificial Sequence: Synthetic coding sequence
  source 1..909: mol_type = other DNA
atggacgagcagagccagggcatgcagggcccccccgtgccccagttccagccacagaaggctctccggcctgatatgggatacaacacactcgccaatttccgcatcgaaaagaagatcggccggggtcagtttagcgaggtgtaccgggctgcctgcctactggatggcgtcccagtagctcttaagaaagtgcagatctttgacctaatggatgctaaagctcgcgccgactgcataaaggaaatcgacctgttgaaacagctcaaccacccgaatgttatcaaatattatgccagcttcatagaggataatgagctgaacattgtgctggaactggctgatgcgggggatctctcccggatgataaagcactttaagaagcagaagaggctgattccagaaagaacagtttggaagtatttcgttcagctctgctccgccctcgaacacatgcactcccgaagggtgatgcatcgcgacatcaagcccgctaacgtgtttattacagccactggcgtcgtgaaactaggagatttgggcctaggaaggttctttagttctaagacgactgcagctcattccctggtggggacaccttattacatgagcccagaacgaatacacgaaaatgggtacaatttcaagtccgatatatggagcctgggatgcttgctgtacgagatggcagctctgcaatctcccttctatggcgataaaatgaacttgtattcgctttgtaagaagatcgagcagtgcgattaccccccccttccctctgatcactactctgaagagctcaggcagctagtaaatatgtgtataaatcccgaccctgagaagaggcctgatgtaacctatgtgtacgacgtggccaagcggatgcacgcctgcactgcatcaagctag

SEQ ID NO: 197362 - DNA, 249 bp, synthetic construct
  misc_feature 1..249: note = Description of Artificial Sequence: Synthetic coding sequence
  source 1..249: mol_type = other DNA
atggacgagcagagccagggcatgcagggcccccccgtgccccagttccagccacagaaggcgctaagacccgacatgggctacaataccctagctaattttagaatcgagaagaagatcggacggggacagttcagcgaagtctacagagccgcctgtctgctggatggcgtgcctgtcgctctgaaaaaagtccagattttcgatctcatggatgccaaagccagggccgactgtattaaggaatag

SEQ ID NO: 197363 - DNA, 99 bp, synthetic construct
  misc_feature 1..99: note = Description of Artificial Sequence: Synthetic coding sequence
  source 1..99: mol_type = other DNA
atggacgagcagagccagggcatgcagggcccccccgtgccccagtttcagccccaaaaagccctccgacctgatatgggctataatacacttgcatag

SEQ ID NO: 197364 - DNA, 909 bp, synthetic construct
  misc_feature 1..909: note = Description of Artificial Sequence: Synthetic coding sequence
  source 1..909: mol_type = other DNA
atggacgagcagagccagggcatgcagggcccccccgtgccccagttccagccccaaaaggcccttcgcccagacatgggatacaatacccttgccaactttcgtattgagaaaaagattgggcgaggccagttttccgaagtgtaccgagcggcgtgcttgctggacggggttcctgttgccctgaagaaggtccaaatctttgacttaatggacgcaaaagccagggctgattgtatcaaagagatcgatctcctcaagcagctgaaccatcccaatgtgattaaatactatgcctcctttatcgaggacaatgaactcaatatcgttctggagctggcagacgccggtgatctgagcagaatgatcaaacactttaaaaaacagaaaagactcatacccgagaggacggtttggaaatattttgtgcagttatgctccgcattggaacatatgcactctcgccgggtgatgcaccgtgacattaaaccagcgaacgtattcataaccgccacaggcgtcgtgaagctgggcgacttagggctggggcgattcttcagcagtaagacgacagccgcccacagtcttgtggggacaccatattacatgagtcctgagaggatacacgaaaacggatacaatttcaagagcgatatttggtccttggggtgcctactatacgagatggctgccctgcagtcaccattttatggagacaaaatgaacctgtactccctgtgtaagaagattgaacagtgcgactacccccctctgccatccgatcactacagtgaagagctcaggcagctcgttaacatgtgcatcaacccagacccagagaaaaggccagatgtgacatacgtgtatgacgtggccaagaggatgcacgcttgtaccgcatcctcttag

SEQ ID NO: 197365 - DNA, 189 bp, synthetic construct
  misc_feature 1..189: note = Description of Artificial Sequence: Synthetic coding sequence
  source 1..189: mol_type = other DNA
atggacgagcagagccagggcatgcagggcccccccgtgccccagttccagccgcagaaggccctgaggcccgatatgggctataacacactagctaacttccgaattgaaaaaaaaatcgggaggggccagttctctgaggtctaccgagcggcttgtttattagatggcgttcccgtggcgctgtag

SEQ ID NO: 197366 - DNA, 3729 bp, synthetic construct
  misc_feature 1..3729: note = Description of Artificial Sequence: Synthetic coding sequence
  source 1..3729: mol_type = other DNA
atggagaagtacgtgcggctgcagaagatcggcgagggcagcttcggaaaagccatactagtgaaatccaccgaagacggtagacagtacgtgatcaaggagatcaacatcagtcggatgagctccaaagagagggaagagtctcggagggaggtcgcagtcctggccaatatgaaacatccaaacatagtgcagtatagggagtctttcgaggagaatggatctctctatattgtgatggactactgcgaaggcggtgacctctttaagcggattaacgcacaaaaaggcgtactttttcaggaggaccaaattctggattggtttgtgcagatttgtctcgcactgaaacacgtccacgaccgcaagatacttcatcgcgacatcaagagccagaatatttttcttacaaaagacggcaccgtgcagctcggggattttggcatcgccagggtgctcaacagtacggtggagctggctagaacgtgcattggcacgccttactacctctcaccggagatatgcgaaaataaaccatataataataagagcgacatttgggcgctgggttgcgtcttgtacgaactttgcacgttaaaacatgctttcgaagccggatccatgaaaaatctggtcttgaaaatcatatcgggttctttcccgcctgttagtctccattatagttacgacctcaggtccctcgtttctcagctcttcaaacggaaccctagggacagaccatccgtgaacagcatcttggagaaaggtttcatcgctaagaggattgagaagtttctgagcccccaactgatcgcagaggaattctgtctgaaaactttctctaaatttggttcgcagcctatcccagccaagaggccagcctcaggtcagaattcaatcagtgttatgccagcccagaagatcacaaagcccgcagctaagtacggcatcccactggcttataagaagtacggtgataagaaactccacgaaaagaagcccctgcagaagcacaaacaggcccatcaaacaccggagaaacgggtcaatactggtgaggagaggagaaagatctccgaggaagcggcacggaagcggcgcctcgagttcattgagaaggagaaaaagcagaaagatcagatcattagtttaatgaaggccgagcagatgaagaggcaggagaaggagagactggagaggatcaatcgggcccgggaacaggggtggcgcaacgtcctatcggcgggcgggtcaggtgaggtcaaggctcccttcttgggctccggcggcacaatcgctccctcctcattcagttcacggggccagtacgaacattatcatgcgattttcgatcagatgcaacaacagcgggccgaggacaacgaggcgaagtggaagagagagatctatggacgtgggctgcctgaacggcaaaaagggcagctagcggtagagagagcaaaacaagtggaagaattcttacagcggaagcgggaggctatgcaaaataaggccagggccgagggacacatgggaatactgcagaacttggccgcgatgtatggcggaagaccaagttccagccgcgggggaaaaccaaggaacaaagaggaagaggtatacctggctcggctgagacagattcgcctgcagaacttcaatgaacgtcagcagataaaggcaaagctgcggggggagaagaaggaagccaaccactccgaagggcaggaaggcagtgaagaggccgatatgagacgaaagaagattgagagtctcaaagcacatgctaacgcacgcgccgccgtgcttaaggaacagctggaacggaaaagaaaggaggcttacgagagggagaagaaggtctgggaagagcacctggttgcgaagggcgtcaaaagttcagatgtgagtccgccactcggccagcacgagaccgggggatcccccagcaagcaacagatgcgcagcgttatcagtgtaacaagcgcccttaaagaggttggcgttgacagctctctcaccgatactcgggaaacatcagaagaaatgcaaaagacaaataatgcaatctcctctaaacgggagatcctccgcagattgaatgaaaatcttaaagcccaggaagacgagaagggaaagcaaaatcttagtgacacatttgagattaatgtacacgaagacgctaaggagcacgaaaaggagaagagcgtgtcaagcgataggaagaagtgggaggcaggcggtcaacttgtgattccactggacgaattgactctcgatacctccttttcgacaactgaaaggcatacagtcggtgaggtaattaagctaggacctaatggttcgccccgcagagcatggggtaaaagtcctacggattccgtccttaagattctgggcgaagccgaactccagctgcagaccgagttattggagaacactaccattcgatctgagatttcgccggaaggtgagaaatataagcccctgattacaggggagaagaaggttcagtgtattagccatgaaatcaaccctagcgctattgttgactcaccagtcgagaccaagagtccagagttcagtgaggcatcacctcagatgtccctgaaactggagggcaacctagaagagcccgacgacctggagacagagatcctgcaggaaccttctgggacgaacaaggacgagagtctgccctgtaccattactgatgtgtggatctcggaggagaaagagactaaagagactcagagcgctgacaggattacaatacaggagaatgaggtctcagaggatggagtgtcatccactgtcgaccagctctctgatatccatatagagccgggaaccaacgactcacagcattctaagtgtgacgtggataaaagcgtccaaccagagccattctttcataaggtggtgcattccgagcacctgaatctggtaccccaggtgcagagcgtacagtgttccccggaggagtcctttgcattcaggtcccactcccacctcccacccaaaaataaaaacaagaattctctgctcataggcctgtcgaccggcctgtttgacgccaataatccaaagatgctgaggacctgctccctgcctgacctgagcaaactttttcggacattaatggatgtgcccactgttggcgacgtccgccaggacaatctggaaattgatgaaatcgaagatgaaaatatcaaagaaggcccctcggactcggaagatatagtatttgaagagaccgataccgacttgcaggaactgcaagcatccatggagcaactgctcagggaacagcctggggaggaatatagtgaagaagaggaaagcgttcttaagaacagtgacgtggagcctacagccaatggaacagatgtggctgacgaggacgataatccgtcctccgaatctgccctgaacgaagagtggcattctgacaattctgacggggagatcgcaagcgagtgcgaatgcgattcagtattcaaccacctggaggagctccgactgcatctcgaacaggagatggggtttgaaaagttttttgaggtctacgagaagattaaggcaatacatgaggacgaagatgagaatatcgaaatttgttcaaagatcgtccagaacatactgggcaatgagcatcaacacctatacgccaagattctgcatctggtcatggctgatggcgcttatcaggaagacaacgatgaatag

SEQ ID NO: 197367 - DNA, 1800 bp, synthetic construct
  misc_feature 1..1800: note = Description of Artificial Sequence: Synthetic coding sequence
  source 1..1800: mol_type = other DNA
atgctgaagttccaggaggccgccaagtgcgtgagcggcagcaccgcaatctccacatatccaaaaacccttatcgctcggaggtacgtcctacagcagaaactgggctcggggagcttcggaactgtctatcttgtgtctgacaagaaagctaagcgtggggaggagttaaaggtcctgaaagagatcagtgtgggcgaacttaaccccaacgagaccgtgcaggcaaacctcgaggcccagctgctgtcgaagctggatcaccccgctatcgtgaagttccacgcttctttcgttgagcaggacaacttttgcatcattaccgagtattgcgagggtcgcgacctcgacgacaagatacaggaatacaagcaagcgggcaagatctttccagaaaatcagataattgagtggttcatacagctcctgctcggagtggactacatgcatgagcggcgtatcctgcaccgggatcttaaaagtaaaaatgtgttcctcaaaaataatctgttaaagattggtgattttggggtcagcagactgcttatgggatcctgcgatctggcaacgaccctcactgggaccccccactacatgagtcccgaagctctcaagcaccagggttatgacactaaaagtgatatttggtccctggcctgcatcttgtacgaaatgtgttgcatgaatcacgcgtttgccggatccaactttctctctatcgtactcaaaattgtggagggtgacactcccagcctgcccgagagataccccaaagagttgaacgcaattatggagtccatgttaaacaaaaatccatcactgagaccgagcgccattgaaatactgaaaatcccctacctcgatgagcagcttcagaacctgatgtgtaggtacagtgagatgacactcgaagataagaatcttgattgtcaaaaagaggccgctcatattatcaacgccatgcagaagcgcatccaccttcaaactctcagagccctttccgaggtccagaaaatgacaccgcgggagcggatgcgactccgcaaactccaggccgcagatgagaaggctaggaagctcaaaaagatcgtcgaagagaagtacgaggagaactcaaagcggatgcaggaattacgatccagaaatttccagcaattatcagtggacgtactgcacgaaaaaactcacttgaaaggaatggaagagaaagaagagcagcctgagggccgccttagttgttcaccccaggacgaagatgaggagcgttggcagggccgggaagaagaatccgatgagcctactcttgaaaatctacctgaaagtcagccgataccatcaatggatctgcacgagttggagtccatcgtcgaggacgctacatcggacctcggctatcacgagatccccgaggatccgttggtcgcagaagagtactatgcagatgcttttgattcatattgcgaggagtcagacgaagaggaagaggaaattgccctggaacggcccgagaaagaaatccggaatgaaggttctcagcctgcataccgcaccaaccaacaggactccgatattgaagccctggcccgttgcctcgaaaacgtccttggatgcacatctcttgatcagccttgcagatcctggggacaaaagtatctcaaaaggtcgatcattacctcccgcgagcagggaattaggatgctggcaaaacagcgcagcgcgtctgtctggaagaagtggtgcttgaagccagccactgtgctgaagtggactagttcttgtactttgaaatctagctgttag

SEQ ID NO: 197368 - DNA, 459 bp, synthetic construct
  misc_feature 1..459: note = Description of Artificial Sequence: Synthetic coding sequence
  source 1..459: mol_type = other DNA
atggacagcggcaccgaggagtacgagctgaacggcggcctgcccccaggcacccctggctcaccggacgcgagcccggctagatggggctggcggcatggccccattaatgttaatcattatgcctctaaaaagtccgcagccgaatccatgctggatatcgcccttctcatggcaaacgcatctcaactcaaggcagttgtggagcaaggaccatcttttgcgttctacgtgcccttagtggtcctgatttctatcagcctggtgctacaaatcggagtgggcgtcctgcttatttttttggtgaaatatgatcttaataacccagcgaaacacgcaaagctagacttcctgaataatctcgctacaggcctggtctttatcatcgtagtcgtgaatatctttattaccgcctttggtgtccagaagccgcttatggacatggccccccagcagtag

SEQ ID NO: 197369 - DNA, 567 bp, synthetic construct
  misc_feature 1..567: note = Description of Artificial Sequence: Synthetic coding sequence
  source 1..567: mol_type = other DNA
atggccggcctgagccggcagctgtgcgccctgagccaccccaagaaggccgctgaaactcagaccgctgagcctgggggcgctcacgccgtgtgttctaggcaccctgtgcgagttaaggggctggaagggtcagagatggagtctgcccgcgaaaacatcgacctacagccaggctcttctgaccctagaagtcaacctatcaacctcaaccattacgcaaccaagaaatccgttgctgaaagcatgctggatgttgccttgtttatgtccaatgcaatgagacttaaggccgtgctggaacaggggcccagttcccactattatactaccctggtaaccctcatttctcttagccttctgctacaagtggtgataggcgtgttactggtagtcatcgccaggttgaacctgaacgaggtggaaaagcaatggagactgaaccagctgaacaacgccgccaccatccttgtgttctttacagtcgtgataaatgtgtttattactgccttcggcgcgcataagaccggttttttggctgcacgggctagtcgaaatcccctttag

SEQ ID NO: 197370 - DNA, 273 bp, synthetic construct
  misc_feature 1..273: note = Description of Artificial Sequence: Synthetic coding sequence
  source 1..273: mol_type = other DNA
atgctggacgtggccctgttcatgagcaacgccatgcggctgaaggccgttctcgagcagggacccagcagccactattatactacccttgtgacactgatttccctgagcctcctgttgcaggtcgtgattggggttctgctagtcgtaattggtgaagaaccgtcattacagtccgacttactgcctaggcatccatggcttgctgaacgcccccatgtctcaccgggccctccatgcattgggacaggatcatttgccacaacccgctag

SEQ ID NO: 197371 - DNA, 1401 bp, synthetic construct
  misc_feature 1..1401: note = Description of Artificial Sequence: Synthetic coding sequence
  source 1..1401: mol_type = other DNA
atgcccggcgacagcagccccggcaccctgcccctgtgggacgccagtctgagccctcctctaggacccgaccccggagggttctcaagggcgtcccacgccggggataaaagcaggccccccgccccagagctgggctcacctggcgcggtccgcccaagagttggaagctgtgctcccgggcccatggagctaagagtcagtaacacctcctgtgaaaatgggtctctgctgcatttgtattgttccagtcaagaggtgctttgccaaatcgtcaatgatctgagcccagaggtgccgtccaatgctactttccatagctggcaagagcgaattagacagaattatggcttctatatcggacttgggctggctttcctgtcctcctttctaattggcagcagcgttatcctcaaaaaaaaaggtctgttgagattagtggccactggagcgactagggctgtcgacggaggttttggatacctcaaggacgccatgtggtgggctggattcctcacgatggcagccggcgaagttgcaaactttggtgcgtatgctttcgctcccgccacggtcgtcacccccctcggcgcattgagcgtgcttatcagcgcaattctgtccagttacttcctgcgtgaatcgcttaacctcttaggcaaactcgggtgcgtaatttgtgtggctggcagcacggtcatggtgatacacgccccagaagaggaaaaagtgaccaccattatggaaatggcatcaaaaatgaaagacaccggcttcattgtgtttgctgtcctattgctggtgtcctgcctcatcctgatctttgtcatcgcccctagatacgggcagcgtaatatacttatatatataataatatgtagcgtgatcggggccttcagtgtcgcggcagtgaagggcttagggataactatcaagaatttttttcagggcctccccgtggttagacatcccctgccatacatcctgagcctcatactcgccctttcactgagcactcaagttaacttccttaaccgggcattagacatttttaacaccagcttagtctttccaatctactacgtcttctttactaccgtggtagtgaccagttccattatcctcttcaaagaatggtactcgatgtccgccgtggacatcgccggtacactctccgggtttgtaacaatcattctcggcgtgttcatgctgcatgccttcaaggacctggatatctcctgcgcatctctgcctcacatgcacaagaaccccccaccctcaccggcacctgagcctactgtgattcgccttgaggacaagaatgtgcttgtggataacattgagctggcttccactagtagtcctgaggaaaagcctaaagtttttattatccacagctag

SEQ ID NO: 197372 - DNA, 1344 bp, synthetic construct
  misc_feature 1..1344: note = Description of Artificial Sequence: Synthetic coding sequence
  source 1..1344: mol_type = other DNA
atgcccggcgacagcagccccggcaccctgcccctgtgggacgccagtctgtccccacctctgggaccagacccgggcgggttcagcagggcaagccacgccggtgacaagtccaggccaccggcacccgaactggggagtccaggcgccgtcagaccgcgtgtcggttcatgtgcgccaggccctatggagctgcgtgtgagcaacaccagttgcgaaaacgggagcctgctccatttatactgctccagccaggaggtgttgtgccagatcgtcaatgatctttcccctgaggtgcctagcaacgccacctttcactcctggcaagagaggatcaggcagaactacggattctacatagggttgggattggcatttttgtccagcttcctgatcgggtccagtgtaatcttgaaaaaaaagggcctgctgagactggtcgccaccggagcaactcgcgcagtggctgctggtgaggtcgcaaatttcggtgcctatgccttcgcccccgcaaccgtggtgactccactaggcgctctgagcgtccttatcagcgccattctgtcttcatattttttaagggagtcgttgaacctcctgggcaagcttggttgcgtgatttgtgtcgccgggtcgacagttatggtgatccacgctccagaggaagagaaggttactacaattatggagatggcttccaagatgaaggacactggatttattgtctttgccgttctcctacttgtcagttgcttgatactcattttcgtcattgcccctagatacggtcagcggaatatcctgatctatatcattatttgctctgtgatcggcgcctttagcgtggcagcggtaaagggtctcggcattaccataaaaaatttttttcaggggcttcctgtcgttcgacaccccctcccctacatactatccttaatattggctttgagcctgagcacccaggttaacttcctcaaccgcgccctcgacattttcaatacctccctcgtgtttcctatatactacgtattcttcacaacagtggtggtaacctcttccattatcctgttcaaggaatggtactcgatgagtgccgtggacattgccggcacattgtctggcttcgtaacgattatcctgggtgtatttatgctacacgcattcaaggacctggacattagctgcgcttcgttgccccatatgcataaaaaccctccaccaagcccagcccccgagcctaccgtgatcaggctcgaggataaaaacgtcctggttgataacatcgagctggcatctacgtcaagcccagaggagaagcctaaagtcttcatcatccattcatag

SEQ ID NO: 197373 - DNA, 8415 bp, synthetic construct
  misc_feature 1..8415: note = Description of Artificial Sequence: Synthetic coding sequence
  source 1..8415: mol_type = other DNA
atgaacggcgacatgccccacgtgcccatcaccaccctggccggcatagcatccttaactgatctgttaaatcagctgccactgcccagcccgcttcctgctacaaccacaaaaagtctgcttttcaatgcgcggatcgccgaagaggtcaactgtctgttggcatgtcgcgacgacaacctggtgtctcagttggtccactccttgaaccaagtgtctaccgatcatattgagctgaaggataacctcggtagcgacgatcccgaaggcgatatccctgtgttactgcaagcggtgctggctagaagcccaaacgtgttccgagagaagtccatgcagaacaggtacgtgcagtcaggtatgatgatgtcacagtataaactaagccaaaactctatgcattccagtccggcaagttcaaattaccagcagactacaatctctcatagtccttcatcacgttttgtgccccctcagaccagttccggcaacaggttcatgccacagcagaactctcctgttcccagtccttatgcccctcagtctccagctggctacatgccctatagtcatccttcttcctacactacccatccccaaatgcagcaggcctcggtctcctcacctatcgtggctggcgggctgaggaacattcacgacaacaaggtgagtggccctttgtcggggaactccgcaaatcatcacgcggacaacccaagacatgggtccagtgaagactacctccatatggtacaccgcctgtcctccgatgatggtgattcttctaccatgcggaatgctgcctcctttccgctgcgttcaccacaacccgtctgcagcccagcaggaagtgagggaactccaaaggggtctcgcccgcccttgatcctacagtcacagtctcttccttgctcctccccgagagatgttcctcccgacatactgctcgatagccctgaacgcaagcaaaagaagcaaaaaaagatgaaactgggcaaagacgagaaagagcagtcagaaaaggccgcaatgtatgacattatcagtagtccctctaaagatagtaccaagttaaccctcaggctgtcaagagtgcgctcgtccgatatggatcagcaggaggacatgatttccggagttgagaatagcaatgtatcggagaatgatattcctttcaacgtgcagtatccaggacagactagcaagaccccaatcacaccgcaggacatcaatagaccgctaaacgccgctcagtgtttatcccaacaagaacagaccgcttttctgcccgcgaaccaggtgccggtgctccagcagaacactagtgttgctgccaaacagcctcagacatccgtggtacagaatcagcaacagatttcccaacagggcccaatttacgatgaggtggagctggatgccctcgccgagatcgaacggatcgagcgggagagcgctattgagagagagaggttctctaaggaggtgcaggacaaggataagccacttaagaaaagaaagcaggattcttaccctcaggaagcaggaggggcaaccgggggcaatcgccccgcctcccaggagacgggcagcaccgggaatgggtcccgacccgctcttatggtgagcatagatctacatcaggctgggagagtcgatagtcaggctagcattacccaggatagtgacagcatcaagaagccagaggagataaagcagtgtaacgacgccccagtgtccgttctccaggaggacatagtaggcagcctcaaatctacgcctgaaaaccatcccgagactccaaaaaagaaaagtgaccctgagttatccaagtctgagatgaagcagtcagagtccaggctcgccgaaagcaaacctaatgaaaaccgactggtggaaaccaaatctagcgaaaataagctagaaacaaaggtcgagacacagaccgaagagctgaagcagaacgagagtcgcaccactgagtgcaaacagaatgagagcacgatcgtcgagccaaaacagaacgagaacagactttccgatacaaagccgaacgataacaaacagaacaacggtaggtcagagacaacaaagagcaggcccgagacaccgaaacaaaagggggaatcccgccctgagactcccaagcagaaaagcgacggccacccagaaactcctaagcaaaaaggagatgggcggccagaaacacctaagcagaagggcgagagtcgccctgaaacccccaaacagaagaacgagggtagacctgagacgcccaagcaccgccatgataaccggcgcgactccggcaagccatccactgaaaaaaaacccgaggtcagcaaacataagcaggacactaagtcagactccccccgccttaagtccgagcgcgctgaggcgctcaagcagcgacctgatggcagatcagtctccgagagcctgagacgggaccatgataataagcagaagagcgacgatcgaggggagtctgaacgtcacagaggcgaccagtcacgcgtgcgacgacctgaaacactgcgtagctcctctcgcaacgagcacggtatcaagtctgactcatctaaaacagataagctcgagaggaaacatagacatgagagcggtgactcaagagaaagacccagtagcggcgagcaaaagtcccgtccagacagtcctagggtcaagcaaggtgacagcaataagtctcgatccgacaagcttgggtttaagagcccaacaagtaaggatgataagcgcaccgaaggcaataaaagcaaggtggacacgaacaaggcacaccctgacaataaggccgagtttccgagctacttattggggggtcgatctggcgcccttaagaatttcgttatcccaaaaattaagagggacaaggacgggaatgtcacccaggagactaagaaaatggaaatgaaaggggagccgaaggataaggtggagaaaattggattagtggaagatttgaacaaaggtgcaaagcctgtggttgtgctgcagaagctgtctctggatgacgtccagaaactgattaaggatagagaggacaagagtaggtcttctctcaaaccaattaaaaacaaaccgtcaaaatccaacaagggatcaattgaccaaagtgttttgaaggagctcccgcccgagttactcgcagagattgagagtactatgcccctgtgtgaaagagtgaagatgaacaagcgcaaacgctctaccgtgaacgaaaagcctaaatacgcggaaatctcatctgatgaggacaacgatagcgatgaggcgtttgagagctctagaaaaagacacaaaaaagacgatgacaaagcgtgggagtatgaggagcgggataggaggagcagcggcgaccacaggcggtctgggcattcgcacgagggtcgcaggagtagtggtggagggaggtacaggaaccgctccccctccgactccgatatggaggactacagtcccccacctagcctgtcggaggtcgccaggaaaatgaagaaaaaggagaaacaaaagaagcgcaaggcctatgagccgaaactgactccagaggaaatgatggactcctcgaccttcaagcggtttactgcaagtattgagaatatcctggataatctggaagatatggatttcacggcctttggtgacgacgatgaaatccctcaggagctgctacttgggaagcaccaattaaacgaactcggcagtgaatccgcaaagatcaaggctatgggcatcatggacaaactcagtaccgataaaacagtcaaagtgctgaatatcttagagaagaacatccaagatggaagcaagcttagcaccctgctcaaccacaataacgataccgaggaggaagagcgcctgtggagagacttgattatggagagagtgaccaagtccgccgacgcttgtttaacaactatcaatataatgaccagccccaacatgccgaaggctgtgtacatcgaagatgtcatagagagagtgattcagtacacaaaattccacctccagaacaccctctatccacaatacgatccggtgtacaggctggatccccacggtggcggtttgctctcctccaaagcaaagagagctaaatgttcgacccacaagcagcgggttatcgtgatgctgtataacaaggtttgcgatattgtgtcttcgctcagcgaactgctggaaattcaacttctgaccgacacaacgatcctgcaggtctcctctatggggattacaccattcttcgtcgagaacgtgagcgagctgcaactctgcgcaatcaagctagtgaccgcagtgttctcgcgctacgaaaagcaccgacaactgattctcgaagagatcttcacatctcttgcccgcttgccaacaagcaaaagatctctgcgcaattttcgccttaactcgtccgacatggatggggagcccatgtacattcagatggtcactgcactggttctccagctgatccagtgcgttgtgcaccttccctcatctgagaaagactccaatgcggaggaggattccaataagaagatcgaccaagacgtggttattaccaactcgtacgagaccgccatgcgcactgcccagaacttccttagcattttcctgaaaaaatgcggctccaaacaaggggaggaggactatcggcctctatttgaaaatttcgtacaggacctcttaagcactgtcaacaaaccggaatggccggctgcggaattactactcagccttttaggacggctcctcgtgcaccagtttagcaacaaatccaccgaaatggccctgcgcgtggccagcctcgattatctgggcacggttgccgctcgcttaaggaaggatgccgttacgagtaagatggatcagggatctatcgagcgcatcctcaagcaggtaagtggaggcgaagacgagattcagcagcttcagaaggcacttctcgattatctcgatgagaacacagaaaccgacccttctctagtgttctcacggaaattctacatagctcaatggtttcgcgacactacattggagactgagaaagcgatgaaaagccaaaaggatgaggagagcagcgagggaacccatcacgccaaagaaatcgagacgacaggccagattatgcatagagcagaaaaccgcaagaagtttctgcgctccataatcaaaaccaccccatcccagttcagtaccctcaaaatgaactctgataccgtcgattatgacgatgcctgcctaatagttaggtacctggccagcatgcggcctttcgctcagtcttttgatatttatttgacgcagatcttgcgggtacttggcgagaatgctatcgcagtgagaacgaaggctatgaaatgtttatccgaagttgtggccgtggacccttctattctggcccgattggacatgcagcgaggagtgcatggccgtctcatggataacagtacatccgtcagggaggctgctgtggagctgctgggcagattcgtgctgtgccggccgcagcttgctgagcagtactatgacatgctgatcgaacgcattttggacacgggtatttcagtgaggaagcgcgtgattaagatcctaagggatatctgcattgagcagcctacatttcctaagattacagaaatgtgcgtgaagatgatccgaagagtgaacgacgaagagggaataaaaaagctcgtgaacgaaacctttcagaaactctggtttacccctactccccacaacgataaggaagccatgactcggaagattctgaacatcaccgatgtggtagccgcctgtagggatacgggctacgattggtttgaacagttactgcagaacctgctgaagtcagaggaggattcctcctacaagcccgtcaaaaaagcctgtacccagctggtggacaatcttgttgaacacattctgaaatatgaggaaagcctcgccgactctgacaacaaaggcgtaaactccggccgcctggtggcatgcattaccacacttttcctttttagcaagatacgcccccagttaatggtgaaacacgcaatgactatgcaaccttacctgactacaaaatgtagtacccagaatgattttatggtaatctgtaacgttgctaagattctggagcttgtagtacctctcatggaacaccccagtgagactttcctggcgaccattgaagaggacctgatgaaactcattatcaaatatggcatgactgtcgttcaacactgtgtgagctgcctgggagcggttgttaataaagtcacgcagaattttaagttcgtgtgggcctgcttcaaccgttactacggcgccatatccaagctgaagtctcaacatcaggaagaccccaacaacacttcactactcacaaataagccagccctgctcaggagcctctttacagttggcgcactctgccggcacttcgattttgatttggaagactttaaaggaaactctaaagtgaacatcaaggataaagtcttagaacttcttatgtatttcaccaaacacagcgacgaggaggtgcagaccaaggctatcatagggctggggtttgcttttatccaacacccgagcctgatgtttgagcaggaggtgaaaaatttatataacaatatccttagtgataaaaattcaagcgtaaacctgaagatccaggtgctcaaaaatctgcagacatacctgcaggaggaggacacccgcatgcaacaagccgaccgcgattggaagaaagtggccaagcaagaggacctgaaagaaatgggtgacgtgagctctggcatgtcctcatccataatgcagctgtacctcaaacaagttctggaggcattttttcacacacagagttccgtccgccatttcgcgctcaatgtgattgccctcacactcaaccagggcctaattcaccccgtgcagtgcgttccttatttgatcgccatggggaccgatcctgaaccagctatgcgcaacaaggctgatcaacaattggtggagatcgataagaagtatgccgggttcattcacatgaaggccgtggcaggaatgaaaatgagctatcaggtgcagcaggcgattaatacatgtttgaaggatccagtcaggggattcaggcaggacgagtcatctagcgctctctgctcacatctctattctatgattcgcggcaacagacagcatagacgagcgtttttgataagcttactgaatctgttcgacgacaccgcgaagacagacgttactatgctgctgtacatagcagataacctcgcctgttttccttaccagacccaggaggagcccctgtttataatgcatcacattgacatcacactatctgtttccggcagtaacctcttgcagtcttttaaagaatccatggtgaaggataaacggaaggagcgcaaaagtagcccctcgaaagagaacgaaagcagtgactccgaggaggaggtctcaagacccaggaagtcgaggaagcgggtagatagcgattccgacagtgactcagaggacgatattaactccgtgatgaaatgcttaccggaaaattctgctcccctgattgaattcgccaatgtgtcacagggcatcttgctccttttaatgctcaagcaacatctgaaaaatctatgcggattctcagattccaagatccagaaatactctccaagtgaatccgcaaaagtatatgacaaggccattaataggaagacaggcgttcattttcacccaaaacagaccttggacttcctgcgcagcgatatggccaacagcaaaataacagaggaagtcaagcgttctattgtgaaacaatatctggactttaaactgctgatggagcacctggatcccgacgaggaggaggaggagggggaagtcagcgcatccacaaacgcccgtaacaaagctatcactagtttattgggcggaggctccccaaaaaacaacaccgcagcagagacagaggacgacgagagcgacggcgaagacagaggaggcggcacctccggaagtctgcgccgcagcaagaggaatagcgattcaactgagctggcagctcagatgaatgagtccgtagatgtcatggatgtaatagccatctgttgtcctaagtacaaagatcgtcctcagatagcgcgagtggttcaaaagactagtagcggatttagcgtacagtggatggctgggtcatacagcgggagctggaccgaggccaaaagaagagatggcagaaaactggtgccctgggtggacacaatcaaagaaagcgacataatttataagaaaatcgccctgacctccgctaacaaactgaccaacaaagttgtgcagaccctgcgcagtttgtacgctgccaaagatggcacaagcagttag

SEQ ID NO: 197374 - DNA, 8094 bp, synthetic construct
  misc_feature 1..8094: note = Description of Artificial Sequence: Synthetic coding sequence
  source 1..8094: mol_type = other DNA
atgaacggcgacatgccccacgtgcccatcaccaccctggccggcattgctagcttgacggacttgctgaaccagcttccattgccctcaccacttccggccactactacaaagtctctgctgttcaatgccaggattgcagaggaggtgaactgcttgctggcctgcagagacgacaacctcgtttcacagttagtgcattcactgaaccaagtctctacagatcacattgagcttaaggataacctcggatctgacgacccggagggcgacatacccgtgttgctgcaagcagtcctggctaggtcacccaatgtttttcgggaaaagtccatgcagaataggtatgtccaatccggcatgatgatgtcgcagtacaagctaagccagaattccatgcattcttcccctgcgagttccaactaccagcaaaccacaatcagccacagcccatcatcaaggttcgtgcccccccaaacctcatccgggaatcggtttatgcctcaacagaactcgcccgtccctagcccttacgctccccagagccctgccggatacatgccatattctcatccctcttcctatactactcatcctcagatgcagcaggcatctgtctcttccccgattgttgccgggggtctccggaacattcatgacaataaggtttcgggacctctgtcgggcaacagtgctaatcaccatgcagataatcctagacacggcagttcggaagactatttgcatatggttcacagactttcttccgatgacggcgattccagcactatgcggaatgccgcttcattcccactgagaagccctcagcctgtttgtagcccggccggctccgagggaaccccgaagggctctcggcccccgctgatcctgcagtctcagagcctgccctgttctagtccacgagatgtgccacccgacattctgctagactcacccgaaagaaaacaaaaaaagcagaaaaaaatgaaattgggaaaagacgagaaagagcagtcagagaaggctgccatgtatgacatcattagttctccaagtaaggacagcaccaagctaacactgaggcttagccgagtgcggtcctccgacatggaccaacaggaggacatgatctctggagtggaaaattcaaatgtttcagagaatgacatcccatttaatgttcagtatcctggtcaaacctcaaagactccaattacgccccaggatataaataggcccctaaatgccgcccaatgtttgtctcagcaggagcagacggcctttttgcctgcaaatcaagtaccagtcttacagcaaaacacaagtgtcgccgctaaacagcctcaaactagtgtcgtccaaaatcaacagcagatttcccagcaaggccctatctatgacgaggtagaactagacgcactagcggagattgaacggattgaacgcgaatcagccattgagagagagcgtttctctaaggaggtgcaggacaaagacaagcctttgaagaagcgtaaacaggattcatacccgcaagaagccggaggcgctaccggcggcaacagaccagcctctcaggaaactgggtcgaccggcaatgggtcaagacctgctctgatggtaagcatcgacctgcaccaagctgggagggtggactcccaagcttctatcacccaggactcagacagcataaagaagccagaggagatcaagcagtgtaacgatgcacccgtctcagtgctgcaagaagacatcgtcgggagcctgaaatccaccccagagaatcatcccgagactcctaaaaagaaatccgatccggagctcagcaaaagtgagatgaaacagtctgaaagccgcctggcagaatccaagccgaacgagaaccgtttggttgaaaccaagagcagtgagaataaactggagactaaagtggaaacgcagaccgaagaactcaagcagaatgaatcacgaactacagaatgcaaacaaaacgagtcaaccatcgtggagcccaagcagaacgagaaccggttgtctgacactaagccaaacgataataaacagaataacggacgcagcgaaacgactaagagccggcctgaaaccccgaaacagaagggggagtcacgcccagagacaccgaagcaaaaatcggacggccacccggagacccccaaacaaaaaggggacgggcgaccagagacacctaagcagaagggagagtcacggccagagactcctaaacagaaaaatgaggggcggccagagaccccaaagcacagacatgacaataggcgggacagtggaaaaccctctacagaaaaaaagcctgaggtctcaaagcataagcaggatactaaaagtgattccccaaggcttaagagcgaaagggccgaagccctaaaacagagaccagatggaaggtctgtgtcggagagcctgagacgggaccatgataacaaacagaaatcggacgacaggggggaatccgaacgtcacagaggcgatcagagtcgcgtccggcgacccgaaactctgcgaagctctagtcgtaacgaacacggaattaagtcagactcgtcaaagaccgataagctcgagagaaaacaccgccacgaaagcggtgattccagagagcgaccgagcagcggcgagcaaaaatcgcgcccagattccccgagagtaaagcaaggggactcaaacaaatccagatccgacaagctgggatttaagagtcccacttccaaggatgacaagagaaccgaggggaataaatccaaagtcgacaccaacaaggcgcatcccgataataaagcggaattcccttcctatctcctggggggaaggagtggcgctcttaagaattttgtgatacctaagatcaagagagacaaggatggcaatgtgactcaggagacaaaaaaaatggaaatgaaaggcgagcctaaagataaagtggagaagatcggcctggttgaagatctgaacaagggcgccaagcccgttgtggtcctgcagaagctgtctctggacgatgtccaaaaactgataaaggacagagaggacaaatctcggtccagtttgaaacctataaagaataagccaagcaaatctaataagggctctattgatcagtctgtattgaaagaattacctcccgaactactggccgagattgaatcaaccatgccactttgtgaacgcgtgaaaatgaataagcggaagcgatctacggtcaacgagaagccgaagtacgcagagatttcgtccgatgaagacaatgacagcgacgaggcctttgaaagctccagaaaacgccacaaaaaagatgatgataaggcatgggagtatgaagagagggatcggcgtagctcaggggaccatagaaggtccgggcactctcatgaaggtcggcggtctagcgggggtggccggtataggaataggagtccatcagactccgatatggaggactattcccctccgccatccttgagcgaagtggcccgcaaaatgaagaaaaaagagaaacagaagaagaggaaagcttatgagcccaagctaaccccggaggaaatgatggactccagcactttcaagcgatttaccgcgtctatcgagaacattctggacaacctggaagacatggactttaccgcattcggcgacgacgatgaaattcctcaggaactgctgctgggcaagcatcagttgaacgagcttggttccgagtctgctaagatcaaggcgatgggtatcatggacaagttgagcacagacaagaccgtgaaagtcctgaacatcttggaaaaaaacatccaggacgggagcaagctttccactcttctgaatcataacaatgataccgaggaggaggagcgcctctggagagatctgatcatggagcgagttacaaagtctgcggacgcttgtctgaccaccataaatatcatgacctctcccaatatgcccaaggccgtgtacattgaggatgtgattgaacgggtgatccagtataccaaattccatctccagaataccctgtacccccagtacgacccggtgtaccgcctcgacccacacggcggtggtttactgagttccaaggcgaagagggctaagtgttcaactcataagcagcgggtgattgtgatgctgtataacaaggtttgtgatatcgtttcctctctatctgagcttctcgagatacaactactcactgatacaacaatcctgcaagtgagctcaatggggatcactcctttctttgtggaaaacgtctctgaactgcaactctgcgcaatcaaactcgttaccgctgtttttagccgctacgaaaaacatcgacagctcatcctggaagaaattttcacctccctggctcggctccccacaagtaagcggtctttgcgcaattttcggctgaacagctccgacatggacggcgagcccatgtacatccaaatggtcaccgctctggtgctccagttgatacagtgtgtggtgcatcttccatcatccgagaaggattcaaatgccgaggaagattccaataagaaaattgaccaggacgtcgtcataaccaactcctatgaaactgcaatgaggaccgctcagaattttctgtctattttcctaaagaagtgtggatctaagcagggagaagaggattaccgtccacttttcgagaactttgttcaggatctgctgtcgaccgtcaataaaccagagtggcccgccgccgagttactgctgagtctactcggaaggcttctggttcaccagttcagtaacaagtccactgagatggcactgcgggtcgccagcctggattatttggggacagtcgccgcccgcttgcgtaaggatgccgttacctccaagatggaccaaggttcaattgagcgcattttgaagcaggtctcaggcggtgaggacgaaatccaacagttgcaaaaggccctcctggattacctggatgagaacaccgaaacggatccatcactcgtcttttccaggaagttctacatagctcaatggttccgtgacactaccctggaaaccgagaaagccatgaagtcacaaaaagacgaggagtcttctgagggaactcaccatgcaaaggagattgagaccacaggccagattatgcaccgggctgagaatcgtaaaaagttcctccgaagtattattaaaactacgccgtctcagttttcaactctcaagatgaactccgacaccgtcgattacgatgatgcatgtctcatagtccgatatttggcaagcatgcgcccctttgcccagagttttgacatatatctaacccaaatcttgcgggtgctgggcgaaaacgcaatagccgtccgcaccaaggccatgaaatgcctgtctgaggtcgtggcagttgacccctcaatactggcccggctcgacatgcagaggggagtccatgggaggctgatggataatagcacctcagtgcgcgaggctgccgtcgagttgttgggtcgattcgtgctctgccgtcctcagctcgccgagcagtactacgacatgctgatcgaacgaatactggatacaggaatcagcgtgaggaagcgagtcatcaagatactccgcgacatctgtatagaacagcctaccttccccaagattactgaaatgtgtgtgaagatgatacgcagagttaatgatgaggagggcattaagaaacttgtaaatgagacctttcaaaagctgtggtttaccccgaccccgcacaatgacaaagaggccatgaccagaaagatattgaatattaccgacgttgtcgcggcatgccgggacacgggttatgattggttcgagcagctactgcaaaatcttcttaagtccgaggaggactcctcgtataaaccagtgaagaaagcatgcacacagctggttgataatttggtggaacatatcttaaagtacgaggagtccctggccgattctgacaacaagggcgtcaatagcggccgcctggtggcctgtatcactacattgtttctcttttcaaagatcaggccccaactcatggttaaacatgccatgacaatgcagccctacctaacaaccaaatgttccactcagaacgacttcatggtgatctgtaatgtggcgaagatcctagagctagtcgtgccacttatggaacacccatccgagaccttcttggctaccatcgaagaggatctgatgaagctcatcattaagtatgggatgactgtcgttcagcattgtgtgtcctgtcttggagcggtggtaaacaaagtgactcagaatttcaagttcgtatgggcctgcttcaataggtactacggtgccatatcgaaacttaaaagccagcaccaagaagaccctaacaatacgtcactgctgacgaataaacctgccctgctgagaagcctgtttaccgtcggagctctttgcaggcacttcgacttcgatcttgaagatttcaaggggaacagcaaggtgaatatcaaggacaaggtgttagaactccttatgtacttcaccaaacactccgacgaggaagtccaaactaaagccattatcgggcttgggttcgctttcattcaacacccttccctgatgttcgaacaagaagttaagaacttatataacaacattctctccgacaagaactctagcgtgaacctaaaaatccaagtattgaaaaatttgcagacataccttcaggaagaagatacgcggatgcagcaagcagaccgcgactggaagaaagtggccaaacaggaggatctcaaagagatgggcgacgtctcctcaggaatgagtagctcaatcatgcagttgtacctcaaacaagtgcttgaggctttctttcacacccaatcaagcgttcgtcacttcgccctgaatgtcattgcactgacactcaatcaaggtctcattcacccggtgcagtgtgtcccatatctgatcgcgatgggaactgacccggagccggcaatgcgaaacaaagctgatcagcagctcgtggaaattgataaaaagtatgccggttttatccatatgaaagctgtggccggcatgaaaatgtcgtatcaggtacagcaagccatcaacacatgtctgaaggacccggtccgaggctttcgtcaggacgagagctcaagtgcactgtgctcacacctgtactctatgatacgcggcaaccgtcagcatagacgagctttcctgatttctctgctgaatctttttgatgatacagccaagaccgatgtgacaatgctgctgtatattgctgataatttagcctgctttccgtatcagactcaagaagagcctttatttatcatgcatcatatcgacatcactctgtccgtgtccggaagtaaccttctgcagtcctttaaggaaagcatggtcaaggacaagagaaaggagcggaagtcaagtcctagcaaggagaacgaatcatcagactccgaggaggaggtatctcggccccgcaagtccagaaagagggtggacagcgattccgattcagattctgaggatgacatcaatagcgttatgaagtgcctgcctgaaaatagcgcccctcttatcgagtttgccaacgtctctcagggtattctgttgttattgatgcttaagcagcaccttaagaacctgtgtggattttcagactcaaaaatccaaaagtatagcccaagtgaatccgcaaaagtttatgataaggccattaaccgtaagaccggtgtgcacttccaccccaaacagacactcgatttcctgaggagcgatatggccaatagtaaaatcaccgaagaggtcaagcgaagtatcgtcaaacagtatctagacttcaagctgcttatggaacatttggacccagacgaagaggaggaagaaggggaggtgtccgcgagcactaatgccagaaacaaggccattacctctctcttaggcgggggctcccccaaaaataacacagccgctgagacagaagatgacgagagcgatggggaggaccgtgggggcggcacatccggggtgcggcgacgccgtagtcagcgaatttctcagcggattacctag

SEQ ID NO: 197375 - DNA, 867 bp, synthetic construct
  misc_feature 1..867: note = Description of Artificial Sequence: Synthetic coding sequence
  source 1..867: mol_type = other DNA
atggagcggccccagcccgacagcatgccccaggacctgagcgaggcactgaaagaagctacaaaggaggtccacacccaggccgagaatgccgagtttatgcggaattttcagaagggtcaggtcacccgggacgggttcaagctagtcatggcttcgctgtatcatatttacgtggccctggaggaagagatcgagcggaacaaggagagcccagtcttcgcccctgtttactttccagaagagttacatcggaaggccgccctggagcaggatttggctttctggtacgggcccaggtggcaagaggtgataccctatacacccgccatgcagcggtacgttaaacggctccacgaggtggggaggactgaaccggaacttctcgttgctcacgcctataccaggtacttaggagacctcagcggagggcaggtgctgaagaagatcgcccagaaagcattggacttgcccagctcgggcgaggggctcgccttttttaccttccccaatattgcgagcgccaccaaattcaagcagctttatagaagcaggatgaactcgctggagatgacacctgcggtacggcagcgggtgattgaagaggccaaaaccgccttcctcctcaatatccagctttttgaggagctgcaagagcttctgactcatgacaccaaggatcagtcaccatccagggctccagggctcagacagagggcctctaataaagtgcaggacagcgccccagtagagacacctagaggcaaacctccactgaataccaggagtcaggcccctctcctgcggtgggttctgacactgtccttcttagttgcaaccgtcgcagtggggctctacgccatgtag

SEQ ID NO: 197376 - DNA, 4305 bp, synthetic construct
  misc_feature 1..4305: note = Description of Artificial Sequence: Synthetic coding sequence
  source 1..4305: mol_type = other DNA
atggaggaccacatgttcggcgtgcagcagatccagcccaacgtgatatcagtcaggctgttcaaaagaaaagtcggggggctgggcttcctggtgaaggagcgagtgtctaagcctcctgtcattataagcgacttaatcagaggcggcgccgcagaacagtcaggccttatccaggccggggatatcattctggccgtaaacgggcggcccctcgtagatctttcttacgacagtgccctggaagtcctaaggggaatcgcttctgaaactcacgtggtgctaattctgcgagggccagaaggctttaccacccacctggaaacaacgtttacgggagatggcacgcccaagaccatccgagtgacacagcctcttggtcctcccactaaggctgtggacttgtctcaccaaccacccgctggaaaggagcagcctctcgcagttgatggagcctcgggaccagggaacggtcctcagcatgcctacgacgacggacaagaagctgggtcattaccacacgctaatggcttagctccacgtccacctggtcaggaccctgcaaaaaaggcaaccagagtcagcctccagggaaggggggaaaacaacgaactgcttaaggagatcgaacctgttctgtcattgctaacgtccggaagcagaggtgtcaaaggtggggctcctgccaaggctgaaatgaaggatatgggcatccaagttgatcgggatctggacggcaaaagtcacaaaccattgcccctcggtgtggagaacgatcgtgtctttaacgatctctgggggaagggaaacgtacccgtggtcttgaacaacccatactctgaaaaggagcagccacccacttcaggtaagcagtcgcctacaaaaaatgggtctccatccaagtgccctaggttcctaaaagtcaaaaattgggaaactgaggttgtgcttacagacacgctccatctcaagagcacactggaaacgggctgtaccgagtacatttgtatgggttcgatcatgcatccatctcaacatgcacgcagacccgaagatgtccgaactaaaggccagttgtttccactcgccaaagagtttatcgaccagtattacagttccataaagcgattcggcagcaaggcccacatggagaggttagaggaggtgaacaaggagatcgataccacatccacataccaacttaaggataccgaactcatctacggggccaaacatgcctggcgcaatgcatcacgatgcgttggacggattcagtggagcaaactgcaggtgttcgatgcccgtgattgtacaaccgcacacggaatgttcaactacatctgcaaccacgtgaaatacgccactaataaggggaacctccgaagtgctatcacaatttttccacaacggaccgacggaaaacatgatttcagagtgtggaactctcagctgattcgctacgctggatataagcagcctgatggaagcaccctgggtgatcctgccaacgttcagttcacagaaatctgcattcagcagggctggaaaccccctcgcggcaggttcgacgtgttacccctgctgctgcaggctaatggcaacgacccggaactcttccaaattccaccagaactggtcctcgaggttccaatcaggcaccccaagtttgaatggtttaaagacttgggcctcaagtggtatggcttgccagccgtcagcaacatgctcctcgagatcgggggactggagttcagcgcctgtccgttttcaggatggtatatgggtacggaaatcggggtgagggactattgtgataatagccgttacaatatcctggaggaggtagccaaaaagatgaacttggacatgaggaaaacctcttcactgtggaaggatcaggccctggtggaaattaatattgcagtgctgtactcttttcagagcgacaaggtgactatagtcgaccaccattccgctacagaatccttcataaaacatatggagaatgagtataggtgtcgcggaggttgccctgcagactgggtgtggatcgtacccccaatgtccggttccattacgcccgtctttcatcaggaaatgctgaattaccgactgacgccatcattcgagtaccagcccgatccctggaatactcatgtctggaaggggaccaacggcacccctactaaaaggcgcgctatcggattcaagaagctggccgaggccgtcaaattttccgcaaaactcatgggacaggcaatggccaagagggtgaaagcgacaatcctttatgcaaccgagactggaaagtctcaagcctatgctaagacactatgtgagattttcaagcacgccttcgacgccaaagtgatgtctatggaagagtacgacatcgtccacctggaacatgagacgttggttctcgttgtaacctcaacttttggaaatggtgacccacctgaaaacggcgagaagttcggctgcgccttgatggaaatgcggcacccaaactctgtgcaagaggagcgaaaatcctataaagttagattcaacagtgtctctagctacagcgattctcaaaaaagttcaggggacggccctgacctgcgtgataacttcgaatccgccggcccattagccaacgtcaggttttcagtgttcggcctaggctcccgcgcgtacccacatttttgtgcgtttggtcatgccgtcgataccctgctcgaagagcttggaggagagcggatcctaaagatgcgcgagggcgacgagctttgtgggcaggaggaggccttcagaacttgggccaaaaaggtatttaaggcagcatgtgatgtgttctgcgtcggtgatgacgtaaatatagagaaagcaaacaatagcttgatatccaacgatcgaagctggaaacgcaataaattcaggctgacattcgttgccgaagccccagagctgactcaagggctgtcgaacgttcacaaaaagagagtgagcgccgcgaggctccttagcagacagaacttgcagtcccccaagagcagccgatcaaccatcttcgtgaggctacacaccaacggatcacaagagctgcaataccagccgggagatcatttaggagtttttccagggaaccacgaggatttggtcaatgctctgatagagcggcttgaggacgctcctccagtgaatcagatggttaaggtggagcttctggaagagcgaaatacagcactcggcgtgatctccaactggaccgacgaactccgactccctccttgcaccatctttcaggcctttaagtattatctagatatcacaacgccaccgacccctctgcagttacagcagttcgcctctctggccactagcgaaaaagagaaacagcgccttttagtcctgagtaaggggttacaggagtatgaggaatggaaatgggggaaaaatccaaccatcgtcgaggtcctggaggagttcccttccattcagatgcctgcgacgctcctgcttacccagttgtccctgctacagccacgctattatagtatctctagctctcccgacatgtacccagatgaagtgcatctgacagtggccattgtttcctaccgcactcgagacggtgaggggcctatccaccacggggtttgctcctcgtggctaaatcgaatccaggccgacgagctggtgccatgcttcgtgcgcggtgcaccatcatttcatctaccgaggaacccgcaggtcccttgtatcctagtcggcccaggtaccggcatcgccccgttccggtcattttggcagcagcggcagtttgacatccagcataaagggatgaacccatgcccaatggttctcgtgttcggctgccgccagagtaaaattgatcacatctacagagaggaaaccttgcaggcaaaaaacaagggtgtatttagggaattgtacaccgcatacagtcgtgagccagacaaacccaaaaagtatgtgcaggacattttgcaggagcagcttgctgaatccgtgtatagagccctcaaggaacagggcggtcacatttatgtgtgcggcgatgtcaccatggcagccgacgtactgaaagcaatccagagaatcatgacgcaacagggcaagctgtctgcagaggatgcaggagtatttatctctaggatgagagacgataaccgctaccacgaagatatcttcggcgtaactttgaggacctatgaagtgaccaaccgcctgagaagcgagtcaattgccttcattgaagaatctaagaaggacactgacgaggtgttttcctcgtag

SEQ ID NO: 197377 - DNA, 4407 bp, synthetic construct
  misc_feature 1..4407: note = Description of Artificial Sequence: Synthetic coding sequence
  source 1..4407: mol_type = other DNA
atggaggaccacatgttcggcgtgcagcagatccagcccaacgtgatctctgtcagattatttaagagaaaggtagggggactgggtttcttggtgaaggaacgggtaagcaagccacccgtgatcatcagcgacctgatccgcggaggagccgccgaacagagcggtctgatccaggcaggcgatattattctggccgtgaacgggaggcctctggtggatttgagctacgacagtgcactcgaggttttgaggggaatcgcaagcgagacacatgttgtcttgattctcaggggccccgagggatttaccactcacctggagacgacatttacaggtgatggcacacctaagactataagagtgacgcagccacttggcccaccaaccaaggcagttgatcttagccatcagcctccagccggaaaagagcaaccgctcgctgttgacggtgctagcgggccaggcaacggaccacagcacgcatacgatgatgggcaggaggcaggctcgcttccccacgctaacggactagcacctcgaccgccaggtcaggaccccgccaagaaagcaacccgtgtgagtctccagggtcgaggagagaataatgaacttctgaaggaaattgagcctgtgctgagcctcctcacctctggttcccgtggggtcaaaggaggtgcccctgccaaagctgagatgaaggacatgggaatccaggtcgaccgcgacctggacggtaaaagtcataaacctttaccactgggcgtggagaatgaccgcgtgttcaatgatctctggggaaaaggcaatgtgccagttgtgctaaataatccgtacagtgagaaagaacaaccaccgacctcgggaaagcagtccccaacgaagaatggcagccctagtaaatgtcctagatttctcaaagtaaaaaactgggaaacggaggtggttcttacagacactttacatcttaaatctaccctggagaccggttgtacagagtacatctgtatggggtccattatgcacccttcccaacacgcacggagacctgaggatgtgcgaacaaaagggcagctgttccccctagctaaggagttcatcgatcagtactattcatcaatcaaacggttcgggtcgaaagcgcacatggagcgtttagaagaagtcaacaaagaaattgacaccacctccacataccagctgaaagatactgagctgatctacggagccaaacatgcatggaggaatgcttccaggtgcgtcggacggattcagtggagcaagctgcaggtatttgatgctagggactgtacgactgcccacgggatgttcaactatatctgcaaccatgttaaatatgccacgaataaggggaatttgcggagtgccattacaattttccctcagcgcacggatggaaagcacgacttcagagtgtggaactctcaacttatccgctacgccgggtacaagcaacccgacggaagcaccctaggggacccagcaaacgtgcagtttacagaaatctgcattcagcaaggatggaagccccccagggggcggtttgatgttttgcccctgctcctccaggctaacgggaatgaccctgaactcttccaaatcccaccagagctggtactggaggtgcccattcgccacccgaaattcgagtggttcaaggacttgggactgaagtggtacggattgcctgccgtgagcaatatgctattggagataggcggcctcgaattttccgcatgcccgttctccgggtggtacatggggacggagattggcgtaagagattattgcgataactcccgctataatattttagaagaggtcgcaaagaagatgaacctggacatgcgtaagacctcctccctgtggaaggatcaggccttggtggagattaatatcgccgtgctgtactcgttccagtcagataaggtgacgattgttgatcaccactccgcgactgagtcttttatcaagcatatggagaacgagtatagatgccgcggtggctgccccgccgactgggtttggatcgtgcctcctatgtcaggctccatcactcctgtgtttcaccaggaaatgcttaactaccggctaactccatcttttgagtatcagcccgacccttggaatacacatgtttggaaaggcaccaatggaacaccgacaaaaaggagagccatcggcttcaaaaaactggccgaggctgtgaagttctccgcaaaacttatgggacaggccatggcaaaaagagtgaaagccactatcctatacgctaccgagaccgggaagtctcaggcatatgcaaaaactctttgtgaaatctttaaacacgcattcgacgccaaggtgatgtcaatggaggaatacgacatcgtgcatctggagcacgagactctcgtactggtggtgacctctacattcgggaacggggatccacctgaaaacggagagaaattcggatgtgctctcatggagatgagacaccccaactccgtgcaggaggagaggaaatatcccgagccattaaggtttttcccaagaaaaggtccccccctgcccaacggtgacactgaagtccacggtttggccgcagccagagattctcagcaccggtcttacaaagtccgttttaatagtgtgtccagttacagtgattcacagaagtcaagcggagatgggccggacctgcgggataacttcgagagcgccgggcccctcgctaacgtgcgtttttctgtatttgggctgggaagccgggcataccctcacttctgtgcatttggccacgctgtggacactctgttggaggagctgggcggtgagcgcatcctgaaaatgcgtgaaggagacgaactctgtgggcaagaggaggcgtttcggacctgggccaaaaaagtgtttaaggcagcctgcgacgtcttttgtgtgggcgacgacgttaacattgaaaaggctaataatagcctaatcagtaacgaccgctcttggaaaagaaataagtttcggttaacattcgttgctgaagccccagagctgacacaggggctgtctaacgttcacaagaagagagtgagcgcggcgcgcctcctttcaagacagaatctccaatcccccaagtcaagcagatctacaatcttcgtacggctccacacaaatggcagtcaggagctgcagtatcaacctggagaccacctgggggtgttccctgggaatcatgaggacttggtgaatgccctaatcgagcgtctcgaggacgcaccccccgttaatcagatggtcaaagtggagctcctcgaggagcgcaacaccgcccttggtgtgatatccaattggactgacgagctgagattgcccccatgtaccattttccaggcctttaagtattacctagatataacaacaccacctacccccctacagcttcagcaattcgcaagccttgctacaagcgagaaagagaagcaacggctgctagttttgtctaaagggcttcaggagtatgaagaatggaaatggggcaagaatcccacaatcgtggaagtgctggaagagtttccttccatacagatgcccgccacattgctcctgacacaactaagcctgctgcagcccagatattatagcatatcttcttctcctgacatgtaccccgatgaggtccacctgaccgttgccatcgtgtcataccgaactagagacggtgagggccccattcatcatggtgtctgctccagctggctcaatagaattcaggccgatgagcttgttccctgtttcgtgcggggtgccccttcgttccacttgccacgcaaccctcaggtaccctgtatcctggttggacctggtaccggaattgcacccttcaggagtttttggcagcagcgccagtttgatatccaacataagggcatgaatccttgtccaatggttctggtttttgggtgccgccagagtaagatagaccatatctatagggaggaaacactgcaggcaaaaaataagggggtgttccgcgagctgtataccgcctattccagggagccagataaaccgaagaagtatgtgcaggatatcttgcaggaacagctggccgagtctgtctacagggccttaaaggaacagggcggacatatttacgtgtgcggcgatgtgacgatggccgcagatgtgctgaaggccatccagagaatcatgacccagcaaggcaaactttctgccgaggatgctggcgttttcatctctcggatgcgtgatgataatagataccatgaggacatattcggagtgactctccggacttacgaggtcaccaatcgactgcgatccgaaagcattgcgttcatagaagagagcaaaaaggataccgacgaagtattctcttcttag

SEQ ID NO: 197378 - DNA, 1224 bp, synthetic construct
  misc_feature 1..1224: note = Description of Artificial Sequence: Synthetic coding sequence
  source 1..1224: mol_type = other DNA
atggaggaccacatgttcggcgtgcagcagatccagcccaacgtgatttctgtcaggctgttcaagaggaaggttggtggcctgggattcctggtaaaggagcgagtgtccaagcctccagtgatcatttctgacctcatcaggggcggagcagccgagcagagcggcctcatccaggccggagatataatcctcgcggtgaatggcaggccattggtcgacctgtcctacgactctgctcttgaggtactccgagggatcgcgtcagagacccatgtggttctgatcttgcggggccccgaaggctttactacacacctggaaaccacgtttactggggacggaactccaaaaacaattagggtcacccagcctctgggccctcctactaaagcagtcgacctttctcatcagccacccgctggtaaggaacagcctctggctgtcgacggcgcctcaggacccggcaacggtcctcaacatgcatacgatgatgggcaggaggccggatctttgcctcatgccaatggcctcgccccacgcccacctggacaggaccctgccaagaaagctactcgggtgtccttgcaggggcgcggagagaataacgaattactcaaggagatagagccagtgctcagtctactgacctccggcagcagaggcgtaaaaggtggagctccagcaaaagctgagatgaaggatatgggaatccaggttgacagggatcttgacggcaaatcgcacaagcctttgccgctgggtgtcgagaatgatagagtctttaacgatttatggggaaaaggcaacgtgccagtcgttctaaataatccctattctgagaaggagcagatgaggaaattgaggattaccgagggcttcggggcgcagcgcggctcacacaaccacccaccgccccaggagaactctccccctcagaggatggcggcgccaccatctgtccacgcctcatccaggtcacgcaccggacggctcagatggtttagtctgaccccctccactctacgggctcactggaagcgcgacgccctttccacatctgcctgggccccctcttgcattttgttgtcaatgcaggggggtctcaagacttctgcccagaaagatagttccagtctctctcccaagagccttttgatcaatactatccatcagttgaaggacctcgccccaaagccgacatggaaagggtggaaacgatag

SEQ ID NO: 197379 - DNA, 3993 bp, synthetic construct
  misc_feature 1..3993: note = Description of Artificial Sequence: Synthetic coding sequence
  source 1..3993: mol_type = other DNA
atggaggaccacatgttcggcgtgcagcagatccagcccaacgtgatctccgtgcgcctgttcaagcgaaaggtcgggggcctgggattcctcgtgaaagagcgcgtttcgaagcccccggtgattatctccgatttaattcgggggggcgcagcggagcagtcaggcctgattcaggcaggagatattattctggctgttaatggcagacctctagtggatctctcttacgactctgctctagaagtcctgagggggattgccagcgagacccacgtcgtattgatcctaaggggccctgaaggtttcaccacacacttggagaccacttttaccggcgacggcaccccaaaaacaatccgggtgactcagcctcttggccctcccactaaggccgtcgacctgagtcaccagccaccagcgggtaaagagcaaccactcgcagtagatggggcatctgggccaggcaacggccctcaacacgcgtacgatgatggccaggaagccggcagtctgcctcatgcaaatggtctggccccccgtcctccaggacaagacccagctaaaaaagctaccagagtcagcctccaagggagaggcgagaacaacgaactgctgaaagagattgaaccggtcctaagcctgctgacctccggatctagaggtgttaaaggcggtgcacccgccaaggcggagatgaaggacatggggatccaggtagaccgggatctggacggtaaaagccataagccactcccacttggcgtcgaaaatgaccgcgtctttaatgacttatggggcaaagggaatgttcctgtcgtgctcaacaacccgtattctgagaaggagcagccgcccactagtgggaaacagagtccaaccaagaacggatccccttccaagtgccctagatttcttaaggtgaagaactgggaaaccgaggtagttcttaccgacactctccatctgaagtcaacactggaaacaggctgtacagagtacatctgtatgggatccatcatgcatccttcacagcacgcaagacgtccagaagacgtgcgtactaaagggcagctgttcccactggccaaggagtttattgatcagtactatagctcaattaagcgatttgggtcgaaagcacatatggagcgcctggaggaggtgaataaggagattgataccacctctacttatcagctgaaggataccgaactgatatacggggccaaacacgcatggaggaacgcgtctaggtgcgtcggtcgtattcagtggagcaagctgcaggttttcgacgcccgggactgcactaccgcccacggaatgttcaattacatttgcaatcatgtgaaatatgctaccaacaaagggaatctccgctccgctatcacaatcttccctcagcgtactgatggcaagcatgatttcagagtctggaattcacagttgatcagatacgccggctataagcaaccagatggttctacactcggggatccagctaacgtgcagtttaccgaggaggtggccaagaaaatgaacctggacatgaggaaaacctccagtctctggaaggaccaggctcttgtcgaaatcaatatcgccgtgctgtatagcttccagtccgacaaggtgactattgtggaccaccatagcgcgacagagtcttttatcaagcacatggagaacgagtacaggtgtcggggcgggtgccctgccgactgggtgtggatcgtccccccaatgtccggaagcatcacacctgtgttccaccaggaaatgcttaactaccgcctgaccccgagcttcgagtatcagccagacccctggaatactcacgtgtggaagggcactaacggaacacctaccaagaggcgggcaataggctttaagaaactggccgaagcggttaagtttagtgcaaagcttatgggtcaagctatggctaagcgggtcaaagccaccatcttatacgcaacagagactggtaagagtcaggcgtacgcaaaaacactgtgtgagatttttaagcacgcgtttgatgccaaggtgatgtctatggaggagtacgatatagttcacctggaacacgagaccctggtgctcgtggtgacctcaacatttggcaatggagacccacccgaaaatggagaaaaattcggttgtgcgttgatggagatgcgtcatcccaatagtgtccaggaggagcgtaagtcgtacaaagttcgttttaattcagtgtctagctactccgattctcagaagtcctctggagacggtcccgatttgcgtgataacttcgaatcagcagggccactagcaaatgtcaggttttctgtcttcgggttggggtctcgagcctacccacacttttgcgcttttggacacgcggtggacactctactagaagagctgggaggagaacgaatcctgaagatgagggaaggagacgaactctgtggccaggaagaggcatttcgcacgtgggctaaaaaggtgttcaaagcagcctgtgacgtgttctgcgtgggtgacgacgtcaatattgagaaagcaaacaactcacttattagcaatgacaggtcatggaaacgaaacaaattccgcttaacatttgtggcagaggctccagagctaactcaaggactgagtaatgtgcacaagaagagagtctctgcggcacggctgctgagccgccagaacttgcagtccccaaagtcctcccgtagcacaatttttgttagactgcataccaatggatcacaggaactgcagtatcagcctggggaccatttgggtgtgttccctggtaatcatgaagacctggtgaatgcactcatcgaacgactggaggacgccccccccgtgaatcagatggttaaagttgaattgctggaggagcgtaacaccgccctcggcgtgatttccaactggaccgatgaactccgcctgcctccctgcacaatcttccaggcttttaagtactacctggacatcaccaccccccccacacctctgcaactccagcaattcgcgagtctggcgacatcagaaaaagagaagcaaaggctgttggtgctatctaaagggctgcaggagtatgaagagtggaaatgggggaaaaatcctaccattgtcgaggttctcgaagaattccccagcattcaaatgcccgcgacactccttctaacacagctctctcttttgcagcctaggtactacagcattagttcgtcccccgacatgtacccagatgaggtgcatctcacagtggcgatcgtgtcttacaggaccagagacggcgagggacccatccaccacggcgtgtgctcttcatggttgaatcgaattcaagccgatgagctggtaccatgtttcgtcagaggggcccctagctttcacctccccaggaatccacaggtgccctgcatcctcgtgggtcccggaactggaatcgcccccttcagaagcttctggcagcaacgtcagttcgatattcagcataagggcatgaatccttgtcctatggtactcgtgttcggctgcaggcagagtaagatcgatcatatctatcgggaggaaaccctccaagccaagaacaagggtgtgttcagggaattgtatacagcctatagcagagaacctgataaacctaagaaatatgtccaggacatcctgcaggaacaactggccgaaagcgtatatcgcgccctgaaggagcagggcggacacatatacgtgtgcggtgatgtaacaatggcggcagacgtactcaaagcgattcaaagaatcatgactcagcagggcaaactgagtgcagaggacgctggtgtgtttatctcccggatgagagacgacaaccgatatcatgaggatatcttcggcgtcaccctgcgtacatatgaagtgaccaaccgcctgagatcggaatccattgcgttcatagaagaatcaaaaaaagacacagacgaccaggtgttcaaaacttag

SEQ ID NO: 197380 - DNA, 3621 bp, synthetic construct
  misc_feature 1..3621: note = Description of Artificial Sequence: Synthetic coding sequence
  source 1..3621: mol_type = other DNA
atggaggaccacatgttcggcgtgcagcagatccagcccaacgtgatcagtgtgcggctatttaagcgtaaagtcggtggtcttggattcctcgtcaaggagcgagtgtctaaaccacctgtgatcatttcggatctcattcggggcggggctgcggagcagagcgggcttatccaggcaggcgacatcatccttgctgttaacgggaggccactcgtagacctgtcctatgacagtgctctcgaggttctgcggggcatcgcctccgagacacacgtggtcctgatcctgcgcggcccagaaggcttcaccacccacctggagaccacctttaccggagatgggaccccaaagaccattcgcgtgactcaacctttgggtcccccgaccaaggctgtggacctcagccaccagcctcctgctggcaaggagcagccgctggccgtggacggagcgagtgggccgggcaacggcccacagcacgcatacgatgatggccaggaagcagggtcactgccacatgcaaacgggttggcccctcgtccacctggccaagatccagctaaaaaagccacgagagtctctctacagggacggggggaaaacaatgagttactcaaggagattgaacccgttctgtccctgctcacctctggatcccgcggcgtgaaaggcggtgcacccgctaaagcagagatgaaagacatgggaattcaggtggatcgggacttagatgggaagagtcacaagccgctcccactgggggttgagaacgatcgtgtattcaacgacttgtggggcaaaggcaacgtccccgtagtcttgaataacccgtattccgagaaggagcagcccccaacctcagggaagcagtcccccactaagaacggttcccctagtaagtgtccccggttcctcaaggttaaaaactgggaaaccgaggtggtactgaccgacacattacacttgaagagcacgctagagacgggctgtaccgagtacatttgcatgggtagtatcatgcacccttcccagcacgctcgacgccccgaagatgtacggacgaaggggcagctgtttccactagccaaggagtttatcgaccaatattacagctcgatcaaacgtttcggtagcaaagcccacatggagcgactggaagaggtgaataaggagattgatactacaagcacctatcagctgaaggatacagagctaatctatggtgctaaacacgcgtggcgcaatgcgtcaagatgcgttggtaggattcagtggagtaaattgcaggtgtttgacgccagagattgtaccacagcacacggaatgttcaactacatctgtaaccacgtgaaatacgctacaaacaagggtaacttacgcagtgctatcaccattttcccccagcggaccgacggcaagcacgacttcagggtgtggaactctcagctgattcgatacgccggttacaaacagccagacgggtcgaccctgggcgatcctgccaatgtacaatttaccgagatatgcattcaacaaggatggaaaccgcctcgcggacgcttcgacgttttgcctctgctactgcaagctaacggcaatgatccagaactgtttcagatacctcccgaactggtcctggaagtacccatccgccatcccaagttcgagtggtttaaagacctcgggctaaaatggtacggccttcccgccgtgtccaacatgttgttggagataggcggactcgagttttccgcatgcccattctcaggctggtacatgggtacagagatcggcgtccgcgattattgtgataatagccggtataatattttggaggaagtcgctaagaaaatgaacctcgacatgcgcaaaacaagtagcttgtggaaggatcaagccttggttgaaataaatattgctgtactgtattcttttcaatccgataaagttactattgtggaccaccacagtgccactgagagcttcattaagcacatggagaacgagtaccgctgtcggggcgggtgcccagcggattgggtctggattgtaccacctatgtctggatccatcacacctgtgttccatcaggagatgctgaattatcgtctgaccccaagctttgagtatcaacctgacccgtggaatactcacgtctggaagggaaccaatggcactcctactaaacgaagggcaattggcttcaaaaaactggcagaagccgtcaaatttagtgcgaaattaatgggccaggccatggccaagagagtgaaagccactatactttacgctaccgaaacaggcaagtcacaggcgtacgctaagaccctgtgtgaaatcttcaaacacgcattcgacgcgaaggtgatgtcgatggaagagtacgatatcgtacaccttgaacatgaaactctggtgttggtggtcacttccacatttggaaacggcgatccaccagaaaacggcgagaagtttggatgcgccttgatggagatgaggcacccaaactccgtgcaagaagaacgcaaatcgtataaggttaggtttaactctgtgtcttcctactcggacagccagaaaagctctggagacgggccagacctgagagacaatttcgagagcgccggcccattagccaatgtacgtttttctgtcttcggcttgggtagccgcgcctatccccatttttgcgcctttgggcatgccgtggacaccctcttggaagagctgggcggggaaagaatcttgaaaatgcgcgaaggcgacgaattgtgcggccaggaggaggctttccggacgtgggcgaagaaagtctttaaagcagcatgcgacgtcttttgcgtgggggacgacgtcaatatcgaaaaggctaataattccttaattagcaacgatcgatcatggaagagaaacaagttccggcttacatttgtggctgaggctcctgaactgactcagggactatccaacgtccataagaaaagggtctcggctgctagactcctatcccgacaaaacctgcaatctccgaagagcagcagaagcaccatatttgtgagactgcacacaaatggatcccaggaattacagtaccaacccggagatcatctgggagtatttccgggcaaccatgaggacctcgttaatgccctcatcgaacgcttagaagacgcacccccagtgaatcagatggtcaaggtcgaactgcttgaggagcggaatactgcactgggtgtgattagcaattggaccgacgagcttcgcttgcctccatgcaccattttccaagcgtttaagtactatctggacattactaccccacccacacctcttcagctgcaacaatttgcttcattggccacgagcgagaaagagaaacagcgcctgctggtgctgtccaagggcctgcaggagtacgaagagtggaagtggggtaaaaacccaaccattgttgaagtcttggaagaattcccatcgatacaaatgcccgcaactttgttgctgacccagttgagccttctgcagcctcgatattattcaatttcctcctctccccacacacacaccttgtcagaaacaagaccaagtcccctacccctttcttcacagtgttgctag

SEQ ID NO: 197381 - DNA, 204 bp, synthetic construct
  misc_feature 1..204: note = Description of Artificial Sequence: Synthetic coding sequence
  source 1..204: mol_type = other DNA
caccccaacagcgtgcaggaggagcggaagtaccccgagcccctgcggttcttcccaagaaagggacccccactgcccaatggggacacagaagtgcacggactggctgcggctcgagactcccagcacagatcctacaaagtgaggtttaattccgtgtcctcatacagtgattcccagaaaagcagtggggacgggccttag

SEQ ID NO: 197382 - DNA, 1521 bp, synthetic construct
  misc_feature 1..1521: note = Description of Artificial Sequence: Synthetic coding sequence
  source 1..1521: mol_type = other DNA
atgcccagcaagaccaagtacaacctggtggacgacggccacgacttgcggatccccctccataatgaggatgcctttcagcacggaatctgttttgaggcaaaatatgtgggttccctggatgtgcctagacccaattcccgcgtggagatcgtcgctgccatgcggcgaattcgctatgagttcaaagctaagaacattaagaaaaagaaggtgagcatcatggtctccgtggacggcgtcaaggtgatactgaagaagaagaaaaagctcttgcttctgcagaaaaaggagtggacgtgggacgagagcaaaatgcttgtaatgcaagaccccatatatcggatcttttatgtctctcacgatagccaggacctaaagatcttcagctatatcgccagagatggcgcttccaacatttttcggtgtaatgtgtttaagagcaagaagaaatcacaggccatgaggatagttcggactgtcggacaggcatttgaagtatgccacaaattgtccctgcaacacacacaacaaaatgccgacgggcaggaagacggcgaaagcgaaagaaattccaactcttccggagacccaggccggcagctgacaggggccgagagagcaagcactgcaactgccgaggagactgatatagatgcagtcgaagtaccactgcccggcaatgatgtgctggagttttctcgaggggtgaccgatctggacgctgtcggaaaggagggtggatcccacactggaagtaaagtgtcccatcctcaagagcccatgctcaccgcctccccccgcatgttactcccttcatcctcttctaagccacctggacttgggacagagaccccactatccacacatcaccagatgcagctactgcagcagctgctgcagcaacagcagcagcaaacacaagtggccgtggctcaggtacacctgctcaaggatcagctggctgctgaagcagcagctcgactcgaagcccaggcccgagtgcaccaactgctactacaaaataaggacatgttgcagcacatctctctgttggtgaaacaggttcaggagctcgaacttaaattatcagggcagaatgcaatgggctcccaggattcactcctcgaaattaccttccgctccggtgcgctgccagtgttgtgcgatcccacaacacctaaacccgaggacttacactccccacctctgggtgcgggactggccgattttgcccatccagcaggtagcccactgggccggagggattgccttgtcaaactggagtgttttaggtttcttccgcccgaggataccccgccacctgcgcagggggaagctctgctgggcggcctagaactgatcaagtttcgagagtccggcatcgcttcggaatacgaatcaaacaccgacgaaagcgaggagcgcgatagctggtcccaggaagaactccccaggctcctcaatgtgttgcaacgacaggaactgggcgacgggcttgatgatgaaattgcagtgtag

SEQ ID NO: 197383 - DNA, 636 bp, synthetic construct
  misc_feature 1..636: note = Description of Artificial Sequence: Synthetic coding sequence
  source 1..636: mol_type = other DNA
atgagcctgagcagcctgtgccccgtgttcagcgccgccgccagcagcctccaggtccatctgctgaaggatcaacttgctgctgaagcggcagctcggctggaggcccaagcacgagttcaccagctcttgcttcaaaataaggatatgcttcagcatatatccctgctggttaaacaggttcaggagctcgaactaaagttgagcggccagaacgccatgggatcccaagatagcctcctcgaaatcacattccggtcgggggcgttgcccgtgctgtgcgatccaacgaccccgaagcctgaggatctgcattcaccccctctgggtgcaggcctggctgatttcgcacaccctgcagggtctcccctggggcggcgcgattgcttagttaagctggaatgcttcagattcctgcccccagaggacacacctccacctgcccagggagaggcccttctggggggcttggaactgattaagttccgggaatccggtatcgcaagcgaatacgaaagcaacactgacgagtcagaggagcgggactcttggtctcaggaggagcttccgaggcttttgaatgtgcttcagcgccaagaactgggagacgggttggatgatgagatcgccgtctag

SEQ ID NO: 197384 - DNA, 1506 bp, synthetic construct
  misc_feature 1..1506: note = Description of Artificial Sequence: Synthetic coding sequence
  source 1..1506: mol_type = other DNA
atgcccagcaagaccaagtacaacctggtggacgacggccacgacttgaggatccctctacacaacgaagatgctttccagcacggtatctgctttgaggctaagtatgtgggctctctggatgtccctcgacccaatagccgcgttgagatcgtggctgcaatgcgcagaatccgatacgaatttaaggccaagaacatcaaaaaaaagaaagtatctataatggtgagtgttgacggcgtaaaggtgatattaaaaaaaaagaagaaaaaaaaagagtggacctgggacgagtccaagatgctggtcatgcaagatcctatttaccgtatcttctacgtatctcacgattcccaggacctcaaaattttctcttacatcgcacgcgacggagcttccaatatatttcgctgcaatgtttttaagtccaaaaaaaagtctcaggctatgcgcatcgtacgcacagttggtcaagcttttgaagtctgccacaagctcagtctgcaacatacccagcagaacgccgacggccaggaggatggcgaaagtgaacggaactcaaactcatctggcgatcccgggcggcagctcaccggggccgagcgcgcatcaacagcaacagccgaagaaaccgatattgatgccgtcgaggtcccattgcccgggaatgacgtccttgagttctcacgaggcgtgacagacctagacgcagtggggaaggaaggcggcagccacaccggctccaaggtaagccacccccaggaaccgatgctcaccgcatctcctagaatgctcctgccatcttcatcctcaaagccacctggccttggaactgagactccactgagcactcaccatcagatgcagcttctgcaacagctcttgcagcagcaacagcagcaaacccaagtggcagtggcccaggttcacttactgaaggaccagctcgcagcggaggcggctgcaagactcgaagcacaagctagagtgcatcagcttctgttgcagaataaggatatgctgcaacacatcagcctgctggtgaaacaagttcaggaactggagctaaaactttccggccagaacgcaatgggtagccaggactccctccttgaaataactttccggtccggagccttgccggtactatgcgacccaactaccccaaaacccgaggatcttcattcccctccactgggcgcagggctagcagactttgcccacccggccggctcccccctggggcgtcgcgactgcctcgtgaagttagaatgcttcaggtttcttccgcctgaggacacccccccaccagcccagggtgaggccttgctgggtggacttgagctcatcaaattcagggagtcgggcattgccagcgaatacgagtctaacactgatgagagcgaagagagagacagttggtcccaggaagagctgccgcggctcttaaatgtactgcagcgtcaagaactgggcgacggcctcgatgatgaaatagcggtttag

SEQ ID NO: 197385 - DNA, 2190 bp, synthetic construct
  misc_feature 1..2190: note = Description of Artificial Sequence: Synthetic coding sequence
  source 1..2190: mol_type = other DNA
atggcctgcccctggaagttcctgttcaagaccaagttccaccagtacgccatgaacggcgagaaagatatcaacaacaacgtggaaaaggccccatgcgccaccagcagccccgtgacccaggatgacttacagtatcataacctcagcaagcaacagaatgaatccccccaacccctcgtggagacaggaaagaaatctcctgaaagtctcgtgaagttagacgcgaccccactatccagtcctcgccatgtgagaattaaaaactggggctccgggatgacatttcaagatacccttcaccataaggccaaaggcatcttgacgtgtagatccaagtcatgcctgggcagtataatgacgccaaagagcttaacccgcgggcccagggataaacctactcctcctgacgagttgctcccccaagctatagagtttgtcaatcagtactatggatcttttaaggaggctaagatcgaggagcatctggccagggtcgaagccgttacgaaggagatcgaaaccacaggtacctatcagctgacgggcgatgagctgatatttgccaccaagcaagcctggcggaacgcccctcgatgtattggacgaatccagtggagtaacctgcaggtatttgatgcccgcagctgttctacagccagagaaatgttcgagcatatctgtcgccacgtccggtactccaccaataacggcaatattcgcagtgctataactgtgttcccccaaagaagtgacggtaagcatgacttccgcgtgtggaatgcccagctgatccggtacgctggctaccagatgcccgatggcagtatacggggtgaccctgctaatgtagagtttacacagttatgtattgatctcgggtggaaacccaagtatggaaggttcgatgttgtgccccttgttctgcaggccaatggcagagaccccgagctgttcgagatcccaccagatttagtcctggaggttgcgatggagcaccctaagtatgagtggtttagggagcttgagctcaagtggtacgccctgcctgcggtagcaaatatgctgctcgaagtgggcggtttggaattccccggatgcccatttaatggctggtatatgggaaccgagataggtgtaagagatttctgcgacgtgcagcgctacaacattctcgaagaggtcggacgacggatgggcctggagactcataagctagccagtttgtggaaggaccaagccgtggtcgaaattaatatcgccgtgctgcattccttccagaagcagaatgtaaccatcatggaccaccatagtgcagcggagtccttcatgaagtatatgcaaaatgagtatcggagcagaggagggtgtccggctgactggatctggctggtccctcccatgtcggggagcatcacacctgtcttccaccaggagatgctgaactatgtgctgagcccattctactactaccaggtcgaggcctggaaaactcacgtgtggcaggatgaaaaaagacggccaaaacggcgggagatccccttgaaagtgctggtgaaagccgtactgttcgcatgtatgcttatgaggaagacaatggcatctagggttcgcgtcaccatactgttcgccaccgagacgggtaagtctgaagcgcttgcgtgggatctaggcgcacttttctcctgtgccttcaaccccaagaaacttaagaaaagcctgtttatgctgaaagaactgaacaataagttccggtacgccgtgtttggtcttggttctagtatgtatcctcgattctgtgcgtttgctcacgatattgaccaaaaactgtcccacctcggagcttcccagcttactcccatgggtgaaggcgatgaactgtcaggccaggaggacgccttcaggagctgggccgtccagaccttcaaggccgcctgcgagacctttgacgtgagaggcaaacagcacatccaaattcctaagctttacacgagcaacgtcacatgggaccctcatcattataggctagtacaggatagtcaaccactgcccgcggcatcgacttccccaaggattccccctatcctggcttcgtcttctggcctggcccaagcttccaggccctcagccgttagtggctctaatggctctatgactccatccacgagggagtgtggcgaggccgcctag

SEQ ID NO: 197386 - DNA, 3462 bp, synthetic construct
  misc_feature 1..3462: note = Description of Artificial Sequence: Synthetic coding sequence
  source 1..3462: mol_type = other DNA
atggcctgcccctggaagttcctgttcaagaccaagttccaccagtatgcaatgaacggggaaaaggacattaataacaacgttgaaaaggccccatgtgccacatcttcccctgtaacacaggacgacttgcagtaccataacctgagcaaacagcagaatgagtccccacaacccttagtcgaaacaggtaagaagtcacctgagtcacttgttaaactggatgccactccactcagttccccaaggcacgtcaggatcaaaaactggggctctggcatgacttttcaagacacactccaccacaaagcgaagggaatcctcacctgccgctcaaagagctgtctcggctcaatcatgactcctaaaagcctcactagaggtcccagagacaagccaaccccaccagatgaactgctgccccaagcgatcgagtttgtgaatcaatattacgggtctttcaaagaagcgaaaattgaagagcacctggcacgtgtggaggctgtgaccaaagagatcgagaccacagggacctatcagctgacaggtgacgaattgattttcgccaccaaacaagcttggcgcaatgccccccgctgcatcgggcgaatccaatggagcaatctacaagtctttgatgccagatcttgcagcacagcccgggaaatgttcgaacacatttgcagacacgtgcgctacagcaccaataacggaaacatccggagcgccattaccgtgttcccgcagcgcagcgacggaaagcacgattttagggtttggaatgcccagttgattagatatgcaggttaccagatgcctgatggcagcatccgaggcgaccccgccaacgttgaattcacgcagctttgcatcgatctgggctggaagcctaagtacggcaggtttgacgtcgtgcccctagtgctccaggcaaatggtcgagatcctgaactgttcgaaatcccccccgaccttgttctcgaggtggccatggagcatcccaagtatgagtggtttcgagagctggagttaaaatggtacgcactgcctgcagttgccaacatgctgttagaggtggggggcctcgagttccccgggtgtccctttaacggctggtatatgggcacggagataggcgtgagagatttttgtgatgtccagcgctataatatcctggaagaagtcggtcggcgtatgggcctggaaacccacaagcttgctagcctttggaaagatcaggcggttgtagagatcaatattgctgtacttcactccttccagaaacagaatgtgactatcatggatcaccacagcgcggcagagtcctttatgaagtacatgcagaatgaatatcggtcacgtggggggtgcccagccgactggatctggctcgtccctcctatgtccggcagtatcactcctgtcttccaccaggagatgcttaactacgtgctgtccccgttctattactaccaggtggaggcctggaagacacatgtgtggcaagacgaaaagagacgccctaaacgtcgggagattcctctcaaagttcttgtgaaggccgttttgtttgcgtgtatgcttatgagaaagaccatggccagtcgcgtacgcgtcaccatactcttcgctactgagactgggaagtccgaagctctggcgtgggatctgggagcactgttttcttgtgcgttcaatccgaaagtggtctgcatggataagtatagactgtcctgtttggaagaagaacgactactactcgtagttacctcaacatttggaaacggggactgtccgggcaacggcgagaaattgaagaagtccctttttatgcttaaggagctgaataacaagttcaggtatgccgtgttcgggttaggttcctcaatgtacccaagattttgcgcttttgcgcatgacatcgatcagaaattgtcacacctcggggccagtcaactgacccctatgggagaaggagacgagttgtcaggtcaggaggacgcgttcagaagttgggctgtccaaacctttaaggcagcttgcgagacgtttgacgtgcggggcaagcagcatatccagatccccaaactgtatacatcaaatgtgacctgggacccccatcactatagactggttcaagattcccagccactagatctgagcaaggcactgagcagcatgcatgctaaaaatgtgtttacaatgcgactgaagtcccggcaaaatcttcagagtcccaccagctcacgagccaccatcctggtggagttatcctgtgaggacgggcaaggattaaactaccttcccggagagcacctcggtgtctgccccggcaatcagcctgcactggtccagggaatactggaaagagtcgtggacgggcctacacctcaccagaccgtcagactcgaggcactggacgagtctgggagctattgggtgtcagacaagaggctgccaccatgcagcttatcacaagctctaacatacttccttgacatcacaacaccgcctacgcagctgctcctccagaaactggcacaagtagctaccgaggaaccggaaagacagcgtctggaggccctctgccagcccagcgagtattctaagtggaaattcactaatagtcctacatttctggaagttttggaggagttcccaagtctgcgtgtgagcgcagggttcctgctcagccagttgcctatcctgaagcctcgcttttactctatttcctccagccgggatcacactcctaccgaaatccacctgacagtcgccgtcgtcacttatcatacacgagatggccaagggcccctccaccacggcgtgtgttcaacttggctgaattccctgaagccgcaggaccctgtgccgtgcttcgtgcgaaacgcctccggcttccacctgcctgaggaccctagccacccatgcattttaattggacctggtaccggtatcgcgccattccggtccttctggcaacagagactgcatgactcgcagcacaaaggagtccgcggaggcagaatgaccctcgtgttcggatgccgtaggcccgacgaggatcatatataccaggaagaaatgcttgaaatggcgcagaagggggtgttgcatgcagttcatacagcttactctagactgccagggaagcccaaggtctatgtccaagacatcttgcgccagcagttggccagcgaggtccttcgcgtgctacataaagaaccaggccacctgtacgtgtgtggggatgtcaggatggccagagatgttgcgcacactcttaaacagttggttgccgccaaactgaaacttaacgaggagcaggtggaagattattttttccagcttaaaagtcagaaacgatatcatgaggacatttttggtgcagtcttcccttatgaggccaaaaaggatcgcgtggccgtgcagccctcttctctggaaatgagcgcactctag

SEQ ID NO: 197387 - DNA, 3345 bp, synthetic construct
  misc_feature 1..3345: note = Description of Artificial Sequence: Synthetic coding sequence
  source 1..3345: mol_type = other DNA
atggcctgcccctggaagttcctgttcaagaccaagttccaccagtacgccatgaacggggaaaaggacatcaacaacaacgtggagaaggccccatgcgccacatcctctcccgtcacacaggacgatctgcagtaccacaatttgagcaaacagcagaacgaatccccacaacccttggtggagacaggtaaaaaatctccagagagtcttgtcaagctcgacgctacacctttgagcagtccccgccatgtgcggatcaagaactggggtagtgggatgacatttcaggacactctgcaccacaaggcgaaaggcatcctgacctgtcgcagcaagtcttgcttggggagcattatgactcccaaatccctgacccgaggcccaagagataagcctacccctccggacgaacttcttccacaagcaattgagttcgtcaaccagtattacggtagctttaaagaagcaaagatcgaagaacatcttgccagagtagaggccgtgaccaaggagatcgaaaccacaggcacgtaccagctgacgggggatgaactgatctttgcgactaagcaagcgtggaggaatgcacctcggtgcattggcaggatccagtggagcaacctgcaggtatttgatgcccgaagctgcagtactgcccgggaaatgtttgagcacatctgcagacatgtgaggtacagcacaaataatggcaacattaggagcgctattaccgtattcccgcagagaagcgacggcaagcacgattttcgcgtgtggaatgctcaactttgcatagacttagggtggaaacctaatggaagggacccagaactgttcgagatccctcctgacctggtactggaggtcgcaatggagcatcctaaatatgagtggtttagggagcttgaactgaagtggtacgctttgcccgcggtcgctaacatgctgctcgaagtgggtggcttagaatttcctgggtgtccattcaatggctggtacatgggcacagagataggagttcgggacttttgtgatgtgcaacgatacaatatcctggaagaagtgggacggaggatgggtctagagacacacaagctcgcttcactgtggaaagatcaggcggttgtggaaattaacattgccgttctgcacagctttcaaaaacagaacgtcacaatcatggaccaccacagtgccgctgagtcttttatgaaatacatgcagaacgagtatcgatctcgggggggatgccctgctgactggatatggttagtcccccctatgtccggctcaatcacaccagtgttccaccaagaaatgctcaactatgttctgtcccccttttactactatcaggtggaggcctggaaaacacatgtttggcaggacgagaaacggcgccccaagaggagagagatcccactgaaggtgttagtcaaagctgtgctcttcgcgtgcatgctaatgaggaaaactatggctagtcgcgttcgggtaacaattttatttgccacagaaactggtaaatcagaggcattggcctgggacctcggagctctgttctcgtgtgcctttaatcccaaggttgtctgcatggataagtacagattgtcttgcctcgaggaggaaagactcctgttagttgttacttctaccttcggtaatggggactgtcccgggaacggagagaagctgaaaaagtccttgtttatgctgaaggagctaaacaacaagtttcggtacgcagtgttcggccttggctcttctatgtatcctcggttctgcgcattcgcccacgacatagaccaaaagctgtcccaccttggggccagtcaattaacaccaatgggcgagggcgacgagttaagcggtcaggaagatgctttcaggtcttgggcagtgcaaacctttaaagctgcctgcgagactttcgatgtgagaggtaagcagcatatccaaattcccaagctttacacttcaaacgtgacttgggaccctcatcattaccggctcgtgcaggacagccagccattggacctgagcaaggctctttcctccatgcatgcaaagaacgtgttcacgatgaggctgaaaagtcgacaaaacctccaaagtccaacgagttctagggcaactatccttgtggagctgtcgtgtgaggatgggcaagggcttaattacttacctggagaacatcttggtgtttgcccagggaaccagccggctctggtgcaaggaattttggagcgggtcgtcgatggccccaccccacaccagacggtacgcctggaagccctggatgagagcggaagttactgggtcagtgacaagaggctgccaccatgttctcttagccaagctcttacctatttcctggatatcacaacccccccaacccagctccttcttcaaaaattagcccaggtggccaccgaagaacccgaaagacagaggttggaggcactgtgtcagccttccgaatattctaaatggaaatttaccaactctccaaccttcctcgaagttctggaggagtttccctcgcttagggtgtccgcaggctttctgctatcccagcttcccatactaaagccccggttctattccatttctagcagtcgggatcacactccaactgaaatccaccttacagtagctgtcgtgacatatcacactcgggatgggcaggggcccctgcatcatggcgtgtgttcaacctggctgaattccttaaaacctcaggacccagttccctgtttcgtgaggaacgcctccggcttccacctccccgaagaccctagtcacccttgcattctgatcggcccaggaacgggaattgcaccttttcgttcgttctggcagcagagacttcacgattcccaacataagggggttagagggggtaggatgaccctagtcttcgggtgcaggcgaccagacgaggaccatatataccaggaggagatgcttgaaatggcacaaaaaggagtgttacacgccgtccataccgcttattcccgcttgcctgggaagccaaaagtctatgtccaggacatattacgccagcagctcgccagcgaggtgctcagagtgcttcacaaagaaccggggcacctttacgtttgcggagacgtccgcatggcgcgggatgtcgcccatacactcaagcagctggttgcggcaaaactcaagctcaatgaggagcaggtcgaagattatttcttccagctgaagtctcaaaaaaggtaccacgaggacatttttggggccgttttcccatatgaggctaaaaaagatagagtggcggtgcagccctctagcttggaaatgtcagccttgtag

SEQ ID NO: 197388 - DNA, 3612 bp, synthetic construct
  misc_feature 1..3612: note = Description of Artificial Sequence: Synthetic coding sequence
  source 1..3612: mol_type = other DNA
atgggcaacctgaagagcgtggcccaggagcccggccccccctgcggactcgggcttggcttaggtcttggtctgtgtggcaagcagggccctgcgacaccagcaccagagccctcaagggctcccgcttcactcctgccgccagctcccgagcatagcccacccagttcaccgttaacccagcccccggagggccccaaattcccacgtgtgaagaactgggaggtgggttcaataacctacgatactttgagcgcccaggcccagcaggatggcccctgtacacccaggcgttgtctgggttccctggtattccctaggaagctgcaaggtcggccatctcctggaccaccagcaccggagcagctcctgtcgcaggcacgggacttcattaatcagtactacagctcaatcaagcgctctggatcacaggcacatgaacagcggttacaggaggtagaggccgaagtcgccgccaccgggacgtatcagttgagggagagtgaactggtgtttggtgccaaacaggcctggcgaaacgcccccaggtgtgtaggacggattcagtgggggaagctccaagtattcgatgctcgtgactgtcgctccgcccaagagatgttcacctatatctgcaatcacataaaatatgccaccaaccgtggaaatctgcgcagtgcaataacggtattcccccagcgatgcccaggtcgaggcgatttccgaatctggaatagtcagctcgtcagatatgccggctatagacagcaggacggatctgtgaggggagatcctgctaatgtcgagattaccgagctgtgtatccagcacggctggacgccaggtaacggtcgctttgacgtgctcccgcttctgctgcaggcccccgacgatcctcctgaactctttctgctccctccggaactggtcctcgaggtgcctctggaacaccccaccctagagtggtttgcagcgttgggtctgcgatggtatgcgctgccagcggtctctaacatgcttctcgaaattggcggcctggaattcccggccgccccattttcagggtggtacatgtcaactgagattggaacccggaacttgtgcgacccacacaggtataacatactggaagacgtggcagtttgtatggacctcgatacgagaaccacctcgagcctgtggaaagacaaggccgcagtcgaaattaatgtggcagtcctgcactcatatcaactcgcaaaggtaaccattgtggatcaccacgctgctacagcctccttcatgaagcacctcgaaaatgagcaaaaggcccgcggtgggtgtcctgccgattgggcatggatagtgccaccaataagcggatccctcacaccagtgttccatcaagagatggtgaactacttcttgagtccagcgtttaggtaccagccagacccttggaaaggatccgctgccaagggcactggcattactcggaagaaaacctttaaagaagtcgccaacgcagtgaaaatctcggcttctctgatggggactgtgatggctaagagagtcaaggctaccatcctctatggctcggaaaccggacgggcacagtcatatgcgcaacaattgggaagattgtttagaaaagcttttgatcctagggtcctgtgcatggatgagtacgatgtggtctcactggaacatgagacactggtactggtagtgactagcacattcggcaacggagacccgccagagaacggagagtcttttgccgccgctctgatggagatgagtggcccatataatagcagcccacggccagaacagcataagagttacaagattaggtttaattccatctcttgcagtgaccccctggtgagcagctggcggaggaagcgcaaggagtccagtaacactgactctgctggggcattgggtactctgagattctgcgtatttgggttagggtcacgggcatacccccatttctgcgcttttgcccgcgccgtcgacaccaggcttgaagagctgggtggggagaggcttcttcaactgggtcagggagatgagttatgtggacaggaggaggcgttcaggggctgggctcaagccgcctttcaggcagcatgcgagaccttctgtgtgggagaggatgcaaaagccgccgcgcgggatatattcagtcccaaacgatcctggaagcgacagcggtatcggctgagtgcccaggctgaaggactgcagctgctacctggccttattcatgtgcaccgcaggaagatgttccaagccaccattcggtccgtcgagaatctgcagagctctaaatctactagggcgacaattttagttcggctggacaccgggggccaggagggcttgcagtatcagccaggagatcatattggggtttgcccgcctaatcgtcccggtctggtggaggctcttttatctagagtagaggacccccctgctccgaccgagcccgttgccgtcgagcagctggaaaagggcagccccggcggtccacctccaggctgggttcgggaccccagactgcccccatgcacacttcgccaggcccttacattttttctcgacattacatcccctccatctccgcaacttttgcggcttctctctactttggccgaggagccaagggaacagcaagagctcgaagccctttcccaagaccccagaaggtacgaggaatggaaatggtttagatgcccgacccttctggaagtgcttgagcagtttccctccgttgccctgccagccccgcttttgttgacccagctgcctctgctgcagccaaggtattactcggtaagtagcgccccatctacgcatcccggcgagatccacctcaccgtggctgtgctcgcctatcgtacgcaagacggactcggtcccctgcactatggggtatgttccacctggctgtcgcaactaaagcccggtgaccctgtgccctgtttcatccgtggagcaccatccttccgcttgcctcctgacccaagcctgccctgcatcctggtcggtccagggacaggcatcgctcctttccgtgggttttggcaagagcggctgcatgacatagagtctaaagggctccagcccacacctatgaccctggttttcggctgtagatgcagccaactggatcatctgtatcgggatgaagtgcagaacgcgcagcaacggggggtttttggtcgcgtgttaacagccttcagtcgagaaccagacaacccgaagacctacgtgcaggacattctgcggactgaactcgccgcggaagtgcaccgagtcctgtgcctcgagcggggtcacatgttcgtgtgtggtgatgtgactatggccaccaacgtgctgcagacagtacagagaatcctggctacagaaggcgatatggaactagacgaagccggtgacgttatcggcgttctgcgcgatcagcagaggtatcacgaagatatcttcgggctaactctgcgaacccaggaggtgacaagccgcatcagaactcagagtttctctttgcaggagcgtcagctgaggggggctgtgccatgggcattcgacccgcccggtagtgacactaactccccatag

SEQ ID NO: 197389 - DNA, 2994 bp, synthetic construct
  misc_feature 1..2994: note = Description of Artificial Sequence: Synthetic coding sequence
  source 1..2994: mol_type = other DNA
atgttcacctacatctgcaaccacatcaagtacgccaccaaccggggaaatcttcgctctgccatcacagtattcccccagcgctgcccgggacggggtgatttcagaatatggaactctcagctggtccgttacgctgggtaccggcagcaggatggctcggtcagaggtgatccagccaacgtggaaattaccgagctttgcatccaacatggctggacaccggggaatggacgcttcgatgtcttaccactgctattgcaggcccctgatgacccacccgagctgtttcttctgccacccgagctggtcctggaggttccacttgagcacccaacattggaatggtttgcggctctcggcctgcgttggtacgcccttcccgccgtgtctaatatgcttttggaaattgggggactggaattccctgcggctcccttctcaggatggtacatgtccaccgaaattggcactcgaaacctatgcgatccgcatagatacaacatcctcgaggatgtggctgtgtgcatggacctggacaccagaactacttcctccctttggaaagacaaggcggctgttgagatcaacgtggcagttctgcactcctaccagctggccaaggttactattgtggaccaccacgccgctaccgcctcattcatgaaacatctggagaacgaacagaaggctcgcgggggatgtccggccgattgggcctggattgttccgcccatttccgggagcctgacaccggtattccaccaggagatggtgaactacttcttgtcacctgcattccggtatcagcctgacccctggaaggggtcagcagcgaaagggacgggaatcactagaaaaaaaacgttcaaggaggtagccaacgccgtgaaaatttctgccagcctgatgggaacagtgatggccaaaagggtgaaagccactatcctgtatggttctgagactggccgcgcccagtcttatgcccagcaattaggcagactttttagaaaagccttcgatccccgcgtgctttgtatggatgagtatgacgtcgtttctctggaacatgaaactctggtactggttgtaaccagtactttcggcaacggagatcctcccgagaacggcgagtcattcgcagcagctcttatggagatgtctggaccatacaactccagcccaaggccagaacaacataaaagctataagatccgcttcaattccatttcgtgttctgacccactggtgtctagttggcgaaggaagcgaaaggaatcctccaacaccgattcagccggagcgctgggcacattaaggttttgtgtgttcggccttggttcccgcgcttacccccacttctgtgcctttgcgagggcggtagacaccaggctggaggagctcggaggcgagagattactgcagctggggcaaggggacgagctgtgtgggcaggaagaggctttccggggctgggcacaagcagcttttcaggcagcgtgtgagaccttttgcgttggagaagatgcaaaggccgccgctcgggatatttttagtcctaagcgatcatggaagcgccagcgatacagactatccgcccaggcagaagggcttcagctccttccaggtctgatccatgtgcatcggagaaagatgtttcaggcgaccattcgctctgtagaaaatttgcagagcagtaaatccactagagcgaccatcctcgtccggctggatacaggtggtcaagaggggttgcagtatcagcccggcgaccacattggcgtgtgcccacccaaccgtccggggctggtcgaagcactattatcacgggtggaggaccctccggctccaacagagccggtggcagtggagcagctggagaaaggcagtccaggaggcccaccacccggatgggtgcgggatccccggctccccccctgtactctgcgccaagcacttacattttttctggatatcacttctccacctagcccacagctgttgcgcctgctctccaccctggcagaagagcctcgcgagcaacaggagctggaagccctctctcaggacccccggcggtacgaagaatggaaatggtttcggtgccccacactgctggaggtccttgaacaattccccagcgtagccctaccagctccactactcctgacacaattgcccctgctgcagcccaggtactatagtgtcagcagcgccccgagcactcaccctggcgagattcacctcaccgtggcagtgctcgcatatcggacccaggatggcttggggccattgcactatggcgtgtgctctacctggctatcccagctgaagcctggtgaccctgttccatgcttcataaggggggccccctcgttccgattgcctccagacccttcgctgccttgcatcctggtcgggcctgggaccggtatcgctcctttcagggggttctggcaggaaagactccacgacatcgagtccaagggactccagccaactccgatgacactcgttttcgggtgccgatgtagccagctggatcatctgtaccgggacgaggtgcaaaacgctcagcagagaggtgtctttggcagggtgctcaccgccttctccagagagccagacaatcccaaaacatacgttcaggatatccttcgcaccgagctggccgccgaggtgcaccgggtgttgtgtctcgagagaggccacatgtttgtctgcggggatgtgacgatggccacgaacgtgctccagacggtgcagagaatcctggccaccgaaggcgacatggagctagacgaggcaggggatgtaataggcgtgctacgtgatcaacagcgataccacgaggatatctttggacttacattacggacgcaggaagtcacaagtaggatacgtacccagagcttctctctccaggagcgacagctcagaggagccgtgccgtgggctttcgatcctcctggctccgacactaacagcccttag

SEQ ID NO: 197390 - DNA, 1521 bp, synthetic construct
  misc_feature 1..1521: note = Description of Artificial Sequence: Synthetic coding sequence
  source 1..1521: mol_type = other DNA
atgcgggaccccctgaccgactgcccctacaacaaggtgtacaagaatctgaaagagtttagccagaacggggagaatttttgtaagcaagtcacctcagttctgcaacagcgtgccaacctcgagatctcatacgccaaaggcctgcaaaaactcgccagtaaactcagcaaagcgctgcagaacactcgcaagagctgcgtaagcagtgcctgggcttgggcttcggaagggatgaagtcaacagccgatttgcatcaaaaactggggaaagctatcgaattggaggccatcaaaccaacctaccaggtgctcaatgtgcaggaaaagaagcggaagtctctagataacgaggtcgaaaagacagccaacctggtgatttccaactggaaccagcagattaaagctaagaagaaactaatggtgagcacaaaaaaacatgaagcactattccagctggtggagagctccaagcaatctatgactgagaaagaaaagaggaaactgctcaacaagctgactaagtctactgagaagctcgaaaaggaggacgagaactattatcagaagaacatggctggatacagtactaggctgaagtgggagaacactctggagaactgctatcagagtattctggagctggagaaagaacgcattcagttactctgcaacaacctcaaccagtattcacagcacatcagcttgttcgggcagactctgaccacctgtcatactcagattcactgcgcaatttctaagattgacatcgagaaagatatacaggccgttatggaagagacggccattctgagtactgaaaacaaatcagagttcctgttaaccgactatttcgaagaggaccccaatagcgccatggataaggagagacgaaaaagtttattaaagccgaagcttttgagactgcaaagagacattgagaaggcttcaaaggacaaggagggtctcgaacgtatgttaaagacttattcatcgaccagttccttttcggatgctaagtctcagaaagacaccgccgcacttatggacgaaaacaatctgaaactggatcttttagaggctaatagctacaagcttagctccatgttggccgaactggaacaaaggccacaacctagccatccgtgcagtaatagtattttccggtggagggagaaggagcacactcactcttacgttaaaatctcacggccatttctgatgaagcgtttagaaaatattgttagcaaagcaagttcgggaggtcagagtaacccaggcagtagtacaccagctcctggagccgcacagttgtccagcaggctttgtaaagctctttattcctttcaggcacgccaagatgatgaactgaatctggagaaaggagacatagtgatcatacacgaaaaaaaagaaggtggctggtggttcggctccctcaacgggaagaaagggcatttccccgccgcctacgtcgaagagttgccgtcaaatgctggcaataccgctactaaagcctag

SEQ ID NO: 197391 - DNA, 1287 bp, synthetic construct
  misc_feature 1..1287: note = Description of Artificial Sequence: Synthetic coding sequence
  source 1..1287: mol_type = other DNA
atgaagagcaccgccgacctgcaccagaagctgggcaaggccatcgaactggaggccataaagcccacctaccaagtccttaacgtacaggaaaagaagcggaagtctctggataatgaagtcgagaagactgcaaacctagtcatcagcaactggaaccagcagattaaggcgaagaagaaactgatggtgtctacaaaaaagcatgaagcactgtttcagctggtggagtccagcaagcagtccatgacggagaaggagaaacggaaactcctcaataaattaaccaaaagcacagaaaagctcgagaaagaggatgagaattactaccaaaagaatatggccgggtacagcacacggcttaaatgggagaacaccctggaaaactgctatcagtcaatcctcgagctcgagaaagagagaatccagttactttgcaacaatttaaaccagtacagccagcacatcagcctgttcgggcagacactgaccacctgccatacacaaattcactgtgctatctctaagattgacatcgaaaaggacatacaggccgtcatggaggagacggccattctcagtacagagaataaatcggaattcctgctgactgattacttcgaagaggatccaaactctgcgatggacaaggaacggagaaagagcctgctcaagcctaagttacttcgactccagagagacatcgaaaaggcttctaaggacaaggaggggcttgagagaatgttaaagacctacagctcaacatcttcattttcagatgccaagtcccaaaaggacaccgcggccctcatggacgagaacaatctaaagctggatctgctcgaggctaattcttacaagctttcatcaatgctggccgagttggagcaaaggccccagccctcgcacccctgtagtaattcaatttttagatggagggagaaagaacatacccactcatatgtgaagattagccgccccttccttatgaagagactggaaaatatcgtcagcaaggcctcaagtggcggtcagagcaaccccgggtcatctacgccagcaccgggcgcggctcagcttagctcacgcctttgcaaggctctgtacagcttccaggcacgccaggatgatgaactgaacctagagaaaggggacattgtgataattcacgagaaaaaggaggggggatggtggtttggcagcctcaacggaaaaaagggtcattttcctgcggcctatgtggaagagttgccgtccaacgccggaaatactgccactaaggcatag

SEQ ID NO: 197392 - DNA, 1692 bp, synthetic construct
  misc_feature 1..1692: note = Description of Artificial Sequence: Synthetic coding sequence
  source 1..1692: mol_type = other DNA
atgcgggaccccctgaccgactgcccctacaacaaggtgtacaagaatcttaaggagttcagtcagaatggggagaatttctgcaagcaagtgacaagcgttctgcagcaaagggctaatctcgagatttcttatgcgaagggcctccagaagctggcttccaagctgtcaaaggcgctgcaaaacaccaggaaatcctgcgtttcttctgcttgggcttgggctagtgagggtatgaagagtaccgctgacctgcaccagaaactgggcaaagccatcgagcttgaggcaatcaagccaacctatcaggttctgaatgtgcaggaaaaaaaacgcaagagcctcgataacgaggtcgagaaaactgcgaatctcgttatcagcaattggaatcagcagattaaggctaagaagaagttgatggtgtcaaccaagaaacacgaggcactattccaactcgttgaaagctccaagcagtcaatgactgaaaaggagaaacgcaaacttcttaataaactaactaagtccaccgagaagttagaaaaggaggacgagaattactatcagaaaaacatggccggatatagcactagactgaagtgggagaacactcttgagaattgttatcaggtgactcattccatttgtctgtatgccttctgggtcaaaagggcctggggaaagtgtgtctccgacttgaggtatcaggacacctttctccctggcaacctcccacctctttggttcggctacgatattgtcaaaaggctcattatgagactgtgttcggtgtgcttacagtccatcttagaactggagaaggaacggatccagctcctttgcaacaacctgaatcagtattcacagcatatctccctcttcgggcagacactgaccacgtgccatactcaaatacattgtgcgatctccaaaatagatatcgagaaggatattcaggcggtaatggaggaaacagctattctaagcacggagaataaatcagaattcctgttaacagattacttcgaggaagaccctaactcagcaatggataaggaaaggcgtaaatccctgttgaaacccaaactgctccgtcttcagagagacatcgagaaagcctccaaggacaaggagggcctcgagaggatgctgaaaacttacagctccacatcaagtttttcagacgccaaatcacagaaagacaccgctgctctgatggacgagaataatctgaaactggatctgctggaagctaacagttacaaactttcaagtatgcttgccgagttagaacagcggcctcaaccaagtcacccctgcagcaactccatttttcgttggagggagaaggaacatacccatagctatgtgaagatctccaggccctttctgatgaaaagactggaaaatatagtaagcaaagccagttcaggcggccagtctaatcccggttcctccactccagcacccggagctgcccagctgtcaagccgtttgtgtaaggcactttacagttttcaggcaaggcaggacgacgagctcaacctggagaaaggcgacatagtaattattcacgagaagaaggagggcgggtggtggtttggctcgctaaacgggaagaagggccacttccctgctgcttatgtggaagagctgcctagtaatgctggaaacacagccaccaaggcatag

SEQ ID NO: 197393 - DNA, 1692 bp, synthetic construct
  misc_feature 1..1692: note = Description of Artificial Sequence: Synthetic coding sequence
  source 1..1692: mol_type = other DNA
atgcgggaccccctgaccgactgcccctacaacaaggtgtacaagaatttgaaagaattcagtcaaaacggggagaatttttgtaagcaggtgacatcagtgctgcagcagagagctaatctggaaatttcatacgctaagggactacaaaaacttgcctccaagctcagcaaggcactgcaaaacactcgcaagtcttgcgtgagcagtgcatgggcctgggcttccgaagggatgaaatctacagccgatctgcaccagaagctgggcaaagcaattgaattggaagctattaagcccacataccaggtgctcaatgtgcaagagaagaaacgtaaaagcctagataacgaagtggaaaagactgccaacctggtcatctccaattggaaccagcagattaaggcgaaaaagaagctcatggtgagcaccaaaaaacacgaggcactattccagcttgtcgagtcctctaagcagtcaatgactgaaaaggagaaaaggaagctgttaaacaaattgacgaagtctaccgagaaattggaaaaagaagacgaaaactactatcagaagaacatggctgggtatagtacacggctcaagtgggagaacaccctggaaaattgctaccaggtcacccactccatatgcctgtacgcgttttgggtgaagagagcctggggcaagtgcgtgagcgatctcaggtaccaagatactttcctgcctggcaacctgccccccctttggttcggctacgatatcgtgaaacgcctgatcatgcgcctgtgctctgtgtgtctccaatccatacttgaacttgagaaggagaggatacagctgttgtgcaataatctaaaccaatactctcagcatatcagtctgtttgggcagacgctgacaacctgccatacgcagattcactgcgctatttctaaaatagacattgagaaggacattcaggccgtgatggaagagacagccattctcagcactgaaaataagtcagagttcctgctgacggattattttgaagaagatcccaactctgcgatggataaagagagaaggaagagcctcctgaagcctaaactcttgaggctgcagagagatatcgaaaaagcctcaaaagacaaggagggtttggaacggatgctgaaaacctattcttctacttccagcttctctgatgcaaagtcccagaaagacacagctgctctcatggacgagaataatctgaagctggatttgctagaagcaaacagctataagttatcgagtatgttggccgagcttgagcagcggcctcagcccagtcacccatgcagtaatagcatttttcggtggcgcgagaaagaacacacccatagctacgtcaaaatctcacggccgttcctaatgaagagattagaaaatattgtgagtaaggccagctccggcggccagtccaatcctggcagtagtacacctgcgccaggtgcagcacagctgagctccaggttgtgtaaagcactgtatagtttccaagcaagacaggatgacgagttgaatcttgagaagggcgacatagtcatcatacacgagaaaaaagaaggggggtggtggttcggtagcttgaacggaaagaaaggtcacttccctgcagcctatgtggaagaactgccaagtaatgccgggaacaccgctaccaaagcatag

SEQ ID NO: 197394 - DNA, 939 bp, synthetic construct
  misc_feature 1..939: note = Description of Artificial Sequence: Synthetic coding sequence
  source 1..939: mol_type = other DNA
atgaccttcggcctgcggaagcggctgagcgaggagcggggcttctccctcatgcctcgggctatggcaatatcaagctctagctgcgagctcccactggtcgctgtgtgtcaggtgacgtccaccccagacaagcaacagaacttcaaaacttgtgccgagctggtgagggaagccgcccggctgggcgcatgtctggccttcctgcctgaggcctttgatttcatcgcacgcgaccccgccgaaacactgcacctttccgagccattaggcggcaagctgctggaggagtacacgcagttagcaagagaatgtgggctgtggctctccctgggaggcttccatgagagaggccaggattgggagcaaactcaaaagatatacaactgccatgtactgctcaacagtaaaggagcagttgttgccacgtacaggaaaacccacctgtgtgatgttgagatccctggccagggaccaatgtgtgagtcaaacagtactatgcccggaccaagtctcgaaagtcccgtttctacccccgccggaaaaatcggtctcgcagtgtgttacgacatgagattcccggagctatcgctggctctggctcaggccggagccgaaatcctgacatacccaagcgcatttggatctataactggccctgctcactgggaagttctgcttcgcgcgcgtgctattgagacccagtgctacgttgtggccgccgcacagtgtgggaggcaccatgagaaaagggcctcctacggccacagcatggtcgttgacccctgggggactgtggtggcccgctgtagtgagggacccggtctatgtctggcccgtatcgacttaaactaccttcgacagctccgacgccaccttccggtcttccagcacagacgtcctgatttatatggaaatctcgggcatcccctttcctag

SEQ ID NO: 197395 - DNA, 732 bp, synthetic construct
  misc_feature 1..732: note = Description of Artificial Sequence: Synthetic coding sequence
  source 1..732: mol_type = other DNA
atgctgggcttcatcacccggcccccccaccggttcctgagcctgctatgtcccggacttcggattccacagcttagtgtgctgtgcgcccagcccaggccacgggccatggctatctcttcttccagttgtgaattacccctagttgcggtctgccaggtaactagcacaccagacaagcagcaaaattttaagacctgtgcagagctggtgagagaggcagctcggctaggggcgtgcctcgcatttctgccggaagcatttgatttcatcgcaagagacccagcggagacgcttcatctaagcgaacctttggggggcaaactcctggaagagtacactcagctcgcccgcgagtgtggcttgtggctctcattgggtggcttccacgagagggggcaggactgggagcagacacaaaaaatttacaactgtcacgtgctgctgaatagcaaaggagctgtcgtggccacctaccggaagacgcatctctgtgatgtcgaaatccccggccagggacccatgtgtgagtccaactcaaccatgccaggacccagcttggaaagcccagtgtccaccccagctgggaaaatcggcttggcggtgtgttatgatatgaggttccctgaactgagtttagcactggcacaggcaggggctgagattcttacctaccccagtgcattcggatctattacgggccccgctcactgggagcccgttagcagctag

SEQ ID NO: 197396 - DNA, 984 bp, synthetic construct
  misc_feature 1..984: note = Description of Artificial Sequence: Synthetic coding sequence
  source 1..984: mol_type = other DNA
atgctgggcttcatcacccggcccccccaccggttcctgagcctgctctgccccggcctgagaatacctcagctcagcgtcctctgtgcacagcctagaccacgggctatggcgatctcttcctcgagttgtgagcttccactcgttgctgtgtgccaagtaactagcactcccgacaagcagcagaatttcaagacatgtgccgagctggttcgcgaagccgctaggctaggtgcctgccttgcatttctgccggaagcctttgattttattgcacgggaccctgctgaaacactccaccttagcgaacccctcggagggaagctcctagaagaatacactcagctggccagggaatgcggcctgtggctgagtctcggcggttttcacgaacgaggacaggactgggagcagacccaaaaaatttacaattgccatgtgcttctcaatagcaagggggcagtggtagccacatatcggaagactcacctttgtgatgtggagatccctggtcagggcccaatgtgcgagagcaacagcaccatgcctggacctagcctcgagagccctgtgagtacccccgccggcaagataggcctggcagtatgctatgatatgcgtttcccagagttgtcacttgcactagcgcaggccggtgccgagatcctcacatacccttctgcctttggatccattacggggccagctcactgggaggtgttgcttcgcgcaagggccattgagacccagtgctacgtggtagctgctgcccagtgcggaaggcatcacgagaaacgcgcaagttacggccattccatggtggtggacccatggggcacggtggtggctcgatgttccgagggaccagggctgtgcctggcacgcatcgacctgaactatctccgtcaactccgcaggcacctgcccgtgtttcaacacagacgacctgatctttatggaaatctcgggcatccattgtcttag

SEQ ID NO: 197397 - DNA, 876 bp, synthetic construct
  misc_feature 1..876: note = Description of Artificial Sequence: Synthetic coding sequence
  source 1..876: mol_type = other DNA
atggccatcagcagcagcagctgcgagctgcccctggtggccgtgtgccaggtgacttccaccccagacaaacagcagaatttcaaaacttgcgccgagctcgtccgggaagcagcaaggttgggcgcttgcctggcctttctgcctgaggccttcgatttcatcgctagggaccctgcagagactctgcacctgagcgaaccccttggcggcaagcttctggaggagtacactcagctggcccgggagtgcggcctgtggctctcgctcggagggtttcatgagcgcggccaagactgggagcagacacagaagatctacaattgccatgtcctcttaaacagcaaaggggctgtggtggccacgtacagaaagactcacttgtgtgacgtggaaatcccggggcaaggccccatgtgtgaaagtaactctacaatgcctggtccaagcttggagagtcctgtgagcacccctgctgggaagattggattggctgtttgctatgatatgaggttcccagagctaagcctggctcttgctcaggctggggccgagatcttgacatatccctcggccttcggcagcataactggccctgcccactgggaggtgctgctcagggcgagagccatagagacccagtgctatgtagtcgccgcagcacaatgcggtcgtcaccatgaaaaaagggcaagctacggccactcaatggttgtggacccgtggggcaccgtcgtagcccgatgctccgagggtcccggtctctgcctcgcgcggatcgatctcaactacttgcgccagctgcgtagacacctgccagtttttcaacataggcgcccagacttgtacggtaatttgggtcacccactgagctag

SEQ ID NO: 197398 - DNA, 822 bp, synthetic construct
  misc_feature 1..822: note = Description of Artificial Sequence: Synthetic coding sequence
  source 1..822: mol_type = other DNA
atgagcctgaccaacaccaagaccggcttcagcgtgaaggacatcctcgacctgcctgacacaaatgacgaggagggctccgtggcagaaggtcccgaggaggagaatgaaggaccagaacccgccaagagggccggtccattgggacagggggccctcgacgctgtgcagagtctgcctctgaagaatcctttctatgattcatcagataatccttatacacggtggctcgcttctacggaaggcttgcagtatagccttcacgggttggctgccggagctccccctcaagatagcagcagcaagtcaccggagccatctgctgacgaaagcccagataacgataaggaaactcccggagggggcggggacgccggaaagaagaggaaaaggcgggtacttttctccaaagctcagacgtacgaacttgaacggaggtttcgtcagcagcgttacctctccgcacccgagcgagaacacctggcctccctgattcgtctgacccccacgcaggtgaagatttggtttcaaaaccaccggtataagatgaaaagagccagggccgaaaagggcatggaagttaccccactgccctctccaagacgcgtggccgtgcctgtcctcgtcagggatggaaagccctgccacgcgttgaaggcccaggacctggccgccgcaacattccaagccggcatcccattctctgcgtatagtgcccagtccctacagcatatgcagtacaacgctcagtattcaagcgcatccaccccacagtatcccactgcacatccgctggtgcaagcgcagcagtggacgtggtag

SEQ ID NO: 197399 - DNA, 1065 bp, synthetic construct
  misc_feature 1..1065: note = Description of Artificial Sequence: Synthetic coding sequence
  source 1..1065: mol_type = other DNA
atgagcctgagccccaagcacaccacccccttcagcgtgagcgacatcctgtctcctatcgaggagacttacaaaaaattttcgggtgccatggacggtgcaccgcccggcctcggagcacccctgggcgccgctgccgcgtaccgcgcacctccgcctggcccaagttcccaggccgcaacggtggccgggatgcagccatctcacgcaatggccggtcataatgcggcggctgccgcggccgccgctgccgcagccgccgccgctgcagcgacctaccacatgccacccggcgtgagtcagttcccacacggagctatgggaagttactgcaatggtgggctaggaaacatgggtgagctgccagcctacaccgatggaatgagaggcggtgcggccaccggttggtatggcgccaatcctgatccacgctatagctccataagtaggtttatgggaccatctgccggcgtcaacgtcgctgggatgggctcactgacagggattgccgacgccgcaaagtcattaggacccttgcacgctgctgcagccgctgcggctccaagacgcaagaggcgcgtgctgttcagtcaagcccaggtgtatgaattggagagacgctttaaacagcagaaatacttaagtgcccctgagcgggaacaccttgccagcatgattcaccttactccaacccaggtgaagatctggtttcagaaccaccgttataagatgaaaagacaagctaaggataaagctgcacagcagttgcagcaggagggcgggctcggtcctccacctccgcctccgccctctccaaggcgtgtggccgtaccggtgctcgtgaaggatgggaaaccttgtcaaaacggggctagcacgccaacacctggccaggcgggtcctcagccacccgccccaacaccagcgcccgagttagaggaactgtcaccatcccctcctgctctgcacggtcctggtggcggactcgctgctctcgatgctgcagctggagaatattctggaggagttcttggggctaatctcttgtacggaagaacgtggtag

SEQ ID NO: 197400 - DNA, 975 bp, synthetic construct
  misc_feature 1..975: note = Description of Artificial Sequence: Synthetic coding sequence
  source 1..975: mol_type = other DNA
atgttccccagccccgccctgacccccacccccttcagcgtgaaggatatactgaacctggaacagcagcaacgctcattagcagcagcaggtgagctgtccgcgagactggaagctaccctcgctccctcaagctgcatgcttgcagcctttaaacctgaagcctatgccggacctgaggcagccgccccaggactcccagagctacgagccgaactggggagagctccatctcctgcaaagtgcgcctcggccttccctgcagctcctgctttttaccccagagcgtactccgaccctgacccagccaaagacccccgcgctgagaagaaagagctatgtgcactgcagaaagctgtggaattagagaaaaccgaagctgataatgctgaaaggccccgcgccaggcggagacggaaaccacgcgtactatttagccaggctcaggtctacgaacttgagcggcgctttaagcagcaaaggtatctgtcagccccggaacgcgaccaattggcttctgttctgaaacttacttccacccaggtaaagatatggttccagaacaggcggtataagtgtaaaaggcagcggcaggaccagaccttggagcttgttggcctcccacccccccctcctcccccggccagacgaatcgctgtcccagtgcttgtgagggacggaaagccgtgcttgggcgattccgccccttatgccccagcgtatggcgttgggctgaatccatacggctataacgcctatcccgcctatcccggttatggcggggcagcatgtagccccggctatagctgtactgcggcctatcccgcaggcccgagtccagctcagccagccaccgccgctgctaataataatttcgtgaactttggcgtgggagacctaaacgccgtgcaaagcccgggaatcccccagagcaactctggtgtctctacattgcatggtatccgtgcatggtag

SEQ ID NO: 197401 - DNA, 339 bp, synthetic construct
  misc_feature 1..339: note = Description of Artificial Sequence: Synthetic coding sequence
  source 1..339: mol_type = other DNA
atgttccccagccccgccctgacccccacccccttcagcgtgaaggatattctcaatctggaacaacagcagcgaagccttgcggccgccggcgagctgtctgcgcgtctggaggccacattggctccatcgagttgcatgctcgcagctttcaaaccagaggcctacgctggccctgaagcagcggcccccggacttccagaactccgtgccgaactcgggagagccccctctcccgcaaagtgcgcttccgctttccccgcggcacccgccttctacccccgtgcttattctgatccggaccctgccaaagaccccagggccgaaaagaaggcctag

SEQ ID NO: 197402 - DNA, 456 bp, synthetic construct
  misc_feature 1..456: note = Description of Artificial Sequence: Synthetic coding sequence
  source 1..456: mol_type = other DNA
atgttccccagccccgccctgacccccacccccttcagcgtgaaggacattttaaatcttgagcagcagcagcggtctctggcagcagccggtgagttgtccgccaggctcgaggcaactctggctccttcttcctgcatgttggccgctttcaagcctgaggcctatgctggccccgaagcagccgctccaggcctaccagagctgagggccgaattgggaagggccccttctcctgctaaatgtgcctccgctttccctgccgcacctgccttctatcccagagcctactcagatccggatcccgccaaagatcccagggcagaaaaaaaaggctgtgagttgccgagaggccagcgacctccagttttgtttagctctgccctttcacagcccgatttccttcaaatgctgagcgagacgtgtcggtggttacctgtccatctggctgaatag

SEQ ID NO: 197403 - DNA, 906 bp, synthetic construct
  misc_feature 1..906: note = Description of Artificial Sequence: Synthetic coding sequence
  source 1..906: mol_type = other DNA
atgctgctgagccccgtgaccagcacccccttcagcgtgaaggacatcttgcggctggagagggagaggtcttgcccagccgctagcccacaccctagagttcggaagagccccgagaattttcaatatctgaggatggacgccgaacctcgcgggtctgaggtgcacaacgctggaggcggagggggggacaggaaactcgatgggagtgagccacctgggggcccctgcgaagccgtgctcgaaatggacgccgagaggatgggtgagccacagcctgggctgaatgccgccagtcccctggggggcggtacacgcgttcccgaacgtggcgttggcaattctggggacagcgtaagaggcggccggagcgagcaaccaaaggcacgccagcgccggaaaccccgcgtcttattctcccaggcccaggtgctggcactcgaacgcaggtttaagcagcagagatacttgagcgcaccagaaagagagcacctggcatcagctctgcagctgacttctacgcaagtcaagatctggttccaaaaccggcgctacaaatgcaaaagacagcgtcaggataagtccctggaactagctggacaccccttgactccgaggcgcgtcgccgtgcctgttttggtgagagatggcaaaccatgcttgggtccaggacccggggcccccgcatttcctagcccgtactccgcggctgtctccccatactcttgttacggggggtattccggagcgccatatggcgctggctatgggacatgctacgccggagccccatcagggcccgcacctcatacccctctcgcgagcgcggggtttggacatggaggccagaacgcaaccccacaaggacacctggcggcaacactccaaggggttcgggcgtggtag

SEQ ID NO: 197404 - DNA, 660 bp, synthetic construct
  misc_feature 1..660: note = Description of Artificial Sequence: Synthetic coding sequence
  source 1..660: mol_type = other DNA
atggacgccgagcggatgggcgagccccagcccggcctgaacgccgccagtcctcttggaggtggcactcgagtgcctgaacgaggggttggtaactcgggggactctgtgcgaggcgggaggagcgaacaacccaaagctaggcagagacgcaagcctagggtactgttttcgcaggcccaggtattggccttagagcgccgcttcaagcaacaacgctacctaagcgctcctgaaagggagcacctcgcaagcgcccttcagctaacgtccacacaggttaaaatctggtttcagaatagacgctacaagtgtaaaagacagcggcaggataagtcgctcgaactggctggtcacccattaaccccacgaagggttgccgtgcctgtgttagtgcgcgacggcaagccgtgcctgggtccaggccctggggctccagcatttcccagcccctattccgcagctgtgtcaccgtattcatgttacggggggtacagcggcgctccctacggcgccggttatggaacttgctatgctggagcccccagcggccccgcaccccacacccctctggcctccgccggatttggacacggaggacaaaatgccactccccagggtcacttagccgcaacactgcagggcgtgcgggcctggtag

SEQ ID NO: 197405 - DNA, 720 bp, synthetic construct
  misc_feature 1..720: note = Description of Artificial Sequence: Synthetic coding sequence
  source 1..720: mol_type = other DNA
atggccaccagcggccggctgagcttcaccgtgcggagcctgctggatctgcccgagcaggatgctcaacatctgccaagacgcgaaccagagcctcgtgccccccaacctgacccatgcgctgcttggctcgattccgaacgaggtcattacccatctagcgacgagtcctccttggagacgagtccaccagatagttctcagcggccttctgcgagacctgcaagtcctggatctgacgccgaaaagcgtaaaaagcgaagggtgctcttttccaaggctcagaccctggaattggaaagacgcttccgacaacagcgatatctcagtgcccccgagcgcgaacagctggcctcattgcttcgcctcacaccaacacaggtcaaaatctggttccagaatcaccggtacaagctgaaacgagcacgagccccaggggctgctgagagcccagacctcgccgcaagcgccgagctgcatgcggcaccaggcctcttacggcgcgtagtggtgcccgttctggttcgcgacggacagccttgtggtggggggggcggaggagaggttggcaccgctgccgcacaagagaaatgtggagctccccccgcagccgcctgccccctccccggttaccctgccttcggtcccgggagcgcacttggtctctttcccgcttaccagcatctcgcttctcccgctctcgtcagctggaattggtag

SEQ ID NO: 197406 - DNA, 1002 bp, synthetic construct
  misc_feature 1..1002: note = Description of Artificial Sequence: Synthetic coding sequence
  source 1..1002: mol_type = other DNA
atggccgtgcggggcgccaacaccctgaccagcttcagcatccaggctatactgaacaagaaggaagaaaggggagggttggcagccccagaaggcagacccgctccaggcgggacagcagctagtgtggcggcggccccagctgtgtgttgctggcggctgtttggagagagggatgctggggctctgggtggagcagaagactccctccttgcctcccccgctggcacaaggacggcagcagggcgcacagctgagtccccggaagggtgggatagtgacagcgctctgtccgaggagaatgaatccagaagacgttgtgccgatgcccgcggcgcctctggtgcaggccttgcgggggggagcttaagtttgggacagcctgtgtgtgaacttgctgcgagtaaagacctggaagaggaggcagcagggcgctccgattccgagatgagcgcatccgtgtccggcgatcgaagtccccgtaccgaggatgacggtgtgggacctaggggcgcacacgtatctgctttgtgttccggtgcgggcggaggcggggggtccggaccagccggagtggccgaggaggaggaggagcctgccgcacctaaacctaggaagaaacgctcacgtgcggcctttagccacgcacaagtctttgagcttgagagacgctttaaccatcagcggtatctcagcgggccagagagggccgacctcgccgccagtctcaaactcacggagacacaggttaagatctggttccaaaatcgcagatacaaaacaaagcgacggcagatggcagccgatctgctcgcctccgctcctgcagccaagaaagttgccgtgaaagtgttagtacgcgacgatcagcgccagtacttaccaggtgaagtgcttcggccaccatccctgctgcctcttcaaccatcatactattacccgtattattgcctccccggctgggctctgagtacttgcgcagctgctgctggaacccagtag

SEQ ID NO: 197407 - DNA, 798 bp, synthetic construct
  misc_feature 1..798: note = Description of Artificial Sequence: Synthetic coding sequence
  source 1..798: mol_type = other DNA
atggagagcaacctgcagggcaccttcctgctgaacaacacccccctggctcaatttcccgagatgaaggcccctgtttgtcagtactccgtgcaaaactccttctacaaactctccccaccaggcttgggtccacagctggccgccggcactccacatggcatcaccgacatcttatcaaggcctgtcgcagccccgaacaactctctgctttcaggatacccccatgtcgcaggctttgggggtctcagctcacagggagtgtactactcaccccaggtgggaaactttagcaaagccggtaacgaataccctacacggactcgcaattgctgggcagatacggggcaggactggcggggaggaaggcagtgctctaatacccctgaccctttatcagattccatccataaaaagaagcacacgcgccccacgttcacaggccaccagatattcgccctagagaaaacttttgaacagaccaagtacctcgcaggcccagaaagggctaggttggcctatagtctgggaatgactgagagccaggtgaaggtatggttccagaatcggcgaactaagtggaggaagaaatcagccctggaacccagtagcagcactccgcgcgctcccggtggcgcaggtgctggggccggcggcgatagggctccaagtgagaacgaggacgacgaatacaataagcccctggatcctgactctgacgacgagaaaattagattgctcttacggaagcacagagctgcctttagcgtgctgtcattgggcgcccactccgtgtag

SEQ ID NO: 197408 - DNA, 408 bp, synthetic construct
  misc_feature 1..408: note = Description of Artificial Sequence: Synthetic coding sequence
  source 1..408: mol_type = other DNA
atgcagcagggccagctggcccccggcagccggctgtgcagcggcccatggggactgcccgaactgcagccggcggctccctctagctccgcggctcagctcccttggggagaaagttggggagaggaggccgatactcccgcttgtctgtccgcctcaggagtgtggttccagaatcggagaacaaagtggcgcaagaagagtgctctcgagccttcgtcctctaccccaagagcccctgggggagctggtgccggagctggaggcgaccgagcccccagtgaaaacgaggatgacgagtataataaaccactggacccagacagtgacgacgagaagattcgcctgcttctaaggaaacacagggctgccttctccgtgcttagtctcggggcccattccgtatag

SEQ ID NO: 197409 - DNA, 2928 bp, synthetic construct
  misc_feature 1..2928: note = Description of Artificial Sequence: Synthetic coding sequence
  source 1..2928: mol_type = other DNA
atgcggtggggccaccacctgccccgggccagctggggcagcggcttccggcgggccctccagagacctgacgatagaataccttttctcatccattggagttggccactgcagggggagcggcctttcggtcctccccgcgcctttatccggcaccacgggtcctctgtggattctgcgcctccaccaggacggcacggaaggctattcccatccgcatctgctacagaagctatccagagacatcgccggaacctggcagagtggtttagtcggctaccccgcgaggagagacaattcggacctacgttcgcgttggacactgtccatgtagacccagtgatacgcgaatccacccctgatgagctgctcagaccaccagccgaattagcactggaacaccagccgccacaagcaggcctgccccccctggccctttctcagcttttcaaccccgacgcttgtggacggcgtgtccagacagtcgtactctacggcacagtcgggacaggcaagtctactctggttcgaaaaatggttctagactggtgctacggacgcctaccagctttcgaactcctgatcccattcagctgtgaagacttaagctctctgggccctgcaccagcgagcctgtgccaactggtcgctcaacggtacactcccttaaaagaggtgttacctctgatggccgccgcgggctctcacctattatttgtactccatggactggaacacctaaacctggacttccgacttgcagggaccggactatgtagcgatccagaagaacctcaggaaccggcagccattattgttaatctgctgcgcaaatatatgttaccccaagcttccattctggtgaccacgcgtccatccgctatcggtaggatacccagtaagtatgtgggccgttacggggaaatctgtggctttagtgacactaatctccaaaagctgtactttcagctccggctaaatcagccctattgtggctatgctgtcggaggatccggcgtctccgcaacgcccgctcaacgcgaccacctcgtgcagatgttgagcaggaacctagagggtcaccatcagatcgccgcagcgtgttttctcccatcctactgctggttggtctgtgccaccctgcactttttgcacgcccctacgcctgctggacagaccttgacatctatttacacatcattcctgcgcctaaacttttccggcgagacacttgacagtactgatccatccaacttgtcactcatggcatatgccgctaggacaatgggtaagctggcctatgagggcgtttcttcgcgaaagacatactttagcgaggaagatgtgtgtggctgtttggaggccggtatcaggactgaagaagaatttcaattgctgcatattttccgcagagacgcattgcgatttttcctggccccctgtgttgagcctgggcgagcaggaacatttgtctttacagtaccggccatgcaagaataccttgccgcactttatattgttctgggacttcgcaagacgacactccaaaaagttggtaaggaggtagccgagctcgtcggacgagtaggggaggacgtgtccttagtcctggggataatggccaaactgttgcccttaagagcgctccctcttcttttcaatctaattaaggtagttcccagggtttttggccggatggtcggtaaatccagagaggccgttgcgcaggctatggtcctcgagatgttcagggaagaagattactacaacgacgatgtcctagaccaaatgggcgctagcatcttgggggtggaggggccccgccgacatcctgacgaaccccctgaggatgaggtgtttgaactttttcctatgtttatggggggactcttatccgctcataacagggctgtgttggctcagttggggtgcccaatcaagaacttagacgctctcgaaaatgcgcaggccattaagaagaagctcggaaagctgggcaggcaggtgctacccccatcggaactgctcgaccacttgtttttccattatgaatttcagaaccagagattttctgcagaggtcttgtcttctctgcggcagcttaacctggcaggagtccggatgacccctgtcaagtgtactgtggtcgctgcagttcttggttcagggaggcacgcattggacgaagttaacctggcatcatgccagctggaccctgcggggttgcgcaccctcttgcctgtcttcctaagggcccgaaaactgggtctgcaactcaattcactcggaccagaggcatgtaaagacctgcgagatctgctgctccatgaccagtgtcagatcactaccctgaggctgagcaataacccactgacggcagcgggtgtcgcagtgcttatggaaggcctagccggcaacactagtgtcacacaccttagtctgctgcacactgggctcggagatgagggcttggaactgcttgctgcccagctcgacaggaatcggcaactccaggaactgaacgtggcctacaatggggcgggggacaccgccgcccttgctctcgctcgggccgctcgtgaacacccctcactggagcttctccacctgtactttaatgagcttagctccgaggggaggcaagttctgcgagacctgggaggcgccgccgagggtggagctagggttgtggtgagcctaacagaaggcacagcagtgtctgaatactggtccgtcattctcagtgaggtccagcgcaatttgaacagttgggaccgcgctagagtgcagcggcatcttgaacttctcctccgcgacttggaagatagcagaggcgctacattgaacccatggcgcaaggcccagctgctccgcgtggaaggcgaggtacgcgcactgctggaacagctgggctcgagtgggagttag

SEQ ID NO: 197410 - DNA, 345 bp, synthetic construct
  misc_feature 1..345: note = Description of Artificial Sequence: Synthetic coding sequence
  source 1..345: mol_type = other DNA
ggcatcagcaagctgaagatggtgaaccagtgcttcggcctgggcgatgggacgtgtcttttgagtattcagctagagggtccgaagcatgtggctttcgggtggccggaatgtccagaggctccactgccaactttaccaccccccccccttaaggaaccactgacggtgtctccccgagggtcccaccttatgagcgctatgcccggggtttcgccttccaggtgcgtaggtagctttcccagttgtctgatgcttacttgcgggcaccgaggatgcccacacattggtgctttcagttcgagctcctgccctctctgccacaacgggatgatggcttggtag

SEQ ID NO: 197411 - DNA, 2928 bp, synthetic construct
  misc_feature 1..2928: note = Description of Artificial Sequence: Synthetic coding sequence
  source 1..2928: mol_type = other DNA
atgcggtggggccaccacctgccccgggccagctggggcagcggcttcagacgagcactgcagcgcccagacgaccggattcctttcctgatccattggagctggccactccagggggagaggccttttggcccacctcgagcatttatcaggcaccatggctcttccgttgactcagcgccccctcccggaagacacggtagactctttccctctgcttctgccaccgaagctatacagcgacaccgtagaaacctggcggagtggttcagccgactaccccgcgaggagaggcagtttgggcccacgtttgccctggacacagtccacgtggacccggttatcagagaaagcacgcccgacgagctgctaagacctccagccgaactagccctggaacaccagccccctcaggccggcctgccgccattagctttatcgcagctgtttaaccccgacgcctgtggtcgccgagtccagacggtagtcctgtacggaactgtggggaccggcaagtcaacgttagtccggaagatggtgctcgattggtgctatgggagacttcctgcgttcgaactgctgataccttttagttgtgaggatctctcaagcttagggcctgccccagcgagcctgtgtcagttggtcgcccaaagatatacgccgttaaaggaggtgttaccgctcatggcagcagctggcagccatctgctgtttgtgttgcatggactggagcacctaaatctagactttaggcttgcaggcacagggctttgctccgaccccgaggagcctcaggagcctgccgcgattatcgtgaacctcctcagaaaatacatgctcccacaggcctcaatcctggttaccactcgaccctcggcaatcggccgcattccctcaaaatacgtggggcgctacggagagatctgcggattctctgacacgaatttacagaagctgtacttccaactgcgcctcaaccagccctactgcggttacgcggtgggagggtctggcgtgagtgctacaccagctcagagggaccacctggtgcaaatgctaagtcgaaacctggagggccaccatcagatcgccgcagcctgctttctgccatcttactgctggctcgtttgtgctacgctgcatttcctacatgcacccactcctgccgggcagaccctgacttcaatctatacctcttttcttaggctgaatttctctggcgagacccttgacagcaccgacccatctaacttgtctctgatggcttacgctgctcgtaccatgggaaaattagcttatgagggggtgagcagtcgtaaaacctatttttccgaggaagacgtctgtggatgtttggaagctggcattaggaccgaggaagaattccagctccttcacatttttcggcgcgatgcactgaggttcttcctggctccctgtgttgaaccagggagagctggtacatttgtgttcacggtccctgctatgcaggagtatcttgcggccctctacattgtactcggtctgagaaaaacaacactgcagaaggtcggcaaagaagtcgccgagttagtcggtcgggtgggtgaggacgtttcattggtgctgggcattatggctaaattactcccacttagagcgcttccactgctgttcaatttaattaaagttgtgcctcgcgttttcggacggatggttggcaagtctcgcgaagccgtggcgcaggcgatggttctggaaatgtttagggaagaggattactataacgatgacgtactggaccaaatgggggcttccattctgggagtcgaaggcccgcgtagacatcccgacgagcctcccgaggatgaagtatttgaactgttccccatgtttatggggggattgctgtctgcccacaaccgcgcggtcctcgcacagctaggttgtccaatcaagaacctggacgccctggagaacgctcaggccatcaagaagaaactcgggaagctgggtcgtcaggtcctaccaccaagtgagcttcttgatcatctgttttttcactacgagtttcagaaccagaggttcagcgcagaggttctgtcgtctcttagacagttaaatctggccggggttcgaatgacccctgtcaaatgcaccgtcgttgctgctgttcttgggtctggacgccacgcactcgacgaagttaatttggctagttgccagctggaccctgctggacttcggacactcctacctgtgttcctgcgcgctcgcaaactcggcctccagctcaactctttaggccccgaagcctgtaaagacttgcgcgacctgctgcttcacgatcagtgccaaattacaacgcttaggctgtccaataaccccttgacagccgcaggcgttgctgttctgatggaaggactggccggcaacactagtgtgactcacctgtcgctcctgcacacagggctgggtgatgaggggcttgagctgctggctgcacaactggaccgcaatcgccagttgcaagagctgaacgttgcgtacaacggtgcaggggacactgcggcactcgccctagctcgcgctgcccgggagcatccttctctggagcttctgcatctgtatttcaacgagttgagtagcgagggccggcaggtgctgagagacctggggggggccgcggagggcggcgcgcgtgtggtcgttagcctcaccgaggggacggctgtttccgagtactggtctgtgatcctgtccgaggttcagcgcaaccttaacagttgggaccgggccagggtgcagcgccacctcgagctgctgctgcgtgatcttgaagacagccgtggagcaacgttaaacccctggcgcaaagctcaacttttgcgtgtcgagggggaggttagagctcttctggaacaactcgggtcttccggttcttag

SEQ ID NO: 197412 - DNA, 2766 bp, synthetic construct
  misc_feature 1..2766: note = Description of Artificial Sequence: Synthetic coding sequence
  source 1..2766: mol_type = other DNA
atgcggtggggccaccacctgccccgggccagctggggcagcggcttccgtcgtgcactgcagcgaccagacgacaggatcccgtttttaatccactggtcctggcccctgcagggcgagagaccattcgggccgcctcgggcctttatcagacaccacggatcaagcgtagactctgccccgccaccgggccggcacgggagactgttcccttccgcatccgccaccgaggccattcaacgtcatagacgtaacctggcggaatggtttagccggcttcctcgcgaagagagacagttcggccctaccttcgcgctggataccgtgcacgtggatcccgttatccgcgagtccactcctgatgagttacttcgaccacctgccgagttggctctggaacaccaacctcctcaggccggactgccccctcttgccctgtcgcagcttttcaacccggacgcgtgcgggcgaagagtgcagaccgtggtgctgtatggaacggtgggaacagggaaaagtactctggtaaggaagatggttctcgattggtgttacggtcggttacctgcctttgaactgcttattcccttctcatgtgaagatttgagctcgctgggccccgcccccgctagcctgtgtcagctcgtggcacaaagatacactccccttaaggaagtccttcctctgatggcggcagctggctctcacttgttgtttgtgctgcatggactggagcacttaaacctggattttagactggctggtacgggtctctgttcagatccagaggaacctcaggagcccgctgcgatcattgtcaaccttctgaggaagtatatgctcccacaggcaagcattctggtgaccacccggccaagtgcaatcggccgaattccctccaaatacgtgggcaggtatggggagatttgtggattttccgacaccaatcttcagaaactctatttccaactgaggcttaaccagccatattgcggctatgccgtcggcggatccggggtttctgccaccccggctcagagggaccatttggtgcagatgttatctagaaacctggaaggccaccatcagattgccgccgcctgcttcctgccttcgtactgttggctggtctgcgccactctgcattttcttcacgcacccactcctgcgggccagaccttgacatccatctataccagctttctgcgcctcaatttttccggggaaactctggattctacagatcctagtaatctgtcactgatggcgtatgctgctaggacaatggggaagttggcctacgaaggagttagctctagaaaaacatatttcagcgaagaagatgtttgtgggtgtctcgaggcaggaattaggaccgaggaagagtttcagttactccacatcttccggagggacgcgcttcggttctttctcgcgccgtgtgtggagcccgggagagcgggaacattcgtgttcaccgtccccgccatgcaggaatacttagccgctctctatatcgttcttggactccgtaagacaactcttcaaaaagttggcaaggaggtcgcagagttggtgggtagagtgggagaggatgtgtcgcttgttctgggcatcatggctaaactcctccccctgcgtgcgctgccattgctgttcaatttgattaaggtggttccacgagtattcggtcggatggtggggaagtcccgagaagccgttgctcaggccatggttctcgaaatgtttcgggaagaggattactataatgatgatgtcctggaccagatgggggcttctattctgggggtggaggggccacgacggcatcctgacgaaccgccagaggacgaagtgtttgagttattccctatgtttatggggggtcttttatccgcccacaatcgggccgttctggcgcagctcgggtgccccatcaaaaatctggatgcacttgaaaatgctcaggcaattaagaaaaagctcggaaaactcggaaggcaagtgctgccaccttccgagctcttagaccacctctttttccactacgagttccagaaccaaaggttcagcgccgaagtactctcatcactgagacagctgaatctggccggagtgcgtatgacccccgttaagtgtactgttgttgccgccgtgctaggatcaggccgtcatgctctcgacgaggttaacctcgcgagctgtcagctggaccccgcagggctccgaacgttgcttcccgtgttcctccgcgctagaaagctggggctccagctgaactcactcggacctgaagcgtgtaaagacctccgcgatttgctgctccacgaccagtgtcagattactaccctgcgcctgtccaataatcccctcaccgctgccggagtggctgtcttgatggagggtctggcaggaaatacctccgtgacccatctgagtctgctgcatactgggttgggcgacgaaggtctagagttactggccgctcagttggaccggaacagacagctccaagagctgaatgttgcttataatggcgccggtgataccgctgccctagccctggcaagagcggctcgcgaacaccctagcctggagctgctccagggtgttgcaatccaaatgtgctggaagttgcctctgttaccctacgcccacctgtggacgccccggatgccttcgcactggtgttttctcctgatactcatgcctcccctcccgcagtggtacgacgggctggtggcccctcgaggacggtgcacctag

SEQ ID NO: 197413 - DNA, 2928 bp, synthetic construct
  misc_feature 1..2928: note = Description of Artificial Sequence: Synthetic coding sequence
  source 1..2928: mol_type = other DNA
atgcggtggggccaccacctgccccgggccagctggggcagcggcttccgtagggctctccagcgtcccgacgaccgtattcccttccttatccattggagctggcctctccagggcgaacggccttttggacctcctcgcgctttcattcgccaccacgggtcaagcgtggacagtgcacctcctcctggcaggcacggacgactgtttccttcagcaagtgcaacagaggccatacagaggcatagacggaacttggctgagtggttctcccggctaccaagagaagagaggcagttcgggccgacatttgcactggataccgtgcatgtggatcccgtcatccgggaatctacaccagacgaactcttgaggccaccagccgagctggctttagaacaccagcccccacaagctggactcccccctctcgctctatcacaacttttcaaccctgacgcatgtgggcggagagtgcagaccgtcgtactgtacggtaccgtgggcactggaaagtcaacgcttgtgcgtaaaatggtactagattggtgctacgggcgattgcccgcctttgagcttttgattcccttctcgtgcgaggatttatctagtctggggcccgccccagcgtcgttatgtcaattagtggctcaaagatatacccctctaaaggaggttctaccgctgatggccgctgcaggatcgcacttgctgtttgttctacatgggcttgagcatctcaacctggactttaggctggcggggaccgggctgtgttccgaccccgaggagccacaggaacctgccgccataatcgttaacctgcttcgaaaatatatgcttccgcaggcatccatactcgtgactacgagaccatctgctattggccgcatacctagcaagtacgtgggccggtacggtgaaatttgcggattttcagatactaatctccagaagctgtatttccagctgcgactcaaccagccgtactgtggctatgcagtgggtggttccggtgtgagtgcaacccccgcccaaagggatcacctggttcagatgctgtcccggaaccttgaaggccaccatcagatcgcagcggcctgctttctgccatcatactgttggctcgtgtgcgccaccctgcacttccttcacgctccaactcctgcgggccagacattgaccagtatttacacttcctttctacgactaaatttctcgggtgagactctggatagcacggaccctagtaatctgtctttgatggcttacgcggccagaacaatggggaagcttgcctacgagggggtttcaagcagaaaaacatacttctccgaggaggatgtgtgtggctgcttggaggccggaattcgcaccgaggaagaattccaactgctccatattttcaggagagacgcactgaggttctttcttgcaccttgcgtggaacctggccgggccggcactttcgtgtttaccgtccctgccatgcaggaatacctcgcagccctgtatattgtgctagggctcaggaagaccactctgcagaaagtgggaaaagaagtggcggagctggtgggccgggtgggggaggacgtctccctggtgctcggtattatggccaagttactccccctgagggcgttgcctcttctgttcaacctgatcaaggtggtgccccgcgtgtttggccgtatggtcggaaagagcagagaagccgtggcccaggccatggtgctggaaatgttccgggaagaagactattataatgacgacgttctcgatcagatgggggctagcatcctgggcgttgaaggccccagacgacaccctgacgaaccacctgaggacgaggtcttcgagcttttcccaatgttcatgggaggattgctaagtgcgcataatcgggctgtcttagcgcagctgggctgcccaataaagaatttggatgctttagaaaacgctcaggccataaagaagaagctggggaaattagggagacaggtcctgccgccttcagagctcttggatcacctgttcttccattatgaattccagaatcaaaggttttccgctgaagtcctgtcttccctgcggcagttaaacttggctggagtgagaatgacacctgtcaaatgtacggtggttgcagccgtgctgggctcgggccggcatgctctggatgaggtcaatcttgccagttgccagctggatccagccggccttaggacactgttacccgtatttttgcgcgctaggaaactcggtctgcaattgaattctttgggaccagaggcgtgtaaagatctacgcgatctgctcctgcacgaccagtgtcaaatcaccacccttcggctgtctaacaatccgttaacagccgctggagtagccgtgttaatggaggggctggcaggaaacacatcagtaacccatctatcgcttctccatacgggcttgggggacgaaggcctggagctgctggctgctcaattagataggaaccgccaactccaagaactcaacgtggcatataacggcgctggcgacacagcagcgctcgctctggcccgggccgctcgcgaacatcccagcttggagctgctccacttatactttaatgagctgagctccgagggacgccaggttctacgcgaccttggcggcgctgccgagggaggagcgagggttgtggtaagtctgaccgaagggaccgctgtttctgagtactggtccgtaatcctctctgaggtgcagcgaaacctcaatagttgggacagggctagggtgcaaagacatttggagcttttgctgagggacttagaggattctaggggagcgaccttaaacccttggcggaaggcccagctgctgcgcgtggagggagaagtgcgagccttgcttgagcagctgggttccagcgggagctag

SEQ ID NO: 197414 - DNA, 2766 bp, synthetic construct
  misc_feature 1..2766: note = Description of Artificial Sequence: Synthetic coding sequence
  source 1..2766: mol_type = other DNA
atgcggtggggccaccacctgccccgggccagctggggcagcggctttcgtcgcgccctgcaaagacccgacgaccggataccattcctgatccactggagctggccacttcagggtgaacgtccctttggtccccctcgagcatttatccgtcaccatgggagctcagttgactctgcaccaccacccggcaggcatgggcgcttattcccctcagcatctgctactgaggctattcagcgtcatagacgtaacctggccgaatggttctcacgtctgcctcgggaagaacgccagttcgggcccacatttgctctggacaccgtccacgtcgaccccgtgatacgtgaatccacacccgatgagttgctgaggccaccggcagaactagccctcgaacatcagcctccccaggctgggcttccacctctagccctgagccagctgttcaatcctgacgcttgcggaaggagggtgcagaccgtcgtactgtacgggacggtcggaaccgggaagtctaccctggtgcgaaagatggtcctggattggtgctacggcaggctgcctgcatttgagcttctgattccctttagttgcgaggatttatcatcactgggccccgcaccagccagtctttgtcaactcgtggcccagagatatacccctctgaaggaggttctcccattgatggctgcagccggctcccacttactctttgttctgcacggactggaacatctgaacttggatttcagactggccggcaccggcctgtgttccgatcccgaagaaccccaggagcccgctgccatcattgtaaacttgctgagaaagtacatgcttcctcaggcctcaattctcgtgactacccggccttccgccatcggaaggatccccagtaaatacgttggccggtatggagaaatatgcggcttttctgataccaacctgcagaaattgtatttccagctgcggcttaaccaaccatattgtggctacgccgtcgggggctctggggtctccgcaacccccgcccagagagatcacctagtgcaaatgttgagccgaaacctcgagggccaccatcaaatcgccgccgcgtgttttctaccctcatattgctggctcgtgtgtgccactttacatttccttcacgcgcccacccctgctggtcagacattgacatccatctacactagctttttgcggctaaatttttctggtgaaacactggactctacagacccttcaaacctctccttgatggcgtacgccgccagaacaatgggaaaacttgcctacgaaggagtctcatcgcggaaaacgtacttctctgaagaggacgtgtgtggatgtctggaagcgggtattaggactgaggaggagttccagctgctccacattttcaggcgggatgcccttagattctttctagccccctgcgtcgagccaggtcgggctggaacattcgttttcaccgttcccgcgatgcaagagtacctggctgcgctctatatcgtgctcggcctgaggaagaccacgctgcaaaaggtgggaaaggaggtcgccgaactggtgggtcgggtcggggaggatgtgagtttggtgttaggaatcatggcaaagctcctgcccctgcgtgcactgcccctgctgttcaacttgattaaggtggtgcccagggtgttcggacgaatggtgggtaagagtagggaagcagtggcacaggctatggtcttagaaatgtttcgtgaagaggactattacaatgatgatgttctggatcagatgggcgcctccatcctgggcgtggaggggcctaggaggcacccagacgagcctccagaagacgaggtattcgaactgttcccaatgtttatggggggcctccttagcgctcataatcgtgctgtattagcacaactgggctgcccaatcaaaaatttggacgccctggaaaacgcacaggctattaagaaaaaattaggcaaactcggcaggcaggtactcccccccagcgaactgctagatcacctcttcttccattatgagttccagaaccagcggttctcggcagaggttctgtctagcctgcgccagctgaacctcgcaggagttcgtatgactccagtgaaatgtacggtggtcgctgccgtgttgggctccggacgccacgcactcgacgaggtgaacctggcgagctgtcagcttgatccggctggactgcgaacgttgttgcctgttttcctgcgagcccggaagctgggcctgcagttaaattcattgggccccgaggcctgtaaagacttgagagaccttctcctccatgaccaatgtcaaattacaacccttcgcttaagcaacaatcccctgaccgccgcaggcgtggccgtactcatggagggactagccggaaacacatcggttacgcacctctctctgctgcacacgggtctgggcgacgaaggcttggagctgctagcagcccagttggataggaatcgtcaactacaggaacttaacgtggcctacaatggagcgggcgacactgccgccctcgccctggcccgcgctgcccgggagcatccctctctagagctgctccaaggagtagccattcagatgtgctggaagctccctctgctgccatatgcccacctgtggacgcctagaatgccaagtcactggtgctttttgcttattcttatgcccccactcccacagtggtacgacggccttgttgcccccagagggagatgcacgtag

SEQ ID NO: 197415 - DNA, 3111 bp, synthetic construct
  misc_feature 1..3111: note = Description of Artificial Sequence: Synthetic coding sequence
  source 1..3111: mol_type = other DNA
atgaagatggccagcacccggtgcaagctggcccggtacctggaggaccttgaagatgtagatcttaagaagtttaaaatgcaccttgaagactacccaccacaaaaaggttgcatccccctacctcggggtcagaccgagaaggccgaccacgtggacttggccaccttgatgatagactttaacggagaagagaaggcatgggccatggcagtgtggatttttgctgcaataaacaggcgagatctgtacgagaaggcgaagcgagatgaacccaaatggggatctgataacgccagagtcagcaatcccaccgtcatttgtcaggaggacagcatcgaggaggagtggatgggcctcctggagtacctctctaggatctccatttgcaaaatgaaaaaagattaccgaaagaagtataggaagtatgttcgcagcaggttccagtgcatcgaggacaggaacgctaggctaggggaaagcgtgagtctcaataaaaggtacactcggttacggctgatcaaggagcacaggtcccagcaggaacgggagcaggaactgctagcaatcggcaagaccaaaacctgcgaatccccagtgagcccgatcaagatggaactgctgtttgaccccgacgacgaacatagcgagcccgtgcacacagtggtttttcagggggccgcgggaattggcaagactatccttgctcgcaagatgatgctggactgggcctctggcaccctgtaccaggaccgttttgattacctgttttatatccactgtcgtgaggtgtctctagtaacccagagaagcctcggggatctgattatgtcctgctgtcccgatccaaatccacccatccacaaaatcgtccggaaacctagtaggattttattcctcatggatgggtttgacgagctccagggagcctttgacgaacatatcggtcctctatgtaccgactggcagaaggccgagagaggtgacatactcctatcctccctgattcggaaaaagcttttaccggaagcctctctgctaattacaacaagaccagtggctttggagaaactccagcacctgcttgaccacccgcgccacgtggaaatactgggtttctcagaggctaaacgcaaagagtatttctttaagtacttttctgatgaagcacaggcgcgggctgcttttagccttatacaggagaatgaagtgctatttaccatgtgcttcatccccctggtgtgttggattgtgtgtaccggactaaaacaacaaatggaatcaggaaaatctctggctcagacttccaaaactacgacagccgtgtacgtattttttctcagttctcttctgcagcccagagggggaagtcaggaacatggcctgtgcgcacacctatggggcctgtgctcactggctgccgatgggatctggaaccagaaaatattgttcgaggagtcggacctccggaaccacggattgcagaaagccgacgtgtctgcctttctccgaatgaacttattccaaaaagaggtggattgcgagaaattctactcgttcattcatatgactttccaggagttcttcgccgcaatgtattacctcctggaggaggagaaggaaggcaggaccaatgtccccgggagtaggctgaagcttccttcacgggacgtgacagttctgctcgagaattacggtaaattcgagaaaggctatctgatctttgtggtcagattcttgtttggccttgtaaatcaggagcgcacttcttaccttgagaaaaaactgtcatgtaagatctcccagcaaataagactggagttgctcaaatggatcgaagtgaaggccaaagctaagaagttgcaaatccagccttcacagctcgagttgttctactgtctttacgagatgcaggaggaagattttgtacagagggcaatggattactttccgaagatagaaataaatctttctacaagaatggaccacatggtgagtagcttttgcatcgaaaactgtcacagagtggaaagtctctcgctaggctttttgcataacatgcctaaggaggaagaagaggaggagaaagaggggcggcacttggacatggtccagtgcgtactgccgtctagctcacatgcggcgtgtagccacggactggtcaacagccatttgacaagtagtttctgtcgaggtctctttagcgttctgagcactagccaaagtctgacagagctggatctatccgacaattctctgggagaccctgggatgcgggttttatgtgagacgctgcagcatcctggctgtaacatcaggagactgtggctgggcaggtgcgggctgtcccatgaatgttgcttcgatataagtttggtcctatccagtaaccaaaaactcgtcgagctcgacctcagtgacaatgccctgggcgatttcggtatccgcctcctgtgcgtgggtctcaaacaccttctttgtaacctgaagaaactgtggctggtgtcctgttgcctcacaagcgcctgttgccaagacttagcatctgtcctgagcacaagccatagtctgactagactgtatgtcggcgaaaatgcgttaggagactcgggggttgccatcctatgtgaaaaggctaagaaccctcaatgtaacttacagaagctcggtctcgtgaacagcggtctgacttctgtatgttgcagcgctctctcctccgtactcagtaccaatcaaaacctgacccacttgtatcttcggggtaacacactgggcgacaagggtataaagctgctgtgcgaaggactgttgcatcctgactgtaagctgcaggtattagagctggataattgcaatctgacctctcactgctgttgggatttatccactcttctaacctctagccagtcccttcggaagctgagcttgggtaataacgatctcggagacctaggtgttatgatgttctgcgaagtcctgaaacaacaatcttgtctcctgcagaatctggggctgtccgagatgtacttcaattatgagacaaagtctgcacttgaaacactacaggaggagaagccagagttgacagtggttttcgagcccagctggtag

SEQ ID NO: 197416 - DNA, 2769 bp, synthetic construct
  misc_feature 1..2769: note = Description of Artificial Sequence: Synthetic coding sequence
  source 1..2769: mol_type = other DNA
atgaagatggccagcacccggtgcaagctggcccggtacctggaggatctggaggacgtggatttgaaaaagttcaagatgcatcttgaagactatccaccccaaaaggggtgtatacccctgccacgtgggcagaccgagaaggccgaccatgtagacttagctacactcatgattgactttaatggcgaggagaaggcttgggcaatggcagtttggatctttgctgccatcaacagacgggacctctacgagaaagcaaagcgtgatgagcccaagtggggctccgacaacgctagggttagtaacccgacggttatctgtcaagaggactccattgaggaagagtggatgggtcttctggagtacctgtcccgtatatccatatgtaagatgaagaaggattatcgcaaaaaatatcgcaaatatgtgcgcagtcgattccaatgcatcgaggatcgtaatgctaggttgggcgagtccgtctccctcaacaagaggtatacgcgattgaggcttattaaggagcaccggtcgcaacaggagcgcgagcaggaattgctggctatcggcaagacaaagacgtgtgagtcccctgtgtcccctatcaagatggaactcttgttcgatcctgatgacgagcactccgaacccgtgcacacggtggtgtttcagggcgcagctggaattggtaaaacaatcctagcacgtaaaatgatgctggactgggcgtcaggcacactttaccaggaccgatttgattaccttttctacattcattgtcgagaggtctcacttgtcacacagcggtctctcggagacctcatcatgtcttgttgtccggaccccaatcctcctattcacaagatcgttagaaaacctagccgcatactatttctaatggacggatttgatgagttacagggcgcttttgatgaacacatcggccccctctgtacggactggcagaaagcagaacgaggggatattcttctgagctctctgattaggaagaaactccttcccgaggcttctttattgataactaccagacctgtggctctagagaagctccagcaccttttggaccaccccagacacgtggagatactgggtttctccgaggccaagcgaaaagaatatttctttaaatacttttccgatgaagcgcaggccagggctgcgttctctttaatacaggagaacgaagtcctgttcacaatgtgttttattccacttgtatgttggatcgtttgtaccgggcttaagcagcagatggaatccggcaaatctcttgcacagacatccaaaactacaaccgccgtgtatgtctttttcttgagcagtctgttgcagcctcgtggcggatcacaggaacacggcctatgcgcacatctttggggcctgtgcagtttagcggccgacggaatttggaatcagaaaatacttttcgaggagagcgacctcaggaaccacggactccagaaggccgatgtatctgcttttctaagaatgaacctgtttcagaaagaggtggactgcgagaagttttactcctttatccatatgacattccaggagttctttgctgccatgtattacttgctggaagaggagaaggagggccgcaccaacgtgcctggatcccggctgaagcttccctcacgcgacgtgaccgtactgttggagaattacgggaagtttgagaagggctatttaatcttcgtagtgaggtttctgttcggcctcgtaaaccaagaaaggacgtcctatttggagaagaaactgagctgtaaaatcagccaacagataaggctggagctgctgaaatggattgaggtgaaggctaaggccaagaagctgcagatccagccctcccagctcgagctgttctattgcctgtacgagatgcaggaagaggatttcgttcagcgcgctatggactattttccgaagatagagatcaacctcagtactagaatggaccatatggtcagctcattttgcatcgagaactgccaccgcgtggaatcactgagtcttgggttcctgcacaacatgccaaaggaggaagaggaggaggaaaaggaggggaggcacctggacatggttcagtgtgtgctcccctcatcctcccatgccgcctgttcacatggactgggcaggtgcggattgagtcacgaatgctgtttcgacatctctctggttctgtcttccaaccagaagttggtggaattggatttatccgataacgctctgggagatttcggaatccgtctattgtgcgtcggcttgaaacatctgctgtgcaatctcaaaaagctatggcttgtgaattccggcctgaccagcgtgtgctgttcagcccttagctccgtcctgtctacgaatcagaatctgacccacctgtacctcaggggtaatacactgggggataaggggatcaaactgctgtgcgaagggctgctccacccagactgtaagctgcaagtattggagctcgataactgcaacttgacttctcactgctgctgggacctgtccacacttctgaccagctcccagagcctaaggaagctaagcctgggaaataatgatctcggggatctgggcgtaatgatgttctgcgaggtgctcaagcagcaaagctgtctgttgcagaatcttgggctttctgaaatgtattttaactatgaaactaagagcgctctggagactctgcaggaggagaaacctgaactcactgtcgtgttcgaaccctcctggtag

SEQ ID NO: 197417 - DNA, 2940 bp, synthetic construct
  misc_feature 1..2940: note = Description of Artificial Sequence: Synthetic coding sequence
  source 1..2940: mol_type = other DNA
atgaagatggccagcacccggtgcaagctggcccggtacctggaggatctagaagacgttgacctgaagaaattcaagatgcaccttgaagattatccgccccagaaaggctgtattccacttccccggggtcagaccgaaaaggctgaccatgtcgacctcgctacgctgatgattgattttaacggcgaagaaaaagcctgggcaatggctgtgtggatcttcgccgcaataaacaggcgggacctgtatgaaaaagccaaaagagatgaaccaaaatggggtagtgataatgcacgggtctctaacccaaccgttatctgccaagaggactcaatcgaggaagagtggatgggtttactggagtacttatctcggatttctatttgcaagatgaaaaaagattatcgtaaaaaataccgcaagtatgtgcgctcaagattccagtgcattgaggataggaacgccaggcttggtgaaagcgtgtctctgaataagaggtatacccggttgagactgattaaggaacaccgctctcaacaggaacgcgaacaagaactgctggccatcggcaaaacaaaaacatgcgaaagtcccgtgtccccaattaagatggagctgctgttcgacccagatgacgagcacagcgagcctgtgcacactgtggtgtttcagggcgccgccgggattgggaagactattctggctaggaaaatgatgctcgactgggcgtccggaacactgtatcaagacaggttcgattatctgttttatatacactgcagggaagtgtctctcgtcacacagagaagcctaggagacctaatcatgagctgctgccctgacccgaacccccccatccataagatcgtcagaaagccttctagaattttgtttttgatggatggattcgatgagctgcagggtgcttttgatgagcatatcggccctctttgcaccgactggcagaaagcagagaggggcgacatcctgctgtctagtctgatacgaaaaaagctcttgccagaggcctcactgttaatcacaacacggcctgtagcactggaaaagctgcagcacctgctcgaccaccctagacatgtggagatccttggattttcagaggctaagagaaaggaatatttttttaagtacttttccgacgaggcgcaggcccgggctgccttctccctcatccaagaaaatgaagtgctgttcacaatgtgttttatcccactcgtctgctggatagtgtgcacaggcctgaagcagcagatggagagcggtaagagcttagcccagacttccaagaccaccaccgccgtgtacgtttttttcctgtcatcgctactgcaacctaggggcggctcccaagagcacgggctttgcgctcatctttgggggctctgttcactcgccgcagatgggatctggaaccagaaaatcctcttcgaagaaagcgacctccgaaaccatggactgcagaaggctgacgtgagcgcattcctccggatgaacttattccagaaggaagttgactgcgaaaaattctacagcttcattcacatgacatttcaggagttctttgctgcaatgtattatctgctcgaggaggaaaaggagggccgcactaacgtcccgggctcccgcctcaaattaccaagccgggatgtgactgtgctgctggagaattacggcaagttcgaaaagggctatttgatctttgtcgtgagattcctcttcggtttagttaaccaagagcgcacttcctacctggagaaaaagttatcgtgtaagattagccagcaaatcaggttggaactgctgaaatggatcgaagtgaaggccaaggctaagaagctccagatccaaccgtcccagctcgagcttttctactgtctgtacgagatgcaagaggaagactttgttcagagagccatggattactttcctaaaatcgagattaatctgtccactcgcatggatcacatggtgagctccttctgcatcgagaactgccatagggtggagtccctgtccctgggatttctgcacaacatgcctaaagaggaagaagaagaagaaaaagagggacgccatctcgatatggtccagtgcgttctccccagctcctcacacgccgcttgtagccacggcctcgtaaattcacatttgacgagcagcttctgtcgagggctcttctctgttctgtccacgtcacagtctctgactgagttagatctgtcagacaattctcttggcgatcctggcatgcgtgtcttatgcgaaactctccagcacccaggatgtaacatacgccgtctgtggctgggccggtgcgggttaagtcacgaatgctgttttgacatatctcttgtactctccagtaaccagaagttggtggaactagatctttcagataacgcccttggggactttggaatccgcctgctgtgcgttggtttgaaacacctgctgtgtaacctaaagaagctgtggctggttaactctgggctgacatctgtatgttgttcagctctgtcgagtgtcctgagtaccaatcaaaatctgacccatctttatctgcgggggaacacactcggcgataagggtatcaagctcctctgcgaagggcttctgcacccagactgtaagttgcaggtgctagaattagataattgcaatcttacctcgcattgttgttgggacctttctactttgctgaccagtagtcagtccctgagaaagctcagtctcggcaataacgaccttggagacctgggcgtgatgatgttctgtgaagtcctgaagcagcagagctgtctcctccagaacctggggttgagtgaaatgtactttaactacgagactaagtcagcactggagaccctgcaggaggagaagcctgaacttaccgtggtgtttgaacccagttggtag

SEQ ID NO: 197418 - DNA, 2940 bp, synthetic construct
  misc_feature 1..2940: note = Description of Artificial Sequence: Synthetic coding sequence
  source 1..2940: mol_type = other DNA
atgaagatggccagcacccggtgcaagctggcccggtacctggaggatctggaggacgtggacttaaaaaaatttaaaatgcacctggaggattacccaccacagaaaggatgcatccccctgcctcgaggacagacagagaaggccgatcatgtggatttggcgacgttgatgatcgactttaacggggaggaaaaagcctgggctatggcagtatggatatttgccgccatcaatcgtagggatctgtatgagaaggcgaagagagatgaaccgaagtggggatccgacaatgcaagggttagcaacccaaccgtgatctgtcaggaggactcgatcgaagaagaatggatgggccttcttgagtatctctcaaggatttccatatgcaagatgaagaaggactacaggaagaaatatcgcaagtacgtgcgcagccgcttccagtgcatcgaggatcgcaacgcacgactcggagagtcagtctcactgaacaaaaggtacactcgacttcggctgatcaaagagcatcgcagtcaacaggagagggaacaagaactgctcgcaataggcaagacaaaaacgtgcgagtctccagtgagcccaattaaaatggaactcctattcgacccagacgatgaacacagcgaaccggttcacactgtggtgtttcagggggctgcaggaatcggaaaaaccatcctcgcacgaaaaatgatgttggattgggcttccggaacgctgtaccaggatagattcgactatttattttacatccactgtagggaggtttctcttgtgacccaacgtagcctgggtgacctgattatgtcatgctgcccagatccaaacccacccattcacaaaatagtgaggaagcctagtagaatcctgtttctgatggacggcttcgacgaactgcagggagccttcgatgagcacattggccccttatgtaccgactggcaaaaggcagagcgcggcgacatactactgtcttctctcattcgcaagaaactcctacctgaggcctctttgctgataactacccggccagttgctcttgaaaaacttcagcacctcctcgaccacccacgccacgtggaaatcctggggttctccgaggcaaaaaggaaggaatacttctttaaatacttcagtgacgaggctcaagctagagcagctttttccctgatacaggagaatgaggtgctgtttacgatgtgtttcatcccactagtttgctggattgtgtgcactggcctgaagcagcaaatggaatcaggaaaatcattggcgcagacctccaagactactaccgcagtatacgtcttttttctgtcaagcctgctccagccgagaggggggagtcaggaacacggcctgtgcgcccatctttggggtttatgttctctcgctgcagacgggatctggaatcagaagattctattcgaagagtcggatctacgcaaccacgggctccagaaagccgatgtgtccgccttcctgcgcatgaatctttttcagaaggaggttgactgcgaaaagttttactcattcatccatatgaccttccaggagttcttcgcagcaatgtactacctcctggaggaggagaaggagggccggaccaacgtccccggcagcaggttgaaactgcccagtcgagatgtaaccgtcttactggaaaactatgggaaattcgaaaagggttacttaatctttgtagtgaggttcctcttcggtttagtcaaccaggaaaggacatcttatctcgaaaagaaactgagttgcaagattagccagcagatccgcctcgaactgcttaaatggattgaggttaaagccaaagccaaaaaactgcaaatccagccatctcagttagagctgttctactgcctttacgagatgcaggaggaggactttgtccagcgtgcaatggactacttcccaaagatagaaattaatctttcaacccgcatggaccacatggtcagcagcttctgtatagagaattgccacagggttgaaagcctctcacttggcttcttgcataacatgcccaaggaggaagaagaggaggagaaggaagggcggcacctggacatggtgcagtgcgtgctgcccagtagtagccacgctgcctgcagtcatggcctagtgaattcgcacttgacatcctccttttgccgaggcctgttcagcgtcctgtccacgtcacagtctctcactgagcttgatctgagcgataattccttaggtgaccctggcatgcgcgtgctgtgcgagacactgcaacaccctggttgtaatatcaggaggctgtggttgggccggtgcggcctttcgcacgagtgttgctttgatatttccttggtgctttctagtaatcaaaagttggtggaattagatctgagtgacaacgcactgggagatttcggtatccggcttctgtgtgtaggcctaaaacatctcctgtgtaatctgaagaagttatggcttgtgaattccggcctgaccagcgtgtgctgctctgctctatcttccgtgctgtcaaccaatcagaacctcactcatctgtatttacggggtaatacactgggggataagggtatcaagctgctgtgcgagggcctgttgcacccagattgcaaactgcaagtgctcgagctcgataattgcaacctcacctcccactgctgctgggacttgagtacgttgctcacttcctcacagtccctgcgcaagcttagcctgggcaacaatgacctcggggatcttggggttatgatgttctgcgaagtgttgaagcaacagtcatgcctgttacagaatctgggcctgtctgagatgtacttcaactacgaaacaaagtctgccttggaaacccttcaggaggaaaagcctgaattgaccgtggtgtttgagccttcttggtag

SEQ ID NO: 197419 - DNA, 2940 bp, synthetic construct
  misc_feature 1..2940: note = Description of Artificial Sequence: Synthetic coding sequence
  source 1..2940: mol_type = other DNA
atgaagatggccagcacccggtgcaagctggcccggtacctggaggatcttgaagacgtagacctcaaaaagttcaagatgcatctggaagactaccctccccagaaaggttgcatcccacttccacgcggccaaactgaaaaagctgaccatgtggacctggccaccttaatgattgacttcaatggtgaagagaaggcgtgggcgatggccgtttggatctttgccgcaattaatcgaagagacttgtacgaaaaggcaaaacgcgacgaacccaagtggggcagcgataatgcacgcgtttccaacccaactgtgatatgccaagaggatagcattgaggaagagtggatgggtctgctggaatacctctcacggatcagcatttgtaaaatgaagaaagattatcggaagaagtacagaaagtatgtccgatccagatttcagtgtatagaagatagaaacgcccgcctcggagaaagtgtgtctttgaataagaggtataccagactgagactgattaaggaacaccggtcccaacaagaaagggaacaggagctgctggccatcggcaagactaagacttgcgagtccccagtgtcccccatcaagatggagctcttgttcgacccagacgacgagcactccgaacctgtccataccgtggtatttcagggtgcagccggaatcggtaaaaccattcttgcacggaagatgatgcttgactgggcaagcgggactctctaccaggatcgctttgattatctattctatatccactgcagggaggtcagcctcgttacccagcggagtctgggcgatttaattatgagctgttgcccagatccaaatcctccaattcacaagatagtgagaaagccttctaggattctattcctcatggatggatttgacgagctgcagggagcctttgacgaacacatcgggcccctgtgtacggactggcaaaaagcagagcgcggtgatatattgttatccagcctgataagaaagaagctgctcccagaagcatcactcttgatcactacaagacctgtagcactcgagaaactgcagcacttgcttgaccacccaagacacgtcgagattctgggtttctccgaggccaaaagaaaagagtattttttcaagtacttttcggatgaagctcaggccagagccgcgttcagtctgattcaggagaacgaggtgctgttcaccatgtgctttataccactcgtgtgttggatcgtctgtacggggctgaagcaacaaatggaaagcggtaagtcactggcccagacatccaaaaccaccactgctgtatacgtgttcttcctaagctcattgctacaacctagaggaggtagtcaggagcatggactgtgtgcgcacctctgggggctgtgttctttggccgccgatggcatttggaaccaaaagatccttttcgaggaatctgatctgcgtaaccatgggttgcagaaagcggatgtcagcgccttcttgcgaatgaatctgttccagaaggaggtggattgtgaaaagttctattcctttatccatatgacgtttcaggagttcttcgcagccatgtactacctgctcgaggaggagaaggaaggcaggacaaatgttcctggctcccgattgaagctccccagtcgagacgtgactgtgctcctcgagaactacgggaagttcgaaaagggatacctgatcttcgtcgtgcggtttctgttcggacttgtgaatcaggagaggaccagttacttagaaaaaaagctgagttgtaagatctcccaacaaattaggctggagctgctcaagtggatcgaggtcaaagccaaagcgaaaaaactgcaaatccaaccttcacagcttgagcttttctactgcctttacgagatgcaagaggaggactttgtgcagcgcgctatggactatttccctaagatcgagatcaacctctccacccgcatggaccatatggtcagcagcttttgcattgaaaactgccatcgagtggagagtctgtctcttggtttcttacataacatgcccaaggaagaggaagaagaagagaaggaagggcgacatctggacatggtgcagtgcgtcttgccttcctcaagccacgctgcctgtagccacggcctgggccggtgtggactgtctcatgaatgttgcttcgatatctcacttgtgctgtcttctaatcagaagctcgtggagctggatctcagcgacaatgcattgggcgactttgggatcagactgctatgtgtcgggctaaagcacctgctgtgtaatctcaagaaactgtggctcgtgtcatgttgcctgacctccgcatgttgccaagatcttgctagcgtgttatctacatcacatagcctgacgcggctttacgtaggggagaacgcacttggcgactcaggcgtggcaatcttgtgcgaaaaagccaaaaaccctcaatgcaatctccaaaaactgggcctcgtgaacagcggactgacaagcgtgtgctgctctgccctgtcatcagtcctgtccactaaccagaatctcacccatctgtacctgcgtggcaacaccctaggagataagggcattaagttgttgtgtgaagggctcctgcatcccgactgtaagctccaggtgcttgaactggacaattgcaaccttacatcacattgctgctgggatctcagcacactcctgacatcctcccagtccctgaggaagttaagtctaggcaataatgatctgggagacctgggcgtgatgatgttctgcgaggtgctcaaacagcagagttgtctgttacagaacctcggcttgagtgagatgtacttcaattatgaaaccaaatctgctttggagacactacaggaagagaaaccagagctgacggtagtatttgagccaagctggtag

SEQ ID NO: 197420 - DNA, 3111 bp, synthetic construct
  misc_feature 1..3111: note = Description of Artificial Sequence: Synthetic coding sequence
  source 1..3111: mol_type = other DNA
atgaagatggccagcacccggtgcaagctggcccggtacctggaggatcttgaggatgtggatctcaaaaaatttaaaatgcaccttgaggactatccaccccagaagggatgcatcccactgcctagaggtcagaccgagaaggccgatcacgtggatcttgctacgctgatgatcgacttcaacggggaagagaaagcctgggctatggcagtatggattttcgccgccattaataggcgggacttgtacgaaaaagccaagagagacgaaccgaagtgggggtccgataatgcacgggtgagcaaccccacagtgatttgccaggaagacagcattgaggaggagtggatgggattgttagaatacctgagtcggattagcatctgtaagatgaagaaggactacaggaagaaatatcggaagtatgttagatccaggttccaatgcatcgaggatcggaatgcgaggttgggggaatctgtgtctttgaataaaagatatacacgcttacggctaattaaggagcatcgctctcagcaggagcgagaacaagagttattggctatcggtaagacgaaaacatgcgaaagcccagtctctccgatcaagatggaactgctcttcgaccctgacgacgaacactccgagcccgtgcacaccgtggtgtttcaaggagcagcgggtataggcaaaacaattttggcccgtaaaatgatgctagactgggcctccggcactctataccaggaccgcttcgattacctgttttatatacactgccgtgaagtctccctggtgacacaacgctccctgggggacctgattatgtcctgctgtccggatcccaatccacctatccataagattgtgaggaaacccagtaggatcttgtttcttatggatggttttgatgagctacagggagcgttcgacgaacacattgggccgctgtgcactgactggcagaaagcggaaaggggtgatatcctgctaagctccttgattcgcaaaaagttgcttcctgaagcttcacttctcatcacaacacggccggtcgccctcgagaagcttcagcacctgctcgaccacccccggcatgtggaaatcctcggtttttccgaggccaagcggaaggagtacttctttaaatattttagcgatgaggcccaggcacgggcggcctttagtctgatccaagaaaacgaagtactgttcacaatgtgtttcatccctctagtttgctggattgtgtgcactgggctgaagcaacaaatggagtccgggaagtccctggcacagacctctaaaacaacaacagcagtctatgtattctttttatcttcgctgctgcagcctagaggtggcagccaggagcacggcctatgtgcccacctgtgggggctctgttcacttgccgcagatggaatttggaaccagaagatcctcttcgaggaaagtgacctgagaaaccatggtctgcagaaagctgacgtgtctgcatttctcaggatgaacctctttcagaaggaagtggattgtgagaagttttattccttcatacacatgaccttccaagagttcttcgctgctatgtactatctgctcgaggaggaaaaagaaggacggaccaacgtccctgggtcccgtctcaaattgccctctcgagatgtgactgtgttgcttgaaaattatggaaagtttgagaaagggtatctgatctttgttgtgagatttctgtttggactcgtaaaccaggaaaggacgtcctacctcgagaagaaactatcctgcaagatctcccagcagattagactggagctgctgaagtggattgaggtgaaagccaaggccaagaaactgcagatacagccaagtcagcttgaactgttttactgtctttatgagatgcaggaggaagatttcgttcaacgggcaatggactactttcccaaaattgagatcaacctgtccacccggatggatcatatggtatcaagcttctgcattgagaattgccacagggtggagtctcttagcctgggctttttacacaatatgcccaaggaagaggaagaggaagaaaaggaaggccgccatctggacatggttcaatgtgttctgcccagttcatctcacgcagcctgtagtcacggactggtgaatagccacctcactagttctttctgcagaggcctgttcagtgttttgtcaacgagccagagcctcaccgagctggacctgtcggataatagccttggggatcccgggatgcgggtcctgtgcgaaacgctgcagcacccggggtgtaacatccgcaggctatggctggggcgttgtggcctctcacatgagtgctgttttgacatctctcttgtcctgtccagtaatcaaaaactagtggagctggatctcagcgacaatgcattaggcgatttcggtatccgacttctatgtgttggcctcaaacacctcctgtgcaacctcaaaaagctttggctggtgtcatgctgtctaacgtctgcctgctgtcaggacctggcctcggtgctgtctacatcgcattctctgacgcgcctttacgtcggcgagaatgctctaggagattctggagttgcaattctgtgcgagaaagccaaaaacccccaatgtaacttacagaagctaggcctggtaaatagtggtctgacttcagtgtgctgttcagccctgagttccgttctgagtacgaatcagaacctcactcacttgtatctaagaggaaataccctgggagacaagggaattaaactgctgtgtgaagggctgctacatcctgattgcaaactacaggttctggaacttgataactgtaacctcacaagtcactgctgctgggacctgtccacattactcacttcgtcccagtctttacggaagctgtccctcggaaacaacgatctcggcgacctgggcgtgatgatgttctgtgaggtcctgaaacagcaatcttgccttttgcagaacctggggctctccgaaatgtattttaactacgaaaccaagtccgcacttgaaacgcttcaagaggaaaagccagaattgacagttgtatttgagccctcttggtag

SEQ ID NO: 197421 - DNA, 1512 bp, synthetic construct
  misc_feature 1..1512: note = Description of Artificial Sequence: Synthetic coding sequence
  source 1..1512: mol_type = other DNA
atggagtacatggccgagagcaccgaccggagccccggccacatcctgtgttgcgagtgcggcgtgccaatcagccctaatccggctaacatctgcgtagcctgcctgcgatcgaaggtggacatcagtcagggtattccaaaacaggtgtccatctctttttgcaagcagtgtcagcgctacttccaaccgcctggcacatggatccagtgtgctcttgagtctcgggaactattggccttatgtttgaagaaaattaaagctcctctttcaaaagtcaggctagtggacgcgggcttcgtgtggaccgagcctcattccaaacgactcaaggtgaagctcaccatccaaaaggaggtaatgaatggtgccatcttgcagcaagtcttcgttgtggattacgtagtgcaatcacagatgtgtggggactgtcaccgggtcgaagccaaggacttttggaaagcagtgattcaggttcgccagaagacgctacacaagaaaacattctattatcttgaacagctgattttaaaatatggcatgcatcagaacacccttcgcattaaagaaatccatgacggacttgacttctattacagcagcaaacagcatgctcagaagatggtggagtttttgcagtgtaccgtgccttgtaggtataaggcaagccagagactgatatcccaggacatccacagtaatacctacaattataagtcgacattttcagtcgaaatagtgcccatctgcaaagataacgtggtctgtcttagcccgaagcttgctcagagtctggggaatatgaatcagatctgtgtctgtatccgcgtgacatccgcaatccatttgatcgacccaaatacactgcaggttgccgatatcgatggctcaacattttggagccatccgttcaatagtctttgtcaccccaagcagctcgaggagtttatagtaatggaatgctctatcgtccaggatatcaaacgggccgccggcgctggaatgatctccaagaagcacacgctgggtgaggtgtgggtccagaaaaccagcgagatgaatacggacaagcagtatttttgtcggacacacctcggacatctgctcaaccccggggacttggtgctgggctttgatctagcaaattgtaacctcaacgacgaacacgttaataaaatgaattcagaccgtgtgccagatgtcgttctgattaaaaaatcctacgacaggacaaaacgccagcgccggcgcaattggaaactgaaagaattggctagggaacgcgaaaatatggatacagacgacgaaagacagtaccaggacttcttggaagacctggaggaagacgaggctatccgcaaaaatgtcaatatataccgcgattccgcaatccctgtcgagagtgataccgacgatgaaggcgcgccacgcatctcccttgcagaaatgctggaagacttacacatttcccaggatgccaccggggaagaaggtgcatctatgctgacctag

SEQ ID NO: 197422 - DNA, 1512 bp, synthetic construct
  misc_feature 1..1512: note = Description of Artificial Sequence: Synthetic coding sequence
  source 1..1512: mol_type = other DNA
atggagtacatggccgagagcaccgaccggagccccggccacatcctgtgctgcgaatgtggcgtgccaatctcgccaaaccctgctaatatttgcgtagcctgcctgcgttccaaggttgatatatcccagggtattccaaaacaagtgtccatctccttctgcaaacagtgtcagaggtattttcaaccgccaggcacatggatacagtgtgcattagagtcacgcgaactcttggcattgtgcctgaaaaagattaaggcaccgctatccaaagtgaggctagtggatgccggcttcgtctggacagagccccattccaaaaggctgaaagtcaagctgactattcagaaagaagtcatgaacggcgctatcctgcagcaagtctttgtggtcgattatgtggtgcaatcccaaatgtgcggcgactgccacagggttgaagccaaagacttctggaaagccgtgatacaggttcgtcagaagactctgcacaagaaaacgttttactacctcgaacaactgatactcaagtatggaatgcatcagaacaccctgagaatcaaggagattcacgatggtctcgacttctactacagcagtaagcaacacgctcaaaaaatggtggagtttctgcagtgcacggttccatgccggtataaagcgagccagcgtctgatcagccaggatattcacagcaacacgtataattacaagtcgacattctctgtggagattgtgcccatctgtaaggacaacgtcgtgtgcttgagccccaaactggcgcagtctctaggaaatatgaaccaaatctgtgtctgcattagggtgaccagtgccatccatttaatcgatccaaacacccttcaggtcgcagacatcgacggttctacattttggtcgcacccattcaactcactgtgtcatccgaagcagctggaagaattcatagtcatggagtgttctattgtgcaggatatcaagcgggccgccggagcagggatgatctccaagaagcataccctgggcgaggtgtgggtccagaagacctccgagatgaatacagacaagcagtatttctgcagaactcatctgggccacctgctgaaccccggagatcttgtattgggtttcgatctggctaactgtaacctcaacgatgagcacgtgaacaagatgaacagtgaccgagtgcccgatgttgttctaatcaagaaatcttacgatcggactaagagacaacgtcgtagaaattggaagttaaaagaactggccagagaaagggaaaatatggataccgatgacgaaaggcagtaccaggatttcctagaagatcttgaggaggatgaggcaatccggaagaacgtcaatatttaccgcgacagcgctataccagtagagtcggatacagatgacgagggcgcccctaggatttccctagctgagatgctcgaggatctgcacatcagccaggatgccacaggggaagagggcgcatctatgctgacatag

SEQ ID NO: 197423 - DNA, 471 bp, synthetic construct
  misc_feature 1..471: note = Description of Artificial Sequence: Synthetic coding sequence
  source 1..471: mol_type = other DNA
atggagtacatggccgagagcaccgaccggagccccggccacatcctgtgctgcgaatgcggcgtcccgatctctcccaatccagcaaatatttgtgtggcatgtctccgttccaaagttgacatctcccagggtatcccaaagcaggtttctatttctttttgtaaacagtgtcaacgatacttccagccacccggtacatggattcagtgcgctttagagtctagggaattgctggcactgtgtcttaaaaaaatcaaagctccactgtctaaagtgcgattggtagacgccggattcgtgtggaccgagccgcactcaaaacggctaaaagttaaactcaccatccaaaaagaggttatgaacggcgctattttgcagcaagtgtttgtcgtcgattatgtcgtgcagagccaaatgtgtggcgactgtcatcgcgtcgaggctaaggatttttggaaagctgtctag

SEQ ID NO: 197424 - DNA, 657 bp, synthetic construct
  misc_feature 1..657: note = Description of Artificial Sequence: Synthetic coding sequence
  source 1..657: mol_type = other DNA
atggagtacatggccgagagcaccgaccggagccccggccacatcctgtgttgtgagtgcggcgtccctatttccccaaaccctgcaaacatttgtgttgcctgcttgagaagcaaagtggacatctcccaagggatccccaaacaggtttcaatttctttctgtaaacagtgtcagagatactttcagccacctgggacgtggattcagtgcgccttggagtcccgagagctcctcgccttgtgcttaaaaaaaatcaaggcccctctctctaaggtcaggctggtagatgccggattcgtttggacagaacctcattcgaagaggttaaaagtaaagctgacaatccagaaagaggtcatgaatggggccattctgcagcaagtgtttgtagtggattacgtcgttcagtcacagatgtgtggagactgccatcgcgtggaagcaaaggatttttggaaggccgtgatccaggttaggcagaagaccctacacaagaagacgttttactacttggagcagttaatactcaagtatggcatgcaccaaaatacccttcgtatcaaagagatccacgacgggctggatttctactattccagcaagcagcatgctcagaagatggtggagttcctccagtgcacggtcccctgctag

SEQ ID NO: 197425 - DNA, 297 bp, synthetic construct
  misc_feature 1..297: note = Description of Artificial Sequence: Synthetic coding sequence
  source 1..297: mol_type = other DNA
atggagtacatggccgagagcaccgaccggagccccggccacatcttgtgctgtgagtgcggggtgcccatttcccccaaccctgccaacatatgcgtggcctgcctgcggtccaaagtggatattagtcagggtatccccaagcaggtgtccatttccttttgcaaacagtgccagcggtacttccagcccccaggaacttggattcagtgcgccttagaatctcgggagctactggccctgtgtctgaagaagattaaggcgcctctaagcaaggtccgactggtggatgcctag

SEQ ID NO: 197426 - DNA, 489 bp, synthetic construct
  misc_feature 1..489: note = Description of Artificial Sequence: Synthetic coding sequence
  source 1..489: mol_type = other DNA
atggagtacatggccgagagcaccgaccggagccccggccacatcctctgttgtgaatgtggtgtgcctatcagccccaacccagcaaacatttgtgttgcttgcctgagatccaaggttgacataagccagggtattcctaaacaggtatcgatatccttttgcaaacaatgtcagaggtattttcaaccgccaggaacttggatccagtgcgctctggaaagcagagaactgctcgcactctgtttgaagaagatcaaggcacccctgagtaaagtgcgcctcgtggatgctggcttcgtgtggaccgaaccacattccaagcgactcaaggtgaagctgaccatacagaaggaagtaatgaatggtgctatcttgcagcaggtgtttgtggtggactatgttgttcagagtcaaatgtgcggcgactgccaccgcgtggaagcaaaagatttttggaaggcggtcatccaggtaaggcagaaatag

SEQ ID NO: 197427 - DNA, 657 bp, synthetic construct
  misc_feature 1..657: note = Description of Artificial Sequence: Synthetic coding sequence
  source 1..657: mol_type = other DNA
atggagtacatggccgagagcaccgaccggagccccggccacatcctgtgctgcgaatgtggggtgcccatctctcccaatccagccaatatctgtgtcgcctgcctccgaagtaaggtggatatcagtcaaggaattcctaaacaagtgagtatctcattttgtaagcagtgccaaaggtatttccaaccgccaggaacttggatccaatgtgcactagagtcgagagagcttctggctctctgtcttaagaaaattaaagcgccgttaagcaaggtccgattagtggacgccggtttcgtctggacggaaccgcatagtaaacggctgaaagtgaagttaactatccagaaggaagtgatgaacggggcaatccttcagcaagtgttcgtggtcgattatgttgtccagagtcagatgtgtggcgactgtcatagggtcgaagccaaggacttctggaaagccgtgattcaggttagacaaaaaaccctgcacaagaaaactttttattacctcgagcagctgatacttaaatatggcatgcatcagaataccctgaggatcaaggaaattcatgatgggctggatttttattactccagtaaacagcacgctcagaaaatggtcgagttcttgcagtgtaccgtgccttgctag

SEQ ID NO: 197428 - DNA, 1152 bp, synthetic construct
  misc_feature 1..1152: note = Description of Artificial Sequence: Synthetic coding sequence
  source 1..1152: mol_type = other DNA
atgaacggcgccatcctgcagcaggtgttcgtggtggactacgtggtccagtcccagatgtgcggtgattgccaccgcgtcgaggccaaagatttttggaaagctgtgatccaggtgcggcagaagacactgcacaagaagacattttattatctggagcagttaatcttgaaatatggaatgcaccagaatactctgaggataaaggagatacatgacggattggacttctattactcatcaaagcagcacgctcagaagatggtggaatttctgcagtgcactgtgccgtgcagatataaggcaagtcagaggctaatcagccaggacattcactcaaatacctacaactataagagcacgttttcagtagagattgtgccaatctgtaaagataacgtggtttgtctctcgccgaagttggctcagagcttagggaatatgaaccagatctgcgtctgtatccgtgtgactagcgccattcacctgatagatcccaatacactgcaagtggctgacattgatgggtcaaccttttggagtcatcctttcaactcactgtgtcatcctaaacagctggaggaatttatcgtcatggagtgttccatagtgcaggacataaaaagagctgccggagccggaatgatctccaaaaaacatacactgggggaagtgtgggtccagaaaacttcagagatgaacaccgacaaacaatacttttgtcgaactcatcttgggcatctccttaatccaggcgatctggtgctgggcttcgaccttgctaactgcaaccttaacgacgagcatgttaacaagatgaattcagaccgcgttcctgatgtggtgctaatcaaaaaatcgtacgatcgcaccaagaggcaaagacgcagaaattggaagctaaaagagcttgcaagagagagggaaaacatggatactgatgacgagagacaataccaggactttcttgaggacctggaagaggatgaggcgatacgaaagaacgtaaacatttaccgagacagtgccatacctgtggagtccgacaccgatgatgagggcgctccgagaataagcttggctgagatgctcgaggatttacacataagccaggacgccacaggtgaggaaggtgcgtcaatgttaacatag

SEQ ID NO: 197429 - DNA, 2949 bp, synthetic construct
  misc_feature 1..2949: note = Description of Artificial Sequence: Synthetic coding sequence
  source 1..2949: mol_type = other DNA
atgagcagcaagatggtgatcagcgagcccggcctgaactgggacatttcaccaaagaacggattgaaaaccttcttctcaagggaaaactacaaggaccatagcatggccccctctctgaaggaactgcgagttctgagcaaccggcgcataggggagaacctgaatgcctccgctagtagcgtcgagaacgagccggcagtaagctccgcgacccaagccaaggaaaaggtgaagaccactattggcatggtgctactgcccaagccacgcgtgccctacccacgcttctcccgattttcccaaagagaacagagatcatacgttgatctcctcgttaagtacgctaaaattccagctaattcaaaagctgtgggtattaataagaatgactatctgcagtacctggacatgaagaagcacgtaaacgaagaggtgactgagttcctgaaattcttacagaatagcgccaaaaagtgtgcccaggactataatatgctctctgatgacgcgcgactgtttaccgaaaaaatattgcgtgcgtgcatagaacaggtaaagaagtattctgagttttacacactgcacgaagtaactagtctgatgggattctttccatttagagtcgaaatgggccttaagctcgaaaagacgcttctggcattgggctccgtgaagtatgtgaaaactgtattcccatcaatgccaattaagctccagctctccaaagacgatatcgccaccatcgagacctcggaacaaaccgcagaggccatgcactatgatatttcgaaggatccaaatgccgagaaactcgtttcacggtaccatccacagattgccctgacttcccagtcattattcacactgttgaacaatcacggtcccacatacaaagagcagtgggagatacctgtttgcattcaagtcattcccgttgcagggtcaaaacctgtcaaggtgatctacatcaactcccccctgccacaaaaaaagatgaccatgcgcgagcggaatcagatttttcatgaggtacctcttaagtttatgatgtcaaagaacacaagcgtccccgtgagtgcagttttcatggacaaaccagaggaatttatatctgagatggatatgagctgcgaggtcaacgagtgcagaaaaattgagagcctcgagaacctgtatctggactttgacgatgatgtaacagaactcgagacattcggggtgacaacaaccaaggtgtctaagagccctagccccgcttcgacgtcgaccgtccctaacatgaccgacgcccccacggcacctaaggcaggcactaccacagtggcccctagcgcgcctgacatctccgcgaatagccgttccctgagccaaatcttgatggagcagctgcagaaggagaaacagctggtgaccggcatggatggtgggccagaggaatgcaaaaacaaagacgaccaggggttcgagtcttgcgagaaggtgagcaacagtgataagcccttgattcaggactccgatctgaagacctcggatgccttgcagttggagaactctcaggaaatagagacaagcaataagaacgacatgaccattgacatcctacacgccgacggagagcggcccaatgttctggagaatctggacaattccaaggagaagacggtgggctccgaagcagctaaaaccgaggacaccgtgctctgctcgagcgacaccgatgaagagtgcttaattattgataccgaatgcaaaaataattctgacggaaagaccgctgttgtggggtcaaatttgagcagtaggccagcctccccaaactcctcctcaggtcaggcatccgtgggaaaccagacaaataccgcctgttccccagaagagagctgcgtgctgaagaaacctataaaacgggtgtacaaaaagttcgacccagtcggagagattctgaagatgcaggatgagctgctgaagcccatttcacggaaggtgcccgagctccccctgatgaatctggaaaattctaagcaaccttccgtgtctgagcagttgtcaggcccaagtgattctagtagttggcctaaaagtggctggccctccgcctttcagaagcctaaggggcgactcccttatgagctccaggattacgtggaagacacctcagaatatctagcgccccaggagggaaacttcgtatacaagctattttctctgcaggacctgctgttgctggttcggtgtagcgtgcagcggatcgagacgcgaccccgttccaaaaaacgtaagaaaatacggcgccagtttccagtgtacgtcctgcccaaggtggagtaccaggcgtgttatggggtggaagcgctcaccgaaagtgaactttgcaggctctggacagagtcacttttgcacagtaattcgagcttttacgtgggccacattgacgcattcacttcgaaactgtttctgctggaagaaatcacctccgaagaactaaaagagaaactgagcgccctcaaaatttccaatctcttcaatattcttcagcacattctgaagaagctctcctcattacaggaaggctcctacctcctgtcacatgctgctgaggattctagcctgctaatttacaaggcatccgatgggaaggttacccgcacagcttacaatctgtacaaaacccattgtggcctcccaggtgtaccatccagcttatccgtgccatgggtccccctggatccctcactcctcctcccctatcatatacatcacggaaggatcccctgtacgtttcctccaaaatcactcgacaccactacccagcagaagatcggcgggacgcgtatgcctacccggagccatcggaatccagtgtccatggaaacaaagagctcctgtctcccggcacagcaagtggagactgaaggtgttgcccctcacaaacgcaagatcacttag

SEQ ID NO: 197430 - DNA, 2538 bp, synthetic construct
  misc_feature 1..2538: note = Description of Artificial Sequence: Synthetic coding sequence
  source 1..2538: mol_type = other DNA
atgaagaagcacgtgaacgaggaggtgaccgagttcctgaagttccttcagaactccgcaaagaaatgtgcccaagactataacatgcttagcgatgatgccaggctcttcactgagaaaattctgagggcctgtatcgagcaggtcaagaagtactctgaattctacacgctgcatgaagtaacctccctgatggggtttttcccattccgggtggaaatgggtctcaagctggagaaaacgttgctggcgctgggatcagtcaagtacgtgaaaacggtgttccctagcatgcctatcaaactccagttgtccaaagatgacatagctactattgaaacatctgagcaaacagccgaagctatgcactatgacatcagcaaagacccaaacgccgaaaagcttgtctccagatatcacccacaaatcgcattgactagccaaagtctcttcactcttctgaataaccacggtccaacctataaggaacagtgggaaataccggtctgtattcaggtaatccccgttgctggcagtaaacctgtgaaggtgatatatataaacagcccacttccccaaaaaaagatgaccatgcgggaacggaaccagatttttcatgaggtgccactgaaatttatgatgtccaagaatactagcgtgcctgtgagcgctgtgtttatggataagcctgaggagttcattagcgagatggatatgtcctgtgaggtaaacgagtgccgaaagatcgaatccctcgagaacctgtatcttgacttcgatgatgacgttaccgagctcgagacttttggagtcactacaacgaaagtttccaagtctccctctcccgccagtaccagcactgtccctaacatgacagacgcccccaccgccccaaaggctggaaccacaacagtagctcctagtgctccagacatcagcgctaattcccgctctctgtcacaaatcttgatggaacagttacagaaggaaaagcagctcgtgaccggcatggatggcgggcccgaagaatgtaagaataaagatgatcaaggcttcgagagttgtgagaaggtttctaactccgataaacccctaattcaggacagcgatctcaagacgagcgatgccctgcagctcgagaatagccaggagatagagacctctaacaagaatgacatgacaattgatatcctgcacgctgatggcgagcggccaaacgtgctggaaaacctggacaatagcaaggagaaaaccgtcggcagcgaggcggccaagaccgaggacacagtgttatgttcttcagataccgatgaagagtgcctgatcattgataccgagtgtaagaataactcagatggcaagactgccgttgtcgggtctaacttatcaagcaggcctgcttctcctaatagctccagtggacaagccagtgtgggcaaccagactaatactgcctgcagcccagaggagtcttgtgtgctgaagaaaccgattaaaagagtgtacaagaaatttgaccctgtgggcgagatattgaaaatgcaagatgagctccttaaacccatctcaagaaaagtgcccgagttgccattaatgaatttagaaaactccaagcagccctcagttagcgaacaactgagcggcccaagtgattctagctcctggcctaaatccggatggccatccgcctttcaaaaacctaaaggcagactgccctacgaactgcaggattatgtcgaagacacatcagaatatctcgctccccaagaggggaatttcgtctataagctgttcagcctccaggatctgctgttgttggtcagatgttccgtccagcgcatcgaaacacgaccccgcagcaagaaacggaagaagatcagacgccaattcccagtgtatgtgcttcctaaagtagagtatcaggcatgctacggtgtggaggccctcactgaatcggaactttgcaggctgtggaccgagtccctcctgcattctaattctagcttttatgttgggcatattgatgcattcactagcaagctgttcctactagaggagattacttcagaagagcttaaagagaaactctcagccctcaagatcagtaatctgtttaacatactgcagcatatactaaagaagcttagctctcttcaggagggaagctatctgctcagccacgccgcggaagacagcagtctgctcatttataaggccagcgacgggaaagtcactcgcaccgcctataacttatacaagactcattgcggccttcccggcgtaccttcttccctctccgtgccctgggtgccactggacccgtccctactgcttccctaccacatccatcatggcagaattccgtgtactttccctcctaaatctttggataccaccactcagcagaagattggaggtacaaggatgccaacgagaagtcacagaaatccagtctccatggagacaaaaagttcctgtctgccagctcaacaggttgaaacggagggagtagccccccataagcgaaagattacctag

SEQ ID NO: 197431 - DNA, 1017 bp, synthetic construct
  misc_feature 1..1017: note = Description of Artificial Sequence: Synthetic coding sequence
  source 1..1017: mol_type = other DNA
atgagcagcaagatggtgatcagcgagcccggcctgaactgggacattagccccaagaatggcttaaaaaccttcttttcccgagagaactacaaagaccattccatggcgcccagccttaaggaactgagggtgcttagcaacagaagaattggcgaaaacctgaacgcgtccgcttcttctgttgaaaacgaaccagccgtaagctcagccacgcaagctaaggagaaggtgaagaccactatagggatggtgctgctgcccaaaccgcgggtgccttacccccggttttctcgcttctcacagcgggagcagcggagctacgtggacctgctagtgaagtacgcaaagattcccgccaatagcaaagctgtcggaattaataaaaatgattacctccaatacctggacatgaagaagcacgtcaatgaggaggtcaccgagttccttaagtttctccagaattccgctaaaaaatgcgctcaagattataacatgctatctgatgacgcacggctgttcaccgagaagattcttagagcgtgcattgagcaggtgaaaaagtactctgagttttacactctccatgaagtgacatcgctcatgggcttcttcccgtttcgggttgaaatgggactgaaactggagaaaaccttactggctctgggcagtgtcaagtacgtgaagacagtgtttccaagtatgcccataaagctgcagctctctaaagacgacatcgctaccatagaaacttccgagcagactgctgaggcaatgcactatgacatctctaaggacccaaatgcagagaaactcgtttcaagataccatccccaaattgctctcactagtcaatccctcttcacattactgaacaaccacgggccaacgtataaagagcagtgggaaattccggtttgtatccaagtcattccagtggcaggctccaagcccgttaaggtgatttatattaactcaccgcttcctcagaagaagatgaccatgcgggagcggtag

SEQ ID NO: 197432 - DNA, 438 bp, synthetic construct
  misc_feature 1..438: note = Description of Artificial Sequence: Synthetic coding sequence
  source 1..438: mol_type = other DNA
atgagcagcaagatggtgatcagcgagcccggcctgaactgggacattagcccaaagaatggattgaaaaccttcttctcacgggagaactataaagaccacagcatggcaccttctctgaaggaactgagggttctctccaatcggcgcatcggcgagaacctgaatgccagcgcatcatcggtggagaacgagcccgcagttagctccgcgacacaggcgaaggagaaagttaagacaacgatcgggatggtgttactcccaaagccccgggtgccgtaccctcggttctctcgtttcagccaacgggagcaacgctcatacgtggacttgctcgtcaaatacgccaaaatcccggcaaattctaaggccgtcgggattaataagaacgattacctgcaatacttggacatgaaaaagcatgtgaatgaagaatag

SEQ ID NO: 197433 - DNA, 300 bp, synthetic construct
  misc_feature 1..300: note = Description of Artificial Sequence: Synthetic coding sequence
  source 1..300: mol_type = other DNA
atgagcagcaagatggtgatcagcgagcccggcctgaactgggacatcagccccaagaacggtctgaaaaccttctttagtcgggagaattataaagatcactccatggcgccgtccctgaaagagctcagggttctgtcgaataggcgaataggtgagaacctcaatgcatcagctagctcagtagagaacgagccagccgtctcctcagccacccaggcaaaagaaaaagtgaagaccaccatcggtatggtcctgctccccaaacccagggtgccttatcccagattcagtagatag

SEQ ID NO: 197434 - DNA, 285 bp, synthetic construct
  misc_feature 1..285: note = Description of Artificial Sequence: Synthetic coding sequence
  source 1..285: mol_type = other DNA
atgagcagcaagatggtgatcagcgagcccggcctgaactgggacatttctcccaagaatggactcaagacctttttttcccgagagaactacaaggaccacagcatggctccatctctgaaagagctgagggtgcttagcaatagacgaatcggagagaaccttaacgcatcagccagttccgttgagaacgagcctgcagtgagctcagccacccaggctaaagagaaggtgaagaccactatcggcatggtcttgctgcctaagcccagagtgccttactag

SEQ ID NO: 197435 - DNA, 846 bp, synthetic construct
  misc_feature 1..846: note = Description of Artificial Sequence: Synthetic coding sequence
  source 1..846: mol_type = other DNA
atgggccagaagaagcagcggcccgcccgggccggccagccccactcgagcagtgatgcagctcaagcccccgctgaacagcctcacagctcatctgatgccgcccaagccccatgccctagagagaggtgtctggggccaccaacaacccccggcccatatcgttccatctatttttcaagtcctaaggggcacctcacccggctgggcctagagttttttgatcagccagcggtgcctcttgcacgagcatttctgggacaggtgctggtgcgacgtcttcctaacggcacagaactacggggacgaattgtggaaacagaagcctatctgggacctgaggatgaggctgcacacagccgcggcggtaggcagaccccaaggaatcggggaatgtttatgaagcccggcaccttgtatgtatacatcatctacggcatgtacttttgcatgaacatcagtagtcagggggacggtgcctgtgtgctcctgcgcgcactcgaaccactcgaaggccttgagacaatgcgacagctgaggagcacactgagaaaagggacagcttcgcgagtcctaaaagatagggaactgtgttccgggccaagcaagctgtgccaggccctggcaattaacaaatccttcgaccagcgagacctcgcacaagacgaggccgtgtggctggagcgcgggcctctcgaaccctctgagccagccgtggtggccgcggcaagagtgggagtggggcacgctggagaatgggcccgcaagccactgcgtttctacgtacgcgggtcgccttgggtaagcgtggtcgatcgggtggctgagcaggatactcaagcctag

SEQ ID NO: 197436 - DNA, 924 bp, synthetic construct
  misc_feature 1..924: note = Description of Artificial Sequence: Synthetic coding sequence
  source 1..924: mol_type = other DNA
atggaggccgacaaggacgacacccagcagatcctgaaggagcacagccctgacgagtttatcaaggacgagcagaacaaaggacttattgacgagatcactaaaaagaacattcagctaaagaaagagatccagaagctggagactgaattacaggaggcgactaaagagtttcagatcaaggaagatatacccgagactaaaatgaaatttctcagtgtcgaaacacccgaaaatgattctcagctaagtaacatatcgtgttcctttcaggtcagcagcaaggttccctacgagatccagaagggccaagccctcattacctttgagaaggaagaggtagcacagaacgttgtctcaatgagcaagcaccatgtccaaatcaaggacgttaacctcgaggttacagccaagccagtacctctaaactccggcgttagattccaggtttacgttgaggtgagcaagatgaaaataaatgttacagagatccctgacaccctgcgcgaagaccagatgagggacaaactggaactctcctttagtaagtccagaaacggaggaggagaggtcgaccgggtggactatgacagacagtccgggtcagctgtgatcacgttcgtggagatcggtgtggcagataaaattttgaagaaaaaagagtatcccctctacatcaaccagacttgtcaccgcgttactgttagcccctacacagagatccatttaaaaaagtatcagatattctcgggcaccagcaaacgcacggtattgctcaccggcatggagggcattcagatggacgaggagattgtcgaagatctcatcaacatccactttcagagagcgaagaacggaggaggggaagtcgatgtggtgaaatgttcactaggccagcctcatattgcttactttgaagagtag

SEQ ID NO: 197437 - DNA, 90 bp, synthetic construct
  misc_feature 1..90: note = Description of Artificial Sequence: Synthetic coding sequence
  source 1..90: mol_type = other DNA
atggaggccgacaaggacgacacccagcagatcctgaaggagcacagccccgacgaattcatcaaggatgagcagaacaagggcctgtag

SEQ ID NO: 197438 - DNA, 1185 bp, synthetic construct
  misc_feature 1..1185: note = Description of Artificial Sequence: Synthetic coding sequence
  source 1..1185: mol_type = other DNA
atgagccgggagatgcaggacgtggacctggccgaggtgaagcccttggtcgagaagggtgagacaatcaccgggcttctacaggagttcgacgtacaggaacaggacatcgagacactccacggttcagtccacgtgaccttgtgtggtacacctaaggggaataggcctgtgatcctgacctatcatgacatcggcatgaaccataaaacatgctacaatcctttgtttaattacgaggatatgcaggagattacccagcatttcgcagtttgccatgtcgatgcacccgggcagcaagatggggctgcgtcatttcctgccggatacatgtacccgagcatggaccagcttgccgagatgctgccgggtgttctacagcagtttggcctcaagtcgataattggcatgggaacaggcgccggagcttatattttaacgcgatttgcccttaataatccagaaatggttgaaggcctcgtcctaataaacgtgaatccctgtgcggaaggatggatggattgggcggctagtaaaatttcaggctggacgcaggcactgcccgacatggttgtgagccatctgtttggcaaggaggaaatgcaatctaacgttgaggttgtccacacataccgccagcacatcgtgaacgatatgaatcctggcaacctgcacttgtttattaatgcttataactcccgtcgggatctagaaatagaacgtcctatgccaggtacccacaccgtcacattgcaatgtcccgccttgctagtggttggagacagcagccccgctgtagacgccgtcgtggagtgcaactccaagctcgaccctactaagacaactctcctgaaaatggccgactgtggtggtttgccccaaatcagccagccagctaagctcgccgaagcatttaagtatttcgtgcagggtatggggtacatgccctctgctagcatgacccgtttgatgaggtcccgaacggccagcggcagtagtgttacatccctcgacggtactaggagccggagccacacctccgaagggacgagatctaggtcacacaccagcgagggaacccggagccgtagtcataccagcgagggagcacacctggacatcactcccaactctggcgctgccggaaattccgcaggtccgaaatccatggaggtgagctgttag

SEQ ID NO: 197439 - DNA, 975 bp, synthetic construct
  misc_feature 1..975: note = Description of Artificial Sequence: Synthetic coding sequence
  source 1..975: mol_type = other DNA
atgagccgggagatgcaggacgtggacctggccgaggtgaagcccttagttgagaagggagagacgataaccggcctgctgcaagaattcgatgtgcaggaacaagacattgagacactgcatggcagcgttcacgtcaccctgtgtggaacacctaaggggaataggcccgtgattctgacctatcacgatatcgggatgaatcacaaaacctgtgcatacattttgacccgtttcgcactaaataatccagagatggtggaaggactggttctgatcaacgttaacccttgcgccgaaggctggatggattgggccgcctcaaagatttccgggtggactcaggcactaccagacatggtggtctcgcatctctttggtaaagaagagatgcagtctaacgttgaagtggttcatacttaccgccaacacatcgtcaatgatatgaatccagggaacttgcatctgttcatcaatgcttacaacagccggagagacctcgaaatagagcgtccaatgccaggtacacataccgttactttacaatgccctgccttactggtcgtgggggactcatctcctgctgtggacgccgtggttgaatgtaattcaaagctggaccccacgaaaacaacattactgaaaatggcagactgtggcggcctccctcagatcagccaacctgccaaattggctgaagcatttaaatacttcgtgcagggaatgggctacatgccgtcggcctccatgacaagacttatgaggagccggacagcatcggggtcctcagtcacatcgctcgatggcaccaggtcgagatctcacacaagtgagggcacaagatctcgtagccacacttctgaggggaccagaagccggtctcatacctctgagggagcgcacctggatatcacacctaattctggcgcagctggaaactcggcagggccaaaatccatggaggttagctgttag

SEQ ID NO: 197440 - DNA, 1185 bp, synthetic construct
  misc_feature 1..1185: note = Description of Artificial Sequence: Synthetic coding sequence
  source 1..1185: mol_type = other DNA
atgagccgggagatgcaggacgtggacctggccgaggtgaagcccctcgtggagaaaggcgagacaattactggcttgctgcaggagtttgacgtgcaagagcaggatatagagactctgcatgggagtgtccatgtgacattgtgtggaactcccaagggcaatagaccagtgatcctgacttatcacgacatcggtatgaaccacaaaacctgctataacccgttgttcaactatgaggatatgcaggagatcacgcaacatttcgcagtgtgccacgttgacgcacctgggcagcaggatggggcagcctcattcccagcagggtacatgtatccgtctatggatcagctagcggaaatgctccccggagttctgcagcagtttgggctgaagtccattattggcatgggcacaggagccggtgcctacattctgaccagattcgctcttaacaacccggagatggtggaagggctggtgctgataaacgtcaacccatgtgccgaggggtggatggattgggcggcgtccaagatctcaggctggactcaggcactgcctgacatggtggtgagtcacctttttggcaaggaagagatgcagagcaacgtcgaagtcgtccacacgtatcgacaacatatagtgaatgacatgaatcctggcaacctgcacctgttcatcaacgcttacaacagccgtcgcgatctggagatcgagcggcctatgccaggcactcataccgtcaccctccagtgccccgccctgttagtagtgggtgactcttcaccggcagtggacgccgtggtggagtgtaattcaaaacttgaccccacaaaaaccacgcttctgaaaatggcagactgcggcggtcttcctcaaataagccagccggccaagctcgctgaagcttttaaatacttcgtccaagggatggggtacatgccctccgcatctatgacaaggctgatgcggtcacgaaccgcctcaggctcatccgtcacctccctggacggtacccgatctcgctcccatacttctgagggcactcgtagtcggagtcacacctccgagggaactcggagcaggtcacacaccagtgaaggagcgcatcttgatatcacccctaacagcggcgccgccggaaatagtgccgggcctaaaagtatggaggtgagctgctag

SEQ ID NO: 197441 - DNA, 498 bp, synthetic construct
  misc_feature 1..498: note = Description of Artificial Sequence: Synthetic coding sequence
  source 1..498: mol_type = other DNA
atgagccgggagatgcaggacgtggacctggccgaggtgaagcccctggtcgagaagggagagacaataacagggctcttgcaagagttcgacgtgcaggaacaagacattgagacccttcatggctccgtgcatgtgaccctgtgcggcacacccaaaggtaatcggcctgttatccttacttaccatgatatcggaatgaaccacaagacctgctacaatcctctgtttaattacgaagatatgcaggaaattacacagcacttcgcagtttgtcatgttgatgccccagggcagcaggacggggcggccagcttccctgctgggtacatgtacccttctatggatcagttagccgaaatgcttcctggggtgttacagcagtttggtttaaaatcgataatcggtatgggcacaggtgcgggcgcgtatatcctgacacggttcgccctgaacaaccctgaaatggtggagggactggtcttgatcaatgtatag

SEQ ID NO: 197442 - DNA, 477 bp, synthetic construct
  misc_feature 1..477: note = Description of Artificial Sequence: Synthetic coding sequence
  source 1..477: mol_type = other DNA
atgagccgggagatgcaggacgtggacctggccgaggtgaagcccctagtggagaaaggagaaacaatcacaggcttgctgcaggaattcgatgtgcaggagcaagatatcgaaactctgcatggttcagtgcatgtgactctgtgtggcacgcctaaaggcaaccgccctgttatcctgacatatcatgacataggtatgaaccataagacctgttataaccctttgttcaactacgaagatatgcaagagattacccagcacttcgctgtgtgccacgtggacgcgcctggacagcaggacggcgccgctagttttccagccggatacatgtatccctctatggatcagctcgccgagatgctgcccggcgtcctgcagcagttcggcctgaagtccattattggtatgggcactggagcaggcgcatatatcctgacccggtttgcgctgaataatcccgaaatggtcgagtag

SEQ ID NO: 197443 - DNA, 402 bp, synthetic construct
  misc_feature 1..402: note = Description of Artificial Sequence: Synthetic coding sequence
  source 1..402: mol_type = other DNA
atgagccgggagatgcaggacgtggacctggccgaggtgaagcccctagtcgagaaaggggagacgattacgggactgctgcaagagttcgatgtacaggaacaggatatcgaaacattacacggatccgtgcacgtgaccctgtgcggtacccctaaagggaacaggccagtaattcttacctaccacgacattgggatgaaccacaagacctgctataatccattattcaattacgaggatatgcaggagataacgcagcactttgcagtgtgccacgtggatgcacccggacagcaggatggtgcggcttcgttccctgccggttacatgtatccctccatggaccaacttgctgagatgcttccaggggtgctgcagcagttcggactgaaatcctag

SEQ ID NO: 197444 - DNA, 477 bp, synthetic construct
  misc_feature 1..477: note = Description of Artificial Sequence: Synthetic coding sequence
  source 1..477: mol_type = other DNA
atgagccgggagatgcaggacgtggacctggccgaggtgaagcccttagtggaaaagggcgaaacgattacgggcctactgcaggagttcgacgtacaggagcaggacattgagaccctgcatggttcagtacacgtcacgctttgcggcactcctaagggcaatcgccctgtgatattaacataccacgacatcggcatgaaccataagacgtgctataaccccctgtttaattatgaagacatgcaggagattacgcagcactttgccgtgtgtcacgtcgacgccccagggcagcaggacggcgccgcttcttttcctgcgggatacatgtacccttcaatggaccagctcgccgagatgctccctggggttctacagcagttcgggctgaagagtattatcggaatggggaccggggccggcgcctacatccttaccaggttcgccctgaataatcccgagatggtggagtag

SEQ ID NO: 197445 - DNA, 669 bp, synthetic construct
  misc_feature 1..669: note = Description of Artificial Sequence: Synthetic coding sequence
  source 1..669: mol_type = other DNA
atggactgggccgccagcaagatcagcggctggacccaggccctgcccgacatggttgtgagtcacctgttcgggaaagaagagatgcaatccaacgtagaagtggtgcacacttacaggcagcacatagtgaatgatatgaatcctggtaatctccatctgttcataaacgcctataactcacgtagggacttagaaatcgaacggcccatgccaggaactcacaccgttactctgcaatgtcctgctttactggtggtcggcgacagttctccagccgtggacgccgtggtagagtgtaactccaaactggaccccacaaagactactctactgaagatggcggactgtggcgggctgccccaaattagtcagccggcaaaattggctgaagcattcaaatacttcgtgcagggcatgggctacatgccttcggcatccatgaccagactgatgaggtccagaacagctagcggttcttctgtgactagtttggacggcacacggtcccgttctcacacgtcggagggcacgcggagccggagccacacttcagagggtacacgttcaaggtcacacacaagcgaaggagcacatctggatatcactcccaacagtggtgccgctgggaactccgccggaccaaagagcatggaagtgtcatgctag

SEQ ID NO: 197446 - DNA, 450 bp, synthetic construct
  misc_feature 1..450: note = Description of Artificial Sequence: Synthetic coding sequence
  source 1..450: mol_type = other DNA
atgagccgggagatgcaggacgtggacctggccgaggtgaagcccctggttgagaagggggaaactatcaccggcctgttgcaggagttcgacgttcaggagcaggacatcgagaccctgcacgggtctgtgcacgtcaccctgtgtgggaccccacccgccaagctggctgaggctttcaagtacttcgttcaagggatgggctatatgcctagcgcatcaatgacacgactgatgagatcacgaaccgcctccggcagctccgtcacatctctggatggaactagatcacgctcacacacatcagagggaacgaggtcccgcagccacactagtgaaggcactcgcagcaggtctcatacaagcgaaggagctcacttggatattactccaaattctggagcagcaggaaactccgccggtccaaaatcaatggaagtgagctgttag

SEQ ID NO: 197447 - DNA, 942 bp, synthetic construct
  misc_feature 1..942: note = Description of Artificial Sequence: Synthetic coding sequence
  source 1..942: mol_type = other DNA
atgcaggagatcacccagcacttcgccgtgtgccacgtggacgcccccggtcagcaggatggcgccgcaagttttccagctgggtacatgtacccttccatggatcagctggccgagatgctccctggagtgcttcagcaatttggactcaaatccattatcgggatgggaactggagccggcgcctacatcttgacccgtttcgcccttaataatcctgaaatggtggaaggtttggtactcattaatgtgaacccgtgtgcggagggctggatggattgggccgccagcaagatatcaggctggactcaggctctgccagacatggtagtttctcacttgtttggaaaagaggagatgcagtccaacgtcgaagtggttcatacttaccgccaacacattgtgaatgatatgaaccctggcaacctccatcttttcataaacgcatataattcacggagagatctggaaattgagcgccctatgccagggactcacactgtgactctccagtgccctgccctgctcgtggtgggcgactcttcacccgcggtcgacgctgtagtggaatgcaatagcaagttggacccgacaaagaccactctcctcaagatggcggactgcggagggctgccccagattagtcaaccagcgaaactagccgaagcttttaaatatttcgtccaaggaatggggtacatgccaagcgccagtatgacaagattaatgcgctcccggacagcctcaggatcttctgtgacgagcctggacggcacgcgatccagatcccacaccagtgaaggaactcgttcgagatcccacacaagcgaagggacgaggagtagatcacatacctctgagggagcacatcttgatattacccctaactctggcgccgccgggaactccgcagggcctaaatctatggaagtgtcatgttag

SEQ ID NO: 197448 - DNA, 288 bp, synthetic construct
  misc_feature 1..288: note = Description of Artificial Sequence: Synthetic coding sequence
  source 1..288: mol_type = other DNA
atgagccgggagatgcaggacgtggacctggccgaggtgaagcccttggttgagaagggcgagacaattacaggtctgcttcaggagtttgacgtgcaaacgaagcctgctactacaccgtcttctacaacccgtacttgccgtcgctcaccgagcacacttcccagcgccacttggacccccctggccagtcgcacagctcaacccccgagtccgcaaggcacatgcacacctccatggatctcatggctgaagtgtttcctcgaaagcttcaatagcctgggctag

SEQ ID NO: 197449 - DNA, 1491 bp, synthetic construct
  misc_feature 1..1491: note = Description of Artificial Sequence: Synthetic coding sequence
  source 1..1491: mol_type = other DNA
atggccgacgagagcgagaccgccgtgaagccccccgccccccccctgccacaaatgatggaaggcaacggcaatgggcacgaacattgttccgactgtgagaatgaggaggacaattcatacaaccgcggcggtctctcacctgccaacgatacaggcgccaagaagaagaagaagaagcagaaaaaaaaaaaggagaagggcagcgagaccgattctgcccaggatcagcccgtcaagatgaacagcctgccagccgaacgcatccaggagatacaaaaggctattgagctatttagtgtgggccagggccccgcgaaaacaatggaagaagctagtaaacgctcataccagttctgggatacccagccagtgcctaaacttggggaggttgtgaacacacacggaccagtcgagccagacaaagacaacattcgccaggagccatacaccctccctcagggcttcacttgggatgctctggatttaggcgaccgtggcgtgttaaaggaactgtatacactgttaaatgaaaactacgtagaggacgacgacaatatgtttagattcgattattctcccgaatttttgctttgggccctgagacctccagggtggctgcctcaatggcactgtggcgtcagggtggtttcttctagaaagttggttgggttcatcagtgccatcccagccaacattcatatctacgataccgagaagaaaatggtggagatcaactttctgtgtgtgcacaagaaattgaggtcaaaacgtgtcgcccctgtgctgatacgagaaattactcgccgcgtgcatttggagggcatttttcaggccgtctacacggccggcgtcgtgttgccaaagccagtggggacttgtagatattggcacagatccctgaacccccgcaagctcatcgaggtgaagttttcgcacctgagtcgtaatatgactatgcagagaaccatgaagctctacaggttgcctgaaactcccaagacagccggcctacggccaatggagacgaaggatatcccagtcgttcatcagctgctgaccaggtaccttaaacagttccatctcacacccgtcatgtcccaagaggaagttgaacactggttctacccccaggaaaacatcatcgatacatttgtggtggagaatgcgaatggagaggttactgatttcctatcattctacacgcttccgtcaacgatcatgaaccacccaacccataaatctttaaaggccgcttattcgttctataacgttcacacacagacgccgctcctggatctgatgagcgacgcactagtgctggcaaagatgaaaggcttcgacgtgtttaatgctttagacctgatggaaaataaaacatttctagaaaaactgaaattcggtattggagacgggaatctgcagtattacttgtataactggaagtgtccttccatgggcgccgagaaagttgggctcgttctgcagtag

SEQ ID NO: 197450 - DNA, 414 bp, synthetic construct
  misc_feature 1..414: note = Description of Artificial Sequence: Synthetic coding sequence
  source 1..414: mol_type = other DNA
atggccgacgagagcgagaccgccgtgaagccccccgccccccccttgccccagatgatggagggcaatggcaacggacacgaacactgctccgactgcgagaatgaggaggacaattcgtacaacagagggggactgtcaccagcaaacgatacgggagctaagaaaaagaagaagaagcagaaaaagaagaaggagaaaggaagtgagacagatagtgctcaggaccagccagtcaagatgaattccctgccagccgaaagaattcaggaaatacagaaagctatcgaactcttctccgttggccaggggccagccaaaaccatggaagaagccagtaagcgctcttatcaattctgggacactcaaccggttcctaagctcgcaaagcgcactgttcacccacctgagtag

SEQ ID NO: 197451 - DNA, 1491 bp, synthetic construct
  misc_feature 1..1491: note = Description of Artificial Sequence: Synthetic coding sequence
  source 1..1491: mol_type = other DNA
atggccgacgagagcgagaccgccgtgaagccccccgccccccccctgcctcagatgatggagggaaatggcaatgggcatgagcactgtagtgactgcgagaatgaggaggacaattcatataatagaggagggctgagccccgcaaatgataccggtgctaagaaaaaaaaaaagaagcagaagaagaagaaggaaaaaggctccgagaccgattccgctcaagatcagcctgtcaaaatgaacagtctgcccgccgagcggattcaggaaattcagaaggcaattgagttgttttcagtcggtcaaggaccggctaaaactatggaagaggcgagcaagcgatcttaccagttctgggacactcagccggtgcccaaactaggcgaagtcgtgaatacccatgggcccgtcgaacccgacaaagacaatataagacaagaaccatacaccctgccccaggggtttacttgggacgccctcgaccttggggatagaggggtcctgaaggagctgtacaccctgcttaacgagaattacgtggaagacgatgacaacatgtttcggtttgattactctcccgaatttctgttatgggcgcttagacctcccgggtggctgcctcagtggcactgcggagtccgagtggtaagcagccggaaattggtaggattcatttcagctattccggcgaacattcatatttacgacaccgagaagaagatggtcgaaatcaattttttatgtgttcataagaaactcagatccaagagagtggcccctgttctgattagagaaattacccgaagggttcaccttgagggaatattccaggctgtgtataccgccggagtggtgctccctaagccagtgggcacctgccggtattggcatagatcacttaacccaaggaaacttatcgaggtgaaatttagtcacctgagccgcaatatgactatgcagaggaccatgaagttatacaggctgcccgagaccccgaaaaccgctggcctgcgacctatggaaacaaaagacatccccgtggtgcaccaactgctcaccagatatctaaagcaattccaccttacaccagtgatgagccaggaggaagtggaacactggttctaccctcaggaaaacattatcgacacgtttgttgtggagaacgctaacggtgaggttacagattttctgtctttctacaccctcccatctactatcatgaaccatccgacacacaagtccttaaaagcagcctattctttttacaacgtacacacacagactccattgctcgaccttatgtcagacgcgcttgtgctcgccaagatgaaaggttttgacgtctttaacgcgttagatctgatggaaaacaagacgtttctggaaaagctcaagtttggtatcggagatggcaatctgcagtattacctctacaactggaaatgcccttctatgggtgccgaaaaggtcggtttggtcctgcagtag

SEQ ID NO: 197452 - DNA, 1590 bp, synthetic construct
  misc_feature 1..1590: note = Description of Artificial Sequence: Synthetic coding sequence
  source 1..1590: mol_type = other DNA
atggccgaggacagcgagagcgccgccagccagcagagcctggagttggacgatcaagacacgtgcggaatagatggcgataacgaggaggagactgagcatgcaaaaggcagtcccggaggatacctcggggccaagaagaaaaagaagaagcagaagcgaaagaaagagaaacctaatagcgggggcaccaagtccgacagcgcttctgattcacaggagattaaaattcagcaaccttcgaaacacaacacaatctggcaacagattagcgctggggcggctatgggttcagcaactatggaaggagagtggaccggaatgcgcaatgaccacaagaacccgtccgtgcccatgcagaagctccaggacatccagagagccatggagctgctgtctgcctgtcagggaccagctcggaacatcgatgaagctgccaagcatcggtaccaattctgggatactcagccagtgccaaagttggatgaggtgataacctcacacggggctattgaacccgacaaggataacgttagacaggaaccgtactcccttccacaaggctttatgtgggatactctggacctctctgatgccgaggtgcttaaggagttgtacaccttgctcaacgaaaactacgtggaggacgacgacaatatgttcaggttcgactattcacccgagttcctcctttgggccttgcgacctcccggctggctcctgcagtggcactgtggcgtgcgtgtgagctcaaataaaaaacttgtgggcttcatttccgccatacctgcaaacatacggatatacgattccgtgaaaaagatggtggagatcaatttcctgtgcgtgcataaaaaattacgctctaagcgtgtcgccccagtcctgatacgtgagatcacgagacgcgttaacctggagggcatcttccaagccgtgtataccgccggcgtggtcctccctaagcccatcgctacttgtaggtactggcaccggtcattgaaccctcgcaaactcgttgaggtgaaatttagtcacctaagccgcaatatgacgctccagcgaactatgaagttatataggctgccagacgtgaccaagacctccggattgcgccctatggaacctaaagacattaagtcagtgagggagctcattaacacatatctcaagcagtttcacctggcacccgttatggatgaagaggaagtggcacattggttcctgccgagggagcatatcattgatacattcgtcgttgagtctcccaatggaaaattgacagactttctttccttttacacgctgccttccacggtcatgcaccaccctgcccacaaaagcctgaaggccgcatatagtttttacaacatacacactgaaaccccgttgcttgatcttatgagcgatgccctgatcctagccaagtccaaagggttcgacgtatttaatgctttggacctgatggagaataagacattcctagaaaagctgaagtttgggatcggtgacggaaacttacagtattacttatataattggaggtgtccaggcactgattccgagaaggttgggctcgtgctccaatag

SEQ ID NO: 197453 - DNA, 1458 bp, synthetic construct
  misc_feature 1..1458: note = Description of Artificial Sequence: Synthetic coding sequence
  source 1..1458: mol_type = other DNA
atgcggcggcggcggagcacccccaaggaggtgctggagggcatctgggagcccaagcggaagcgacggaacaggcgggagaaaagacgaaatcaaattccggaggctcccagtcagaccaggcatctcatcccaaggagactgaagttcagtagtctccgcaatactacaccgtcaggatctagattccaacgagagcagccctggaacccctcagtgcctatgcagaaactgcaggatatccagagagccatggaactgctgtctgcatgccaggggcctgcccggaacatcgatgaggccgcaaagcaccgataccagttttgggatactcagccagttccaaagttagatgaggttattacatcccacggcgccatcgagccagacaaggacaacgtgaggcaagagccctattcgctccctcaggggtttatgtgggacaccctggatctctccgatgctgaagttttgaaggagctgtataccctgctgaatgagaattatgtagaagatgacgacaatatgttccggttcgattacagtccggagtttctcctgtgggcactgcggcccccaggttggctccttcagtggcactgcggggtgcgggtcagctcaaataaaaaattggtcggattcattagcgcaattccggctaatatcagaatatacgatagtgtgaagaagatggttgagatcaacttcttgtgtgtgcacaagaagctgcgatctaaacgggttgcccctgtcttgataagagagattacccggagggtcaacctggaggggatttttcaggccgtgtacaccgccggagtcgtccttccaaaacctatcgccacatgtcgttactggcacagatcccttaatcctcgcaagttagtggaggtgaagttctcgcacctatctaggaacatgacacttcagcggaccatgaaattgtatcgcctgcctgacgttacgaagaccagtggccttcgaccgatggagccaaaggatatcaagagtgtcagggaactgatcaatacatacctgaaacagtttcacctggcacccgtaatggacgaagaggaggtggcccactggtttttgccccgcgagcacatcatcgacacttttgtggttgagtccccgaacggaaaattgaccgactttctgtccttttatactctacctagtacagtgatgcaccaccccgcccacaagagccttaaggcggcctacagcttttacaacatccacacagaaacacctctgctggacctgatgagcgatgccctgatcttggctaagtccaaaggcttcgacgtatttaacgcacttgatttaatggaaaacaaaactttcctggaaaaactcaaatttggcataggcgatggtaacctgcagtattatctgtacaactggaggtgccctgggaccgacagtgagaaggttgggctagttcttcagtag

SEQ ID NO: 197454 - DNA, 1497 bp, synthetic construct
  misc_feature 1..1497: note = Description of Artificial Sequence: Synthetic coding sequence
  source 1..1497: mol_type = other DNA
atggccgaggacagcgagagcgccgccagccagcagagcctggagctcgatgaccaggacacctgtggaatcgacggagataatgaggaggagactgaacacgctaagggatcacctggtgggtatctgggcgccaaaaaaaagaaaaaaaaacagaagcgcaagaaagagaagccaaacagtggaggaacaaagagcgacagtgcatccgactctcaggaaattaagatacagcaaccctcaaagaatccctccgtacccatgcagaagctgcaggatattcagcgcgcgatggaacttctgtcagcatgccaagggcccgctcggaatattgacgaggcagcaaaacacaggtatcaattttgggatacccagcctgtccctaaactggatgaggtgattactagccacggcgcaatcgaaccagataaggacaacgtgaggcaagagccttactctctgccccagggatttatgtgggacacattggatctgagcgatgctgaagtgctaaaggagctctatacactgctgaatgaaaattacgtagaggacgacgacaacatgttcaggtttgactacagcccggaatttctcctctgggcactgagacccccagggtggctgttgcagtggcattgcggggtcagagtgagctcaaacaagaaattggtaggatttatctccgccattccagccaacatcagaatatatgacagcgttaagaagatggtcgagattaatttcctgtgcgtgcacaaaaagctgcggtcaaagagggtcgctcctgttttgattagggagattacccgaagggtgaatctcgaagggatctttcaggccgtgtacacagcaggggtggtcctgccaaagccaattgccacatgccgttattggcataggagcctgaacccaaggaaactggtggaggttaaatttagccacctctctcgcaatatgacacttcagaggactatgaagttgtaccgcctgcccgacgtgaccaagactagtggcctgcggcccatggagcccaaggatatcaaatccgtccgggagctcatcaacacctacctaaagcagtttcacctcgcccccgtcatggatgaggaggaggtcgctcattggtttctccccagggaacatattattgacacctttgtcgtggagtcacccaatggaaagttgacagacttcttgtccttctacacgcttccatctactgtgatgcaccatcctgcccacaaatctctaaaggccgcttattccttctacaacatccataccgaaactcctctccttgatctcatgtcagatgccctgatactggctaagtctaagggatttgatgtttttaacgctctggacctcatggagaacaagaccttcctcgaaaagctgaagtttggcatcggagatggaaatctgcagtactacctctacaactggcggtgcccgggaaccgatagcgagaaagtgggtcttgtgctccaatag

SEQ ID NO: 197455 - DNA, 234 bp, synthetic construct
  misc_feature 1..234: note = Description of Artificial Sequence: Synthetic coding sequence
  source 1..234: mol_type = other DNA
atgagcgacgccctgatcctggccaagagcaagggcttcgacgtgtttaatgcgcttgacctgatggagaacaagactttcctcgaaaagcttaagtttggtattggagacgggaatctgcagtactacttatacaattggcgatgccccggtaccgattctgaaaaaggatccgggaactttgtcaacgccaacgggaaacttttacctgacgtctgtcggcgtcccccttag

SEQ ID NO: 197456 - DNA, 1458 bp, synthetic construct
  misc_feature 1..1458: note = Description of Artificial Sequence: Synthetic coding sequence
  source 1..1458: mol_type = other DNA
atggccagcccctggcggggcgcccacgaggtgctggagggcatctgggaacctaaacgtaaacgacgcaatcgacgtgaaaaacgtagaaatcagatcccagaggccccttctcagactagacacctcatccctcgtagactgaaattcagttcgcttcgcaatacaacaccgtctggaagcaggttccagagagaacagccttggaatccaagcgtgcccatgcagaaactgcaggacattcagagagctatggaactgcttagcgcctgtcaggggcccgcccgcaatatagacgaagccgccaagcatcgataccagttttgggacactcaacccgtgcctaaactagatgaggtaattacatcccacggagcaattgagcctgataaggacaacgttcggcaggagccatactctttgccccagggttttatgtgggatactctggatcttagtgacgccgaggtgcttaaagaactatacacgctgttaaacgaaaattatgtggaagacgacgataacatgtttcgtttcgattactcgcccgagtttttactgtgggcgttacggcctccagggtggctgcttcagtggcactgtggcgtgcgggtttcctctaacaaaaagctggtggggtttatcagtgcgatccctgccaatatcaggatctacgacagcgtgaagaaaatggtggagatcaatttcctttgtgtccacaagaagctccgtagtaaacgggtagcccccgtgttgatccgcgaaatcactagaagggttaacctggaagggatttttcaagcggtctacactgccggagtggtactgcctaagccgatcgctacatgtcggtattggcataggagcctgaacccaaggaagctagtcgaggtcaagtttagtcatctctctaggaatatgacccttcaacgcaccatgaagttgtatcgactgcctgacgtgacaaaaacctccgggctgcgaccgatggaacccaaagacattaaatctgtgcgggagttgataaacacatacctgaaacagtttcatctggctcccgtgatggacgaggaagaagtcgcacattggtttctgcctcgagagcacattatagacacattcgtggtggagagccccaatgggaagttgacagattttctttcattttacaccctccccagcacagtcatgcaccacccagcccacaagagcttaaaagctgcctattctttttataacattcacactgaaaccccccttttggaccttatgtctgatgcactaatcctggctaaaagcaaaggctttgatgtttttaatgcactggatctgatggagaacaagacctttttagaaaaactgaaattcggaatcggggacggcaacctgcagtactatttatacaattggcgctgccccggcacggactcagaaaaggttgggcttgtgttgcagtag

SEQ ID NO: 197457 - DNA, 933 bp, synthetic construct
  misc_feature 1..933: note = Description of Artificial Sequence: Synthetic coding sequence
  source 1..933: mol_type = other DNA
atgttccggttcgactacagccccgagttcctgctgtgggccctgcgtcctcccggttggttgctgcagtggcattgcggggtgcgggtgagtagtaacaagaagctggtgggttttattagcgcgattcctgctaatattcggatctacgactcagttaaaaaaatggtagaaattaacttcctatgtgtgcataagaagctgagatccaagcgagtagcacccgtgctgatccgcgagatcacaaggagagttaatttagagggcatcttccaggcagtgtacactgccggtgttgtgctcccgaagcctattgctacctgtaggtactggcatcggtctcttaatcccagaaagttagtggaggtcaaattctcccacttatcgaggaacatgaccctgcagcggactatgaagctctacagacttcccgacgtcaccaagacttctgggctccgaccgatggagcctaaggacatcaaatccgtgagagagctgattaacacatatctgaagcagtttcacctggcgccagttatggatgaagaggaggttgctcattggttcctgccgcgcgagcacataatcgacacttttgtcgttgaatcaccaaatggaaagctgactgattttctcagcttttataccctcccttccaccgtgatgcaccatcctgcacataaatccctgaaggctgcctattccttttacaatatccacacggagacccccctcctggacttgatgagcgacgctctaatccttgccaaatctaagggcttcgatgtattcaacgccttggacctcatggagaataaaaccttcttggagaagttgaagttcgggataggtgatggcaatctccagtattacctctataactggaggtgccccggcactgactccgagaaggtagggctcgttctgcagtag

SEQ ID NO: 197458 - DNA, 459 bp, synthetic construct
  misc_feature 1..459: note = Description of Artificial Sequence: Synthetic coding sequence
  source 1..459: mol_type = other DNA
atggaggccgtgctgaacgagctggtgagcgtggaggacctgctgaagtttgagaagaagttccaatctgagaaggcggctggttctgtgtccaagagcacccagttcgagtatgcctggtgcctcgtgcgttccaagtataacgacgacatccgcaagggtatcgtccttctcgaggagctgcttcctaaaggatcaaaagaagagcaacgggactatgtcttctacctggccgtgggaaactatcgcctgaaggagtacgagaaagctttaaagtatgttagaggcctactccaaactgagccccagaataatcaggctaaggagctggagcgcctgatcgataaagcaatgaaaaaggacgggctcgtggggatggctatagttggtggaatggctctcggggtggcgggattggccggattgattggtttggccgtctctaaatccaagtcttag

SEQ ID NO: 197459 - DNA, 2076 bp, synthetic construct
  misc_feature 1..2076: note = Description of Artificial Sequence: Synthetic coding sequence
  source 1..2076: mol_type = other DNA
atggccctgctgctgaccctgaccagccccgacctggagggcacctgggatactagggataaggacggatttaaggctcaggaagggcctcccctggccgtccccgaatttccagtatgcgggctgtacaggatctatggcgtgtgcggatcgttctcaagcttcttcataatcaggtgctctctttgcgccctggaaaccctcaagtctccccaacacgatccattggagatccctgagcaatcactgaagcttattcccctcgtgtctggcaagagagagctgacgcgcgggcagaaggccggcgagaaacccttggctgcaggccccggggaggaagagttgctaaggggcagcgcccctcacgctcaggacacccagagtgaggagctcccccctagctgcactatctctggcgaaaaaaagcctccagcagtctccggagaagctactggggccgatgctggcagactctgtcccccaccaagatcgcgtgcccctcacaaggaccgtactctcgcccgtagcagaccccagacccaaggggaggattgttcactgccagttggtgaggtcaagatcgggaaacgctcctacagtcccgcccccggaaagcaaaagaagcctaacgccatggggctcgcacctacttctagtcccggagcacccaattccgctagagccacacacaacccagtgccgtgcggttccgggaggggtccgtgccacctggcaaaccttctcagtacactggcccagtctaaccaaaacagagaccacaagcagggtccacctgaggtcacgtgtcagattcgaaagaaaacccgcactctctacaggagtgaccagctggaagagctggagaaaatcttccaggaggaccactaccctgactctgacaagcggcgagaaattgcccagacagtaggagttacaccccaacgcattatggtcaagggtgccggctccctcgttgccggctggtccggtgggggacccaccattgaaaccctggagctccagtcagagcgatcagcggtggcatgggtttggttccagaaccggagagcaaagtggaggaagatggaaaagctgaacggaaaggaatctaaggataatcctgccgcacccgggcccgcctcctctcagtgtagcagcgctgccgaaatcctaccggccgttcctatggagccaaagccggaccctttcccgcaagaatccccactcgacacatttcccgagccccccatgttactgactagcgatcaaactctggccccaacacaaccgagcgagggggcacagcgagttgtaacaccaccacttttctctcctcctcccgtgcgcagagcagatttgccctttcctctgggtcccgtccataccccacagcttatgcctctgctgatggacgtcgccggtagtgacagctcacacaaggacggtccttgcggttcgtggggaaccagcattacgctgcccccaccatgcagttatcttgaggagctcgagccgcaggactaccaacagtcaaaccaacccgggcccttccagttctcacaggcaccacaaccccctctctttcaatccccccagccaaagttaccttacctgcctacattcccattcagcatgccttcctccttgaccctgccccccccagaagacagcctcttcatgtttccctgcggccctagtggcggcacaagtcagggttactgccctggtgcatcctccggacagatcctgatgcagcctccagcggggaatatagggacggccagctggtcagatccatgcctaccggagctccccttcccaggaccattctgcccacaggccctgggtcacccacccggcggtgacggatacttcccagatctgtttcccaccccatgtccccaggcactgggaaggcagccctccagtgcgctctcctggatgccagagggcgctcgccctggcactgggcctcttctttccaaagcgaaggaggagcctccagctgcatccctggaccagccatccgccttggaggaggcccgaggtgacgataaaaattcccatgtcccttag

SEQ ID NO: 197460 - DNA, 699 bp, synthetic construct
  misc_feature 1..699: note = Description of Artificial Sequence: Synthetic coding sequence
  source 1..699: mol_type = other DNA
atggagcggtgccccagcctgggcgtgaccctgtacgccctggtggtggttctcggactcagggctaccccagccggcgggcaacattacctgcatattagacccgccccctctgataacctaccgcttgtggatctaatagagcacccggacccaatctttgaccctaaagagaaggatctgaatgagaccctcctacgctcgttgctaggcggacactatgaccccggtttcatggcaacctcaccccccgaggaccggcctggcgggggcgggggcgctgctggaggggcggaggacctggcagagctggaccaacttcttcgtcagagaccaagtggggccatgcctagcgagattaagggcctggaatttagcgaaggactcgctcagggcaaaaagcagcggctgagcaaaaaattacggaggaaactgcagatgtggctctggagccagacattctgccccgtactctatgcatggaatgatctgggatcgcgattttggccgcgatatgtgaaggtgggatcctgtttttcaaaacgctcttgctccgtacctgaagggatggtttgcaagccgagcaagtcagtgcacttgacagtccttcggtggagatgtcagcgccgaggcgggcagaggtgcgggtggatcccgatccagtatcccatcatctcagagtgtaaatgttcctgctag

SEQ ID NO: 197461 - DNA, 990 bp, synthetic construct
  misc_feature 1..990: note = Description of Artificial Sequence: Synthetic coding sequence
  source 1..990: mol_type = other DNA
atgggcaccgccgccgccgccgccgccgccgccgccgccgccgccgccggagagggggctcggagcccatcccctgctgctgtaagtctcgggctgggtgtggccgtggtctcttctttggtaaacgggagcacattcgtgctccagaaaaaaggcatcgtccgggctaaaaggcgggggacctcgtacctgactgatatcgtgtggtgggctggcactatcgccatggccgtcgggcagatcggcaatttcctcgcctataccgccgtcccaaccgtgctggtcactcccctgggcgccctcggagtaccatttggatctatcctcgccagctatcttcttaaagaaaaattgaatattctgggaaagctggggtgcttgcttagttgcgcagggagcgtggttctgatcattcattctcccaagtccgagagcgtcacaacacaggctgaactggaagaaaaactgaccaatcccgtgtttgtcggctatctgtgtattgtcctcctcatgttattactgctgattttctggattgcacctgcccatgggcccactaacatcatggtctacatttctatatgctcactcctggggagctttaccgttccttccactaaaggcattggattggctgcccaagacatcctgcataacaaccctagctctcagcgcgctctgtgcctatgcctagtgctgttggcggtgctcggctgtagcatcattgttcaatttagatatattaataaagccctggaatgcttcgattctagcgtgtttggtgccatttattatgtggtgttcacgaccctggtccttctagcatctgccattctgttccgcgagtggtccaatgttggtctcgtggacttcctggggatggcctgcggcttcactactgtaagtgttggtattgtactgattcaggtctttaaggagtttaatttcaatctgggtgagatgaacaagtcaaatatgaaaacagactag

SEQ ID NO: 197462 - DNA, 765 bp, synthetic construct
  misc_feature 1..765: note = Description of Artificial Sequence: Synthetic coding sequence
  source 1..765: mol_type = other DNA
atggccgtgggccagatcggcaacttcctggcctacaccgccgtgccaaccgttctcgtgacgccattgggtgcgctgggagtgcccttcggatccattctcgcttcctatctactgaaagagaaacttaatatcctgggcaaactgggttgtctgctgtcatgcgctgggtctgtggtcctaatcatccactctcccaagtcggagtccgtgaccacacaggccgagctggaagagaaattaacaaaccctgtgttcgttggatacttgtgcattgtcctgctcatgctgctgctgctgattttctggatcgctccagctcacggaccaaccaacattatggtatatatttctatttgcagcctcttaggctcctttactgtgcctagcacaaaggggatcggcttggccgcacaggacattcttcataacaatccctcgagccaacgcgccctgtgtctgtgccttgtgcttttagctgtgttgggttgtagtataatcgttcagttccggtacatcaacaaggcccttgaatgcttcgattcgagtgtgttcggcgcgatttactatgtggtgtttactactctggtgctgctggcctcagcaatcctgtttagagagtggtctaacgtgggactagtggactttctgggaatggcgtgtggtttcaccacagtaagtgtggggatcgtactcatccaggtctttaaagaattcaattttaacctaggggaaatgaataaaagtaatatgaagacagactag

SEQ ID NO: 197463 - DNA, 480 bp, synthetic construct
  misc_feature 1..480: note = Description of Artificial Sequence: Synthetic coding sequence
  source 1..480: mol_type = other DNA
atgctgctgctgctgatcttctggatcgcccccgcccacggccccacaaacattatggtctatatctctatatgttccctattaggttcctttactgtaccatctactaagggcatcgggcttgcggcgcaggacatactgcacaataatccctccagtcagcgagcactctgtttatgcctggttctgctagcagtcctgggatgtagtattattgtccagtttaggtatatcaacaaagctcttgaatgctttgattcatcagtcttcggagctatttactatgtggtgttcactacccttgtgctgctcgctagtgccatcctgttcagggagtggagcaatgttggacttgtggactttctggggatggcctgcggatttaccaccgtctcagtgggaattgtgcttatacaggtgttcaaggaattcaatttcaatctgggtgaaatgaacaaaagtaacatgaagactgactag

SEQ ID NO: 197464 - DNA, 765 bp, synthetic construct
  misc_feature 1..765: note = Description of Artificial Sequence: Synthetic coding sequence
  source 1..765: mol_type = other DNA
atggccgtgggccagatcggcaacttcctggcctacaccgccgtgcctaccgtgcttgtgacgcccctaggcgccctcggagtgccctttgggtcgatcctggcttcatatttgctgaaggagaaactaaacattctgggaaagctaggttgtctcctgtcctgtgcggggtcggttgtcctgattatccactccccaaagagtgaaagcgtaactacccaggcggagctggaagaaaaactgacaaatcctgtttttgttggctatctctgtatagttctgctaatgcttctgctcttaatcttctggattgccccggcacacggccctacaaacatcatggtctacatcagcatctgctcgctgttgggatcatttacagtcccctcgaccaaaggaatcgggctggcagcgcaggatatcctccataacaatccgtcctcacagagggcgctgtgtctgtgcctcgttctactggctgttttgggctgctccattatcgtgcagttcaggtatatcaacaaagctctggagtgctttgactccagcgtctttggcgccatctattacgtggtatttaccaccttggtgctgcttgcaagtgcaattctgttccgggagtggagcaatgtagggctcgtggactttcttggtatggcgtgcggctttacaacagtttctgtaggaatcgtgttaatacaggtgttcaaagagtttaactttaacttgggggagatgaataagtcaaatatgaaaacggactag

SEQ ID NO: 197465 - DNA, 1083 bp, synthetic construct
  misc_feature 1..1083: note = Description of Artificial Sequence: Synthetic coding sequence
  source 1..1083: mol_type = other DNA
atgagccagggccggggcaagtacgacttctacatcggcctgggcttggcaatgagctcttctatcttcatcggagggagttttatcctcaaaaagaaaggtttgctccggctcgctaggaaaggctcaatgagagcaggacagggtggtcacgcctacctgaaggaatggctctggtgggccggcctgctgtctatgggtgcaggtgaggtggcaaacttcgccgcctatgcgtttgccccagccactctggtaacacctctcggtgccttgagcgtcctggtgtccgctatcttaagctcgtacttccttaacgagagactgaatctccacggcaaaatagggtgtttacttagcatattgggcagcactgtgatggtcatccacgcccccaaagaggaggagattgagaccttgaacgagatgtcacacaaactgggcgaccctggctttgtggtgtttgccaccctggtcgtgatcgtggcgctgattttaatatttgttgttgggccccgacacggacagaccaatatactagtgtatattaccatctgcagtgtcataggagcttttagcgtgtcatgtgtcaagggcttggggattgccatcaaggagctatttgcaggcaaacccgtactgaggcatccactggcttggatactgctgctaagcctgattgtgtgtgtgagtacccagattaactacctgaacagagctctggacatttttaatacatctatcgtcacccccatctattatgtctttttcacgacttcagtgctgacgtgcagcgcaatattatttaaggagtggcaggacatgccagtcgatgatgtgattggcacactcagcggcttctttaccatcattgttggtattttcttgctccacgcatttaaggatgtgtcattttccttggcgtccctccccgtgagctttcgcaaagacgaaaaggccatgaatgggaacctgagtaacatgtatgaggtgctgaacaacaacgaggagtcgttgacttgcgggatcgagcagcatactggtgagaatgtgtccagaaggaatgggaacctgacagctttctag

SEQ ID NO: 197466 - DNA, 1026 bp, synthetic construct
  misc_feature 1..1026: note = Description of Artificial Sequence: Synthetic coding sequence
  source 1..1026: mol_type = other DNA
atgagccagggccggggcaagtacgacttctacatcggcctgggcctagccatgtccagctcaatattcattggcggctcatttatactgaaaaaaaagggactgcttcggcttgccaggaaggggagcatgcgcgccgtcggggctggggaggtcgctaacttcgccgcatacgccttcgctcccgccactctggttaccccgctgggggccttgtcggtgctcgtcagcgccatcctgtcttcctacttccttaatgagcggctcaacctacacggcaaaataggctgtttgctgtctatcctggggtctaccgtgatggtcattcacgcacctaaggaggaggaaatcgagaccctcaatgaaatgtcccataagctaggggacccggggtttgtggtctttgctacgcttgtggttattgtggccttaattctgattttcgtagttgggcccagacatggccagaccaacattctcgtgtatattacgatttgctcagtgatcggcgcattttcggtaagttgcgtcaagggccttggtattgctatcaaagagctgttcgctgggaagccagtgctgcgccaccccctggcttggattctgctgctgagcctgatcgtctgtgtgagcacacagatcaactacctgaacagggcactggacattttcaatacctcaatcgtcacccccatctattacgttttttttacaacgtcggtgttgacatgttcagccatactctttaaggagtggcaggatatgccggtggacgacgtgataggtacgttgtctggcttctttacaattatagtcggaattttcttactccacgcattcaaagacgtgagctttagcctcgcgtccctgccagtgagcttccgcaaggatgagaaagctatgaacggaaacctgtcaaacatgtacgaagtcttgaacaacaacgaagaaagcttgacttgtggcattgagcagcacactggcgaaaatgtgagccgccgtaacgggaacctgaccgcattctag

SEQ ID NO: 197467 - DNA, 1083 bp, synthetic construct
  misc_feature 1..1083: note = Description of Artificial Sequence: Synthetic coding sequence
  source 1..1083: mol_type = other DNA
atgagccagggccggggcaagtacgacttctacatcggcctgggcttagctatgtcatcgagtatcttcatcggaggcagttttatcctaaaaaagaaaggcctgctgaggcttgcccgaaaagggtccatgagggcagggcaaggcgggcatgcgtatctgaaggaatggctgtggtgggccggtctcctatccatgggggccggagaggttgcaaacttcgctgcttacgctttcgcccccgcgaccctagttacgcctttaggagccctgagcgtcctcgtctcagccatcctgtcctcttactttctcaacgaacgcctcaatcttcacggcaagattggttgtctgttaagtatattgggatccaccgtgatggtgatccacgcacctaaggaagaggagatcgagacactcaatgaaatgtcacacaagctgggcgatccaggctttgtggtcttcgcaaccctagttgttatcgtagcactgatcctcatctttgtagtaggcccacgacatgggcagacgaacatcctagtgtacatcaccatctgttcagtcattggtgcctttagtgtctcctgcgtgaaaggtctgggcatagcaattaaagagctgttcgcagggaagccggtattacggcacccactcgcctggattctgcttttgtcactcatcgtctgcgtgtccacccaaataaactatttaaaccgtgcgctagacatttttaacacttccattgtcaccccaatctattacgtcttctttacaacctccgtgttaacctgctccgcaatactcttcaaggagtggcaggacatgcccgtcgatgacgtgattggaactctatccggcttttttacaattattgtcggcatcttcctgttacacgcgttcaaagacgtgtcgttcagtctcgcctcactgcctgtaagcttccgcaaggacgaaaaggcaatgaatggaaacctgagcaatatgtatgaggtcctgaataacaatgaagaatcactcacatgtggcattgagcaacacaccggcgagaacgtgagccggagaaacggtaatctgacggccttttag

SEQ ID NO: 197468 - DNA, 1083 bp, synthetic construct
  misc_feature 1..1083: note = Description of Artificial Sequence: Synthetic coding sequence
  source 1..1083: mol_type = other DNA
atgagccagggccggggcaagtacgacttctacatcggcctgggcctggcaatgtcgagctctatcttcatcggaggcagcttcatattaaaaaagaagggacttttgcggctggctcgtaagggttccatgcgtgccgggcagggaggccacgcctatttaaaagaatggctttggtgggccggtctgctgtcaatgggtgccggggaggttgcaaattttgccgcctacgcctttgcacccgcgaccctcgtcactccactcggggcactctccgtgctagtttctgctatattatccagctacttcctgaatgagcggttgaaccttcatggcaaaatcgggtgcctgctcagtatccttggctctacagtgatggttatccacgctccaaaggaagaagaaattgaaactcttaatgagatgtcccataaattaggtgatcctggatttgtcgtattcgctaccctggtggtgattgtcgctctgattcttatattcgtggtcggaccgaggcacggacagacaaatatccttgtgtacataactatctgctctgtgatcggagcgtttagtgtcagctgtgtgaagggcttaggcatcgcgataaaggagctcttcgctggtaaacctgtgctgcgacacccgctggcctggatcctcctcctgtcattaatagtctgtgtgagcacacagataaactacctgaaccgcgcgctggatatcttcaataccagcatcgtgacacccatatactacgtctttttcaccaccagtgtgctcacctgttcagccatattgtttaaagaatggcaagatatgcctgtggatgatgttataggcactctttccggattcttcacaatcattgtgggcatttttctgcttcacgcatttaaagacgtttctttctcgttagcgtctctgcccgtctctttcaggaaagatgagaaggctatgaatggcaatctgtcaaacatgtacgaggtactcaataacaatgaagagtccctcacatgcgggatcgaacagcacacaggcgagaacgtctcccgcaggaatggtaacctcacagcattctag

SEQ ID NO: 197469 - DNA, 1026 bp, synthetic construct
  misc_feature 1..1026: note = Description of Artificial Sequence: Synthetic coding sequence
  source 1..1026: mol_type = other DNA
atgagccagggccggggcaagtacgacttctacatcggcctgggcctcgcaatgagcagctcaatctttatcggcgggtcctttattctgaagaagaaggggttgctccggttggcgaggaaaggatctatgcgtgccgttggcgctggggaagtggccaacttcgccgcctatgcctttgctcctgctacactcgtcacgccattgggtgccctctcagttctcgtttctgccatcttatcttcatacttcctgaatgaaagactgaacctacacggaaaaattggatgcctgctgagcattctggggtccacagtcatggttattcatgctcctaaagaagaggaaatcgagacactcaacgaaatgagtcacaaactaggtgatcccggttttgtcgtctttgcaaccctggttgtgattgttgctctgattctgatctttgtggtgggacctcgccacggccagacaaatatacttgtgtacatcactatatgcagcgttatcggcgcattttccgtctcctgtgtgaagggcctgggcatcgcaattaaggagctctttgccggcaagccagtgctgcggcacccccttgcatggatccttcttctgagcttgattgtttgcgtaagtacccaaattaactatctgaacagggctctggatattttcaatacaagtatcgtgacacccatttattacgtcttcttcacaactagcgtgctgacatgcagcgccatcctgtttaaggaatggcaggatatgcccgttgacgacgtgatcggaacactgtctggcttttttacgatcatcgttggcatattcctgctccacgccttcaaggacgtatcctttagtcttgcttccctgcccgtgagcttccgcaaggatgaaaaggccatgaacggaaatctatccaatatgtatgaagtcctgaataataacgaagagagcctgacatgtgggatagagcaacatacgggggagaacgtcagcagacgaaacggaaacctgaccgctttctag

SEQ ID NO: 197470 - DNA, 180 bp, synthetic construct
  misc_feature 1..180: note = Description of Artificial Sequence: Synthetic coding sequence
  source 1..180: mol_type = other DNA
atgagccagggccggggcaagtacgacttctacatcggcctgggcctggccatgtcaagtagcatctttatcggtggctcctttattttgaagaagaagggattactgcggctggcgcggaaaggctccatgagggccggccaaggagggcatgcctacctcaaggagtggctttggtag

SEQ ID NO: 197471 - DNA, 900 bp, synthetic construct
  misc_feature 1..900: note = Description of Artificial Sequence: Synthetic coding sequence
  source 1..900: mol_type = other DNA
atggaggagctggagcagggcctgctgatgcagccctgggcctggctacagctggcagagaacagcttactcgccaaagtgttcattacgaaacaggggtatgctctgcttgtgtccgatttacaacaggtgtggcatgagcaagtcgataccagcgttgtgagccaacgtgccaaagaattgaataagagactgacggccccacccgcagccttcctttgtcacctagacaatttattacgacctttactgaaggatgctgcccatccctctgaggccaccttcagctgtgactgtgtggccgacgccctgatactgagggtgcgatcagaactgtctggactccctttctattggaacttccattgtatgctggcttctccctctttagtgagtcagcaccttattcgcccactgatggggatgagtctggcactgcagtgtcaggtgagagagctggcaaccctgctacatatgaaagatttagagatccaggactaccaggaatctggtgcgaccctgattagagatcgcctcaagacggaaccgtttgaagagaatagctttctggagcagtttatgattgaaaaactgcccgaggcatgctcgattggcgacggcaagccctttgtcatgaacctccaagatctgtacatggccgtgactacgcaagaggttcaggttgggcagaaacatcagggtgctggggatccccatacttctaacagcgccagtctacaggggatcgactcccagtgtgtgaaccagcccgagcagctagtgtcctccgcacccacactctccgcgcccgagaaggagtccaccggaacaagtggtcctctccaacgcccacagctgagcaaggttaaaaggaagaagccccgtggtcttttttcatag

SEQ ID NO: 197472 - DNA, 951 bp, synthetic construct
  misc_feature 1..951: note = Description of Artificial Sequence: Synthetic coding sequence
  source 1..951: mol_type = other DNA
atggaggagctggagcagggcctgctgatgcagccctgggcctggctgcaattggctgaaaatagtttactggctaaagtttttattacaaagcaagggtacgctctgctggtaagcgacctgcagcaggtgtggcatgagcaggttgatacctctgtggtgtcccaacgtgccaaggaactcaataagcgcttgaccgcacctccagccgcatttttatgtcatttagataaccttctgcggcctttgctgaaagacgctgcacacccatctgaggccacattctcctgcgactgtgtggccgacgctttgattctccgggtgaggtccgaactctccggacttccattttactggaacttccattgcatgctcgcttcgccaagcttagtttcccaacacctgatcagacccctaatgggcatgtcccttgcattacaatgccaggtgagggagctcgccacactgttgcacatgaaagatctcgaaatacaggactaccaggaaagcggcgcaaccctgataagagacaggttgaaaaccgagccatttgaggaaaattcctttctggagcagttcatgatcgagaaattgcctgaggcctgttctattggggacggcaagccctttgttatgaaccttcaggacctgtacatggcagtgacaacacaggaagtccaagtcgggcagaagcatcagggtgccggtgatccacacacatctaatagcgccagcctgcaagggatcgatagtcagtgcgttaatcagcctgagcaactcgtgagctctgcccctacactgagcgcacccgagaaagagtcaaccgcactgtgtagggatttatcgtgccagagatcacggggaaggtcccagggtgtcagttccgtcaatttgctctggccacagctgttacgaatggatcttgaaaactcctttcaggccagtccatag

SEQ ID NO: 197473 - DNA, 690 bp, synthetic construct
  misc_feature 1..690: note = Description of Artificial Sequence: Synthetic coding sequence
  source 1..690: mol_type = other DNA
atggaggagctggagcagggcctgctgatgcagccctgggcctggctccagctggccgagaacagcctgttagctaaggtttttattaccaaacagggctacgcattattggtgtcagacttgcagcaggtctggcacgagcaggttgacacttcagtggttagtcagagggccaaagagttgaataagcgcctgaccgctcctcccgctgcctttctgtgccatctggataacttgctgaggcctcttttaaaggacgctgcacacccctctgaggccacctttagctgtgactgcgtagcagacgctctgattctacgggtccgtagtgagcttagtggcctgccattttactggaacttccactgtatgcttgcctctccgtcactggtgtctcagcatctcatccggcccctaatgggcatgagtcttgcactccagtgccaggtcagggagttggccacactcctgcacatgaaggaccttgaaatccaagattatcaagaaagcggagcaactctcatccgggacagactcaagaccgaaccctttgaggaaaatagctttctggagcagtttatgattgaaaagctcccggaggcctgcagtattggggacgggaagccttttgttatgaacctgcaggatctgtatatggctgtgactacccaggaagtccaagtgggctag

SEQ ID NO: 197474 - DNA, 804 bp, synthetic construct
  misc_feature 1..804: note = Description of Artificial Sequence: Synthetic coding sequence
  source 1..804: mol_type = other DNA
atggccaactgcgagcggaccttcatcgccatcaagcccgacggcgtgcagagaggcctcgtcggagaaatcattaagcggtttgagcagaaaggatttagactcgtcggccttaagtttatgcaggcttccgaggatctgctgaaagagcactacgtcgatttaaaggaccgccccttcttcgccggcctcgttaagtatatgcattccggccctgtcgtggccatggtgtgggagggccttaacgttgtcaaaactggcagagtgatgctgggagaaacaaatccagccgacagtaagcccggcaccatccgtggtgatttttgcattcaggtaggacgaactatggcaaatctcgagcgcacattcattgccatcaaacctgacggcgtccagcggggtctggtaggggagataattaaacggttcgagcaaaaaggattccgactggtcgctatgaaattcttacgcgcatcagaggagcacctgaaacagcactacatcgatttgaaagacagaccgttctttcccggcttagtgaagtacatgaactccggaccagtcgttgctatggtgtgggagggacttaacgtggtcaagacaggcagagtgatgcttggcgagaccaacccggccgacagtaaacctggcactatccgaggagacttctgtattcaagtggggaggaacataattcatggaagcgacagcgtgaagtcagctgaaaaagaaatttctctgtggttcaaacctgaagaactggttgactacaaatcatgcgctcacgattgggtctacgaatag

SEQ ID NO: 197475 - DNA, 234 bp, synthetic construct
  misc_feature 1..234: note = Description of Artificial Sequence: Synthetic coding sequence
  source 1..234: mol_type = other DNA
atggtgtgggagggcctgaacgtggtgaagaccggccgggtgatgctgggggagacaaacccggccgatagtaagcccggtactatccggggcgatttctgcattcaggtgggaagaaacattatccacggcagcgactccgtgaaaagtgctgaaaaggagatatccctgtggttcaaaccagaagaactggtcgattacaaatcttgtgcacacgactgggtttatgaatag

SEQ ID NO: 197476 - DNA, 234 bp, synthetic construct
  misc_feature 1..234: note = Description of Artificial Sequence: Synthetic coding sequence
  source 1..234: mol_type = other DNA
atggtgtgggagggcctgaacgtggtgaagaccggccgggtgatgctgggggagactaacccagcggacagcaagccaggcacaattaggggcgatttttgtattcaggtcggtcgcaacattatacacggctccgactcagtgaaatccgccgagaaggagatctcactttggttcaagcccgaggaactggtcgactataagagttgcgctcacgattgggtatacgaatag

SEQ ID NO: 197477 - DNA, 459 bp, synthetic construct
  misc_feature 1..459: note = Description of Artificial Sequence: Synthetic coding sequence
  source 1..459: mol_type = other DNA
atggccaacctggagcggaccttcatcgccatcaagcccgacggcgtacaaaggggccttgtgggtgagattatcaagcggttcgaacagaaaggtttccggttagtagctatgaagtttctgcgggcgagtgaggagcacctcaagcagcactatatcgaccttaaggatagacctttctttcccggtcttgtgaaatatatgaactctgggcccgtcgttgcaatggtgtgggaagggcttaacgtggtgaaaacaggccgggtgatgcttggagaaacgaatccggcggattccaaacccgggaccatccgaggtgatttctgtatccaggttggtaggaatatcatacatgggagtgactccgtgaagagtgctgagaaggaaatttctttatggtttaaacccgaggaattagttgactacaaatcttgtgcccacgactgggtgtacgagtag

SEQ ID NO: 197478 - DNA, 459 bp, synthetic construct
  misc_feature 1..459: note = Description of Artificial Sequence: Synthetic coding sequence
  source 1..459: mol_type = other DNA
atggccaacctggagcggaccttcatcgccatcaagcccgacggcgtgcaaagggggttagttggagagataattaagcggttcgagcagaagggatttcgactggtcgccatgaagttcctgagagcctccgaggaacacctgaaacagcactacatcgaccttaaggaccgcccatttttcccggggcttgtgaagtacatgaattcgggtccagtcgttgccatggtctgggagggactgaacgtagtgaagacaggcagagttatgctgggggaaactaatcccgccgattcaaaacctggaaccatccggggcgatttctgtatccaagtaggacgcaacatcattcacggcagcgatagtgtgaaaagcgcggagaaagagatcagtttatggtttaaacccgaggaacttgtggactacaagtcctgtgcacacgactgggtctacgagtag

SEQ ID NO: 197479 - DNA, 459 bp, synthetic construct
  misc_feature 1..459: note = Description of Artificial Sequence: Synthetic coding sequence
  source 1..459: mol_type = other DNA
atggccaacctggagcggaccttcatcgccatcaagcccgacggcgtacagagggggctcgtcggggagatcatcaagcgctttgagcagaaaggattcaggttggtagctatgaaatttttacgagcaagcgaggaacaccttaaacaacactatatcgatctaaaagacaggcccttttttcccggtttagtcaagtatatgaattctggcccagtggttgccatggtatgggaaggactaaatgtggtcaaaacaggaagagtgatgctgggggagaccaatcctgctgactccaaacccggaacgattagaggcgacttctgtatccaagtgggacgcaacattatccatggctccgattcagtcaaatccgccgaaaaagagatctctttatggttcaaacccgaagagctagttgactacaagtcctgcgcacacgactgggtctatgaatag

SEQ ID NO: 197480 - DNA, 459 bp, synthetic construct
  misc_feature 1..459: note = Description of Artificial Sequence: Synthetic coding sequence
  source 1..459: mol_type = other DNA
atggccaacctggagcggaccttcatcgccatcaagcccgacggcgtgcagcggggattggttggcgagatcattaagcgcttcgaacagaaaggtttcagactggttgctatgaagtttctgagggcatcagaggaacacttgaaacagcattatatcgatcttaaggaccggccattctttcctgggcttgtcaaatatatgaactcagggcctgtcgttgctatggtgtgggaagggcttaacgtggtgaaaacagggcgggtaatgctgggggaaaccaaccccgccgactcgaaaccaggcactattagaggtgatttttgcatccaggtggggcggaacatcattcacggttcagacagcgtgaagtccgcagagaaagagatttccctttggtttaagccagaggagctagtggattacaaaagctgtgctcacgactgggtgtacgaatag

SEQ ID NO: 197481 - DNA, 459 bp, synthetic construct
  misc_feature 1..459: note = Description of Artificial Sequence: Synthetic coding sequence
  source 1..459: mol_type = other DNA
atggccaacctggagcggaccttcatcgccatcaagcccgacggcgtccagcgggggttagtgggcgaaattattaaaagattcgaacaaaaggggttccggttggttgcgatgaagttcctcagggccagtgaggagcatctgaagcagcactatatcgacctgaaggacagaccgttctttccgggcctagtaaagtacatgaacagcggtccagtcgtcgcgatggtatgggaagggctgaatgtcgtgaagactggccgtgtgatgctgggtgagacgaatccagccgatagtaaacctgggacaatccgcggcgacttctgcatccaagtaggccggaacattatccacggtagcgattctgttaaaagtgccgaaaaagagatctccttgtggttcaagcccgaagagctggtggactataagtcatgtgcgcatgactgggtgtacgagtag

SEQ ID NO: 197482 - DNA, 879 bp, synthetic construct
  misc_feature 1..879: note = Description of Artificial Sequence: Synthetic coding sequence
  source 1..879: mol_type = other DNA
atggtgctgctgagcaccctgggcatcgtgttccagggcgagggcccccccatttctagttgtgatacaggcacaatggctaactgcgagagaacgtttattgcgatcaagccggatggtgtgcagagagggctggtgggggagatcattaagagatttgagcaaaaaggatttagattggtagggctgaagtttatgcaagcctctgaggatcttctcaaggaacactatgtggatttaaaggatcgtccattcttcgcaggccttgtgaagtacatgcatagcgggccagtcgtggctatggtttgggaaggcctcaatgtggtcaaaaccggaagggtaatgttaggagaaaccaatcctgcggactcaaaaccaggcacgatacgcggagatttttgtatccaagtgggcaggacaatggctaatctcgagcggacattcatcgcgattaagccagatggggttcagagagggctggttggagaaattataaaacgtttcgagcagaagggctttcgcctcgtggccatgaagtttctgagggcctccgaagagcatctgaaacaacactacatcgatcttaaggatagaccattctttcccgggcttgttaaatacatgaactccggcccagtagtcgcaatggtgtgggaaggcttaaacgtggtgaagactggacgggtcatgttgggtgaaaccaatcccgccgacagcaagccaggcactatcaggggtgacttttgtatacaggtcgggcggaacatcattcatggcagcgacagcgtaaaaagtgccgagaaggaaatcagtctgtggttcaagccggaagaattagtagattacaagtcttgcgcacacgattgggtttatgaatag

SEQ ID NO: 197483 - DNA, 1188 bp, synthetic construct
  misc_feature 1..1188: note = Description of Artificial Sequence: Synthetic coding sequence
  source 1..1188: mol_type = other DNA
atggtgagcgccgccggcctgagcggcgacggcaagatgcggggcgtgctgctcgtgctgctgggactgttgtacagcagcaccagttgcggggtgcagaaggcaagtgtcttctatgggccagatccaaaggaggggctggtatcatctatggaatttccatgggtggtgtctctacaggattcccagtatacccatctggccttcggctgtattctttccgaattctgggtgctgagtattgcatccgctattcagaatcgaaaggacatcgtcgttatcgtgggcatttccaacatggatcccagcaagatcgcacacactgagtaccctgtcaataccattataattcatgaagactttgacaacaattccatgagcaacaacattgccctcctgaagactgacaccgccatgcattttggcaatctggttcaatctatatgcttcctgggccgcatgctgcacaccccccccgtgttgcagaactgctgggtgtctggctggaaccccaccagcgccactggtaatcacatgactatgtctgttctccgcaagattttcgtaaaagacctggacatgtgccctctgtataaactgcagaaaacggaatgtggttcccatacgaaggaggagaccaaaactgcctgcttgggggaccccggatccccaatgatgtgccagctccagcagttcgatctgtgggtgctgaggggcgtcctgaactttggtggggaaacatgtcccggcctgtttctctacaccaaagtcgaagattacagtaaatggattactagtaaagctgaacgagcgggacctcccctgtcaagtctgcatcactgggaaaaactcatatcgttttcgcatcatggcccaaatgcaaccatgacacagaaaacatattctgatagcgaactgggtcatgttggaagctatctccagggccagaggaggactattacccattccagacttgggaatagctctagagacagcctggatgtgcgcgaaaaagacgtgaaggagagtgggagatctccagaggcctcagtgcagcccctttattacgactattatggcggagaggtgggcgagggtcgcattttcgctggacaaaataggctatatcagcccgaggagatcattctcgtctcattcgtgctggtatttttttgctcttcaatttag

SEQ ID NO: 197484 - DNA, 639 bp, synthetic construct
  misc_feature 1..639: note = Description of Artificial Sequence: Synthetic coding sequence
  source 1..639: mol_type = other DNA
atggagatcagcatgccccccccccagatctacgtggagaagaccctggcaatcataaagcccgatatcgtcgacaaagaggaggagatccaggacattattctcaggtcaggctttacgattgtgcagagacgtaagttgcgcctgtccccagagcagtgctcgaacttctacgtggagaagtatggaaaaatgttctttccaaatctcaccgcctatatgtcttccggccccctggtcgccatgatcttggcccggcataaggccatttcctactggctggaattgctggggccgaacaacagtctggtcgccaaggaaactcatccagactccctgcgtgctatttacgggacagacgatctgagaaatgccttgcacggttcgaatgatttcgctgcggcggagagagagataagattcatgtttccagaggtgatcgttgaaccaataccaattgggcaggccgcaaaggactatcttaaccttcatatcatgcccactttgctcgagggactgaccgagctgtgtaaacaaaaacccgcagacccgctgatctggctcgccgactggctgctgaaaaacaaccctaataaacctaagttgtgccaccatcctattgttgaggagccgtactag

SEQ ID NO: 197485 - DNA, 561 bp, synthetic construct
  misc_feature 1..561: note = Description of Artificial Sequence: Synthetic coding sequence
  source 1..561: mol_type = other DNA
atggccagcatcctgcggagcccccaggccctgcagctgaccctggcactcatcaaacccgacgctgtcgcacaccccctgatcctagaagcagtacaccagcagatcctctccaataaattccttatcgtgagaatgcgggagctcctatggcggaaggaggattgccagcgtttctatagggagcacgaggggcgtttcttttatcagcggctggttgagttcatggccagtggccctattagagcatatattctggcacacaaggatgctatccagctatggcggacactcatgggcccaacaagggttttccgcgcccgacatgtggccccagactcgattcgaggatcattcggtcttactgacacccgtaatacgactcacggcagtgacagcgttgtgagtgcgtctcgcgaaatcgcagcgttctttcccgacttcagtgaacagagatggtatgaggaggaagaaccccagctccggtgcggccccgtttgctactccccggaggggggggtgcattatgtggcgggcacaggcgggctcggccccgcgtag

SEQ ID NO: 197486 - DNA, 585 bp, synthetic construct
  misc_feature 1..585: note = Description of Artificial Sequence: Synthetic coding sequence
  source 1..585: mol_type = other DNA
atgacccagaacctgggcagcgagatggccagcatcctgcggagcccacaggccttgcagcttacactcgcactgattaaacccgacgcagtagctcacccgcttatactggaagcggtgcaccaacagatcctgtctaacaaattcctgatcgtccgaatgcgagagctcctatggagaaaagaagattgccagcgcttctaccgggagcatgagggccggttcttttaccagagattggttgagttcatggcctccggcccaattagggcatatatccttgcacacaaggatgcgatccaactctggcgaactctcatggggccaactcgggtcttcagagccaggcacgtagctcccgacagtatcagaggaagcttcggcctcaccgacacaaggaatacaacccacgggtccgacagcgtcgtgtccgccagcagggaaattgcagccttctttcctgacttttctgagcaacggtggtacgaggaagaagagccacagctcaggtgtggtccagtgtgttactcacccgaaggcggagtgcactatgtggccggtactggcgggttgggtcctgcctag

SEQ ID NO: 197487 - DNA, 561 bp, synthetic construct
  misc_feature 1..561: note = Description of Artificial Sequence: Synthetic coding sequence
  source 1..561: mol_type = other DNA
atggccagcatcctgcggagcccccaggccctgcagctgaccctggcgctgatcaagcctgacgccgtggcgcacccactcatactggaggcagtccaccaacagattctttccaataagtttctaatagtgcgtatgcgggagctgctttggcggaaggaggattgccagcgattctatcgcgaacatgagggccgattcttctatcagcgcctagtcgagtttatggcgtcagggccaatacgagcttacattctggctcacaaggatgctattcaactctggcggactctgatgggaccaacccgagtattccgcgcacgtcatgtggcccccgattcaatccgtggatcctttggcctgaccgatacacgaaataccacgcacggttccgactccgttgtcagcgcctctcgcgagattgctgcgttttttccagatttcagcgaacaacgttggtatgaggaagaggaacctcagttgcgctgtggtcccgtgtgctatagtcccgaaggtggggtccattacgtggctggcaccggggggttggggccagcctag

SEQ ID NO: 197488 - DNA, 360 bp, synthetic construct
  misc_feature 1..360: note = Description of Artificial Sequence: Synthetic coding sequence
  source 1..360: mol_type = other DNA
atggccagcatcctgcggagcccccaggccctgcagctgaccctggctctcatcaagcccgacgcggtagctcaccctctcatactggaggcagtgcaccagcagatcctttctaataagtttttaatagtgaggatgcgggaactgttgtggaggaaagaggactgtcagcgattctatcgggaacacgaggactccgtggtgtctgctagcagagagattgccgcctttttcccagacttctcagaacagcgctggtatgaagaggaagaacctcaacttaggtgtggtccagtctgttacagcccagagggcggagtccattatgtggccggcaccggagggcttggacctgcttag

SEQ ID NO: 197489 - DNA, 561 bp, synthetic construct
  misc_feature 1..561: note = Description of Artificial Sequence: Synthetic coding sequence
  source 1..561: mol_type = other DNA
atggccagcatcctgcggagcccccaggccctgcagctgaccctggccctcataaaacctgacgctgtggcacaccctcttatcctcgaggccgtccaccagcaaatcctgtccaataagtttctgatcgttcgcatgagggaactcctgtggagaaaagaggactgtcaaagattctatagggaacacgaggggaggttcttttatcagcgcctcgtggaatttatggcgtcaggtcctatccgagcctatatcctggcccataaggacgccatccagctttggcgcactctgatgggtccaactcgcgtgttcagagcccgacacgttgcccctgattccatccggggtagtttcgggttaacagataccaggaacactactcacggtagtgactctgtagtgtcagcctccagggagatcgctgctttcttccctgatttttctgagcaaaggtggtacgaagaagaggaaccccagctgagatgcggtcctgtgtgctactctcctgagggaggagtccactatgtcgctggcactggcggcctgggccctgcctag

SEQ ID NO: 197490 - DNA, 492 bp, synthetic construct
  misc_feature 1..492: note = Description of Artificial Sequence: Synthetic coding sequence
  source 1..492: mol_type = other DNA
atggccagcatcctgcggagcccccaggccctgcagctgaccctggccctgatcaaaccagacgccgtcgcccacccgctgattctggaagccgtgcaccagcagatactgtctaacaagttcctgatcgtccggatgagggaactgctctggaggaaggaggattgtcagcggttttatcgcgaacacgaagcaggccaatcagaaccaacctctctccccacccgcatgccttctagctcaggcgggaggagctgggatccccctgaatgctcagagcacgcaatgtggccacaaattttatctgtcggcgtgtcagccagcttgacccctgccacccccccaatggtgagaaccctgtggtttcaacctgcagagcgcctacagcctagcagcctaacgtctgtgaattccgccgggatgaggagaaaaagccccagctgtgccgtagcgctgtgcgccatcgcccagcgtgaggtgagcaccatgtag

SEQ ID NO: 197491 - DNA, 561 bp, synthetic construct
  misc_feature 1..561: note = Description of Artificial Sequence: Synthetic coding sequence
  source 1..561: mol_type = other DNA
atggccagcatcctgcggagcccccaggccctgcagctgaccctggctcttataaaaccagatgccgttgcccatcccctgattttggaggcagtccaccagcagattctatccaacaaatttttgattgttcgcatgagagaactgctgtggcggaaggaagactgtcagagattctaccgagaacacgaaggacggttcttttaccagcgtctcgtcgagtttatggctagtggccccatccgggcctacatcctcgctcacaaagacgctattcagctctggaggaccctgatggggccgacacgagtgtttagggcccggcacgtcgcaccagactctattagggggtcattcggattgaccgacacccgcaacaccacccatggctctgactcagttgtgtccgccagcagagagattgccgcttttttccccgatttcagcgaacagagatggtacgaagaggaagaacctcagcttcgctgtggacctgtgtgctactcacccgaagggggtgtgcactatgtggctgggaccgggggcttgggccccgcctag

SEQ ID NO: 197492 - DNA, 1131 bp, synthetic construct
  misc_feature 1..1131: note = Description of Artificial Sequence: Synthetic coding sequence
  source 1..1131: mol_type = other DNA
atgaaccacagcgagcggttcgtgttcatcgccgagtggtacgaccctaacgctagcctgctaaggcggtacgagctcttgttctacccaggggatggttctgtggagatgcacgacgtcaagaatcatcggacctttcttaaaagaacaaaatacgacaacttgcacctggaggatctcttcattggcaataaggtgaacgtgttttcccggcagctggtgcttatagattatggcgaccaatataccgcccgccagctgggcagcaggaaagaaaaaaccctggccctcattaagccggatgctatatctaaggctggagaaataatagaaattatcaacaaggcaggcttcactattaccaaacttaagatgatgatgctgtcacgcaaggaggccctggatttccatgtggaccatcagtctcgacccttcttcaatgaattaatacagttcatcaccacaggacccataatcgccatggaaatccttagagacgacgcgatttgcgaatggaaaaggctgttgggaccagcaaatagcggcgtggctcggaccgatgccagcgagtctatacgggctctgtttggaaccgatggcataagaaatgcggcccacggccctgactcattcgcatctgccgcccgcgaaatggaactgtttttcccttcttccggaggctgcggacccgctaacacagccaagttcaccaactgcacatgctgcatcgttaagccccatgctgtcagcgaaggattacttggcaagattttgatggctattcgggacgcaggctttgagatttccgccatgcaaatgtttaacatggacagagttaacgtggaggaattctacgaggtttacaagggggtggtgaccgagtatcacgacatggtcactgagatgtacagcggcccatgtgtggcaatggagatccagcagaacaatgcaacaaaaacgtttagggagttttgcggacccgctgacccagagattgctcgacacttgcgacccggtaccctgagggctattttcggaaagaccaaaatccaaaacgccgtccactgtaccgacctgccggaggacggacttctcgaggtccagtacttcttcaagattttggacaactag

SEQ ID NO: 197493 - DNA, 1023 bp, synthetic construct
  misc_feature 1..1023: note = Description of Artificial Sequence: Synthetic coding sequence
  source 1..1023: mol_type = other DNA
atgcacgacgtgaagaaccaccggaccttcctgaagcggaccaagtatgataacctgcacctggaggacctgtttataggcaataaggtgaatgtgtttagtaggcagttagtgctcatcgattacggtgaccagtatacagcccgacagctcggctcgcgcaaggagaagacactggctctgatcaaacctgacgcaatatccaaggccggcgaaatcatcgaaatcatcaacaaagccggcttcacaatcacaaaactaaagatgatgatgctcagtcggaaggaggcgttggatttccacgttgaccaccagtcccggcctttcttcaacgagctgattcaattcataactacggggcctattattgctatggagatactacgtgatgatgccatctgcgaatggaaacggctgctgggcccggccaacagtggtgtcgcacgcacagacgcgtccgagtccatccgagccctgtttggtaccgacgggatacgaaatgccgctcacgggcctgattcattcgcgagtgcagcacgcgaaatggagttgttctttccaagcagcggtggttgtggccccgctaataccgccaagtttaccaactgtacttgttgcatcgtcaaaccccatgctgtcagcgaagggttactggggaaaatccttatggccataagggacgctgggtttgagatatctgccatgcaaatgtttaacatggatcgggtcaatgtagaagaattctacgaggtttacaaaggggtggtgacggagtatcatgacatggtgactgagatgtactctggcccatgtgtggccatggaaatccaacagaacaatgcgaccaagacctttcgagagttctgcggacctgctgaccccgagattgcaagacacctcaggcctggcactctgcgagctattttcggcaaaacaaagatccagaatgccgttcactgcacagacttgccagaagacggcctgctagaggtccagtacttcttcaagattctggacaattag

SEQ ID NO: 197494 - DNA, 1416 bp, synthetic construct
  misc_feature 1..1416: note = Description of Artificial Sequence: Synthetic coding sequence
  source 1..1416: mol_type = other DNA
atgcagagcaacaagaccttcaacctggagaagcagaaccacaccccccgaaaacatcaccagcaccaccaccagcagcagcaccaccagcaacagcagcaacagccaccccccccaccaatccctgccaatggccagcaagcaagcagccagaacgaagggctgacaatcgatctaaagaactttcggaagccgggggagaaaacatttacacagaggtctcgactgtttgttggcaacctgccccccgatatcaccgaagaggagatgagaaagctgttcgagaagtatgggaaggccggcgaggtgttcatccacaaggacaaaggatttggcttcattaggctggaaacacggaccttggccgagatagcgaaggtggaattggataatatgcctctgcggggcaaacaactgagggtgcggtttgcctgccactccgcgtccttgacagtcagaaacctgccccagtacgtgagtaacgagctgctggaggaagcttttagcgttttcggccaagtggagagagctgtggttattgtggacgaccgcggacgcccttctgggaagggaattgtagagttctccggaaaacccgcagcaaggaaagctcttgacagatgcagcgaaggaagcttccttctgaccaccttccccaggccagtcacggtggagcccatggatcagctcgatgatgaagaagggctgccagagaaactggtaatcaaaaaccagcagttccataaggaacgggagcagcctccgcgattcgcccagccagggagcttcgagtacgagtacgctatgaggtggaaggccctgatcgaaatggaaaagcagcagcaagaccaggttgacaggaatatcaaggaagcacgtgaaaagcttgaaatggagatggaggcagcacggcacgagcaccaagtgatgctgatgcggcaggacctgatgcggcggcaggaggagctccggagaatggaggaactgcataatcaggaagtccagaaacggaagcaactggagctgagacaggaggaggagagacgccgtagagaggaggaaatgaggcgtcagcaagaagaaatgatgagaaggcagcaagaagggttcaaggggacttttcctgacgcacgagagcaggagatacgaatgggacagatggcgatgggaggagcgatgggcatcaacaatcggggggctatgcccccagcacccgtccctgccggaacgcctgccccacccgggcctgcaacaatgatgcctgacggcacactagggttaacacctcccaccaccgagaggttcggccaagccgctaccatggagggcatcggtgccatcggcggcacaccccccgcctttaaccgcgccgccccaggcgctgagtttgccccgaacaagagacggcgatattag

SEQ ID NO: 197495 - DNA, 1416 bp, synthetic construct
  misc_feature 1..1416: note = Description of Artificial Sequence: Synthetic coding sequence
  source 1..1416: mol_type = other DNA
atgcagagcaacaagaccttcaacctggagaagcagaaccacaccccacgcaaacaccaccagcaccaccatcagcagcagcatcaccagcagcagcagcagcagcctccccctccccctattccggccaatggtcagcaggcttctagtcaaaatgagggtttgaccattgatctgaagaactttcggaagccgggagagaagacctttactcagcggtctcgactctttgtgggaaatcttcccccagacatcaccgaggaggaaatgagaaagctttttgagaaatatggcaaggcaggagaggtcttcattcataaagacaaaggtttcggctttatccggctggaaacacggactctagcggagatcgccaaagtagaattggataacatgccactgcgtggcaagcagctccgggtgagatttgcctgtcattcggcctctcttaccgtgcgcaacctgccccagtatgttagcaatgaactgctggaggaggcgttcagcgtcttcgggcaggtcgagcgggctgtcgtcattgttgacgataggggcagacctagcggaaagggcattgtggagttctctgggaagcccgcagcccgcaaagctctggataggtgttctgagggctcctttctccttaccaccttccctagaccagttaccgtggagccaatggatcaactggacgatgaggagggtctccccgagaaactggtgatcaaaaaccagcaattccacaaggagcgcgagcagcctccacgcttcgcgcagcccggttccttcgagtatgaatatgccatgagatggaaggctcttatcgaaatggagaaacagcaacaggatcaggtggaccgcaatatcaaggaggcaagggaaaaactggaaatggaaatggaggccgcacgtcatgagcatcaagtcatgcttatgcgccaggaccttatgcgcaggcaagaggaactgagacgaatggaggaactccataaccaagaggtacagaaacggaaacagctcgaactccgacaggaggaggagagaagacgccgggaagaggagatgcggcgacagcaggaggagatgatgcgccggcagcaggagggattcaaagggacattccctgacgcacgcgagcaagaaatacggatggggcaaatggccatgggcggggcaatgggcattaacaatcggggcgccatgcccccggcccctgtgcccgctggaacccccgccccacccggacctgcaacgatgatgcccgacgggacgctcggactgacgccacctactaccgaacggttcggccaggctgcaactatggaagggataggagcaattggcggcacgccacctgcattcaaccgagctgcaccgggcgctgaatttgcaccaaataagagaaggcggtattag

SEQ ID NO: 197496 - DNA, 1416 bp, synthetic construct
  misc_feature 1..1416: note = Description of Artificial Sequence: Synthetic coding sequence
  source 1..1416: mol_type = other DNA
atgcagagcaacaagaccttcaacctggagaagcagaaccacaccccacggaagcaccatcagcatcatcaccaacaacagcaccatcaacaacaacagcagcagccaccacctccacctatccccgccaacgggcagcaggctagctctcagaatgagggtctgacaatcgacctgaaaaacttccggaagccaggcgaaaaaacattcacccagagaagcaggttgttcgtgggcaaccttcctccagacattacagaagaggaaatgcgcaaactgttcgagaaatatggcaaggcaggggaggtctttatacacaaggacaaaggtttcggcttcatccgtctggagacacgcacgctggccgaaatcgcgaaagtggaactggataatatgcccttgagggggaaacagctcagggtcagattcgcgtgccattcagccagcctgactgttcgtaacctgccgcaatatgtcagtaacgagctactggaagaagccttctccgtgttcggtcaggtggagagggcggtagtcattgtggacgatcgcggccggccatctggaaaaggaatcgtcgagttctctggaaagccagccgcacgcaaagcattagacagatgttcagagggaagtttcctactgaccacattcccgagacccgtcaccgtggaacctatggatcagttggacgatgaagagggcctccctgagaagctggttatcaagaaccagcagttccataaggagcgcgagcagccaccccgcttcgcccagcctggcagcttcgaatacgagtatgccatgcggtggaaagccctcatagaaatggagaagcagcaacaggaccaggtggataggaacataaaagaagcacgggagaaactggaaatggaaatggaggcagctcgacacgagcatcaggtgatgcttatgcgccaggatcttatgaggagacaggaggaattacggcggatggaggagcttcataaccaggaagtgcaaaaaagaaaacagctggagcttcgccaggaagaggaaaggagaaggcgggaggaggagatgagacggcagcaggaggagatgatgcgcaggcaacaagaaggcttcaaaggaacattcccagacgcccgcgaacaggagatccgtatgggacagatggccatgggcggcgccatggggattaacaaccggggcgctatgccgcctgcaccagtcccagccggtactccagcgcctcctggtccagccacaatgatgccagacggcactctgggcctaacaccccccacgactgagcggtttggacaggcagcgaccatggagggcattggtgctattggcggtacgcctccagcttttaatcgtgccgcaccgggcgctgagtttgcccccaataagcggcgaaggtactag

SEQ ID NO: 197497 - DNA, 747 bp, synthetic construct
  misc_feature 1..747: note = Description of Artificial Sequence: Synthetic coding sequence
  source 1..747: mol_type = other DNA
atgcagagcaacaagaccttcaacctggagaagcagaaccacaccccacgcaagcaccatcagcatcaccaccagcaacagcatcaccaacaacagcaacagcagccacctccccctccaattcccgccaacggtcagcaggctagcagccagaacgagggtctgaccattgacctgaaaaatttccgtaagccaggggaaaaaacttttacgcagagaagccgactcttcgtgggcaacctcccacctgacatcactgaggaagagatgaggaagctgttcgagaaatatgggaaagctggtgaagtgttcatccataaggacaagggtttcggatttattcggctcgaaacacgcacactggcggaaatcgctaaggtggagctggataacatgcctcttcggggtaaacagctgcgcgttcggttcgcgtgtcactctgccagtctgaccgtgcgaaacctgccccaggaaagagagcagcccccacggttcgcccagcctgggtccttcgagtacgagtacgctatgaggtggaaagccctaattgagatggaaaaacagcagcaggatcaggtggaccgtaatattaaagaggccagagaaaagctggagatggagatggaggccgctcgacacgagcatcaggtgatgcttatgagacaggatctgatgcgccggcaggaggagctgcgaaggatggaagaactccataaccaggaggtgcagaagcggaaacaactgtag

SEQ ID NO: 197498 - DNA, 708 bp, synthetic construct
  misc_feature 1..708: note = Description of Artificial Sequence: Synthetic coding sequence
  source 1..708: mol_type = other DNA
tgacccgacatcaccgaggaggagatgcggaagctgttcgagaagtatggtaaagctggcgaggtgtttatacataaggacaaaggcttcggatttattaggctagttgaaagggccgtggtgatcgtggacgaccgcggaaggccatccgggaagggaattgttgaattttccggcaagcccgcagccagaaaagcactggatcgctgttcggagggatcttttttactcaccaccttcccccgtccagtaacagtcgaaccaatggaccagctcgatgatgaagagggtctgcccgagaaactggtaattaagaaccaacagttccataaggaacgtgagcagccccctaggtttgcgcagcctggaagcttcgagtatgagtacgccatgcgttggaaagctctgatcgagatggagaagcaacagcaagaccaggtcgataggaatatcaaggaagcccgggaaaagctcgagatggagatggaggcagctcgccacgaacatcaggttatgttgatgagacaagaccttatgcgtcgccaggaagagcttcgaagaatggaggagttacacaaccaagaggtccagaagcgaaagcagctggagctgagacaggaagaggagaggagaaggagggaggaggagatgagaaggcagcaagaggaaatgatgcggcggcagcaggaaggtttcaagggcacctag

SEQ ID NO: 197499 - DNA, 375 bp, synthetic construct
  misc_feature 1..375: note = Description of Artificial Sequence: Synthetic coding sequence
  source 1..375: mol_type = other DNA
atgcagagcaacaagaccttcaacctggagaagcagaaccacaccccccgtaagcatcaccaacatcatcaccaacagcagcaccatcagcaacagcagcagcagcctccaccccccccgatcccggccaatggtcagcaggccagtagtcagaatgaagggctcacaatagatctgaaaaacttcagaaaacccggtgaaaagaccttcacccagagatcaaggttattcgtggggaatctgccccctgatatcacagaagaagaaatgcggaagcttttcgagaaatatgggaaggagacaaggacactcgctgagatagcaaaggtggaattggataatatgcctttgaggggaaaacagctcagagtctag

SEQ ID NO: 197500 - DNA, 201 bp, synthetic construct
  misc_feature 1..201: note = Description of Artificial Sequence: Synthetic coding sequence
  source 1..201: mol_type = other DNA
atgcagagcaacaagaccttcaacctggagaagcagaaccacacccccagaaagcatcatcagcatcaccaccagcagcagcatcaccagcaacagcagcagcagccacccccaccgccaatccccgccaacggccagcaggcttcctctcagaatgaagggctgaccattgatttaaaaaattttagaaagcccgggtag

SEQ ID NO: 197501 - DNA, 624 bp, synthetic construct
  misc_feature 1..624: note = Description of Artificial Sequence: Synthetic coding sequence
  source 1..624: mol_type = other DNA
atgcagagcaacaagaccttcaacctggagaagcagaaccacaccccccgtaagcaccatcaacatcaccatcaacagcagcaccaccagcagcagcagcagcagcccccccccccgccaatccccgctaacgggcagcaagcttcaagtcagaacgagggtttgacaatcgacttgaaaaatttcagaaagcctggagagaagacctttactcagagaagtcggctgtttgtcgggaacctgcctcccgacataacagaagaggaaatgaggaagttgtttgagaaatacggcaaagccggtgaggtgttcattcataaggataaaggcttcgggtttattaggttggagacacgaacactggcagaaatcgctaaggttgaactggataatatgccactgcgcggcaaacagttaagagttcgattcgcctgtcactctgctagtcttaccgttcgcaatcttccacaatacgtgtctaatgagctcttggaagaggctttttcagtgttcggccaggttgaaagggccgtggtcatcgttgatgatcgagggcgtcccagcggaaagggcatcgtggagttcagtggcaagccagcggcccgcaaagctttagatagatag

SEQ ID NO: 197502 - DNA, 1149 bp, synthetic construct
  misc_feature 1..1149: note = Description of Artificial Sequence: Synthetic coding sequence
  source 1..1149: mol_type = other DNA
atgcggaagctgttcgagaagtacggcaaggccggcgaggtgttcattcataaggacaagggttttggctttattcgactcgaaaccagaaccttggcagagatagcaaaagttgagcttgataacatgcccctgcgaggcaagcagttaagggtgcgcttcgcctgccactccgcctccttgaccgtgaggaatctgccccagtacgtaagcaacgagctgctggaagaagctttcagtgtattcggtcaggtggagcgagccgtagttatcgtagatgatagaggtaggccgtctggaaaaggaatcgtggagttttcaggaaagcccgccgctcgtaaagcactggaccgctgctccgagggcagctttcttcttacaaccttcccccgcccagtgacagttgagccaatggaccagctggacgatgaggagggtttgcccgagaagctcgtcatcaaaaatcagcaatttcataaagagcgcgagcagccacccagatttgctcagcccggttcattcgagtatgagtacgccatgcggtggaaggctctcatcgagatggaaaagcagcaacaggatcaggtcgacagaaatattaaggaggcccgtgagaagctcgagatggagatggaggcggcgcgccatgaacaccaggtgatgctgatgagacaggacttaatgcgaaggcaggaggaactccggcgtatggaggagttgcacaaccaggaagtacagaagaggaaacagctcgaattacgacaagaagaggagagacgacggagagaagaggagatgaggcggcagcaggaggaaatgatgcgacggcagcaggaaggcttcaaaggcacatttccggatgccagagaacaagagatccgtatggggcagatggccatgggcggcgctatgggaataaataaccgcggcgctatgccccccgcacccgtgcccgctgggacacctgctcccccaggccctgccacgatgatgcccgatggcactcttggcttgactcctcctacaacggaacgttttggtcaggccgcaactatggagggtatcggagcaataggtgggactcctcccgcattcaatcgcgcagcacccggagcagagtttgcacctaataagcggagacgatactag

SEQ ID NO: 197503 - DNA, 3048 bp, synthetic construct
  misc_feature 1..3048: note = Description of Artificial Sequence: Synthetic coding sequence
  source 1..3048: mol_type = other DNA
atgggcgccgagcggcggctgctgagcatcaaggaggccttccggctggcacaacaacctcatcaaaaccaagcaaaacttgtggttgctctgtcaaggacctaccggactatggacgataagactgtgttccacgaagaatttattcattatctgaagtacgtgatggtggtgtacaaacgtgagcctgccgtggagcgcgtaatcgaatttgccgctaaatttgtcaccagttttcatcagagcgatatggaagacgacgaggaagaggaggatggcggattacttaactatcttttcacctttttgctgaagtcccatgaggctaattccaacgctgtgcgttttagagtgtgccttctgatcaataagttgctgggtagtatgccagagaatgcccagattgatgatgatgtctttgataaaattaacaaggcaatgctgattcggctcaaagacaagattcctaacgtgcgcattcaagcagtgctagctctgtcgagactgcaagatccaaaggacgatgaatgtccagttgtgaacgcctatgcaaccctgatcgaaaacgacagcaatcccgaagtgaggcgtgctgtcctgtcctgtatcgccccctctgccaaaaccctccctaaaatagtggggagaacaaaggacgtgaaggaagccgtcaggaaacttgcctatcaggttctagccgagaaagtgcatatgcgggccatgtccattgcccaacgggtgatgctactgcagcagggcctcaatgaccggagcgatgccgtgaagcaggcaatgcaaaaacacctgctgcaaggatggctacgttttagcgaaggtaatatcctggagctgcttcataggttagacgttgaaaattccagtgaagtggccgtgtccgtgcttaacgcccttttttcaattacccctctttctgaactggtggggctttgtaagaataatgatggccggaaactcatccctgtcgagactctcacacctgagatcgcgctgtactggtgtgccctgtgtgagtatttaaaaagtaagggagacgaaggtgaagagtttctggaacagatactccccgaacctgtcgtgtatgcagactatctcctatcatacattcagagtataccagtcgttaacgaggagcatcggggagatttttcgtatatcggaaatctcatgacaaaagaatttattggccaacagctcatcctgattatcaagagcctcgacacctctgaggagggaggccgcaaaaaactcctggccgtgctacaagaaattctgatcctcccgactattcccatatctttggtctccttcctggtggaacggctgctgcatatcatcatcgacgacaacaagaggacacagatcgtgactgagatcatttcggagattcgggcacctatcgttactgtcggcgttaacaacgatccagctgacgtgagaaagaaagaacttaagatggctgaaataaaagtcaagttgatcgaagccaaagaggcactggagaactgtattacactgcaggatttcaaccgcgcctccgaattgaaagaggaaataaaggctctggaagacgctcggatcaatctgctcaaggaaaccgagcagcttgagatcaaggaggttcacatcgagaagaacgacgcggagacactgcagaagtgtcttattctctgttatgaactcctgaagcaaatgtccattagcactggattaagtgcaactatgaacgggatcattgaatcattgatcctacccggcattatttcaatccaccctgtcgtgcggaacctggctgtgctttgcctcggatgttgcggccttcaaaatcaagatttcgcacggaaacactttgtgctcctcctgcaagtgctgcaaatcgacgatgttactattaaaatctccgctcttaaagccatcttcgaccaattgatgacatttggcattgaaccttttaagactaagaagataaagacgctccattgcgagggaactgaaattaatagcgacgatgagcaggaaagtaaagaggttgaggagacggccacggctaagaatgtcctgaagctactgagcgactttctggactccgaggtttcagagttgcggactggtgcagccgagggtctggcgaagctgatgttcagcggccttttggtgtcatccagaattctctcacggctcatcttgctctggtacaaccccgtgacagaagaggacgtgcagctccggcattgtttgggcgtgttcttccccgtgttcgcttatgccagcaggaccaatcaagagtgctttgaggaagcatttctgccaacccttcagaccttggccaacgcccccgcctcatctccactagcagaaattgacattacaaatgtggctgagttgttagtcgacctgacaaggccttccggcttgaacccccaagctaaaacctcacaagactaccaggcccttaccgtgcacgacaacctagccatgaaaatttgtaatgagatactgacttctccttgtagccccgaaattagggtgtatactaaggcgctgtcctccctcgagttgagtagtcatttggccaaagaccttctagttctcctgaacgagatcctcgagcaggtaaaagaccggacatgcctgcgtgcactggagaaaattaagattcaattggagaaagggaataaggagtttggcgaccaggctgaggccgctcaggacgcaacattgacaacaaccacctttcagaatgaggatgagaaaaacaaggaagtgtacatgaccccactgaggggcgtgaaagccactcaagccagcaagtccacccaactgaaaacaaaccgcgggcaaagaaaagtcaccgttagtgcccgcaccaatcgccggtgccagacggcagaggcagatagtgagtccgaccacgaggtgcctgagcccgagtccgagatgaagatgaggttacctagaagggccaagaccgcagcgctggagaaatctaaactgaacttggcacagtttctcaatgaggacctttcttag

SEQ ID NO: 197504 - DNA, 951 bp, synthetic construct
  misc_feature 1..951: note = Description of Artificial Sequence: Synthetic coding sequence
  source 1..951: mol_type = other DNA
atgagcggcgacagcagcggccggggccccgagggccggggccggggtagggacccacaccgggacaggacacgctcaagaagccgatctaggtctccattgtcgcctagaagccgcaggggcagcgcgcgagaaagacgggaggcccccgaacgccccagcctggaagacactgaaccctctgatagcggggatgagatgatggatcccgcctcccttgaagcggaagccgatcagggcctatgccgccagattagacatcaataccgcgctctaataaattctgtccagcaaaaccgagaggatattcttaatgcgggcgacaaactgactgaggtccttgaggaggccaatacgctatttaacgaagtcagccgggccagggaagccgtcctcgacgcccactttctcgtccttgcttccgatctcgggaaagaaaaagccaagcagctgagaagcgacctgtcatctttcgatatgttaaggtatgtggagacactcctcacgcacatgggcgtcaaccccctggaggccgaggaattaataagagacgaggacagcccagattttgaattcatagtatatgacagctggaagattacggggcgcaccgccgagaacacgtttaataaaacgcataccttccattttcttctgggcagcatctatggggagtgccccgtgcctaagcccagagttgatcggcccaggaaggtcccggtgatccaagaagaacgggccatgccggcccagttgcgccggatggaggagtcccaccaagaagcaaccgaaaaagaggtcgaacggatccttggccttctacagacatatttccgcgaggatcgggacagccttaccttgtcaccacggctggaatgcagtgggaccatctccactcactgcaatttacatcttctagatagttccaattctccagcatctgcctcctag

SEQ ID NO: 197505 - DNA, 1158 bp, synthetic construct
  misc_feature 1..1158: note = Description of Artificial Sequence: Synthetic coding sequence
  source 1..1158: mol_type = other DNA
atgagcggcgacagcagcggccggggccccgagggccggggccggggccgcgatccccacagggatagaacccgaagccgctcgaggtccagatctccgctgtcgcctcgttctagacgaggttccgccagagaaagacgggaggcacctgaaagaccatctcttgaggacacagaaccctctgatagcggagatgaaatgatggaccccgctagcctggaagcagaggccgaccaagggctgtgccggcagatccggcaccaatacagagctttgattaactccgtccagcagaatcgcgaagatattctgaacgctggcgacaaacttactgaagtgctggaggaggcgaatactctgtttaacgaagtctccagggctagagaagcagtgttagacgctcacttcctggtgcttgctagtgacttagggaaggagaaggcaaagcagcttcggtccgatctttccagctttgatatgctccggtatgtcgaaactctactgactcacatgggagtgaacccactggaggccgaggagctcatacgggatgaggactctcctgatttcgaattcattgtatatgactcctggaagatcaccggaagaactgccgagaacacttttaataaaacacacactttccatttcttactcggaagcatctacggagaatgccccgtacccaaaccgcgtgtggatcggccccgtaaagtccccgtgatccaggaggaacgcgccatgcctgctcagctgaggagaatggaggaaagccaccaggaagccaccgagaaagaagtagaaagaattctaggtttactgcaaacatattttagggaggatccggacacccctatgtccttcttcgactttgttgtggatccccactcttttcctcggacagtggaaaatatctttcacgtgtctttcatcatcagagatggctttgcccggatccgtttggaccaagaccgcttgccagttatagaaccagtgagcattaatgaggaaaacgaaggcttcgagcataatacacaggttcgcaaccaaggaatcatcgccctatcgtatagagactgggaggaaatcgtgaagacattcgagatttctgaaccggtgataactccctctcagcgtcagcaaaaaccctctgcgtag

SEQ ID NO: 197506 - DNA, 519 bp, synthetic construct
  misc_feature 1..519: note = Description of Artificial Sequence: Synthetic coding sequence
  source 1..519: mol_type = other DNA
atgctgcggtacgtggagaccctgctgacccacatgggcgtgaaccccctggaagccgaggaactgatcagagatgaggattcgccagatttcgagttcatagtctacgactcatggaaaatcaccggccggacagcagagaatacgttcaacaagacccacaccttccactttctgctgggaagtatttacggggaatgtcccgtcccaaaaccacgagtggatagaccccgaaaggtgcctgtcattcaagaagaaagggctatgcctgcacaactgcgcaggatggaagaaagccaccaggaggccaccgaaaaagaagttgagcggatactgggtcttctccagacatatttcagggaggatccagatactcctatgtcattttttgactttgtggtcgacccccatagctttccacggactgttgaaaacatctttcatgtgtcctttatcatcagagacgggttcgccagaatccgtttggatcaggacaggcttccagtgatcggcaaatag

SEQ ID NO: 197507 - DNA, 2574 bp, synthetic construct
  misc_feature 1..2574: note = Description of Artificial Sequence: Synthetic coding sequence
  source 1..2574: mol_type = other DNA
atggccaaggccaagaaggtgggcgcccggcggaaggccagcggcgctcccgctggcgctcgcggaggacctgcaaaggccaactctaacccgtttgaagtcaaggtcaaccggcagaaattccaaatcttgggcaggaagacccggcatgacgtaggcttgcctggggtatcccgggcccgggctctgagaaaacggacccaaaccctcctgaaagaatacaaagaacgagataaatctaatgtattccgggataagcggtttggggagtacaattccaacatgagccctgaggagaagatgatgaagcgatttgctctcgagcagcagaggcaccatgaaaagaagtctatttacaaccttaacgaggatgaagaactgacccactacggccagtcccttgccgacattgagaagcacaacgacatcgtggattccgacagtgatgccgaagatcgaggcaccctttctgcggaattaaccgccgctcacttcggaggcggcggtgggctcctccataaaaaaacccagcaggaaggtgaggaacgggaaaagccaaaaagtcggaaggagctgatcgaggagctgattgccaaaagcaaacaggagaaaagggagaggcaggcgcaaagagaggatgccctggagttgactgaaaagcttgaccaggattggaaggagatccagactctcttgtcccacaagacccccaagtcagaaaacagggacaagaaggagaaacccaaacctgacgcctatgatatgatggttagagagcttggattcgaaatgaaagcacagccgtccaaccgcatgaagacagaggcagagctcgccaaggaggagcaggagcatctcaggaaactggaggccgaaaggcttaggaggatgcttggtaaggacgaagatgagaatgtgaagaagccaaagcacatgtctgcagatgatctgaatgacggatttgtacttgataaagacgacaggcgtttgttaagctataaagatggcaagatgaatgtggaagaggatgtgcaggaagaacagtctaaagaggcctctgatcctgagagtaacgaggaagagggggattcaagcgggggggaggacacggaagaatccgattcacccgattctcatctcgatctggaaagtaatgtcgagagcgaggaggaaaacgaaaagccagctaaggaacagcgacaaactcccgggaaaggactgatctctgggaaggagagagcgggcaaagccacacgggatgaattgccatacactttcgctgcaccagaatcttatgaggagctacggagcctgctgctgggaagatctatggaagaacaactgcttgtcgttgaacggattcagaaatgcaaccatccttcattggcagagggtaacaaagccaaactggagaagctattcggatttctgctagagtatgtgggagatctggccacagacgatcctccagatctgactgttattgacaaacttgtcgttcacttataccacctctgccagatgttcccagaatcagcttctgatgccatcaaatttgttctgcgagacgcgatgcacgagatggaagagatgattgagaccaagggccgcgctgcccttcccgggctggacgtcctcatataccttaagatcacgggattgctgttccccactagcgatttctggcatcctgtggttactcctgctctggtgtgtctgagtcagttgctgacgaagtgccctatattgtcactacaggatgtagtgaaaggattatttgtttgctgcctcttcttggaatatgtcgcactcagccagagattcatacctgaactgataaattttctgctgggcatcctatatattgcaactcctaacaaagcaagccagggcagcaccctcgttcatccatttagggcacttggaaagaacagcgaactgcttgtggtctccgctagagaggacgtggccacttggcaacaatcaagcctgtccctcagatgggcttcccggctgcgagcacctacaagcaccgaagcaaatcatatccggctgtcctgcttagccgtgggtctggcactgctgaaacggtgtgtacttatgtacggcagcttgccctccttccatgccattatgggcccgttgcaggcactcctgacagatcacttagctgattgctctcacccacaggaactccaggagttatgccagtcaactttaacagagatggagtctcagaagcagctgtgcaggcctcttacatgtgagaagtcaaagcccgtacccctaaagctgttcactcctaggctcgtgaaagtgctggaattcgggcgtaagcagggctcctccaaggaggaacaggaaaggaaacgtcttatccataagcacaagcgtgaattcaaaggcgccgttcgtgagattagaaaagacaaccaattcctagctcggatgcaactgtccgagattatggaaagagatgctgagaggaaaaggaaggtaaagcagctgtttaatagtctggctactcaggagggtgagtggaaagccctgaagcgcaagaaattcaaaaaatag

SEQ ID NO: 197508 - DNA, 2421 bp, synthetic construct
  misc_feature 1..2421: note = Description of Artificial Sequence: Synthetic coding sequence
  source 1..2421: mol_type = other DNA
atggccaaggccaagaaggtgggcgcccggcggaaggccagcggcgctcccgccggagctagaggaggccccgccaaagcaaattcaaatccatttgaagtaaaggtcaataggcagaagttccaaatcctgggtcggaagacacggcacgacgtcgggttacccggcgtcagcagggcccgggcattgaggaagaggacccagacactcctgaaggaatataaagagcgagataaatcaaatgtgttccgggataaacgcttcggagaatacaattccaatatgagtccagaagagaaaatgatgaagcggtttgcgctggagcagcagcgccatcatgagaaaaagtctatatacaatctgaatgaggatgaggagctgactcattatggacaatcactagccgacattgagaaacataatgacatcgtggattctgattccgacgccgaagatcgtggaactctttccgctgaactgaccgctgctcactttggcgggggaggcggcctgctgcacaaaaagactcaacaagaaggcgaagagagagagaagccaaagtcgagaaaagagttaatcgaagagctcattgccaaatcaaaacaggagaaaagagaacggcaggcccagcgtgaagatgctctggaactgacagaaaagcttgaccaagactggaaagagatacagaccctgcttagtcacaaaactccgaagtctgaaaatcgggataagaaggaaaaaccgaagcccgacgcatatgatatgatggtccgcgagctcggcttcgaaatgaaggctcagcctagtaacagaatgaaaactgaggcggagttagcaaaggaggagcaggaacacctgcgcaagcttgaggcggagaggctccgccgaatgctggggaaagatgaagatgaaaacgtgaaaaagccaaaacatatgtcagccgacgatctcaatgacggctttgtgcttgataaagacgataggcgcctcctgagttacaaagatggaaagatgaacgttgaggaggatgtgcaggaggaacagagcaaggaagcctctgatcctgaaagtaacgaggaagagggcgactccagcggcggagaagacacggaagaatctgacagtcctgattctcacctggacctggaatcaaacgtcgaaagtgaggaggaaaatgaaaagccagcaaaggagcagaggcagactcccggcaagggacttatttcagggaaagagcgcgctggtaaggcgacccgcgatgagctaccgtatacctttgcagctcccgaatcctatgaggagctacgttcactcctactcggccgctcgatggaagagcagctcctcgtcgtcgagcgaatccagaagtgtaatcaccccagcttggctgaggggaacaaggcgaagttggaaaagctcttcggtttcctgctggagtacgtgggcgacttagcaaccgacgatcctcccgatctgaccgtgatcgataagctcgttgttcacttataccacctgtgccagatgttccccgaatccgcttccgacgcgattaagtttgtgctgcgcgacgccatgcacgagatggaagagatgattgagacgaagggaagagccgccctgcccggcctagacgtcctgatatacctcaaaataacaggcctcctatttccaaccagcgacttctggcacccggtagtcacacccgccttagtgtgcctttcacagctgttaactaagtgccccattctgtccctccaggatgttgtgaaaggcctctttgtctgttgcctgtttctggagtatgttgccctatcccagcgttttattccagagctgattaattttttgctagggattctctatatcgctaccccgaacaaagcttcccaggggtccaccctggtacatccctttcgggctctcggcaagaattcagaattgttggtagtgagcgcccgagaggatgtggctacgtggcaacaaagtagtctgtctctgcggtgggcttccagacttagagcgccaacttctactgaagccaatcacatccgcctttcatgtctcgccgttggactggccctgttgaagagatgtgttctgatgtacggcagtctgccctcttttcacgccatcatgggcccactccaggcactgctcaccgatcaccttgccgactgctctcaccctcaggagctgcaggagctgtgccaatctacccttaccgaaatggaatctcagaagcagctatgtcgcccactaacctgtgaaaagtcgaaacccgtccccctgaagctgtttacaccgcggttggtttccaacagccggccccaggttattcatcttccttggcctccaaactataggtgcgaaccacagcatccagctaagaaagtgatctttttccgagtgatcatgctgtag

SEQ ID NO: 197509 - DNA, 2574 bp, synthetic construct
  misc_feature 1..2574: note = Description of Artificial Sequence: Synthetic coding sequence
  source 1..2574: mol_type = other DNA
atggccaaggccaagaaggtgggcgcccggcggaaggccagcggcgcccccgcgggtgcccggggcggccctgcaaaggcaaactcaaatcctttcgaggtaaaggtcaataggcagaagtttcagatcttgggaaggaagaccaggcatgatgttgggctacccggagtttctagagctcgagctctccggaaacggacacagacactgctaaaggaatacaaagaacgtgacaagagtaatgtgtttcgagacaaaaggttcggcgagtataacagcaacatgtccccagaggagaagatgatgaaacgttttgcattggaacagcagcgtcaccatgagaagaagagcatttacaacctgaacgaagatgaggagctgacgcactacggacagagcttggccgacatcgagaaacacaatgacattgttgactcagactccgatgcggaagatagggggactctgtccgccgagcttactgcagcccattttggcggcggcggcggactgctccataaaaagacacaacaggagggcgaagaaagagagaaaccgaaatcccggaaggagctcatcgaggagctcattgctaaatccaagcaagagaagagagagaggcaggcccagcgcgaggacgcactagagctaaccgagaagctggaccaggactggaaggaaattcagacattactcagtcacaaaacacccaagtccgagaatcgcgacaaaaaagagaaaccaaaaccagacgcctatgatatgatggttcgcgaactcggatttgagatgaaggcccagccatcaaaccggatgaaaacagaagccgaacttgcgaaggaggagcaggaacacttacgtaagctggaggcggaacgcttaagaaggatgttgggaaaagatgaggacgagaacgtgaagaagcctaagcatatgtccgccgatgatttgaatgatgggttcgtcctggacaaagatgatcggaggctcctctcttacaaggacggtaagatgaatgtggaagaagacgtgcaggaggagcagtcaaaggaggccagtgatcccgagtctaacgaagaggaaggggactcttctggtggggaggataccgaggagtcagatagccccgactcccatttggatctggagtccaacgtggagagcgaggaggaaaatgaaaagccggccaaggagcagcgccagacgcccggaaagggcttaattagtggaaaggagcgcgccggcaaagctacccgagacgaattaccgtatacctttgcggccccagagagctacgaagagttgcgaagcctactcctcggacgctctatggaggaacagttgttggtggtggaaaggatccagaaatgcaatcatccttcactagcagagggaaacaaggctaaactcgagaaactgtttggattcttactggagtatgtcggtgacttagctacagacgatccaccggacctcacagtgatcgacaagctggtagtgcatctgtaccacctctgtcagatgtttccagagagtgcaagtgacgccatcaagttcgtcctgagggatgcaatgcatgaaatggaagagatgatcgagactaagggccgcgccgctctgcctggccttgatgtcctgatttaccttaaaatcacaggtctcctttttcctacaagtgatttctggcaccccgttgtgacacccgccctggtgtgcctttctcagctgctgaccaagtgccccatcctaagtttgcaagatgtggtcaaaggactattcgtttgttgcctttttctcgaatacgtggcgctgagccaacgctttatccctgagctgatcaattttctactcgggattctctatatcgccacgccaaacaaggccagccagggctctacattagtgcatccatttagagccctaggaaaaaattctgagcttctggtcgtctccgccagagaggacgtggccacgtggcagcagagctctttgtccctgcggtgggcatcgcgtttgcgagctccaacgagcacggaggctaatcatatccggctgtcatgtctggctgtagggctggcgttgctgaaaaggtgcgtactgatgtatggaagtctgccctcctttcacgcaataatggggcccctgcaggccctcctgacggatcaccttgccgactgcagtcatccgcaagaacttcaggaactgtgccagtccaccctgacagagatggaaagccaaaagcagttgtgtagacccctgacctgcgagaagagcaaacctgtaccactcaagctcttcacaccacggctggttaaggtcctggaatttggtaggaagcagggatcttctaaagaggagcaggaaagaaaaagactgatccacaaacacaagcgggagttcaaaggtgcggtgcgggagatccggaaagacaatcagtttctggcacggatgcaactgagcgaaattatggagcgcgatgccgaaaggaaaagaaaggtcaagcaactcttcaatagccttgcaacccaggagggcgagtggaaagccctgaaacgaaaaaagttcaaaaaatag

SEQ ID NO: 197510 - DNA, 1728 bp, synthetic construct
  misc_feature 1..1728: note = Description of Artificial Sequence: Synthetic coding sequence
  source 1..1728: mol_type = other DNA
atgaagcggttcgccctggagcagcagcggcaccacgagaagaagagtatttataacttgaatgaagacgaagaactgacccactacggacagagtctcgcggatatcgagaagcacaacgacattgtcgactcggactccgatgctgaagaccgggggaccttatctgctgagttgacagccgcccactttggtgggggcggtgggctcctccacaagaagacacagcaagaaggcgaggagagagagaaaccgaaatccagaaaggaacttatcgaggagctgattgccaaatcaaaacaggagaaaagggaaaggcaagcacagagagaggatgctctggaactgacagaaaagctagatcaggattggaaggagatccagactctcctgagccacaagacccccaagtccgaaaatcgtgacaaaaaagaaaagcccaagccagacgcttatgatatgatggtgagggagctcgggtttgagatgaaagcccagccttccaatcgcatgaagacagaagctgagttggcaaaagaagaacaggagcatctgcgcaagcttgaggctgaacgtctcagacgcatgctcggcaaagatgaagacgaaaatgtgaagaagcctaagcacatgagtgctgatgatctgaatgatggtttcgttctggacaaggatgaccgtcgactgctatcttataaggacggtaaaatgaacgtcgaagaggacgtgcaggaagaacaatcaaaggaagcctctgatcctgaatccaacgaggaagaaggagatagttctggcggcgaggacaccgaagaatcagatagccccgactcacacctggacttagagtcaaacgttgagtccgaagaagagaatgagaaacctgccaaagagcaaaggcagactcccggtaaagggttaatttccggaaaagaacgcgctgggaaggccaccagggacgagctgccctacaccttcgctgcaccagaatcttacgaggagttgagatccctacttctgggacgaagtatggaggagcagctattggtggtcgaacgtatccaaaaatgcaatcacccctctctagcagaaggcaacaaagctaaactcgagaaactgtttgggtttctcctggagtatgtcggggatctggccaccgatgatccccccgatctcactgtcatagacaagctggtggttcatctatatcatctatgccaaatgttcccagagagcgcttcggatgccataaagttcgtcttacgcgacgccatgcacgaaatggaggagatgattgagacgaaggggcgggccgcactgcccgggttggacgtgctaatatacctcaagattacaggcttattgtttcctacaagcgacttctggcacccagtcgtgacacctgcactggtttgtttgtcccaactgttaactaagtgccctatccttagcttgcaggacgtggtgaagggcctgtttgtctgttgtctgtttctagagtacgtcgccctgtcacagcgtttcatccctgaattaatcaatttcctgctcggtatcctgtacattgccacacccaataaagctagccaggggagcactcttgtccacccgttcagagccttaggaaagaattcagaactgctggtggtctcagccagagaagacgtggctacgtggcagcagtctagtctcagtctgcgttggtggagccggatccctgatttgaggtag

SEQ ID NO: 197511 - DNA, 2304 bp, synthetic construct
  misc_feature 1..2304: note = Description of Artificial Sequence: Synthetic coding sequence
  source 1..2304: mol_type = other DNA
atgggccggcggagccggggccggcggctgcagcagcagcagcggccagaagacgcagaagacggagcagaggggggcgggaaacgcggggaagccggttgggagggagggtacccagagatagtaaaggagaataagttgttcgagcactattaccaagagctgaaaatcgtacctgagggtgagtggggtcagttcatggatgcgctccgcgagccactgccagcaactttgcgcataactggctataaatctcatgctaaagaaatattacactgcctaaagaacaaatacttcaaggagctcgaagatctcgaggtagacgggcagaaagtggaagtccctcagccactatcatggtatccagaagaactcgcctggcacactaatctctcccggaaaatccttcggaaaagcccccatctcgagaagtttcaccagtttttggtgtccgagactgagtcgggcaacatttcccgacaggaagccgtgtccatgattccgccgttgctgctgaacgtccgcccccatcataaaatcctggatatgtgcgccgcaccaggcagcaagaccacccagctgattgagatgctccatgccgatatgaacgttcctttccccgaagggtttgtgatcgccaatgacgtagacaataagcggtgttatctgctggtgcaccaggccaaaaggctttcttctccatgtataatggtagtgaaccatgacgcctccagtattccccggctccagatcgatgtggatgggagaaaagagatccttttctacgacagaattctgtgcgacgtcccttgcagcggggatgggacgatgcgcaagaatatcgacgtctggaaaaagtggactacattgaactcgctgcagttgcatggactgcaactccgcatcgctacccggggggccgagcaactggccgaaggaggcagaatggtctatagcacttgcagcctgaacccaatcgaagatgaggccgtaatagcttcacttctcgagaaatctgagggggcactggagctcgccgacgtgagtaatgagttgcctggtctgaaatggatgcccggtataacccagtggaaggtgatgaccaaagatggccagtggtttacggactgggatgccgtgccgcactcccggcatacccagattcgccctaccatgttcccgcctaaagatccggagaagctgcaagcaatgcatttggagcgctgccttaggatcctgccccaccatcaaaacaccggcgggtttttcgtagccgtcctggtcaagaaatcctctatgccatggaacaagcgtcagcccaagctccagggaaagtctgccgagactcgcgaaagcactcagttatcacccgccgaccttacagaaggaaagcctactgatccctcgaaattagagtccccttctttcaccggaactggggataccgagatcgcacatgccacggaagaccttgagaacaacggtagcaaaaaagacggagtatgcggacctccaccttcaaagaagatgaagctctttggattcaaggaagaccctttcgtttttatcccagaggacgacccactgttcccccccatcgagaaattttacgcattagatccctcatttcctcgcatgaatcttctaaccaggacgactgagggcaagaaacgacagctttacatggtcagcaaggaactcaggaatgtgctgctgaacaattcagaaaagatgaaggtgatcaacacaggcatcaaggtgtggtgtcgtaacaatagcggggaagaatttgactgcgccttccggctggcccaggaaggcatctataccctctaccccttcattaactccagaattatcactgtttccatggaggacgtgaagattctcctcacgcaggagaacccattttttagaaaattgagctcagaaacctattcacaggcgaaggacttggcgaaagggtcaatcgtgcttaagtacgaacccgactcggctaatccggatgcactgcagtgtcccattgttctgtgcggatggcgcgggaaggcatcaataaggactttcgtgccgaagaacgagcggcttcattaccttcgcatgatgggacttgaggtgctcggcgaaaagaagaaggaaggggtgatcctgacgaacgagagtgctgcttcaactggccaaccggacaacgatgtcaccgaggggcagcgtgccggcgagccaaattcacctgatgccgaggaggcaaatagtcccgatgtcactgctgggtgtgacccggcaggggtgcacccgccaagatag

SEQ ID NO: 197512 - DNA, 1596 bp, synthetic construct
  misc_feature 1..1596: note = Description of Artificial Sequence: Synthetic coding sequence
  source 1..1596: mol_type = other DNA
atggtggtgaaccacgacgccagcagcatcccccggctgcagatcgatgtagacggccgcaaagaaatacttttctatgaccggatcctctgtgatgtgccatgctctggcgatggaaccatgagaaagaacatcgacgtgtggaaaaaatggaccaccctcaattccttgcagttacatgggctacagcttagaatcgcaacccgcggggcagagcagctcgccgagggcggccggatggtctacagcacttgctccttgaatcccatcgaggatgaagctgttatcgccagccttctagaaaagtccgagggcgcactcgaattggccgatgtgtctaatgagttgcctggtcttaaatggatgcctggtattacccagtggaaggtgatgaccaaagatggacagtggtttacagactgggacgctgtgccccactcacggcatactcaaattcggcccaccatgttcccgcctaaggatccagaaaagcttcaggcaatgcaccttgaaaggtgtttgagaatcttaccccatcaccagaatacaggaggctttttcgtggcggtcctggttaaaaagagcagtatgccttggaacaaaagacagcccaaactacagggcaaatccgcggagactcgcgagtcgacccaactgtctccagcagacttgacagaggggaaaccaacagatccctcaaaactggagtcgccgtctttcaccggcacgggagacactgagattgcgcacgcgacagaggatttggaaaataacgggagcaaaaaggatggcgtgtgcggccctcctccttccaagaagatgaagctcttcggctttaaagaggacccattcgttttcataccagaagatgaccccctgttcccacctatagaaaaattctacgccctcgatccatcattcccccgcatgaatcttttaacccgcaccaccgagggaaagaagcgccaattgtacatggtctctaaggaattacgtaacgtcctattaaacaactctgaaaagatgaaagtgataaacaccggaattaaggtgtggtgcaggaataactctggggaggagttcgactgtgcctttaggttagcacaggagggaatatacaccttgtatcccttcattaactctcggattatcacagtatcaatggaggacgtcaagatcctccttacccaggaaaacccctttttcagaaagctgagtagcgagacctattcccaggctaaagatctggccaaggggtctatagtgctcaagtacgaacctgactccgcaaaccctgatgcccttcagtgccccatcgtgttgtgtgggtggcgcggaaaggcatccattcgaacctttgtccccaaaaacgagaggctgcattacctcaggatgatgggcctcgaggttctgggggagaaaaaaaaagaaggagtgatcctaactaatgaatccgcagcatcaaccgggcagccagataatgacgttaccgagggccaacgagccggggaaccaaactcacctgacgcagaagaggctaactccccagatgtgactgccgggtgtgatccagcaggcgtacaccctccccgctag

SEQ ID NO: 197513 - DNA, 2199 bp, synthetic construct
  misc_feature 1..2199: note = Description of Artificial Sequence: Synthetic coding sequence
  source 1..2199: mol_type = other DNA
atgggccggcggagccggggccggcggctgcagcagcagcagcggcctgaggatgcagaagatggtgctgaaggcggcggtaagcggggagaggctggatgggagggaggatacccagagatcgtgaaagagaacaagctgttcgaacactattaccaggagctgaagatagtccctgagggcgagtgggggcaattcatggatgcccttcgggaacctcttccagccacactgcgcataaccggatataagagatacccagaggagttggcctggcatactaatctttccaggaagattttgaggaaatccccacatctcgagaagttccaccagttcctcgtgtctgaaactgagtccggaaatatctcgcggcaggaggcggtgtcaatgattcctcccttgctgctgaatgtacggcctcaccacaaaatcctggatatgtgtgcagcccccggtagcaagacgactcaactgatcgagatgctgcatgccgatatgaacgttccattccctgaggggttcgtcatcgccaacgatgtggataacaagcgctgttatcttctggtccatcaggcgaaaaggctttcgtccccatgtattatggtggttaatcatgatgcctcttccatccctaggctgcagattgatgtggatggcagaaaggagatattgttttatgaccgcattctctgtgatgttccgtgctccggcgacggaactatgcgcaagaatattgacgtgtggaagaaatggactacgttaaacagcctccagttgcacggcctgcaactccgtatagcaacacgcggggccgagcagttggctgaggggggtagaatggtttatagcacatgcagtttaaaccctatcgaagacgaagcggtgatcgcaagtctcctagagaaatccgaaggagccctggagctggctgacgtgtcaaacgaacttcctgggctgaagtggatgcctggaatcacccagtggaaggtgatgacgaaggatgggcagtggttcaccgactgggacgctgtacctcacagcaggcacacacaaattcgccctactatgttcccacctaaggaccccgagaagctccaggcaatgcatctcgaaagatgcttgaggatccttccccaccatcaaaacacgggaggcttctttgtcgcggtgctcgtaaagaagtcatctatgccatggaataaacggcagcccaagctgcagggaaagtctgccgagacccgggagtctacccagttaagcccggctgatctcaccgagggaaagcccacagatccttccaaactagaatcaccttcctttactggaaccggggacaccgagattgcccacgccactgaggacctagaaaacaatggatcaaagaaagacggcgtttgcgggcctccaccatcaaaaaaaatgaagctctttggctttaaagaggacccattcgtgttcattccagaagacgacccactctttccccctatcgagaaattttacgcactggacccgtcttttccaaggatgaacttactcacaaggacaactgagggcaaaaaaagacagctgtatatggtttcaaaagaactgcgaaacgtgctcctgaacaactcagagaaaatgaaagtcattaacactggcatcaaagtgtggtgtcggaataacagcggagaggagtttgattgtgcctttcgcttggctcaagaggggatttataccttataccccttcatcaattcccgcatcattacagtctccatggaggatgtaaagatactattgacccaggaaaaccctttttttcgaaaactgagctctgagacttactctcaggccaaggatctcgccaagggctccatcgtcttgaaatacgaacccgattcggccaaccctgatgcactgcagtgccccatcgtcctctgcgggtggcgtggcaaagccagtatacgaacctttgtgccgaagaacgagagacttcactatctgcgcatgatgggacttgaagtgttgggcgagaagaaaaaagagggcgtgatcctgacgaacgaatctgccgcgagcactggccagcctgataacgacgtcactgaaggccagcgagccggagagccaaacagtcccgatgctgaggaggctaactcccccgacgtcaccgcgggttgtgatcctgctggcgttcacccacctcggtag

SEQ ID NO: 197514 - DNA, 1785 bp, synthetic construct
  misc_feature 1..1785: note = Description of Artificial Sequence: Synthetic coding sequence
  source 1..1785: mol_type = other DNA
atggtgctgctgcacgtgctgttcgagcacgccgtgggctacgccctcctggccctgaaagaagtggaagagatctcactgctacagccacaagtggaggaatccgtcttgaatctgggcaaattccactccattgtgcgtcttgtcgctttctgccctttcgcatcctcacaggtggccttggaaaatgcaaatgctgttagcgaaggcgtagttcacgaggaccttaggctcctgctcgaaacccatctcccttcaaaaaagaagaaagtgctgctcggcgttggtgatcctaagataggcgcggccatacaagaggagctgggctacaactgccaaaccgggggcgtgattgcagagatcttacgcggggttcgtctccactttcacaacttagtcaaaggcctgacagatctctcggcctgcaaagcccagctgggactagggcactcctattctagagcaaaggtgaaattcaacgtgaatagagtggacaacatgataatccagtcaatttcacttttggaccagcttgacaaggatattaacacatttagcatgcgtgtcagagagtggtacgggtaccacttccccgaactagtgaaaataatcaacgacaacgccacttattgtcgcctcgcacaattcataggcaaccggcgtgagttgaacgaagacaagctggagaagcttgaagagctgaccatggatggggccaaggcaaaagccatcttggatgcatcgaggagttcgatgggcatggacatttctgccattgaccttattaatatcgaatcttttagttctcgcgtggtctccctgagtgagtaccggcagtcactgcatacatatcttcgaagtaagatgtcacaggtggccccaagcctgagtgccttgatcggagaggccgtaggggcccgattgattgcccatgccggttccctcaccaacctggcaaaatacccggccagcaccgtgcagattcttggggccgagaaggccctcttccgcgcgctcaagacgaggggtaatacacccaagtacggcttgatcttccattccacctttatcggacgcgccgccgccaagaataagggacgcatcagtaggtatttggccaataaatgttctatcgccagccgcatcgattgcttctctgaagtccctactagcgtgttcggagaaaaactccgagagcaggtcgaggaacgcttatctttctatgaaaccggggaaatcccccgaaaaaatttggacgttatgaaggaagccatggtgcaggctgaagaggccgccgcggagatcacacggaagttagaaaagcaagagaaaaagagactgaaaaaggaaaaaaaacgcctggctgccttagcactggcctccagcgagaactcctcatctacccctgaggagtgcgaagagatgtctgagaagcccaagaaaaaaaagaaacagaaaccccaggaggtgccgcaggagaatggcatggaagaccccagcatatcattttcaaaaccaaagaaaaaaaagagcttttccaaggaagagctgatgagctcagatctggaggaaaccgctggaagcacctccatccccaaacgcaaaaaaagcactcctaaggaggagacggttaatgaccctgaggaggcaggtcaccggagcgggtccaagaagaagagaaagttttcaaaggaagaacccgtctcaagtggccccgaggaagctgtggggaaaagtagcagtaaaaaaaagaaaaaattccataaagcatcacaggaggattag

SEQ ID NO: 197515 - DNA, 678 bp, synthetic construct
  misc_feature 1..678: note = Description of Artificial Sequence: Synthetic coding sequence
  source 1..678: mol_type = other DNA
atggacatcagcgccatcgacctgatcaacatcgagagcttcagctcacgcgtcgtgtcactatccgaataccgccagtctctgcatacctacctgcgaagcaaaatgagccaggtggccccctctctgagcgctctcataggcgaagcggtaggagcaagactcatcgcacatgctggcagcctcacaaacctagcaaagtatcccgcaagtacagtgcagatcctgggagcagagaaggctctgtttcgtgccttaaaaactaggggcaatacaccgaaatatggcctgatcttccattctactttcattgggcgtgccgcggcaaagaacaaaggacgtatatctcgctacctcgctaacaaatgctccatcgcctcacggatcgactgcttcagtgaagtgccaacttcagttttcggagagaagctgcgtgagcaggtcgaggagagactgagcttttacgaaactggcgagatcccacgtaagaacctggatgtcatgaaagaagctatggtgcaagctgaagaagctgccgcggagattacacgcaagcttgagaagcaagagaagaagagactcaagaaggaaaaaaaaaggcttgccgcattagctctcgcatccagtgagaacagcagcagcactcctgaagagtgcgaggaaggcgaccgatgttag

SEQ ID NO: 197516 - DNA, 660 bp, synthetic construct
  misc_feature 1..660: note = Description of Artificial Sequence: Synthetic coding sequence
  source 1..660: mol_type = other DNA
tgactgatcaacatcgagagcttcagcagccgggtggtgagcctgtctgagtacaggcaatctttgcatacatatcttaggagcaagatgtcccaggtagcccccagcctgtccgccctgataggcgaggcagtgggggcccggctgatcgcacacgcagggtcactcacaaatcttgctaagtatccagcaagcaccgtgcagattctaggtgctgagaaggccctctttcgagcacttaaaactcgaggcaacacgcctaagtatggcctaatcttccactctaccttcattggacgagccgcagctaaaaacaagggcaggatatctaggtacctagcaaataaatgttcaatagcctcccgcatcgattgcttttccgaggtaccgacatctgtcttcggcgaaaaattacgggaacaggtggaagagagactctcgttttacgagacgggagaaattccgcgaaagaacctggacgtcatgaaggaggcaatggtacaggcagaggaagccgctgccgagattacacgaaaactggagaagcaagagaagaaacgcctcaagaaagaaaaaaagagattagccgcattggccctcgctagtagcgagaactccagcagtacaccagaggaatgcgaggagggcgatcgctgctag

SEQ ID NO: 197517 - DNA, 846 bp, synthetic construct
  misc_feature 1..846: note = Description of Artificial Sequence: Synthetic coding sequence
  source 1..846: mol_type = other DNA
atggtgctgctgcacgtgctgttcgagcacgccgtgggctacgccctgctggccctgaaagaggtggaagagatctcattgctgcaacctcaggtggaagagtctgtgctgaacctcggtaagtttcatagcatcgtgaggctcgtcgccttttgtccctttgcctcaagtcaggtggcacttgagaacgcaaatgccgtgtcggaaggagtggtccatgaggacctgcggctcctgctggagacccacctgccaagcaagaagaagaaggtactactgggagtcggagatccgaaaattggcgccgccatccaagaagagctcggatacaattgtcagacaggtggagtgatcgcagagatcctgaggggcgtgcggctgcacttccataatcttgtcaaaggcctcacagacttaagtgcctgtaaggcccagctgggactgggccactcctacagccgagctaaggtcaaattcaatgtaaacagggtggataatatgattattcagagcatcagcttgctcgatcagctggataaggatataaacactttctccatgcgagtaaggcaatctagatgcggcgagggcaaagctgttgccctgtggttcctcatgaaacagctcggtcagggagtgaccgtggcactgtgcagagaatggtacggttatcatttccccgaactagtgaagattatcaatgacaatgccacctattgccgtttagcccagtttattggtaaccgcagggagttgaatgaagacaagctagaaaagcttgaagaactgacaatggatggcgccaaggccaaggccatactggatgccagtcgatcaagcatgtag

SEQ ID NO: 197518 - DNA, 402 bp, synthetic construct
  misc_feature 1..402: note = Description of Artificial Sequence: Synthetic coding sequence
  source 1..402: mol_type = other DNA
atgcggaagcacgtgctggccgccagcttcagcatgctgagcctgctggtcatcatgggtgacacggacagtaagaccgactcaagctttatcatggacagcgacccaagacgatgtatgcgacaccactacgtcgattcaatctcccaccctctgtacaagtgttctagcaaaatggtcttgcttgctaggtgtgaggggcactgcagccaggcaagccgctctgaacctctcgtctctttcagcacggtgcttaagcagccattcaggtcctcttgccactgttgtaggcctcagacttctaaactcaaggctctgagattaagatgcagtggaggtatgagactgacggcaacttaccgctacattctgtcctgccactgcgaggaatgtaactcttag

SEQ ID NO: 197519 - DNA, 7416 bp, synthetic construct
  misc_feature 1..7416: note = Description of Artificial Sequence: Synthetic coding sequence
  source 1..7416: mol_type = other DNA
atgcccgccctgcggcccgccctgctgtgggccctgctggccctgtggctctgttgcgcggccccagcccatgctctgcaatgtagagatggttacgaaccttgcgtgaacgagggtatgtgtgtaacttaccataatggcaccggatattgcaaatgtccagagggattcctgggcgagtactgtcagcatagagatccttgtgagaagaaccgatgtcagaacggcgggacatgcgtagcacaagccatgctgggcaaggccacatgcaggtgtgctagcggcttcacgggcgaagattgccagtactctacatcacacccttgctttgtgagtaggccttgtcttaacggtggcacctgtcatatgctctccagggacacctacgaatgcacgtgtcaggtcggtttcacgggaaaagagtgccagtggactgacgcttgtctgagtcatccctgtgctaatggatctacatgcaccaccgtcgcaaatcagttttcctgtaagtgcttgacaggtttcaccggccagaaatgcgaaaccgatgttaatgagtgtgacattccagggcactgtcagcatgggggcacatgtctcaatctaccagggagctatcagtgtcaatgtcctcagggattcacaggccagtattgtgatagcctgtacgtgccatgcgcaccctcaccttgtgtcaacggcggaacatgtcgccagacaggagacttcacatttgaatgcaattgcttacctggtttcgaaggtagcacatgcgagagaaatatagatgactgccctaaccaccggtgtcagaacggcggggtttgcgttgacggcgtgaacacttataactgtaggtgtcccccacagtggaccggccagttctgcactgaagacgtcgacgagtgcttgctgcagcccaatgcctgtcagaacgggggaacttgcgccaatagaaatggcggatacggatgtgtgtgcgtgaacggctggagcggagatgattgtagtgaaaatatcgatgactgcgcgtttgccagttgcacgcccggcagcacatgcattgatcgcgtagcctccttctcctgcatgtgtccagaggggaaggctggcctcctctgtcacctggatgacgcatgcatttcaaatccttgccataagggcgctctgtgtgatactaacccgcttaatgggcagtatatatgtacctgcccacaggggtacaagggagcagactgcacagaagacgtggatgaatgcgccatggccaactccaacccttgtgagcacgccggcaagtgcgtgaacacagacggggccttccattgtgaatgccttaaggggtacgcaggacccaggtgcgagatggacataaatgaatgccattctgatccttgccagaatgacgctacctgcctggacaagattggagggttcacatgtttgtgcatgccaggattcaaaggagtacactgtgagctcgaaatcaacgagtgccagagcaatccatgcgtcaacaacggacagtgtgttgataaagtgaacaggttccaatgtctgtgtccaccggggtttaccggtcctgtttgtcagatagacattgatgattgctcctctaccccatgcctcaatggtgctaagtgcatcgaccacccaaacgggtacgagtgccagtgtgcaaccggatttacaggcgtgctgtgcgaggaaaatatagataattgtgatcccgacccctgtcaccacgggcaatgccaggacggcattgattcctacacctgcatttgcaatcctgggtatatgggagccatatgcagtgatcagatcgacgagtgttatagctcgccatgtctcaacgatgggagatgcattgacttagttaatggttaccagtgcaactgccagcccggcacatccggagtgaactgcgaaattaatttcgacgattgcgctagtaacccttgcatacacggcatctgtatggatggcatcaaccgttactcgtgcgtgtgttctcccggatttacaggtcagcggtgcaatattgacatcgatgagtgtgcttctaacccatgtcgaaagggtgctacatgcatcaacggggtgaacggctttcgttgtatttgtccagaagggcctcatcatccgtcttgctactcacaggtgaatgagtgtttatccaacccctgtattcacggcaactgtacaggggggctgtctggatacaaatgcctgtgcgatgccggctgggtcggcatcaattgtgaggtcgataagaatgaatgtctgagtaatccctgtcagaacgggggtacatgtgataacctcgttaacggttaccgatgcacttgtaaaaaaggatttaaaggttacaattgtcaggtgaatatagacgagtgcgcgtctaatccatgccttaaccagggaacttgttttgacgatatttcagggtatacctgccactgtgtcctgccttatactgggaagaactgtcagaccgttcttgctccatgctcacccaatccatgcgaaaatgccgccgtttgtaaagagtctccaaattttgaaagttatacttgtctgtgtgctccagggtggcaaggacaacgctgcaccattgatattgacgagtgcatttcaaagccttgtatgaatcacgggctgtgtcataatacgcaggggtcttacatgtgtgagtgtcctccaggattttcgggcatggattgcgaggaagacattgatgattgcctggccaacccatgccaaaacggaggctcttgcatggacggcgtcaatacgttcagctgcctttgtttgcccggctttactggcgacaagtgccagaccgacatgaatgagtgtcttagcgagccttgtaaaaacgggggaacctgctctgattacgtcaactcttatacctgcaagtgccaggcaggtttcgatggggtacactgtgagaataacatcaatgagtgcacggagtctagttgttttaacggcggcacttgtgtggacggcatcaactccttctcatgtctctgccccgttggattcacaggatccttttgtttgcacgaaatcaatgaatgttcctcccacccttgtctaaacgagggcacctgcgtcgatggcctgggaacgtatcgttgttcttgcccactggggtacacgggcaagaattgtcagaccctggttaatctgtgctcccgctctccatgtaagaataaaggcacgtgcgtgcagaaaaaagcggaaagccagtgcctttgtccttcaggatgggcaggggcttattgtgacgtacccaacgtgtcctgcgatattgccgctagcagacgaggtgtcttggtggagcacctgtgtcagcattctggcgtctgcataaatgcaggaaacacccactactgccaatgcccactggggtataccggatcgtattgcgaagaacagctggacgaatgtgcaagcaatccttgccagcatggggctacatgtagtgatttcattggaggctaccggtgcgaatgtgttccaggataccagggcgtgaactgtgagtatgaagtagacgagtgccagaatcaaccatgtcagaacgggggcacttgcatcgacctcgtcaatcacttcaagtgtagctgtcctcctggaacacgcggtttgctttgcgaggagaatatagatgactgcgcgagggggcctcactgtttaaatggtggacaatgcatggatagaatcggtggctacagctgtcgctgtctccccggttttgccggggaaaggtgtgaaggcgatattaatgagtgtcttagcaatccatgctcatctgagggttctctggattgtatccagttgacgaacgattatctgtgcgtttgtagaagtgccttcacaggaaggcattgcgaaaccttcgtggacgtgtgcccacaaatgccctgtttgaacgggggcacctgcgcagttgccagcaacatgccagacggctttatctgtcgctgtccaccaggattttccggtgcgcgctgccagagcagctgcggacaggttaagtgcaggaagggagagcagtgcgtgcacactgccagcgggcctcgatgcttctgtccaagccccagggactgcgagtcaggttgtgcctcctctccttgtcagcacggcggtagctgccaccctcagcggcagccgccatactactcgtgccagtgcgcacctccattcagcggatcacgatgcgaactctataccgcgcctccctctacaccccccgctacctgtctgtcacaatactgcgctgataaagccagggacggagtttgtgatgaagcgtgtaactcgcatgcatgtcagtgggacggtggtgattgctcccttacgatggagaacccttgggcaaattgtagctcccccttaccctgctgggactacattaataaccagtgtgacgagctgtgcaacactgtggagtgtctctttgacaactttgaatgccagggtaattccaagacttgtaaatacgacaagtactgtgcagatcacttcaaagataaccactgtgatcagggatgcaatagtgaggagtgcgggtgggatgggcttgactgcgccgccgatcagccagagaatctggcggagggaaccctggtgattgtcgtattgatgcctccagaacaactgctccaagatgcccggtcatttttgagagccctgggtacactacttcacaccaacctgcgaatcaaaagggacagccaaggggagctgatggtatatccatactatggagagaaatctgctgcgatgaagaagcagaggatgacacggcggtccctgcctggcgagcaagagcaagaggtcgcaggttctaaagtgttcctggaaatcgacaatcgacaatgcgtccaagatagtgatcattgttttaaaaacacagacgctgccgccgcactgttggctagccatgccatccagggcacgctgagttacccattggtgagtgtggtctcggaatccttgactcccgagcggacccagttactgtacctgttagcagttgcagtggtgattatactcttcatcattcttctgggagtgatcatggctaagaggaagagaaagcatggctctctctggttgccggaaggattcacactccgccgcgacgctagcaatcacaaaaggagagagccagttgggcaggatgctgtcgggttaaagaacctgtccgttcaggtctctgaggccaatcttatcggaaccggtacttccgaacactgggtcgacgatgaaggtccacagccaaagaaagtgaaggccgaggatgaggccctactttctgaggaggacgatcccatagatagacggccatggacacaacagcacttggaggcagctgacatccgcaggacccctagcctagcactgacaccaccacaggcagagcaggaagtcgatgttctggatgtgaatgttaggggaccggacgggtgtacccctttaatgctggctagcctacgaggggggtcctctgatttatccgacgaagatgaagatgccgaggactcctctgctaatatcatcacagacctcgtgtatcagggggcctcactgcaggcccagacggatcggactggcgagatggcattgcatctggccgcccggtactcccgggcagacgccgcaaagagattgttggatgcgggcgctgacgcgaacgcgcaggataacatggggcgatgccccctgcacgccgccgttgctgccgacgctcagggagtatttcagatcctgatccggaaccgcgtaacagacctcgacgctaggatgaacgatggaaccacccctctgattctcgccgccagattagcagtagagggcatggtcgctgagctgatcaattgccaggcggatgtgaacgctgtcgacgaccacggcaaatccgcattgcattgggctgctgcagtcaacaatgttgaagctacgctcctgttactcaagaatggcgcaaatcgcgatatgcaggataacaaggaagaaactcctctcttcctcgctgctcgggagggttcctatgaggcagccaagattctgctggatcattttgccaatcgggacattaccgatcacatggacagacttccacgggacgttgctagagaccggatgcaccacgacatcgtgagattactagacgagtacaatgttacaccctctcctccaggtacagttctaacaagcgcccttagtccagtgatttgtgggcctaacaggtcatttttgtctttgaagcacacccccatgggtaagaagtctcgcagaccttcagctaaaagcacaatgcccacttcactgcctaatctagcaaaagaggctaaggacgcaaaagggtctcggaggaagaaaagtctgtcggaaaaagtgcagttgagcgaatccagcgtaacactctcccctgtagatagccttgaaagtccccatacctatgtgtcggatacaactagctcccccatgattacatcaccaggcatactgcaggcctcccccaatccaatgctagcaaccgccgctcccccggccccagtgcatgcccagcatgctctgtcctttagtaatttacacgagatgcagcctctggcacacggagcctctactgtgcttcctagcgtcagccagctattatcacatcaccacatcgttagtcccggctctggctctgctgggtctctatctaggctccatcctgtccccgttcctgcggattggatgaaccggatggaagtgaacgagacccagtataacgagatgtttggaatggtgttagcccctgcagagggtactcatcctggcatcgcgccacagtctaggccgcccgaaggcaagcacatcaccacccctagagaacctctcccacccatagtgacctttcaactcattccaaaggggtcgatcgcccaacctgccggagccccccagccccagtccacctgtccgcccgccgtggccgggccattgcctaccatgtaccagataccggagatggcccggctgccatccgtggctttccccactgccatgatgcctcaacaggacggacaggtggcccagacaattcttccagcttatcacccgtttccagcttctgttgggaaatacccaacccctccaagtcaacactcatatgcctccagtaacgccgcagaaagaacccctagccacagcgggcacctgcaaggtgaacatccatatcttacaccatcaccggagagcccggatcagtggtcttcttcatcaccacacagcgcatcggactggtcagacgttaccacatcaccaacaccagggggggctgggggcggccaacgcggacctggcacgcacatgtccgaacctccacacaacaacatgcaggtgtacgcctag

SEQ ID NO: 197520 - DNA, 711 bp, synthetic construct
  misc_feature 1..711: note = Description of Artificial Sequence: Synthetic coding sequence
  source 1..711: mol_type = other DNA
atgtgcgtgacctaccacaacggcaccggctactgcaagtgccccgaaggatttttaggggaatattgccagcacagagacccatgtgaaaaaaaccggtgtcagaatggagggacctgcgtcgcccaggctatgcttggcaaagcgacatgcaggtgtgcctccggattcactggggaggattgccagtactctacctcgcatccctgcttcgtgtcccgcccttgtctgaacggtggaacctgccatatgttaagccgtgatacctacgagtgcacgtgccaggtcggttttacgggtaaggagtgccagtggactgacgcctgcctgtcccacccatgcgctaatgggagtacttgtactacggtggcgaaccagtttagttgcaaatgcctcactggtttcaccgggcagaagtgcgagaccgacgtgaacgagtgcgacattccaggtcactgccaacacggaggcacctgcttgaacctgcctggatcttatcagtgtcaatgcccacagggctttaccggccagtactgcgacagtctgtatgtgccctgcgcacccagcccgtgtgttaacggggggacatgccgacagacaggggacttcaccttcgaatgcaattgcctgcccgagacagtgagacgcggaaccgagctgtgggaacgggacagacaggtctggaatggaaaagagcatgatgagaattag

SEQ ID NO: 197521 - DNA, 720 bp, synthetic construct
  misc_feature 1..720: note = Description of Artificial Sequence: Synthetic coding sequence
  source 1..720: mol_type = other DNA
tgccgggacggctacgagccctgcgtgaacgagggcatgtgcgtgacatatcacaacggaacaggttactgcaaatgtccagaagggttcttaggtgagtactgtcagcaccgcgacccctgcgaaaagaatcgctgccagaacggtggaacctgcgtggcccaggccatgttagggaaggcgacatgtagatgtgcctctggcttcactggcgaagattgtcagtactctacctcacacccttgttttgtgagtcgaccgtgtctcaacggaggaacatgtcatatgctctctagagacacctatgagtgtacatgccaggttgggttcacgggaaaggaatgccagtggacggatgcttgtctaagtcatccctgtgccaatggcagtacctgtaccactgtcgccaaccagttttcctgcaaatgcctgacaggatttacaggccaaaaatgcgagaccgatgtcaacgagtgcgatatcccaggccattgtcagcatgggggcacatgtctgaacttaccaggttcctatcagtgtcagtgtccacagggttttactggccagtactgcgactctctctatgtcccatgtgctccatctccctgcgtcaacgggggtacctgccgccagactggggacttcacttttgaatgcaattgtcttcccgcatgctggccaaggactccggacctgagactgcttctgggcgaaaaatag

SEQ ID NO: 197522 - DNA, 672 bp, synthetic construct
  misc_feature 1..672: note = Description of Artificial Sequence: Synthetic coding sequence
  source 1..672: mol_type = other DNA
atgtggatctgccccggcggcggcggcggcggcggcggcggcggcgaccgcgaggatgctcgtcctccattatgttgcggccgctgctggcggtccggttgcgccgccaggcccccaagaatggtctctattggcctgaggggtgcagtcaggggagcccgcggttgccatctcggaaggccgttcagtccttctgtgttactgtgcgtcggcagaccaggtagtgcagccggtgccgagagggggcactcgctaggatctcaggaattcggtcacagacggggcccccttccctggtgccccgctaatagaagagggtcgcctccctcagctcccagaggtcctggcccgctgacaaggctgctaggtcgccgggaggcgggcagtaaatcacagaaacttctctttcgttccgcccgcgtccaggggggaggccagttttgccccagcggttccgctttcctgggggttgagcgggaaccaacagctgggctgggcggagctgagaggcgcaatgcaaggttttggaggggggagcgagggcagggtcgccaagcaaaaagaccggcaccatctcagccggcttctcctctccccgggggtggcacctgggccggctgtgtcggtttagtctggatgggcaccgggttttgcggggctcctgagttttag

SEQ ID NO: 197523 - DNA, 2592 bp, synthetic construct
  misc_feature 1..2592: note = Description of Artificial Sequence: Synthetic coding sequence
  source 1..2592: mol_type = other DNA
atgtgcgtgacctaccacaacggcaccggctactgcaagtgccccgaagggttcctaggagagtactgccagcatcgggatccatgtgaaaagaatcgttgccagaacggagggacatgcgtcgctcaagccatgctggggaaggctacgtgtcggtgtgcctctgggttcactggggaagactgtcagtacagcacaagccacccgtgctttgtgtcccgcccttgtctgaatggtggaacttgtcacatgttgtcacgtgatacatatgagtgcacctgtcaagtgggatttacaggcaaggagtgtcaatggacggacgcctgcctttcacacccctgtgccaacggctcaacttgcaccacggtcgcaaaccagttttcatgcaaatgcctgaccggatttaccgggcagaagtgtgaaactgatgtcaacgagtgcgacattccgggccactgccagcatggcggcacatgtctaaatcttcccggctcatatcagtgccagtgtccgcaaggattcacaggtcagtattgcgactctttatacgtcccctgcgcaccttccccatgcgtgaacggcggcacatgcaggcagactggcgactttacatttgagtgtaattgtctgcccggcttcgaggggagtacctgcgaacgcaatatcgatgattgccccaatcataggtgccagaacgggggagtctgtgtggatggagtaaatacctacaattgcaggtgccccccacagtggacaggtcaattctgtaccgaagacgtcgacgagtgcctgttgcagcctaatgcatgccagaacggtggcacatgcgccaacaggaatggagggtacggttgcgtgtgtgtgaacgggtggtcaggagacgattgcagtgaaaacatcgatgattgtgcttttgctagctgcacccccgggagcacctgtatcgatcgggtcgcaagtttcagttgtatgtgccccgagggaaaggccggtctcctttgtcatcttgacgatgcatgcatctccaatccttgccacaagggggcgctgtgcgataccaatccactgaacggccagtatatttgcacttgcccccaaggatacaagggcgctgattgcaccgaagacgtggatgaatgcgctatggccaattctaacccttgcgagcacgccgggaagtgcgtgaacactgacggggctttccattgcgaatgtctgaaaggttatgcgggcccccggtgtgaaatggacatcaatgagtgccatagcgatccatgccagaacgacgcaacttgtctggataagataggcgggttcacctgcctgtgcatgcctggttttaagggcgtacattgcgaactggagatcaacgaatgccagtccaatccgtgtgtaaacaacggacagtgcgtcgacaaagtgaaccggtttcagtgcctctgcccacctggttttacaggtccggtgtgtcaaattgatattgacgactgcagctctaccccatgtctgaatggcgctaagtgcattgatcaccctaacggctacgagtgtcaatgcgcaaccggcttcacgggtgtgttgtgcgaagagaacatcgacaactgtgatccggatccctgccaccatggccagtgccaggatggaattgattcctacacctgcatctgcaaccctgggtacatgggtgctatttgtagtgaccagatcgatgagtgttatagctctccctgtctcaacgatggtaggtgcatcgatctggtcaacggctaccagtgcaactgccagccaggaacctcaggggtcaactgtgaaataaattttgatgactgcgcgtctaatccttgcatccacggcatttgtatggatgggatcaaccgttatagttgcgtgtgcagcccaggattcaccggtcagcgatgtaatatagacattgatgagtgcgcatctaatccgtgccggaaaggcgctacttgcattaatggagtcaatggctttagatgtatatgtccggaaggccctcatcatccatcctgctacagtcaggtcaacgagtgtctgtccaacccctgcatccatgggaactgtactggcgggctgtcgggttataagtgcctttgtgacgcggggtgggtaggcattaactgtgaagtcgataaaaatgaatgcctgtcgaacccctgccagaatggcggaacatgtgacaatctggtaaatggctacaggtgtacttgcaaaaaaggcttcaaagggtacaattgccaggttaacattgatgagtgcgccagcaacccttgtctgaatcagggaacctgctttgacgacattagcggctatacttgccactgcgttctaccttataccggagggtcgtggaggtatcagcagggacctgagggaattttggatctagcgttatccgtcccagagagccagtgccccggcttgtgggggtgtaacgctcccccacgagcccattcaagtgttgtcctccctgcttttaccgattggattctctcttttgaggagactctctggccacccaagatgcaggtggtggatagccatctcccaaccctgtacttttcaatctag

SEQ ID NO: 197524 - DNA, 6966 bp, synthetic construct
  misc_feature 1..6966: note = Description of Artificial Sequence: Synthetic coding sequence
  source 1..6966: mol_type = other DNA
atgggccccggcgcccggggccggcggcggcggcggcggcccatgtcccccccacctccaccgccaccggtccgggccctgcccctgttgctgttactggccggccctggggctgccgctccaccatgccttgatggtagtccatgtgccaatggcggtaggtgcactcagctgccatccagggaggctgcatgcctctgtccccctggatgggtcggagagcggtgccagctggaggatccatgccactccgggccttgcgccggccgcggagtgtgtcaatccagtgtggtcgccggaaccgccagattctcctgtcggtgccctcgcgggtttcgcggccctgattgttcacttcccgatccgtgtctgtctagcccgtgcgctcatggagccagatgtagcgtcggacccgatgggaggtttttgtgctcttgtccaccaggctaccagggtcgaagctgccgatccgatgttgacgaatgcagggtgggggagccatgcagacacggagggacttgtttaaacacccctggcagctttcgatgtcagtgccctgcaggctacactggcccattgtgtgaaaatccagcggtaccatgtgcaccgagcccctgtcgtaatggtggtacatgtagacagtccggagatttaacctatgattgcgcatgcctgccaggattcgagggccaaaattgcgaggtcaacgtggacgactgtccagggcatcgctgcctcaacggggggacatgcgtggatggcgtgaacacatataattgtcagtgccctccagagtggactggacaattttgtacagaggacgtagacgagtgtcagttgcagcccaatgcttgccataatggcgggacttgtttcaacacactcggaggacattcctgcgtgtgtgttaacggatggactggtgagtcttgttcccagaacatcgacgactgcgcaaccgctgtgtgttttcatggcgctacatgtcacgatcgcgtggcatcattttattgtgcttgtccgatgggaaaaactggactgctatgccatctggatgacgcctgcgtcagtaacccatgccatgaggacgccatatgcgacaccaaccccgtcaacggtcgggccatttgcacgtgtccccccggatttactggtggagcatgcgatcaggacgtggacgagtgttccattggcgctaatccgtgcgaacaccttggcaggtgtgtgaacacccaggggagttttctgtgtcaatgcggccgcggttacaccggtccgcgctgcgaaaccgatgtcaacgagtgtctgagcggtccctgtcggaaccaggctacctgtcttgaccgaataggtcagtttacctgcatttgcatggccggctttaccggaacatattgcgaggtggacatagatgagtgtcaatcttctccttgtgttaacgggggcgtttgcaaggatcgggttaacgggttcagctgcacatgcccctccggatttagtggatcgacgtgtcaactggatgttgacgaatgtgcctccacgccctgccgtaacggcgctaaatgcgtggaccagcctgacggttatgaatgcagatgtgccgaggggtttgagggcacactgtgtgacaggaacgtagacgactgcagtcctgacccatgtcaccacgggagatgcgtcgacggcattgcaagcttctcatgtgcatgcgcaccaggatacacgggaacccgttgcgagagtcaagtcgatgaatgccgcagccagccttgtaggcatggtggcaagtgcttggacctggtggacaaatacttatgcagatgcccttcaggcacaaccggtgtgaattgcgaagtgaacatcgacgactgcgcttccaacccctgcacctttggtgtttgcagggatgggatcaatagatatgattgcgtctgtcagccaggcttcacaggaccactgtgcaatgtagagattaacgaatgcgcctcctccccatgcggcgaaggggggtcatgcgtcgacggtgagaatggattccggtgtctttgccccccgggctccctcccccccctgtgccttccccctagccatccttgcgctcacgagccctgttctcacggaatatgctacgatgcacctggcggatttcgctgtgtttgtgagcctggttggtccggtcctaggtgctctcagtctctggccagagatgcgtgcgagtcccagccctgcagagctggaggcacatgctctagcgacggaatgggcttccactgcacctgtcctcccggcgtccaaggtaggcagtgtgagctgcttagtccctgtacccctaacccctgcgagcacggaggcagatgtgaatccgcccctggacagttaccagtttgttcatgcccacaggggtggcaaggcccccgatgtcaacaagacgtagacgagtgtgccggacctgccccctgcggaccccatgggatatgcaccaacctggccgggtccttcagctgtacgtgtcacggtgggtacacagggcccagttgtgatcaggatataaatgactgtgacccaaacccttgtctcaacggggggtcatgccaggacggggtgggctcattttcatgcagctgtctgcccggttttgccggaccccggtgtgctagagacgttgatgagtgtctgagcaatccttgcgggcccggcacatgcacagatcacgtggcctcctttacatgcacatgccccccaggctatgggggattccattgtgaacaggaccttccggactgttctcctagttcttgcttcaatgggggaacttgcgtggacggggtgaacagcttctcctgcctgtgtcgaccagggtacactggtgcccactgtcagcacgaagctgatccctgcctgtcaagaccgtgtctgcatggaggtgtgtgctccgccgcacatccagggttccgatgcacttgtctggagtcatttacagggcctcagtgtcaaactctggtggattggtgctcaagacagccctgtcagaacggcggcagatgcgttcagaccggtgcctattgcttgtgcccaccaggatggagcggcaggctctgcgatataagatccctcccttgcagggaggcagccgcccagatcggcgtgcgcctcgagcagctttgccaagcaggggggcagtgcgtggatgaggactcttctcattactgcgtctgccctgaaggacggacaggcagccactgcgagcaggaggtggatccctgtctggctcagccatgccagcatggcgggacctgtagagggtatatgggggggtacatgtgcgagtgcctgcccgggtataacggagataactgtgaggacgacgtggacgagtgcgcgtctcagccatgccaacatggaggatcctgcatcgacctcgtggcacgctacctgtgctcttgtcctccagggacattaggagtgttatgtgaaatcaacgaagatgattgcggtccaggcccaccactggactcaggtcccagatgcttacataatggcacctgtgttgatcttgtcggaggattcagatgcacgtgtccacctggttacaccggactcagatgtgaggctgatattaatgaatgccgctccggcgcctgccacgccgcacatacccgcgactgtctgcaggaccccggcggaggctttcggtgcctctgtcacgccggattctccggcccacggtgccagaccgtcctctctccatgtgagagccagccttgtcagcacgggggccagtgtcggccgagcccagggccaggaggcggactaacttttacatgtcattgcgcacagccattctggggaccccgctgcgagcgagtcgctcgctcatgtagggaattacaatgccccgtgggagtcccgtgtcagcagaccccacgtggtcccagatgtgcctgccctccaggtctatctgggccttcttgtaggtcatttcccggctcccccccaggagcgtcaaatgcttcttgtgcagccgccccctgtctgcacggaggatcctgtagacctgcgcccctcgcaccattcttccgctgtgcgtgcgctcaaggttggaccgggcctcggtgcgaagcgcctgccgcggctccggaagtaagcgaagagccacgctgtcctcgcgcagcatgtcaggcaaaacgaggagaccaaagatgcgaccgcgagtgcaattcacccggctgtggttgggatggaggcgactgcagtctgagcgtaggggatccatggaggcagtgcgaggctcttcagtgttggcgcctgtttaacaattcccggtgtgaccctgcctgtagctcccccgcctgtctctatgacaatttcgattgtcacgccggtggccgggagcgaacctgtaaccccgtgtatgagaagtattgtgccgatcacttcgccgacggcaggtgtgatcagggctgtaatacagaggagtgtggctgggacggcctcgattgtgcttctgaggtccccgccttgctcgcaaggggtgtccttgtgcttacagtcttgttaccaccagaagagctgcttcggtctagtgccgacttcctccagcggctgtccgccattctgaggaccagcctgcgatttcgcctagacgcccacggccaggcaatggtttttccatatcaccggccatccccgggatccgagcctcgagcaagaagggagctggcccccgaggtgatcggttctgtcgtgatgctagagatcgacaacagactctgtctgcagtcaccagagaacgatcactgctttcccgacgcacagagcgccgccgactacctgggtgctttgagcgccgtggaaagactggatttcccctatccactgcgagatgtgcgcggcgaacctctagagccacccgaaccgtccgttcccctccttcctttgctggtggccggagcggtcctgcttctggtgatactggtgttaggggtcatggtggcccggcggaaacgcgagcactccacattatggttcccagaggggtttagcttacataaagatgtggcatctgggcacaaagggagaagggagcccgtcggtcaggacgccttgggaatgaaaaatatggcaaagggcgaatcattgatgggagaggtggcaaccgattggatggatacggagtgccccgaggctaaaagactcaaggtcgaagaaccaggaatgggagccgaagaggcggttgactgcaggcagtggacgcaacatcatctcgtcgctgcggatatccgtgtggctccagctatggctctgacccccccacagggcgatgccgatgccgatggtatggatgtgaacgtccggggtcccgatgggtttaccccacttatgctggctagcttttgtgggggagctctggaaccaatgcccaccgaggaggatgaggccgatgacacatctgcgagcatcatttccgacctcatttgccagggggcacaactcggtgcaagaactgaccgcactggtgagaccgctctacacctcgccgcgcgatacgcaagagctgacgcggcaaaaagactgttagacgccggggcggatacgaacgcccaggaccacagcgggagaacccccctgcacaccgccgtcactgcagatgcccagggtgtgtttcagatcttaatcagaaatcgaagcacagacttggatgctagaatggctgacggaagcacagcactgatactggccgccaggctagccgtagaggggatggtggaggagctaattgcatcccacgcagatgtcaacgccgtggatgagctcggtaagtcggccctccactgggcggcagctgttaacaacgttgaagccaccctcgccctgcttaaaaatggcgccaacaaagacatgcaggatagtaaggaggaaacacctcttttcttagccgccagggagggcagctatgaggcagccaaactgctcctggatcatttcgctaaccgcgagatcaccgaccatctggatcgtcttcctcgagatgtggcccaagagcgactccatcaggacatcgtgagactcttagatcagcccagcggaccacggtcaccgccaggaccccacggactggggcctctgttgtgccctcctggcgccttcctgcccggcttaaaagctgctcagagtggatctaagaagagtaggcgaccacctggtaaggccggcttggggccgcaagggcctaggggtcgcggcaagaagttgacactggcatgtcctggccccctcgcagattcttcagttactctgagccctgtggactctctggactctccacgaccttttggcgggcctcccgctagtccaggtggttttccattagagggaccatacgctgccgctacggctaccgcggtgtccctggctcagcttggggggcccggcagagccggattaggcaggcagccacctgggggctgtgttctgagtctggggcttctcaaccccgttgctgtgccactcgattgggcacgtctgccgcccccggctccaccaggcccatcattcttgcttcccctggctcctgggccccagttgctgaatcccggcacacccgtgtctccccaggagcgccccccgccatacctggcagtcccgggtcacggggaagaatatcccgccgcaggagcgcatagctcgccgccgaaagctcggtttttacgggtaccctctgagcacccatatctcaccccgtctcccgaatctcccgagcactgggcttcccctagccctccaagtttgagcgactggtcagaaagtacaccatctcccgccacagccaccggagccatggcaacgactacgggcgctttgcctgcccagccattgcccctgtccgtgccgagttccctcgcacaggcgcagacccagctggggcctcagcccgaagttactccaaaaagacaggtgttggcctag

SEQ ID NO: 197525 - DNA, 3867 bp, synthetic construct
  misc_feature 1..3867: note = Description of Artificial Sequence: Synthetic coding sequence
  source 1..3867: mol_type = other DNA
gccgccatgggccccggcgcccggggccggcggcggcggcggcggccgatgtcaccaccgcccccccctccacccgtcagagctctgccacttctgctactgcttgctggccctggtgctgctgctcccccatgcctcgacggatcaccttgcgccaacggtggccggtgcacgcagttgccctcccgcgaagctgcgtgtctgtgtcctccaggttgggtgggagaaagatgccaacttgaggacccatgccactccgggccatgtgctggccgaggcgtatgccagtcttcagtcgtggcagggactgcgcgtttctcttgcaggtgtccacggggcttccgggggcccgattgctctttgcccgatccttgcctgtcctcaccatgcgcacacggtgcccggtgttcagtcgggcctgatggccggttcttatgctcttgcccgcccggctaccagggacgctcctgccgtagcgatgtggacgaatgcagagtaggcgagccttgcagacacgggggcacttgcctgaacacacctggatcttttaggtgtcagtgcccggctgggtacactggtcccctgtgcgaaaatcctgccgttccatgtgcgcccagcccctgccgcaatggggggacatgccgccagagtggtgatctgacctacgattgcgcttgtcttccgggtttcgagggccaaaactgcgaagtgaacgtggacgactgcccaggacatcgatgtttaaacggaggtacgtgtgtggatggggtcaatacttataactgtcaatgcccccctgagtggacaggacaattttgcacagaggacgtggatgagtgccagttgcagcctaatgcatgtcacaacgggggaacttgcttcaacaccttgggggggcactcctgtgtgtgtgttaacggatggacaggagaaagttgtagccagaatattgacgactgtgccacagcagtgtgttttcacggagctacctgtcacgaccgggtggccagcttctactgcgcttgtccgatgggaaagacgggactgctgtgccatttagacgacgcctgtgtctctaacccatgtcatgaggacgcaatctgcgataccaaccctgtgaacgggagagccatctgtacgtgtccccctgggttcacggggggcgcatgtgatcaggacgttgatgagtgtagcattggagccaatccctgcgagcatctcggaagatgcgtgaacactcaagggtctttcttatgccagtgcggtcgaggatacacaggaccaaggtgcgaaacagatgtgaacgaatgtttgtccggcccttgccgaaatcaagccacctgtttagatcgcatcgggcaattcacctgtatttgtatggccggatttactggaacctattgcgaagtggacattgatgagtgccagtcctccccgtgtgtgaacggcggtgtctgtaaggacagagtgaacggattcagctgtacttgcccttccgggttctcaggttccacctgccaactggatgtcgacgagtgcgcttctacaccctgccgtaatggcgctaaatgcgttgaccaacccgatggatacgaatgcaggtgtgctgaagggtttgagggcactttgtgtgatcggaacgtggacgactgttcccccgatccatgccaccacggcaggtgtgtggatggaatcgcctcattctcctgcgcctgcgcgcccggctatacaggcacccgatgtgaatcccaggtggacgagtgtaggtcccagccttgccgccacggtggcaagtgtctggacctcgtagataagtatctctgtcgttgtcccagcggaaccacaggagtgaactgtgaggtcaacatcgacgattgtgcctccaatccgtgcacttttggcgtgtgcagagacgggattaaccgatatgattgcgtgtgccaaccagggttcacgggaccactgtgtaatgtggagatcaatgaatgcgccagttctccctgcggggaggggggctcatgtgtcgatggggagaacgggtttcgctgtctatgtcctcccggtagcctgccccctctgtgccttccaccctcccacccatgtgctcacgagccttgctctcacgggatctgctatgacgcccctggtgggtttcgctgcgtctgtgaacccgggtggtctgggccacgttgttcacagtccctggctagagacgcctgtgaatcacagccttgcagagccggcggtacttgtagctccgacgggatggggttccactgtacatgtcctcctggggttcaaggccggcagtgtgagctgttgagcccgtgtacccctaatccatgcgagcatggcggaagatgcgaatcggcgcctgggcagctgcccgtgtgtagctgcccccaaggctggcaagacccgtgtctgaatggcggatcatgccaagatggcgtgggctctttttcgtgttcctgtttgcccggtttcgccgggccccgatgtgccagggacgtggatgagtgcttgtccaatccctgcggcccgggaacctgtaccgatcacgtggcttcctttacatgtacctgcccaccaggctatggcggcttccattgtgaacaggacctgccggattgttcacccagtagctgctttaacgggggcacttgtgtcgatggagttaattcattcagttgcttatgcagaccaggctataccggcgcccactgccagcatgaggcagatccgtgcctgtcccgaccatgccttcacgggggagtgtgctccgctgctcaccccggttttcgatgcacctgtctggagtcattcactggtccccagtgccagaccctagtggattggtgtagccgacagccttgccagaatgggggccggtgtgtccaaaccggggcttactgtctgtgcccaccagggtggtcagggaggctgtgtgacatccggtctcttccatgccgagaggctgctgcacagattggggttcggttagagcagctttgccaggccggcgggcagtgtgtggacgaagactcatctcactactgcgtctgcccagaagggcgcacaggctcccattgtgagcaggaagtagatccttgcctggcacagccatgtcagcacggcggcacctgtagaggatatatgggggggtatatgtgcgaatgtcttccaggctataacggcgataactgtgaggacgacgtggatgagtgcgcttctcagccatgccagcacggaggcagctgcatcgatctggtcgctcgatatttgtgctcttgtccaccaggcacgctgggtgttctatgcgagatcaatgaggatgattgtggccccggaccgcccttggattcgggcccacggtgcttgcacaatggtacttgcgtggacctggtaggaggcttccggtgtacttgtccccccgggtacaccggtcttaggtgcgaggctgatattaacgagtgcagatccggagcttgtcatgctgcccacactagggattgcctccaagaccctgggggaggctttagatgtctgtgtcacgccgggttctccgggccacgctgtcagacggtgctgagcccgtgcgagagtcaaccttgccaacacgggggacagtgtcgcccatctccaggaccgggggggggtctcacattcacatgccactgtgcgcagcctttttggggcccacggtgtgagagagtggcacgatcgtgtcgggagttgcaatgtccggtaggagttccttgtcagcagacaccaagaggaccacggtgtgcctgccctcctgggttgagcggcccatcttgtagaagctttcccgggagcccacctggggccagtaacgcttcctag

SEQ ID NO: 197526 - DNA, 6012 bp, synthetic construct
  misc_feature 1..6012: note = Description of Artificial Sequence: Synthetic coding sequence
  source 1..6012: mol_type = other DNA
atgcagccccccagcctgctgctgctgctgctgctgctgctgctgctgtgcgtttccgtagtgagacctcgcggattactgtgcggatctttccccgaaccctgtgccaacgggggcacatgcctctctctgagcctcgggcagggaacctgccagtgcgcgccgggatttctgggcgagacctgtcagttcccagatccatgccagaatgctcagctgtgccaaaacggcggatcctgccaggccctcctgcccgcccccttgggcctaccatcaagtcccagccccttgactcccagtttcttgtgtacatgccttccaggattcaccggggaacgatgccaggccaaattagaagatccctgtccaccctcgttttgttcgaaacgcggacggtgccacatacaggccagcggcagaccgcagtgcagctgcatgccaggatggactggagagcagtgtcagttaagagatttctgttcagcgaatccttgtgtgaatggcggggtctgccttgcgacctacccgcagatccaatgtcattgcccacccggcttcgagggccacgcgtgcgagcgggacgtgaacgaatgtttccaagaccccgggccctgtcccaaaggaacttcctgccacaacaccttgggaagtttccagtgcctgtgtcccgtcggccaggagggccctcgttgcgagctacgggctggaccctgtccgccccgaggttgcagcaatggcggcacgtgccaactaatgccagagaaagactctacctttcatttatgcctgtgccctcctggcttcatcggccccgactgcgaggttaacccagataactgcgttagccatcagtgccaaaacggagggacatgccaggacgggctcgatacctatacatgtttatgccccgagacgtggacaggttgggattgctcagaggatgtcgatgaatgcgaaacccaaggaccccctcattgcaggaacggcggcacctgtcagaattctgctggctcattccactgcgtgtgtgtttccggttggggaggcacctcctgcgaagaaaacttagatgattgtattgctgccacctgcgctccaggatccacctgtattgatagagtcggctccttcagctgtctgtgcccacctggcagaaccgggctgctttgtcacctggaggatatgtgtctaagtcagccctgccatggggacgcccaatgctcgacgaaccctttgaccggaagtactctctgtctatgtcagcccgggtactccgggcccacatgccatcaagatttagacgagtgcctcatggcacaacagggaccctctccctgcgagcacggagggtcatgcctgaatacgccagggagctttaattgcctctgtccacccggctacaccggctcccgctgcgaagccgatcataacgagtgcctgtcccagccatgtcatcccggcagcacctgcttggaccttctggctacatttcattgtctttgcccacccgggttggaagggcagctctgcgaagtcgagacgaacgaatgcgctagtgcaccgtgtttgaatcacgccgactgccacgatttgttgaacggcttccaatgcatctgtctccctgggttctccggtaccaggtgcgaggaagacattgatgagtgccgaagcagcccgtgtgctaatggcggccagtgtcaagatcagcccggcgccttccattgcaagtgcctgccaggcttcgaggggccccgctgccagacggaggtggacgagtgtttaagcgatccatgcccagtcggagcttcctgtctcgatctcccgggcgcttttttctgtctgtgtccgtccgggtttaccggccagctgtgcgaggtgcctctatgtgccccgaacttgtgtcagccgaagcaaatatgcaaagaccagaaggacaaggcaaactgcctgtgccctgatggttctcccggatgcgcacctcctgaggacaactgcacgtgtcaccacggtcactgtcagagatcctcctgcgtttgtgacgtcgggtggacaggccctgaatgcgaggctgagctcggcgggtgcatatcagctccctgcgcgcacgggggaacatgctatcctcagccatcgggctacaattgcacatgccctactggctatacaggtcctacttgttccgaagaaatgacagcctgtcatagcggcccatgcctgaacgggggttcatgcaatccctctcctggcggttactactgcacctgtcctccctcacataccgggcctcagtgtcagacgagtacagattactgcgtctccgccccctgctttaatggcggcacgtgtgtaaaccgccccgggaccttttcatgcttgtgtgcaatgggcttccagggccccaggtgtgagggtaaactccgcccatcttgcgcagacagcccatgtaggaatagggccacttgccaagatagccctcaagggcctcggtgtttgtgcccaactggatacactggtggatcctgccaaaccctgatggacctgtgcgcgcagaagccctgcccaagaaatagtcactgcctgcagactgggccctcattccattgcctgtgtttacaaggatggaccggccccctttgcaacctgccactgtcttcttgccagaaggccgcactatcccagggtatcgatgtcagcagtctgtgccataatgggggcctgtgtgttgatagtggaccttcatatttttgtcactgtccgcctggtttccaaggtagcctttgtcaggatcatgtaaacccttgtgaaagtcgtccgtgtcaaaacggagcaacttgtatggctcaaccaagcggttatctttgccagtgcgcgccagggtacgatggccagaactgttcgaaggaactggacgcatgccaaagccaaccctgccataatcatggtacctgcacacctaaacctggtggattccactgcgcctgcccccctggatttgtcggcctcaggtgtgagggtgacgtcgatgagtgtttggaccaaccgtgccacccaactggaactgctgcttgccatagtttagctaacgcattctattgtcagtgcctgcccggccataccggacaatggtgcgaggtggaaattgacccctgtcattcacagccttgtttccacggcggaacgtgcgaggccacagcaggaagcccactagggttcatctgccactgtcctaaggggtttgagggccccacctgtagccatagagcccccagctgtggcttccaccactgccaccatggcggattgtgtttgccttctcctaaacccgggtttccaccacgctgtgcctgccttagcggttacggcggcccagattgcctcactcctcctgcccccaaaggctgcgggccaccatctccctgtctgtacaatggttcctgttctgaaacgaccgggctggggggccctgggttcaggtgcagctgtccgcactccagccccggacctagatgccagaaacctggcgcaaagggatgcgagggacgttccggagatggcgcctgtgatgctgggtgttctggacccggtggaaattgggatgggggtgattgctctctcggtgtgccagatccctggaagggctgcccgtcacattccagatgttggttgcttttccgtgacggacagtgccacccccagtgtgattcggaggagtgcttgtttgatggctacgattgtgagacaccccccgcttgcactcctgcatatgatcagtattgtcacgatcatttccataatggccattgcgaaaaggggtgcaacacggcagagtgcgggtgggatggcggtgattgccggcccgaagacggtgatcccgaatggggaccatcccttgctcttctcgtggtcctctcaccacctgccctggatcaacagctgtttgccctcgcccgcgtcctgtccttaactttacgggttggcctttgggtgagaaaagatagagacgggcgtgacatggtgtatccctacccaggagcgcgcgccgaagaaaaactgggtgggacaagggatcctacctaccaggagagggcagcgccgcaaacacagccactgggcaaggaaaccgattccctgtctgctggctttgtggtggtgatgggtgtcgatttatcgcggtgcggaccagatcatcccgcatctaggtgcccatgggaccctggccttctattgaggttcctcgctgccatggctgctgtaggagcccttgaaccgctgctgcctggccccctgctcgctgtccacccccacgctgggacagcccccccggccaatcagttgccctggcctgttctctgtagtcccgtcgccggtgtaatactattggcactgggggccctgctggtcctgcaactgattcgccgtaggcggagggaacatggtgccctgtggttgccccctggctttactagaaggccccggactcaatccgccccgcataggcggcgaccacccctgggggaagactcaattgggttgaaggctctgaagcccaaggccgaggtggacgaagacggggtagttatgtgctctggacctgaggagggagaagaagtggggcaagccgaggaaacgggcccaccctcaacctgtcagctctggtcgctgtctggaggatgtggtgccttgccccaggctgcaatgctgacccctcctcaagagtccgagatggaagctcccgacctggatactagaggtccagatggtgtgaccccactgatgtctgccgtttgttgcggcgaggtccaatccggaaccttccagggtgcttggctgggttgtcccgagccatgggagccgctgctggatggtggggcctgtcctcaagcacataccgttggcacaggagagacacctctccacctagcggcacggttttctcgtcctactgccgctagacgtctacttgaggcgggagccaatccgaaccagccagaccgggccggccgaacaccacttcacgccgcggtggccgccgatgctagggaggtgtgccagcttctccttcgctctagacaaactgccgtcgatgcaaggacggaagacggtaccacacccctgatgctggccgctaggctggccgtggaagatctcgtcgaggaactgatagccgcacaggcggatgtcggagccagagacaagtggggcaagacggcgcttcactgggccgccgctgttaataacgcaagggccgcacgatccctcctgcaggctggcgctgacaaggacgcccaggataaccgtgagcagactccgctgtttctggcagcaagagagggggctgtggaggtcgctcagctacttcttggcctgggcgccgcgcgcgaactgagggaccaggctgggcttgcacctgcggatgtggcgcatcagcgaaaccactgggaccttctgactctgctcgagggcgctggtccacccgaagcacggcacaaagctacacctggaagagaagccggccctttccctagggctcgcaccgtctctgtgagtgttcctccgcatggtggcggagctctccctcgttgtagaacattatctgccggagcaggacccagaggaggaggcgcatgtctccaggccagaacatggtcagtagatctggccgccagaggtggcggcgcgtacagtcattgtagatccttgtctggtgtgggcgctggcggcggacctacaccccgaggtcgcagattctccgccggcatgcgtggccctagacccaatcccgccatcatgagggggcggtatggggtggccgcaggccggggagggagagttagcactgatgactggccatgcgattgggtggcactcggcgcgtgcggcagtgccagtaatatcccaatccctcctccgtgtcttacgccaagtcctgagagaggttcaccacagctggattgtggccccccagctctccaggaaatgcctattaaccaggggggcgaaggtaagaagtag

SEQ ID NO: 197527 - DNA, 3147 bp, synthetic construct
  misc_feature 1..3147: note = Description of Artificial Sequence: Synthetic coding sequence
  source 1..3147: mol_type = other DNA
tgcgcccccggctacgacggccagaactgcagcaaggagctggacgcctgtcagagccagccctgtcacaaccacgggacctgtactcctaagccgggcgggtttcactgcgcttgcccaccgggattcgtaggtctgcgctgcgaaggtgacgtcgatgagtgtctggatcagccgtgccatcctacaggcaccgccgcatgtcattccttggccaacgctttttactgccagtgcctgcccgggcacactggccagtggtgtgaggtcgagattgatccctgtcatagccagccatgtttccatggtggcacttgtgaagcgactgctggatctcccctcgggttcatatgccactgccccaaaggattcgaaggtccaacatgcagtcatagagccccgagctgcggctttcatcattgccatcatggaggactgtgtttaccttccccaaaacccgggttcccccccagatgcgcctgtttgagtgggtacgggggcccagattgccttaccccacctgctccaaaaggctgtggccctccttcaccatgcctctataatgggtcttgttccgaaactaccgggctgggcggccctgggttccgttgttcatgtccacattcttcacctggaccccggtgccagaaacctggcgctaaaggatgtgagggccggtcaggggatggagcctgtgatgccggatgttctggccccggcgggaactgggacggtggagactgctccctgggcgtaccggacccatggaaaggctgcccatcccacagccggtgctggttgctgtttagagacggacagtgtcatccgcaatgcgattcggaagagtgcctgtttgacggctacgattgtgagacgccacccgcgtgtacgccggcatacgaccagtattgtcatgatcatttccataacggccattgtgagaagggctgtaacaccgccgagtgcgggtgggacggtggagattgtcgacctgaggacggtgaccccgaatggggtccttctctagcactcttggtcgtgctcagcccccccgcccttgaccagcagctatttgccctggcgagagtgctgagcctcacactgcgcgtgggactgtgggtccggaaagaccgagatggccgggatatggtctatccttaccccggtgctcgagctgaggagaaactcggcggcacaagagaccccacctatcaggaacgggctgcaccgcagacccagccacttgggaaagagactgatagcttgtccgccgggtttgtggtggtcatgggcgtggacctctctagatgtggccccgaccaccctgcatcaaggtgcccttgggacccgggcctgctgttaagatttctggccgctatggccgccgttggtgccctcgagccactgctacccggccccctgttggcggtgcacccacacgccggaactgccccacccgcaaaccagctcccgtggccagtgctctgctccccagtggccggtgttatcttgctggcgctgggagcgctgttggtgctgcaactcattcgacgtcgccggcgtgagcacggggccctctggctacctcccggtttcacccgtcgcccacggacccagtctgcgccacataggcggagaccccccctgggtgaggactcgattggacttaaagccctgaagccaaaggctgaggtagatgaggatggcgttgtgatgtgcagcggaccagaggagggtgaggaggttgggcaagcagaggagacaggcccacctagtacgtgtcaattatggtctctctctggtggctgcggtgcattacctcaagcagccatgcttacacctcctcaggaaagtgaaatggaggccccagacttagataccaggggcccagatggagtgacccccttgatgagcgcagtgtgttgcggggaggttcagtctggcactttccagggtgcatggctcgggtgcccagagccctgggaaccgctcctagacggcggagcttgccctcaggcacatactgtgggaaccggcgaaacgcccttgcaccttgccgcccgattttcacgccctaccgcagcccgccgcttgttggaagcaggcgcaaatcctaaccagcccgatagggccggacgaacacccctgcatgccgctgtggcagccgatgcacgagaggtgtgccagctgttactaaggagccggcagaccgccgtagatgcccgaacggaggacggtaccactcccctgatgctggctgcccgccttgcggtggaagacctggttgaggaacttattgcagcccaggccgatgtgggagcaagagacaaatggggcaagactgctctacactgggccgccgccgtcaataacgccagagcagcccggagtttgctgcaggccggggccgacaaggacgcccaggataatcgcgaacagacaccattgttcctggcggctcgagagggagccgtggaggtcgcccagcttctcttgggcctcggagccgcccgcgagctgagggatcaagcagggcttgcacctgccgacgtcgcccatcagaggaatcactgggacttactcactcttctggagggagccggcccaccggaggcccgacataaggctacgcccggccgcgaagcggggccttttccaagggccagaaccgtttccgtgtctgtgccaccacacggcgggggcgccctccccaggtgtagaacactctcggctggggctgggcctagaggagggggcgcttgcttgcaggcacgaacttggtctgtagatctcgccgctcggggaggaggagcctatagccactgcagaagtctgtcaggagtgggcgccggaggcggaccgacgccacggggtcgccgtttctccgcgggcatgcgcggcccacgccccaaccccgccattatgcgcggccgctatggggtagccgcagggagggggggaagagtatcaacggatgactggccttgtgattgggtggctctaggagcatgtggatccgcgagcaatattcctattccccctccatgcttgacaccttcccctgagaggggctcaccccagctggactgtgggccccctgccttgcaggagatgccaatcaaccaaggaggcgaaggaaaaaagtag

SEQ ID NO: 197528 - DNA, 6018 bp, synthetic construct
  misc_feature 1..6018: note = Description of Artificial Sequence: Synthetic coding sequence
  source 1..6018: mol_type = other DNA
atgcagccccccagcctgctgctgctgctgctgctgctgctgctgctgctgctctgtgttagtgtggtacggccaaggggcctgctgtgcggcagcttcccagaaccttgcgccaatggggggacctgccttagcctctctctgggccagggcacctgccagtgtgcacctggtttcctgggggagacttgccaattcccagacccctgccaaaacgcccaactgtgccagaatggaggcagctgccaagctttgctgccggctcccctgggtttgccgagctccccttctccgctgactccctccttcctgtgtacctgtcttcctggctttacgggtgaacgttgccaggctcaactagaggacccatgtcctccaagcttttgctcaaagagagggcgttgccacatccaggccagcggaaggcctcaatgcagctgcatgcccgggtggacgggagagcagtgtcagctgagagacttctgtagtgccaatccttgtgtaaacggcggtgtgtgtctggccacatacccacagatccagtgccattgccctccagggtttgaaggccacgcctgcgagagagatgttaacgaatgctttcaagaccctgggccatgtcctaagggaacctcctgccataacaccctgggctctttccagtgtctatgcccagtcgggcaggaggggccacgatgcgagcttcgcgctgggccttgcccccccaggggctgcagtaacggaggaacgtgccagctcatgcccgagaaggactccacatttcacctttgcttatgcccccccggttttatcggcccagactgcgaagtgaaccccgataattgtgtgagccaccagtgtcagaacgggggcacctgtcaagacggcttggacacctacacatgcctctgccctgagacctggacaggatgggattgtagtgaagacgtggacgagtgtgaagcacaaggccctccccactgccgcaacggcggcacctgtcagaatagcgctgggagcttccactgcgtatgtgtctcagggtggggcggtacttcctgtgaggaaaacctggatgactgtatagctgctacttgcgctccgggatccacctgtattgacagagtggggagcttcagttgtttgtgcccccctggcaggactgggttgctgtgtcatctcgaagacatgtgcttgagccagccttgtcatggggacgcccagtgctcaaccaacccactgacaggcagtaccctttgcctatgccagcccggctactccgggcccacttgtcaccaggatttggatgaatgtcttatggcacaacaggggccatccccttgcgagcatgggggctcctgtctgaacactcccggttcctttaattgtctgtgtcctcccgggtacaccggctcacgctgcgaggcggaccacaatgaatgcctgtcgcagccctgtcatccgggctcgacctgtctcgaccttctggccacgtttcattgtttgtgcccccccggattggaaggtcagctatgtgaagtggaaaccaatgagtgcgcctcagccccttgtttgaaccacgccgattgtcacgaccttttgaacggcttccagtgtatctgtctgcctgggttctctggtacccgttgcgaagaggacatcgacgagtgccggtccagcccatgtgccaatggcggtcaatgtcaagaccagccgggggcatttcattgtaagtgcctgcccggatttgaagggccccgttgccaaacggaagttgacgagtgcctctctgatccctgccccgttggcgcctcatgcttggacctgcccggagcattcttctgtctctgcccatctgggtttacaggacagctctgcgaggtgcctctttgcgcacccaacctgtgccagccaaagcagatctgcaaggaccagaaagataaggcaaattgtttgtgtccagacggctccccgggctgtgcacctcccgaggacaattgtacctgtcaccacggacactgccaaaggtcctcgtgtgtgtgcgatgtcggatggacaggtcccgagtgcgaagccgagctcggcgggtgtatcagcgcgccttgtgcccacggggggacatgttatcctcagccctccggctacaactgcacctgtcctaccggctataccggacccacatgctctgaggaaatgactgcctgtcattccggcccgtgtttgaatgggggcagctgtaacccctctcccggcgggtactattgtacatgccccccaagccacactggccctcaatgtcaaacgtccacagattattgcgtgtctgccccctgtttcaatggtggcacctgcgtgaatcggccagggactttcagctgcttgtgtgcaatgggattccaaggtccccgatgtgagggtaaactcagaccatcatgtgcagatagcccatgtaggaacagggcaacgtgccaggatagcccacaggggcctcgatgcctctgtccgaccgggtacactggcggctcatgtcagaccctcatggacctatgtgcccaaaagccctgcccccgcaacagtcattgtctgcagacaggtccaagcttccactgcctgtgcctccagggctggacgggtcctctgtgcaatctgccattgtcatcctgccagaaagccgcattgtcccagggaatcgacgtaagttctctatgccacaacgggggcctatgtgtggattccgggccttcctatttctgtcactgtccccccggctttcaaggatcactgtgccaagaccacgttaacccctgtgaatcaagaccatgtcagaacggtgccacatgtatggcacagccatccggttacctctgtcaatgtgcccccggctacgacgggcagaactgtagtaaggagttagatgcttgtcagtcacagccctgccataatcacgggacttgtacaccaaaacctgggggcttccattgtgcgtgtccccctggattcgtgggtttgaggtgcgagggtgatgtcgacgaatgcctggaccagccttgtcacccgaccgggacagcagcctgccattccctcgccaacgcattttattgtcagtgccttcctggccacaccggccagtggtgcgaagtcgaaatcgatccttgtcatagccagccatgcttccatggcggcacctgcgaagccaccgccgggagtccactcggattcatctgtcactgtccaaaaggattcgagggtccaacctgctcgcacagggcaccttcatgcggattccaccactgccaccatggcggtctctgtctcccgtcccccaagccgggtttccctcctagatgcgcgtgtctctcgggctacggtggtcccgattgccttaccccacccgctcccaagggttgtgggcccccgtcaccctgtctgtacaacggcagctgtagcgagacaacaggtctggggggacctggtttccgttgcagttgcccccattcaagcccaggaccgaggtgtcagaaacccggcgccaaggggtgcgaagggcgatcaggcgatggcgcgtgtgatgctgggtgttccggtccaggcggtaattgggacggtggcgattgttccctcggcgtgccagatccgtggaagggatgccctagtcacagccgatgctggctgctgtttagggatgggcagtgccacccccagtgcgactcagaggagtgcctgttcgatggatacgactgcgaaactcccccagcttgcacgccagcctacgatcagtactgccatgaccacttccataacggacattgtgagaaaggttgcaacaccgctgagtgcgggtgggatgggggagactgccgcccggaggacggtgacccggagtgggggccatccctagcactcttggtggtcctgtctcctcccgccctggaccagcaactgttcgcgcttgctcgcgttctgtctttaacactgcgggtgggcctgtgggtccggaaggacagggacggcagggacatggtgtacccttatcctggagcgcgtgcggaggagaaactcggcggaaccagagatccaacataccaagagcgtgctgcaccccagacgcagcccttaggcaaagaaaccgattcgctctcagcaggatttgtggtggtgatgggtgtcgatctgtcccgctgtggaccagatcatcccgcaagccggtgtccctgggatccaggtttgttgctccgcttcctggctgccatggctgcagtaggtgctctggagcctcttctcccagggcctctgctggcggttcaccctcatgcaggtactgccccccctgctaaccaattgccttggcctgtgctttgcagcccagtggccggcgtgattctcctcgcattaggagccctgctggtgctccagctcattcggcgccgccggagggaacatggagccttatggctgcccccaggatttacccgtagacctcggacccagtctgcccctcaccgccgaagaccacctctgggcgaggatagtattggtttgaaagccctgaagcctaaggcggaagtggacgaagacggggtagttatgtgctccggccctgaggagggagaggaggtcgggcaagcagaggagaccggccctccatctacctgtcaactgtggtcattatcaggtggatgtggagccctcccccaggctgctatgttgacccccccgcaggaaagcgaaatggaggccccagaccttgatacccggggacctgatggcgtgacccccttgatgtccgccgtgtgttgcggcgaagtccagtcaggcacattccaaggtgcctggctgggctgcccagagccctgggagccactgctcgacgggggagcttgcccccaggcccataccgtcgggactggcgaaacgccgttgcacctggcggcgcgattcagcaggccaaccgccgcccgacgtctgttagaggcaggcgccaaccctaatcagcccgaccgcgccggtaggacacccttacacgctgccgtggcagcggacgcccgggaggtgtgtcagttactgctgcggagccgtcagacggccgtggatgccagaacagaggacggtacaactcccctgatgctggccgctcgattggcagtggaagacctcgtggaagagctcatagcggcccaggccgatgtgggagccagagataaatggggtaagactgcactccactgggcagccgcggtgaataacgctcgagcggcccgaagccttttgcaagcaggcgccgacaaggatgcgcaggataatagggagcagactcccctgtttctcgccgccagggagggtgcagtggaggttgcccagttgctcttaggattgggcgctgcccgggagctgagggatcaagccggcctggcccccgccgatgtcgcccatcagagaaaccattgggatctgcttaccctcctggaaggtgctgggcctcccgaagcccgccacaaagctaccccgggacgggaagccggacccttcccacgggccagaacggttagtgtctctgtccccccacacggcgggggcgctctgccccgttgtaggacgctttctgccggcgccgggcctcgcggcggaggtgcatgtcttcaggcccggacatggagtgtcgacttggcagctcgtggcggcggagcgtactcgcactgtagatcgctgtctggcgttggggccggtggtggacccactcctcggggcaggcggtttagtgccgggatgagagggcctcggcccaatccagccatcatgagggggcgttacggggttgctgccggaaggggcgggcgggtcagtacagacgattggccatgcgattgggtggcgctcggagcatgcggcagtgcctctaacatccctatcccacccccatgtctgacgccttcccctgagcgaggctcccctcagctggattgtgggccccccgccttgcaagagatgccaatcaatcaaggaggggagggaaagaagtag

SEQ ID NO: 197529 - DNA, 6012 bp, synthetic construct
  misc_feature 1..6012: note = Description of Artificial Sequence: Synthetic coding sequence
  source 1..6012: mol_type = other DNA
atgcagccccccagcctgctgctgctgctgctgctgctgctgctgctttgtgtgagcgtcgtgcgaccaagaggcctactttgcggctcatttcctgagccctgcgcgaacggcggaacgtgcctgagcctaagcctcggtcagggaacatgtcagtgtgccccagggttcctaggggaaacatgccagtttccagacccgtgccagaacgcccagctgtgtcaaaatggtggcagctgccaggccttactacctgctcccctgggacttccctcgtctccctcgcctcttactccatccttcttatgtacgtgcctccccggtttcacaggtgagcggtgccaggctcagctagaggatccctgccctccttcattctgctcaaaacgtggcaggtgccacattcaagcttccggcagacctcaatgctcatgtatgcctggctggactggggaacagtgtcagctccgggatttctgctccgccaatccatgtgttaacgggggagtgtgcctggccacctaccctcagatccagtgtcactgtccccccggcttcgaagggcacgcatgtgaacgggacgtcaacgagtgcttccaggaccctgggccatgtccgaaaggaacctcctgccacaatacacttggctcattccaatgcctgtgccctgtcggccaggagggcccacggtgcgagctgcgcgccggaccgtgccctcccaggggctgtagcaatgggggcacgtgtcaacttatgcccgagaaagactcaacttttcatctctgcctatgtcctccaggatttatagggcccgactgcgaggtgaatccagacaattgtgtttcgcaccagtgtcaaaacggagggacttgtcaggacggcctggacacctacacctgcttgtgtccagaaacgtggacgggctgggactgtagcgaagatgtggacgagtgcgaaacacaaggtccgccacattgtaggaatggggggacttgccagaattcagcaggcagtttccactgtgtgtgtgtctccggctgggggggcactagctgtgaagagaacctggatgactgtatagccgccacctgtgctcctggtagcacctgtattgacagagtgggttcatttagttgtttgtgccctcccgggcgaaccggcctgttatgccacctggaggacatgtgtttgagccaaccttgccacggggatgcccagtgctccacaaacccacttacagggtctacgctgtgtttgtgtcagcctgggtatagcgggcctacctgtcaccaagacttggatgagtgtctgatggcccagcagggcccctcaccttgtgaacacggtggctcttgtttaaatactcctggaagttttaattgtctgtgcccccccggatatactggctcacgatgcgaagccgaccacaacgagtgtttaagccaaccctgccatcctggctcaacctgtttagacctgctcgccacttttcactgcctttgccctccagggcttgagggccagctctgcgaagtggagactaatgagtgtgcttctgcaccatgcctgaatcatgctgactgtcacgacctcctcaatgggtttcagtgcatttgcctccccggattctctggaacacgttgcgaggaggacattgacgaatgccgaagttctccctgtgccaatggcggacagtgccaggatcaacctggagcttttcactgtaaatgccttcctggttttgaaggccctagatgccagaccgaagttgatgagtgtctgagcgatccttgtcccgtaggcgcttcttgcttagacctgcccggagcattcttctgtctctgccctagtggcttcaccggccagctctgcgaagtgcctctgtgcgctccaaatctgtgccaacccaagcagatctgtaaagaccagaaagacaaggccaactgtctctgtcccgacggttcacccggttgcgctcctcccgaggataactgtacgtgtcatcacgggcattgccagcggagctcttgcgtctgcgatgtggggtggacaggcccagaatgcgaagcggagctgggaggctgtatctcagccccctgcgcgcacgggggtacgtgttatcctcagccatcagggtataattgtacttgtcctacaggatacaccggcccgacatgctccgaggagatgaccgcttgccactctggaccatgtctgaacggtgggtcttgcaacccatctcctgggggctattattgcacctgcccccctagccatacgggtccgcagtgccaaacctccaccgattactgtgtatccgctccatgcttcaatgggggcacatgcgtgaataggccgggaacattctcttgtctatgtgccatgggattccagggacctcgctgtgagggcaaactgaggccgagctgtgcagacagtccgtgcagaaacagagctacttgccaggactcacctcagggccctcgttgcctctgtcctactggttatacaggaggaagctgtcaaactctgatggacctgtgcgcccagaagccttgtcccaggaacagtcactgtctgcagacaggaccaagcttccactgcctgtgcctgcaaggttggaccgggcctttgtgtaaccttcctctctctagctgccagaaggccgctctctcccaagggatagacgtatcttccctctgtcacaatggcggcctctgtgtcgatagtggcccctcctatttttgtcactgtccccccggcttccagggctctctgtgccaggaccacgtgaatccctgcgaatctaggccgtgccagaatggtgccacttgtatggcccagccttcaggctacctgtgtcagtgcgcacccggatatgacggacagaactgtagcaaggagctggacgcctgtcagtcacagccatgccacaaccatggcacatgtacgcctaagcctgggggattccactgtgcatgtcctccaggatttgtgggcctgagatgtgaaggtgacgtagacgaatgtttggaccagccgtgccaccctacggggacggccgcgtgtcatagtcttgctaatgcattttattgccagtgtctaccaggccacactggtcagtggtgtgaggtggaaatcgacccctgtcatagccaaccttgcttccacggcggcacatgcgaagccaccgccggtagcccattggggttcatttgtcactgtccaaaaggctttgaaggaccaacgtgttcccaccgcgcacccagctgcggtttccaccattgccatcatggcgggctctgtctgccatctcctaagcccggcttccctccgaggtgtgcctgtcttagtggatatggcgggcctgattgcctcacccccccagctccaaaaggctgcggcccaccgtctccttgcttatacaatggttcgtgttccgagacgacaggactgggtggccccggcttccgctgcagctgcccccactcttcccccggaccacggtgtcagaaacccggtgctaaaggctgtgagggccgcagtggtgatggcgcttgcgatgccgggtgttccggtccaggtggcaattgggacggaggagactgttctctgggcgtccctgacccttggaagggctgcccctctcactctcgctgttggctcctttttcgggacggacaatgtcacccgcagtgcgatagcgaggaatgcctcttcgatggctacgattgtgaaacccctcccgcctgtacacctgcgtacgatcagtactgccacgaccacttccataacgggcattgcgagaaaggctgtaatacagcggagtgcggatgggacggtggggactgcaggcccgaggacggcgatcctgagtgggggcccagcctcgcactgctagtggtgttgtcgccaccagctctggaccaacagctgtttgctctggcaagggtcctgtctttgaccctgcgggtgggactgtgggtgcgcaaggacagggacgggcgcgacatggtctacccttatcctggagcccgggcagaagaaaagttgggcggcacccgtgaccccacttatcaggagagggcggccccccaaacacagcctctcggaaaagagaccgactccctaagtgccggtttcgtggtcgtaatgggcgtggacctttcccggtgcggccccgaccaccccgccagccggtgtccctgggatccaggtcttttactacgctttcttgctgctatggctgcggtgggagcgctggaacccttgctccccggaccgctcctagccgtgcacccgcacgccggaacagcacctccagcaaaccagctgccgtggccggtgctctgtagccccgtggcaggagtcattctgctggctttaggcgcactgcttgtactacaactcattagacggagacgtagagaacacggtgctctctggctgccacccgggttcacacgaagaccccgaacccagagcgcacctcatcggagacgccccccactgggagaagatagtatcggcctgaaggctctgaaaccaaaggcggaggtcgatgaggatggtgtggttatgtgtagcggaccagaagagggcgaagaagtgggccaggcagaagaaaccggccctccaagcacgtgtcaactatggtccctgtccggtggctgtggcgctctgccgcaggctgctatgctgacccctccccaagaaagcgagatggaggcgcccgacctagatactcgtggacccgatggggtaactcccttgatgtcagccgtctgctgcggggaagtccaaagtggcacttttcaaggggcctggctggggtgccccgaaccctgggagcccctgttagacggaggtgcatgcccgcaagcacacaccgtggggaccggggagacaccgctgcatcttgccgccaggttttctcgtcccaccgctgcaaggcggctgctggaagcaggagctaaccccaaccaacccgaccgtgcgggaagaacacccctgcacgccgccgtagccgctgatgctagagaggtgtgtcagctcttactgcgatcaaggcagacagctgttgatgctagaaccgaggacggtacaaccccgcttatgctggcagcacggctggcggttgaggatctcgtagaagaactgattgccgcccaggcagacgtcggagcccgtgacaagtggggaaaaactgcactccactgggccgccgcggtcaataacgcccgcgccgctcgttctctgctgcaggctggtgccgataaagatgcacaagacaatcgcgagcagactccgctgtttcttgcagcccgcgaaggcgcagtcgaagtagcccagcttctgcttggccttggagccgcgcgcgagctgagagatcaggctggcctcgcacctgccgatgtggcacaccagaggaatcactgggatctgctcactttgcttgaaggagctggcccacccgaggcaaggcacaaggcaactcccggccgtgaagcgggtccttttccccgagctcgtacagtgtcagtcagcgtccctccccacggcggaggagccttgccacgatgcagaacccttagtgccggcgctggaccaagggggggaggcgcatgcctgcaagctcggacctggagtgtcgaccttgccgcccgcggaggcggtgcttatagtcactgcaggtcattgagcggagtgggggccggaggtggtcctacaccaaggggcaggagattctcagccggtatgcgcggccctaggcccaaccccgctatcatgcgtggcagatacggcgtcgcagcgggacggggcgggagagtctccaccgatgattggccgtgcgattgggtcgcccttggggcatgtggctccgccagtaatatccccattccacccccctgtctgacaccgtcccccgagcgcggaagcccccagttggactgtggcccacctgcactgcaggagatgcccattaatcagggcggagagggcaaaaaatag

SEQ ID NO: 197530 - DNA, 561 bp, synthetic construct
  misc_feature 1..561: note = Description of Artificial Sequence: Synthetic coding sequence
  source 1..561: mol_type = other DNA
atgagcgccgtgtgctgcggcgaggtgcagagcggcaccttccagggggcatggctcggatgccccgaaccctgggagccactgttggacggcggagcatgcccgcaagctcataccgttgggaccggcgagactccgcttcaccttgccgcccgcttctcaagacccacagcggccaggcggctgctggaagccggcgcgaaccctaatcaacccgatcgggctggtcgcaccccacttcacgctgctgtggccgctgatgctagagaggtctgccagctgctgctcagatccaggcagacagccgtcgacgcgaggacggaggatggcactaccccacttatgctagccgcccgcctcgcagtggaggacctggtggaagagctgattgccgcccaagctgacgtgggcgctcgtgacaaatggggtgccgacgctgccattccaggaggagctggtcgctcaggcgggagtagccccgcaaccgctggtgccggtggcagcccaagagccgctggtccgggatgggcttctgctgggggacgtaggtcgcctacgtag

SEQ ID NO: 197531 - DNA, 6009 bp, synthetic construct
  misc_feature 1..6009: note = Description of Artificial Sequence: Synthetic coding sequence
  source 1..6009: mol_type = other DNA
atgcagccccccagcctgctgctgctgctgctgctgctgctgctgtgcgtgtcagtagtgcgaccacgcggacttctgtgcggttcatttccggaaccttgcgcaaacggcggaacatgtttgtctctttccttaggtcaggggacgtgccagtgcgcccccggcttcctgggggagacctgccagttccctgacccttgccagaatgctcaactctgccagaacggaggaagctgccaggccctcctgccagccccgctgggcttgccatcgtccccaagtcccctcaccccaagttttttgtgcacatgtctacccggcttcaccggggagagatgtcaggcccagctcgaggatccatgtccaccaagcttttgtagtaagcgcggtcggtgtcacatacaagccagtggacgtcctcagtgcagctgtatgccagggtggacaggtgagcagtgtcaactgcgagacttttgctcggccaacccatgtgtcaatggcggagtctgcctggctacctatcctcagatccagtgccattgccccccaggattcgagggacatgcctgcgaacgggacgtaaatgaatgtttccaggacccaggcccttgtcctaaaggaacgtcgtgtcacaacaccctgggatcttttcagtgcctgtgtcccgtcgggcaagagggtcctcgctgtgaactccgcgcgggcccgtgtccaccccggggctgtagtaatgggggaacttgtcagctcatgcctgagaaagattctaccttccacctctgcctatgtccaccaggctttatcggtcctgactgcgaggttaatcctgacaactgcgtctctcatcagtgccagaacggagggacctgtcaggatgggctagacacctacacatgcctttgccccgagacctggactggctgggattgtagcgaggacgttgacgagtgtgaaacacagggtccaccgcattgcagaaacggaggaacctgtcagaacagcgcgggctcatttcactgtgtgtgtgtgagtggatggggcgggacctcatgcgaggagaacctggacgactgtattgcagctacctgtgcaccgggaagtacctgcatcgatagagtgggtagcttttcatgcttgtgtccgcccggtagaactggcctgctgtgtcatcttgaggatatgtgtcttagtcaaccctgtcatggagacgcccagtgttcaacaaaccccctcaccgggagcaccctttgcctgtgccagcccggatattctggacctacatgtcatcaggacctcgacgagtgcctaatggcacagcaaggaccaagcccctgcgaacatggcggcagctgcctgaacaccccaggaagcttcaactgcctctgcccccctggatacacaggatcccgttgcgaggcagaccataatgagtgtttgagtcaaccctgccaccctgggtctacctgcctggatctcttggccacatttcactgcctatgtcctccgggacttgaaggacagctctgtgaggtcgagacaaatgagtgtgcaagcgccccatgcctcaaccatgcagactgccacgatctgttaaacggctttcaatgtatctgtctgcccggcttcagcggcacccgctgtgaagaggacatcgacgaatgtcgctcctctccatgcgctaatggcggacagtgtcaggaccagccaggggcttttcattgtaaatgcctaccggggttcgagggccccagatgccagacagaggtagatgaatgtctctccgacccctgccccgtgggggccagttgcctggacctccctggtgccttcttctgcctgtgtccaagtgggttcacgggtcagctgtgtgaggtccctctctgcgctccgaacttgtgtcagcctaagcaaatctgcaaagaccaaaaggacaaggctaattgcctctgtccggacggaagccccggctgcgcgcctcccgaggacaactgcacctgccaccacggacactgccagcgcagctcctgcgtctgcgatgttggctggacaggtccagaatgcgaagctgagctcggcggatgtatcagcgcaccttgcgcgcatggcggaacgtgttatcctcagccctccggctataattgtacttgccccacaggctacacaggccccacctgctccgaggaaatgaccgcctgccactcagggccatgcctgaacggaggcagttgtaacccctctcctggtggatattactgtacatgtcccccttcacatacaggcccccagtgccaaaccagtacggactactgcgtcagtgctccttgcttcaacggagggacatgcgttaacagacctggcactttctcttgcctgtgtgcaatgggattccagggccctcgctgcgagggtaaattacgcccttcctgtgccgatagcccatgccgcaaccgcgctacttgtcaagacagcccacaaggtcctagatgtctgtgcccaactggctacaccggaggctcttgccagactctgatggacctgtgtgctcagaagccatgtcctcggaatagtcactgtctgcagaccggcccctccttccattgtctttgccttcaagggtggaccggcccactatgcaacctgccgctgtcttcttgtcaaaaagctgccctttcacagggaatcgacgtgagctcactttgccataatgggggcctctgcgttgacagcggcccatcttatttctgccactgcccccctggatttcaggggagcctgtgtcaggatcatgtgaatccttgcgaatcacgaccctgtcaaaacggagctacctgcatggcacaaccttccggttatctttgtcaatgcgctcccggttacgacggtcagaactgctctaaagagctggatgcatgccagtcccagccttgccacaatcatgggacctgcacccctaaacccggcgggttccactgcgcctgccctcctgggtttgtggggctgcgctgcgagggtgatgttgacgagtgtctcgatcagccctgtcatcccacaggcaccgctgcctgtcattctctcgccaacgccttttattgccagtgcctgccgggtcacaccgggcagtggtgcgaagtcgaaattgacccatgtcactcccagccctgcttccacggcgggacctgcgaggctacagcgggcagcccacttggatttatttgtcattgccccaaaggttttgaggggccaacttgctctcaccgagctccatcctgcggatttcatcactgtcaccatggcggactgtgcctgccctcccccaaaccaggttttccacccaggtgcgcttgtttgtctgggtacggaggccccgattgtttgacccctcccgctccaaaggggtgtggccctccaagcccttgcctctacaacggttcctgttcagaaacaacaggcttaggcggtcctggcttccgctgttcttgtccccacagctcgccgggcccccgctgtcaaaagcccggcgctaagggatgcgaggggcgcagcggggacggagcttgtgatgctggttgttctggcccagggggtaattgggatggcggtgattgtagcctgggagtccctgatccatggaagggctgcccctcccactcaaggtgttggctactcttcagagatggacaatgtcacccacaatgcgacagtgaggagtgtttgtttgacggatatgactgcgagaccccccccgcgtgcacacccgcctacgaccaatactgccatgatcatttccacaatggtcactgcgagaaggggtgtaacacggccgagtgtggctgggacggcggggactgccggccggaagacggcgatcctgagtggggtcccagcttagcactactcgtggttctgtcccctcctgccctggaccaacagctctttgccctcgccagggtattatcgctgacattgagggtgggtctgtgggtgagaaaggaccgtgatggcagagacatggtgtatccttacccgggagcgcgggcagaggagaagctgggcggtacccgggatcctacctaccaggagcgggcggcacctcagacccaaccattgggcaaagaaacagacagtctctcagccggtttcgtcgtggtgatgggagtagacctgtcaaggtgtggccctgatcatcccgcctcccgttgcccttgggatcccggtctcctgctacgtttcctggccgccatggctgcagtcggggccctggaacctctactgccgggtcccctgctggctgtgcatccccatgctgggacggcacctccggccaaccagctaccgtggccagtgctctgttcccccgttgccggcgtgatcctattggcactgggcgccttactagtgcttcagttgataaggagaaggaggcgggaacatggcgctctatggctgccacccggcttcacaagaaggccccggacgcaatcagcaccacatcggcggagaccaccactgggagaggacagcatcggcttaaaggccttaaagcccaaagcagaagtggatgaggacggggtcgtgatgtgctcaggacccgaagagggagaggaagtcggccaggccgaagaaacggggccaccttccacgtgccagctctggagcctctccggcggttgtggcgccctgcctcaggccgccatgctgacaccgccccaggagagtgaaatggaagcccctgatctggataccaggggtccagacggcgtcactcctttgatgagcgcggtgtgctgtggagaagtccagtccggcacctttcagggggcctggctaggctgtcccgaaccctgggagcctttgttagacggcggcgcatgccctcaggcccataccgtggggacaggcgagactcctctgcacctcgctgccagatttagcaggcccacagctgcaagacgcttgctggaagcgggagcgaaccccaatcagccggatagagctggacgcacccctctccacgccgctgttgctgctgacgcgagagaggtgtgccaattgttgctgagatcaaggcagactgcagtggacgctaggacagaggatggcaccactcccctgatgctggcggctaggctggcagtcgaggacttagtcgaagaactaatcgcagctcaggccgacgtgggtgctcgcgataagtgggggaagacggctctccattgggcagcagcagtgaacaatgcacgggcggctagaagcctgctgcaggctggcgccgacaaagatgcccaggacaaccgcgaacagactccactgtttctggctgctagggagggtgccgtcgaggttgcacagttgcttctgggtctgggagctgccagggaactcagggaccaagcgggattagcccctgccgacgttgcacatcaaagaaaccactgggatctccttacattactcgagggcgccgggccccctgaagccagacacaaggccacgccaggacgcgaagctggcccatttcccagggccaggacagtctccgttagtgtcccaccccacgggggaggtgctctcccccggtgtcgcaccctctccgctggcgcaggacccagaggcggaggagcctgcctgcaagctagaacatggagcgttgatctggctgcccggggtggcggtgcttattctcattgcagatctctgtctggcgtcggcgccggcggtgggcccacgcctcggggacgaagattttctgccgggatgaggggcccccggccgaaccctgctattatgcggggcaggtacggcgtggcagccggccgagggggccgggtctccacagatgactggccctgcgactgggttgcactgggtgcctgcgggtccgcaagtaacattcccatcccccctccttgtttgaccccgagtcctgagcgcgggtccccacagttggattgcgggccgcctgccctacaggaaatgcccatcaaccaggggggagaaggtaagaagtag

SEQ ID NO: 197532 - DNA, 6012 bp, synthetic construct
  misc_feature 1..6012: note = Description of Artificial Sequence: Synthetic coding sequence
  source 1..6012: mol_type = other DNA
atgcagccccccagcctgctgctgctgctgctgctgctgctgctgctctgcgtgtccgttgtgcgtccgagaggtctgctgtgtggttcatttcccgaaccctgcgccaacggcggaacatgtctctccctgtcgctcggccagggcacctgtcagtgtgctcctgggtttttgggggaaacatgtcagttccccgacccatgtcagaatgctcagctctgccagaacgggggttcctgccaagcactcctacctgcgcccttgggtctgccgtcgtcaccatcccccctcaccccctctttcctctgcacttgcttacccggctttacaggggaaaggtgccaggctaaactggaagatccttgccctccttctttttgttccaaacgcgggaggtgtcatatccaggccagcgggcgcccccagtgtagttgtatgcccgggtggaccggcgagcaatgtcaactcagggatttttgcagcgccaatccctgtgtgaacggaggcgtgtgtctggccacttatcctcagatccagtgccattgtccaccaggttttgaagggcacgcatgtgaacgcgacgtcaacgaatgctttcaagatcccggaccatgcccgaaaggaacttcatgccacaatacacttggttcattccagtgcctgtgtccagtcggacaggagggaccgcggtgcgagttgcgggccgggccgtgcccgcctcgcggctgctccaacggtggcacctgccaactaatgcccgagaaggacagtacattccatttgtgtttatgcccccctggatttatcggcccagattgtgaggtgaaccccgacaattgcgtttcacatcaatgtcagaatggaggaacttgccaggacggcctcgacacatacacttgtctttgtcccgagacatggactggctgggactgttctgaagatgtggacgaatgcgaaacccagggtcctccgcactgtcgcaacgggggcacatgccagaatagtgcaggatccttccattgcgtgtgtgtttctggatggggtggcacctcttgcgaggagaatctggacgattgtatagccgcgacctgtgcacctgggagcacctgtatcgatagagttgggagcttttcttgtctttgccctcccggccggactggacttctgtgccacctcgaagatatgtgcctgtcccaaccttgtcacggcgatgcgcagtgttcaacaaatccgctcacaggttctactttgtgtctgtgccaaccagggtattctggccccacatgccatcaggacctggatgaatgtctgatggcccaacagggcccgagcccttgcgagcatggtggcagctgcctgaacactcctggttccttcaattgtttgtgcccacccggatataccgggtctaggtgcgaggcggatcataatgaatgtcttagtcagccatgccatccaggcagcacatgcttggacctgctcgcaaccttccattgtctctgcccacctggactggagggccagctgtgtgaggtggagacaaacgagtgcgccagcgctccatgccttaaccacgccgactgccatgatcttctcaacgggttccaatgtatatgtctccctggcttttccggaacgagatgtgaggaggatatcgatgagtgtcgctcttctccttgcgcaaatgggggacagtgccaagatcagcccggtgcctttcactgtaagtgcctgcctggcttcgagggcccaaggtgccagacggaagtggacgagtgcctgtctgatccatgccccgtgggtgcatcatgtctcgatttgcctggggcatttttctgtctgtgtccgagtggtttcacaggacagttgtgcgaggtccccctgtgtgcccctaacctctgccaacccaagcagatatgtaaagatcaaaaggacaaagcgaactgtctgtgtcccgacgggtcacccggctgcgctcctcctgaagataattgcacatgtcaccacggacactgtcagcggagctcttgcgtatgtgacgtggggtggacgggcccggaatgtgaagctgaactgggcggctgtatctctgccccctgtgctcacgggggcacctgctacccccagccatccggatacaattgtacgtgcccaacaggatacactggacccacttgcagcgaagaaatgacagcctgccattccggtccctgtctcaatgggggatcatgtaacccaagcccaggtgggtactactgcacctgtcctcctagtcacaccggacctcaatgccaaacatccacggactactgcgtgtctgccccatgcttcaacggtggcacctgcgtaaaccggccaggcaccttctcctgcctctgcgccatgggttttcaaggtcccaggtgcgaagggaagctgcggccttcctgcgcagactccccctgccgaaaccgggctacttgtcaggacagcccacagggacctcggtgtctctgcccgacgggatatactggcgggagctgccagactttaatggacctgtgtgcccaaaagccctgtcctcgaaactcccattgtctgcaaactgggccctctttccattgtctatgcttacagggctggacagggccactctgcaatctgccactgtcttcctgccaaaaggccgccctctcccaggggatagacgtgtcaagtctttgtcacaatggaggactctgcgttgacagcggaccgtcgtatttttgccactgcccaccgggattccagggttctctgtgccaggatcatgtcaacccctgtgaatctaggccatgtcagaacggcgcaacttgtatggctcagccttctggttatttgtgtcaatgtgctccaggatatgatgggcaaaactgctccaaggagttagacgcatgtcagagtcagccctgtcacaaccacggcacttgtaccccaaaacctggaggtttccactgcgcctgcccccccggttttgtgggcttgcgatgtgagggggacgttgatgagtgcctggaccagccctgccatcccacagggacggctgcctgccatagcctcgctaacgccttctattgccagtgtctgccaggccatactggtcagtggtgcgaggtggagatcgatccttgccattcccaaccctgtttccacggaggcacctgtgaggcaaccgcaggaagtcctctagggttcatctgccattgtcccaagggatttgagggccccacttgtagccacagggcaccatcatgtgggttccatcactgccaccacggaggcctatgcttaccttcgcccaagccgggatttccaccacgttgtgcttgcctgtccggttacggcggacccgattgcctaaccccgcctgcccctaaaggctgtggaccccctagcccgtgcctgtataatgggtcctgttccgagacaacaggtctgggtggacccggtttccggtgctcttgcccccatagcagccccggaccacgctgtcagaaacccggggctaagggatgcgagggccgaagcggcgacggtgcatgtgacgccggctgttcaggcccaggcggcaattgggatggcggcgactgtagtctgggtgtgccggacccatggaaagggtgccctagccactcaagatgctggttactgttccgagatggacagtgtcaccctcagtgcgactctgaggagtgtctgtttgacggatacgactgtgagacaccccccgcctgcacccccgcctatgatcagtattgtcatgatcatttccataatggccactgcgagaaaggatgcaacaccgccgagtgcggatgggacgggggggattgtcggcccgaggacggagatccagaatggggaccgagtctggccttactggtggttcttagccccccagctttagatcagcagctttttgccctggccagggtgttgtccctcactctccgggtcgggctgtgggtgcggaaggaccgcgacgggagggacatggtatatccgtacccaggcgcccgtgccgaagaaaagctgggagggacacgcgatccaacctaccaagagcgagccgcccctcagacacaacccctcgggaaagagacagattccttgtctgctggattcgtcgtagtgatgggcgttgatttgagccgctgtggaccagaccatccagcttcaagatgtccttgggacccggggctgttgctgagattcctggccgcgatggctgctgttggggccctcgagccactcctccccgggcctctcctcgccgtgcatccccatgctgggaccgcccctccggctaaccaattgccatggccagttctatgttccccagtggccggggttatcctcttggctttgggggccctgctggttctgcaacttattcgtaggcgaagacgggaacacggcgccctgtggcttccccccggttttacacggagaccacgcacccaaagtgctccacatcgtcggcgaccacccttaggcgaggatagtattggattgaaagctctcaaacccaaagcggaggttgacgaagacggagttgtgatgtgcagtggcccagaagagggcgaggaggtggggcaggcagaagagactgggccccccagcacatgtcaactgtggtccttgagtgggggttgcggagccctgccccaggccgccatgttaacaccaccacaggaatccgaaatggaggcgcctgatctggacactcgaggacccgatggtgtcactccactgatgtctgccgtgtgttgcggggaggtccaaagtggtactttccaaggcgcatggctcggctgcccggagccctgggaacctctgctggatggtggcgcttgtccacaggctcatactgttggaactggagaaactcctctgcatttggccgctcggttttctaggccaactgctgcccggcggctgttagaagcaggagcaaatcctaaccagcccgatcgggctgggagaacccctctacacgccgctgtcgctgcagatgctcgggaagtctgccagctgctgctgcgcagtcggcagacagcggtggatgcccgtacggaggatggaacaactcccttaatgctggccgcaaggcttgcagtcgaggacttggttgaggaactgattgctgcacaagctgacgtcggagcacgcgataaatggggtaaaactgccctgcattgggctgctgctgtgaacaatgctcgcgccgcccgttcactgttgcaggccggtgccgataaagacgcccaagataatagggaacaaacaccactgttcctcgccgctcgggagggcgcagtagaggtggctcaactgctactaggcctgggagcagctcgcgaactgagagatcaggctggtttagcccccgctgacgtggcccatcagcggaatcattgggacttgctcacgctgcttgaaggcgctggtccaccggaggctagacacaaggcaacacccggacgcgaggcaggaccttttcccagagcccgcaccgtttcagtgagtgtcccaccccacggcggcggtgcccttcctaggtgccgcactctctccgcaggagcaggccctagggggggcggagcctgtctgcaggctcgcacatggtctgtggatctcgcagcccgcggaggtggggcatacagtcattgcagatctctctctggggtgggggcgggcgggggacccacaccccgagggcgacggttctcagccggaatgaggggaccaaggccgaacccagcaatcatgagaggacggtacggggtagccgccgggagaggcggccgtgtcagtactgatgactggccttgcgactgggtagctctgggagcttgcggatctgcaagtaatatccctatcccgcctccatgtctcacaccaagccccgagcggggaagccctcaactcgactgcggcccccccgcactgcaagagatgccaatcaatcaggggggcgaaggtaaaaaatag

SEQ ID NO: 197533 - DNA, 561 bp, synthetic construct
  misc_feature 1..561: note = Description of Artificial Sequence: Synthetic coding sequence
  source 1..561: mol_type = other DNA
atgagcgccgtgtgctgcggcgaggtgcagagcggcaccttccagggtgcttggctgggatgtcctgaaccttgggaacctctgttggacgggggcgcttgcccacaggcccacaccgttggtaccggtgaaactcctctgcacctggctgcacgtttttcccgtcccactgccgcgaggagattacttgaggccggcgcgaatcctaatcagcctgatagagccggacgcactcctctgcacgccgccgttgcggccgatgctcgcgaggtctgccagcttctgctgaggagccgacaaaccgccgttgatgcgcgaacagaggatggaacaacccctctgatgctggcagcacggctggcagtggaggacctggtcgaagagctgatcgcggcgcaagctgacgtgggcgctcgcgacaagtggggagctgatgccgctattcccggcggcgccggccgaagcgggggaagcagccccgcgactgcaggagccggtggctcaccccgcgcagctggaccagggtgggccagcgctggcggcaggcgcagcccaacctag

SEQ ID NO: 197534 - DNA, 561 bp, synthetic construct
  misc_feature 1..561: note = Description of Artificial Sequence: Synthetic coding sequence
  source 1..561: mol_type = other DNA
atgagcgccgtgtgctgcggcgaggtgcagagcggcaccttccagggcgcttggcttggttgccctgagccgtgggaacctctgctggacggtggggcttgccctcaggcgcacacagtaggcacaggggagactccgctgcacctggccgctagatttagccggcccacagccgcccgacgcctgctcgaggccggagccaacccaaaccagccagatcgagccgggaggactcctctccatgccgccgtggcagctgatgcccgagaggtgtgtcagttacttttgcgaagccggcagactgccgtggatgcacgcaccgaagacggaaccacaccgctgatgcttgcagctcggcttgcagtggaggatctcgttgaagagctcatcgccgcacaagctgatgtgggggcacgggataagtggggggccgatgccgccataccaggaggagccggccgttcaggtggtagctccccagccacagccggagcaggcgggagtccaagagcggccgggcccgggtgggcttccgccgggggacgaaggtcccctacatag

SEQ ID NO: 197535 - DNA, 561 bp, synthetic construct
  misc_feature 1..561: note = Description of Artificial Sequence: Synthetic coding sequence
  source 1..561: mol_type = other DNA
atgagcgccgtgtgctgcggcgaggtgcagagcggcaccttccagggcgcttggctcggatgccctgagccctgggagcccctgctggatggaggggcatgtccccaggcgcacaccgtgggcacaggggagacccccttacacctggcagcccggtttagtagaccaaccgcagctaggcgacttttggaagcaggcgctaatcccaatcaacctgatcgggctggtcggaccccgttgcacgctgccgttgctgcagacgctagggaggtgtgccagttgttactcaggtctcgccagactgcagtggacgcccggacagaggacggtacaaccccattaatgcttgctgccagattggccgtggaagatctggtggaagagcttatcgccgcccaggccgacgtgggggctcgtgacaaatggggggctgatgcagctatccccggcggcgctggtcggagcggaggctcgagccccgccaccgctggcgccggaggctctcccagagccgcggggcccggttgggcctccgccggcggaaggaggtccccaacatag

SEQ ID NO: 197536 - DNA, 561 bp, synthetic construct
  misc_feature 1..561: note = Description of Artificial Sequence: Synthetic coding sequence
  source 1..561: mol_type = other DNA
atgagcgccgtgtgctgcggcgaggtgcagagcggcaccttccagggggcttggctggggtgccctgaaccgtgggagcccttgctggatgggggagcgtgtcctcaggcccacactgtcggaaccggtgaaactcccctccatttggcagcaaggttttctcgccccactgcagcaagacgattactggaggccggcgccaaccccaatcagccagatcgggccggtcggactccactccacgcagccgtggctgccgatgccagggaagtgtgtcagctgctgctcaggtctagacagacggctgtagacgctcggactgaagatggcaccacacccctgatgttagcagctagactcgctgtcgaggatttggtcgaagaattaatcgcggctcaggcagatgtgggcgcacgggataaatggggagcagatgccgcaatccctggaggcgccgggcgaagcggcggatcttctccggccactgctggagcgggaggatctccccgggcagccggtcctgggtgggcttccgctggaggacggcgctcgccaacctag

SEQ ID NO: 197537 - DNA, 561 bp, synthetic construct
  misc_feature 1..561: note = Description of Artificial Sequence: Synthetic coding sequence
  source 1..561: mol_type = other DNA
atgagcgccgtgtgctgcggcgaggtgcagagcggcaccttccagggtgcttggctggggtgtcccgaaccctgggagccgctgctcgacgggggtgcctgtccccaggctcacacagtgggcacaggtgagacacctctacatctggctgcacggttttcgaggccaaccgccgctcggcggctgttagaagcaggagccaatccaaatcagccagacagagctgggagaacgccactgcacgctgccgtggccgccgacgcacgcgaggtgtgccagttgctcctccgcagcaggcaaaccgccgtagacgcccgcacagaggatgggacaacccccctgatgctggctgccagacttgccgtcgaggatttggtggaggagttgatcgccgcccaagctgatgtgggagcacgtgataagtggggagcggatgccgctatcccaggtggcgccggacggtccgggggaagctcaccggccactgccggggccggtgggagccccagggctgcaggacctggatgggcttccgctggcggacggcggagccctacatag

SEQ ID NO: 197538 - DNA, 1491 bp, synthetic construct
  misc_feature 1..1491: note = Description of Artificial Sequence: Synthetic coding sequence
  source 1..1491: mol_type = other DNA
atgggccggggcgtgcgggtgctgctgctgctgagcctgctgcactgcgcgggcggatcagaggggagaaagacctggagaagaaggggacagcagcccccaccaccacctaggaccgaagctgcacccgcagccggccagcctgtggagagttttccgcttgatttcacggcagtggagggtaatatggattcattcatggcacaagtgaaaagcttagctcagtcgctctatccttgttcagcccaacagctgaatgaagacttaaggctgcacttactgctaaatacatcagtaacgtgcaatgatggatccccagccggttactatctcaaagagtccagaggatctcggagatggttactgttcctggagggcggctggtattgtttcaaccgcgagaactgtgactcacggtacgacacaatgagaaggctaatgtcgtcccgagactggccgaggacccgaactggcaccgggattctctcttcacaacctgaggagaatccctactggtggaatgcaaacatggtgtttatcccttattgctcgtctgacgtctggtctggcgcctcttcgaaatcagaaaagaacgagtatgcattcatgggcgccttaatcatccaggaagtagtaagagaacttcttggtcgcggactctctggagctaaggtgctcctccttgccgggtcatctgcgggcggaactggagtattacttaacgtcgacagggtggccgagcagcttgagaagcttggatacccggctattcaggtcagaggactggcagatagcggatggttcttagacaacaagcagtacaggcacaccgactgcgtggataccatcacatgtgcccccacagaggcgattcgaagaggaattcggtattggaatggggttgtgccagagagatgtaggcgccagtttcaggagggggaggagtggaattgtttcttcggatacaaagtttatcctactttacgatgccctgtgttcgtggtacagtggctgtttgacgaggcccaacttacagtggataacgtgcatttaaccggacagcctgtacaggaggggcttagactctacattcaaaatttgggccgggagctgcggcatactctcaaagatgtgccggcttctttcgcccctgcctgcctgtctcacgagataattatcaggagtcattggactgacgtacaagtaaaagggactagcctgccccgcgcattgcactgctgggacaggtccctgcatgacagccataaagccagcaagacaccactcaaaggctgtccggtacatctcgtcgattcatgcccatggccgcattgcaacccaagctgtccaacagtaagggatcagttcacgggccaggagatgaacgtagcgcaatttctgatgcatatgggatttgacatgcagaccgtcgcacagccgcaagggcttgagccgtccgaactgctcggaatgctgtctaatggatcttag

SEQ ID NO: 197539 - DNA, 888 bp, synthetic construct
  misc_feature 1..888: note = Description of Artificial Sequence: Synthetic coding sequence
  source 1..888: mol_type = other DNA
atgggccggggcgtgcgggtgctgctgctgctgagcctgctgcactgcgctggcggaagtgagggccgcaagacgtggagacgacgaggacagcagccgccccctcccccgagaactgaagcagcgccagctgctgggcagcccgtggaatcattccccctcgattttacagccgtagaagggaacatggattcttttatggcgcaagttaagtctttggcacagtcgctatatccctgcagtgcccaacagctgaacgaagatcttagactacacctgctgctgaacacatcggtaacctgtaacgacgggtccccagctggttattatttaaaggagtccagaggttcacgtcgttggctcctatttcttgagggggggtggtattgctttaaccgtgaaaattgtgactccagatatgacacgatgcgtagactgatgtcctctcgcgattggcccagaacacgaacgggaaccggcattctctcctcacaaccagaagagaatccatattggtggaatgccaacatggtatttattccctattgcagtagtgatgtgtggtccggggctagttcaaagagcgagaagaatgaatatgctttcatgggcgccctcatcatccaggaagtagtcagggagctccttggccgaggtctgtcgggcgcaaaggtgctgctcctggccggatcctctgctggagggaccggcgtgctgctcaacgtggaccgagtggcagaacagctagagaagttggggtatccagccattcaggttcggggcttagctgactcgggatggtttctggataataaacagtatcggcacaccgattgcgtggacacgattacctgcgcgccaaccgaagcaattcggcgcggcatctag

SEQ ID NO: 197540 - DNA, 4080 bp, synthetic construct
  misc_feature 1..4080: note = Description of Artificial Sequence: Synthetic coding sequence
  source 1..4080: mol_type = other DNA
atggccgaggccggcctgcggggctggctgctgtgggccctgctgctgcgcctggcccagagtgaaccctacactaccatacaccagccagggtattgtgctttctatgacgagtgcggcaaaaatccagagctgagtggctccctgatgactctgagcaacgtcagttgtctgtcaaatacaccagcgagaaagataactggagaccacctgattctgcttcagaaaatttgcccccggctatacacaggaccaaacactcaggcgtgctgcagcgcaaaacagctggtgtcactggaggcatctttaagtatcactaaggccctccttacccgctgtcccgcctgttcagacaacttcgtcaaccttcattgccataacacctgctcccccaatcagtcgttgtttatcaatgtgacccgcgtcgctcagcttggggcgggccaactgccagcagtcgtggcctatgaggccttctatcaacactctttcgcagagcagtcatatgacagctgctccagagttcgggtccctgcagccgccacactcgccgtgggaaccatgtgcggggtgtacggctctgccctctgtaatgcgcagcgctggctaaatttccagggagataccggtaacggcctggctcccctcgatatcactttccatctgttagaaccggggcaagctgtgggcagcggtatccagccccttaatgagggcgtagctaggtgtaacgaaagtcagggcgatgacgtggccacgtgttcatgccaggattgtgctgcttcatgtccagccatcgctaggccgcaggccctagactcaactttttatcttggacaaatgcctggcagcctggttcttattatcatcttatgcagtgtgttcgctgttgtgactatattattagtgggatttcgcgtagcacccgcacgggataagtccaagatggttgatcccaagaaaggaacatctctatccgataagcttagcttctcgacgcatacattgctaggacagttcttccaggggtggggaacttgggtggcttcctggcccctgacaattctggtgctgtcggtaatcccagtcgtggccttggccgcaggactcgtttttaccgagctgaccaccgacccagtggaactttggtcagctcctaatagccaggcgcggtcagaaaaagccttccatgaccagcacttcggaccctttttcaggacgaaccaagtgattttaactgcgcccaaccgcagcagctacagatatgactccctgctcttagggccaaagaatttcagcggaatcttggatttggatctgctgttagaactcttggagcttcaggagcgcctacgccatctgcaggtctggtctcccgaagcacagaggaacattagcctacaggatatatgctatgccccattaaaccctgacaacacttcactgtacgactgctgcatcaacagcttgttgcagtactttcagaataatcggacccttctactcctcacagccaatcagactctgatggggcagacaagccaggttgactggaaagaccacttcctgtattgcgcaaacgctcccctgacctttaaggatggcacagcgctcgcgctgagttgtatggcggattatggggctccggtgtttccctttctggcgattggaggatataaagggaaggattactccgaagctgaggcactaattatgacatttagcctcaataattacccagccggggaccccagactggcccaggccaaactatgggaagaggccttcctggaggaaatgagagcattccagaggaggatggcaggcatgttccaagtcaccttcatggctgagagaagcctggaggacgaaatcaacaggaccaccgcggaagatctcccaatatttgccacgagttacatagtgatattcctatacatatccctggcactcgggtcctattcttcttggagcagggtgatggttgacagtaaagctaccttagggctgggaggtgtcgcagtggtacttggagctgtcatggcggcaatgggcttcttcagctaccttggtatccggagctcactggtaattctgcaggtagtgccattcctggttctgtccgtgggtgctgacaacatttttatattcgtgctggaataccagcggttgcctaggcgacctggcgagcctcgggaggtacatatcggccgtgcactgggccgggtcgccccatctatgttactgtgcagcctgagcgaggcaatctgctttttcctcggggcccttactccaatgcccgccgtgagaacctttgctctcactagcgggctagcagtcattctagactttttgctacagatgagcgcatttgtggccctgctctccctcgactctaagcgccaggaggcttcccgcctagacgtgtgctgttgcgtgaagccccaggagctcccgccccccgggcagggagaaggtttgctccttgggttcttccagaaggcctacgctccgtttctgctgcactggattacaagaggcgttgtcctcctgcttttcctggcgctttttggagtttctctgtactcaatgtgccatatttcagtgggtctcgatcaggagcttgccttacccaaggactcctatctgttagattattttctcttcttgaataggtattttgaggtaggggcccctgtttacttcgttacgactcttggctacaacttctcgtcagaggccggtatgaatgccatctgctccagcgcaggatgcaacaactttagcttcacccagaagatccagtatgctaccgaatttcccgagcagtcctacttagctattcctgcctccagttgggttgacgactttatcgactggttgactccctcgtcatgttgtagactctacatctccggtccgaacaaagacaagttttgtccttccacggtgaatagcctgaattgtctcaaaaattgtatgagcattaccatgggaagcgtccgcccttccgtagaacaatttcacaagtacctgccttggttcttgaacgaccgcccgaatatcaaatgtcccaagggcgggctggccgcgtattctacatccgttaatttaacttcggacggccaggtgcttgatacggttgccatccttagccccagattggagtactccgggaccattagcgcccattgtaacctttatctgttggatagcacaagcagattcatggcctatcacaaaccactgaagaactcgcaggattacacggaggccttgagagctgcgcgcgagctcgcagcaaacattaccgccgaccttaggaaagtcccaggaaccgatccagcttttgaagtgttcccctataccattaccaatgtgttttatgaacagtatctcaccatactaccagagggtttattcatgctgtccctgtgtctggtgccgacattcgccgtgagttgtttgttgcttgggttggatctgcggagcgggttgttgaatctccttagcatcgttatgattttagtggacacagtcggcttcatggcattgtggggtatatcgtacaacgccgttagcctcataaacctcgtttcggccgtgggaatgtctgtcgaattcgtgtcccacattacccgctccttcgccatcagtacgaagcctacctggttggaaagagccaaagaggccactatcagcatggggtctgccgtgtttgcgggcgtagccatgaccaacttgccaggaatcctagtccttggtctggccaaggcccagctgatccagatatttttcttcaggcttaacctgctgatcaccttactagggctcttacacggcctcgtgttcttgcccgtgattttgagctacgtgggaccagatgtgaatccggctctcgctctggagcaaaagagagcagaagaagctgtggcggcagtgatggtcgctagttgccctaatcacccctcccgggtatcaacggccgacaacatctacgtgaatcactcctttgagggctcgatcaagggtgccggagccatttctaatttcttacccaacaacggaagacaattctag

SEQ ID NO: 197541 - DNA, 3999 bp, synthetic construct
  misc_feature 1..3999: note = Description of Artificial Sequence: Synthetic coding sequence
  source 1..3999: mol_type = other DNA
atggccgaggccggcctgcggggctggctgctgtgggccctgctgttgcgcctcgcccagagtgagccatacactacaattcatcagcccgggtattgcgccttttacgacgaatgcggtaaaaacccagaactcagcggcagcttgatgaccttgagcaacgtaagttgtctgagtaacacgcctgcacgaaaaatcaccggtgaccatctcatcttactccagaagatttgcccccggctgtatactggcccgaacacacaagcttgctgctcagccaagcagctggtctccttagaagcctcactttctattacgaaggcgttgctgactcgctgccccgcatgcagcgacaacttcgtaaacttacactgtcacaatacatgcagtcctaaccagtccctgtttatcaatgtgacccgcgttgcacagttaggggctggccagttaccagcggtggttgcatacgaggcattttatcaacactcatttgctgagcaatcatacgactcatgctcgcgggtgcgggtacccgctgctgccacactcgccgtcggcactatgtgcggggtctatgggtccgctctctgcaacgctcagaggtggctgaacttccagggggacacagggaacgggctggcccctctcgatatcaccttccacctgctggagcccggccaagccgtgggatccgggatccagccgctgaacgaaggagttgccagatgtaacgagtcccagggggacgacgtagccacttgcagctgccaagactgcgccgcatcatgtccggccattgcccgaccccaggctctcgactcaactttctatttggggcagatgcccggctccttggtgctcatcattatcctgtgttctgtttttgctgttgttacaattcttctcgttggattccgcgttgcacccgcccgtgacaaaagtaagatggtcgatccaaaaaagggtactagcctgtcagataagttgagcttctcaacccataccctgttgggacagttctttcagggttggggtacgtgggtcgctagctggcccctgaccatccttgttctcagcgttatccccgtcgtcgcgctggccgcagggctcgtgttcaccgagctgactacagatccggtcgaactctggtcagcaccaaatagccaagcgcgcagcgaaaaggccttccacgatcagcatttcgggcccttttttcgaactaatcaggtgatccttacagcccctaatcgatcatcctatcgatatgactcccttctgttgggtcctaagaactttagcgggatcctggatctggatttactcctagagctactggaactgcaggaaaggctccgacatctccaggtgtggtctccggaggcgcagcggaacatatctttacaggatatttgttacgctcctctgaatccagataacacatctctctatgattgttgtatcaactccctgctgcagtacttccagaacaaccgcactctgctgcttctcacggccaatcaaacgcttatggggcaaaccagtcaggtcgattggaaggatcatttcctgtattgtgctaatgcacccctgactttcaaggacggaacagccttggccctttcttgcatggctgactacggagcacccgtgtttccgttccttgccataggcggctacaagggtaaggactattccgaagcagaagcattgatcatgacgttcagcctcaataactatccagcaggcgatccccgcctggctcaggccaagctctgggaagaggctttcctggaggaaatgcgtgcgtttcaacgccggatggccggaatgtttcaggtcaccttcatggctgaacggtcactggaagatgagattaatcgaacaacagcagaggacctgcccattttcgccacttcctacattgtgatttttctatatatcagcctggcattggggagctattcttcatggagtcgcgtgatggtggactccaaagcaactcttggcttgggtggcgtggcagtggtcctcggtgccgtcatggccgccatgggcttcttttcctatctgggcataaggagctcgctggttatactgcaggttgttccgttcctggtgctgtcagtaggggctgataacatcttcatcttcgtcctcgagtaccagaggctgccacgcaggcccggcgagcctcgagaagttcacattggaagagcattaggacgcgtcgcccctagtatgctgttgtgttcacttagtgaggccatttgctttttcttgggagcactgaccccaatgcctgcggtgcgcacattcgcgctgacgtctgggctcgcagtgatactggatttcctgctgcaaatgagcgctttcgtcgctctgctgagcttggactctaagcgtcaggaagcgagccgtctcgatgtctgttgctgcgtgaagcctcaggagttacccccacccgggcagggtgaaggcctcctgcttgggttctttcagaaagcatacgctcctttcttactccactggattactagaggcgtcgtccttctgctgttcctcgccctcttcggagtctcactctactctatgtgccacataagcgtgggactggatcaggaactggcgctcccaaaagattcctacttgcttgattatttcctgttcctgaaccgatatttcgaggtcggtgcgcctgtgtattttgtaactacactgggatataactttagctctgaagcaggcatgaacgcaatttgctcatcagccggctgtaacaattttagtttcacccagaaaatccaatatgcaacagagtttcctgaacagtcctatctagccatccccgctagttcttgggtggacgattttatagactggctcacccccagttcctgctgcaggctatacatttccgggccgaataaggataagttctgtccttccacggttaattcacttaactgcttgaaaaactgcatgtccataaccatggggagtgtcagacccagcgtcgagcagtttcataagtacctgccgtggttcctcaatgatcgacccaacattaagtgcccgaaggggggtctggccgcctactctaccagtgtgaacctgacatctgacggccaggtgctggccagtagattcatggcgtaccacaaaccgcttaaaaattctcaggactacacggaagctctacgagccgcacgcgagttagcagcaaatataaccgccgatttgagaaaggtgcccggaacagacccagctttcgaagtctttccctatacgatcactaatgttttctacgagcaatatcttactatactacccgagggcctgtttatgctttccctctgtctcgttccaactttcgccgtcagttgcttgctgttgggtctcgatctgcgctcagggctgctgaacctgctcagtatagttatgatactcgtggataccgtggggttcatggctctttggggcattagttacaacgccgtatctttgattaaccttgttagcgctgtcggcatgagcgtcgagtttgtgtcccacataacccgtagctttgctatctcaacgaaacctacatggcttgagagggctaaagaagccacaatctccatgggatcagcggtgttcgctggagtagcgatgacaaatctcccgggcatattagttctcggtctcgctaaagcacagctgatccagatcttcttcttcagattgaacctgttaattacactccttggcctattacacgggttggttttcttaccagtgatactcagttatgttgggccagacgtgaacccagccttggctttagagcagaaaagggccgaggaggcagtggcagcagtgatggtggcctcatgtcccaatcatccaagccgcgttagcactgctgataacatctacgtgaatcacagttttgagggatccatcaagggggccggagccattagcaactttcttcccaacaatggaagacagttctag

SEQ ID NO: 197542 - DNA, 3861 bp, synthetic construct
  misc_feature 1..3861: note = Description of Artificial Sequence: Synthetic coding sequence
  source 1..3861: mol_type = other DNA
atggccgaggccggcctgcggggctggctgctgtgggccctgctgttgagacttgcacaatcagagccatacactacgatccatcaacctggctactgcgccttttacgacgagtgtggcaagaacccagaattgtcagggtccttaatgactctgtctaacgtgagttgcctcagcaacactcccgcccggaaaatcaccggagatcacctgattctgttgcaaaagatctgtccacggctgtacacaggaccaaacacccaggcatgctgcagcgcgaagcaactcgtgtctcttgaggcgtccctttcaattacaaaggcactgttgacccgatgtcctgcttgctcagataactttgtgaatctacattgccataatacgtgtagcccaaatcaatcactgttcattaacgttacacgagtcgctcagctaggtgccggccagctcccggctgttgttgcttatgaggccttttaccagcatagctttgcagagcagtcttacgattcatgctcccgggttcgcgtaccggctgcagccacgctggccgtcggcactatgtgcggggtctatggcagtgccctctgtaatgctcaacgctggctcaacttccagggagatacagggaatgggttagcgccattggacatcacctttcatttattggagcctggacaagctgtgggctcagggatacagcctctcaatgaaggagtcgcccgttgcaatgagagccaaggcgacgatgtggccacctgttcatgtcaggattgtgccgctagctgccccgctattgcccggccacaggcgctcgactccacgttttacctaggacagatgcccggatcattggtgttgataatcatcctctgttccgtttttgctgtcgttaccattctcctggtaggatttcgggtcgcccccgcaagggacaagagcaagatggtggacccgaagaaaggcacttctctgagcgataaactttctttctccacccatactctgttaggtcaattttttcaggggtggggcacttgggtcgcctcctggccacttactatcctggtgctcagtgttattcccgtagtggcgttggccgcaggtctggttttcactgaactgactaccgatcccgtggaactctggagcgccccaaactcccaagccagatccgaaaaggcctttcacgatcagcatttcggaccttttttcaggacaaaccaagttatcctcaccgccccgaatagaagcagctacaggtatgactcactcttgttggggcccaagaatttttctgggatattagaccttgacctgctgctggagttgctggagctccaggagagactgcggcacctccaggtgtggtcgcctgaagcgcagaggaatatctctctgcaagacatctgttacgcccccttaaatccagacaatacttctttatatgattgttgtatcaactcactcctgcaatactttcagaacaaccgaactttactgctcttgacagccaaccaaacgctcatgggacagacatctcaggttgattggaaagaccactttctgtattgtgcaaatgccccgctgacatttaaagacggcactgctctcgccctgtcttgtatggcagactatggcgcccccgttttcccctttttagctatcgggggatacaaaggcaaggactacagcgaggcggaagctcttattatgaccttttccctcaacaactacccagctggggaccccagactggcacaggccaaactttgggaagaggcatttctggaggaaatgcgagcttttcagagaagaatggcgggaatgttccaggtgacattcatggcggaaaggtctctggaggacgaaataaacaggactactgccgaagatctgccaatttttgccaccagctacatcgtcatttttctctatatctcacttgcgctcggcagttattccagctggagccgcgttatggttgatagtaaggccactcttgggctaggaggcgtcgcagtagtgctaggcgctgtaatggccgccatgggtttcttttcttacctaggcatccgctccagtctagtcatcctccaggttgtgcctttcctcgtcctgtccgtgggagctgataatatcttcattttcgtgctcgaataccagcgtctgccacgtcggcccggtgagccacgggaagttcacatcgggagggccctgggacgggtggccccatcaatgcttctctgctccctgtccgaggccatatgtttctttctgggtgcattaacccccatgcccgctgttcgaacgttcgccctgacttcaggcctggccgttatattggacttcctccttcagatgtccgcttttgtggcattgctgtccctggacagtaaacggcaggaggcgtcaaggctggatgtatgctgctgtgtcaaacctcaggagctaccccctccgggccagggggaaggactgttattgggcttcttccagaaagcgtatgctcccttcctgctgcactggatcacacgcggggttgtggtcggggccccagtctacttcgttacaacattggggtacaatttttcgtctgaggcagggatgaatgctatttgctcaagcgccggatgtaacaatttcagtttcacgcagaagattcagtatgccaccgagtttcccgagcaaagttaccttgccataccagcttcttcgtgggtggacgatttcatcgattggttgacccctagctcctgttgtaggctctacatatccggcccaaacaaggacaaattctgcccctctactgtcaattccttgaactgtctgaagaactgtatgagcatcaccatgggtagtgtacgcccatccgtggagcagtttcataagtacttaccctggttcctgaacgaccgccctaacataaagtgcccaaaggggggactggctgcctattctactagtgtgaatttaacatctgacgggcaggtcctcgcgagccgatttatggcctaccacaagccccttaagaatagccaggattatacggaggctttgcgcgccgcccgagagctggccgccaatattacagcagacctgcggaaagttccaggaaccgacccggcctttgaggtgttcccttacactattactaatgtgttttatgaacaatacctcacaattctgcctgaagggctttttatgctgagcttatgtctagttccaactttcgcagtgagctgtctccttctgggactggacttaagaagtggcttgctgaacttacttagtattgttatgatcctggtggataccgtgggcttcatggccctgtgggggatcagctacaacgcagtgtccctcatcaacctggtgtctgctgttggcatgtcagtggaattcgtaagtcacattacaagatctttcgctattagcacaaagccaacatggctcgagcgggcgaaggaggcaacaatatcgatgggctccgccgtctttgctggagtggccatgacaaatctccccggtatcctggtcctgggcctggcgaaggctcaactgattcagatcttctttttccgcctgaacctcctgattactctactggggcttctccacgggttagtgttcctgcctgtgatacttagctatgtggggccagacgtaaaccccgctcttgcgctcgaacagaagcgagcagaggaagctgtcgcagctgtgatggtcgcctcatgtccgaaccatccctctagagtctctaccgccgataacatctatgtgaaccactccttcgaggggagtatcaaaggtgcaggagctatttccaacttcttgcctaacaacgggcggcagttctag

SEQ ID NO: 197543 - DNA, 783 bp, synthetic construct
  misc_feature 1..783: note = Description of Artificial Sequence: Synthetic coding sequence
  source 1..783: mol_type = other DNA
atgccccagaacgagtacatcgagctgcaccggaagcggtacggctatagactggactaccacgaaaagaaacgcaagaaagagagcagggaagcccacgaacggagtaaaaaggccaaaaagatgattggccttaaagccaagttgtaccataaacagaggcatgcagaaaaaatccagatgaaaaagacaattaagatgcacgaaaagagaaatacaaaacagaagaacgacgagaagacaccacagggcgcagtgcccgcataccttctcgatcgcgagggtcaatccagagccaaggtgctatctaatatgattaaacagaaacgaaaagagaaagcaggcaaatgggaggtccctctccctaaggtgcgcgctcagggtgagaccgaggtcctgaaggtcatacgcaccggtaagagaaagaagaaagcctggaagcggatggttacaaaggtctgcttcgttggcgatggttttacccggaagccaccgaaatatgaaagatttataagacctatggggctgaggtttaaaaaggcccacgtgacacaccctgaactaaaggccaccttctgcttgcccatactgggagtgaagaagaaccccagcagtcccttatatactacgctgggcgtgatcacaaaggggacagttattgaagtgaacgtgagtgagctgggactcgtcactcaaggtggcaaagttatttggggtaagtacgcacaggtcacgaacaaccctgagaacgacggctgcattaatgcggtgctcctggtttag

SEQ ID NO: 197544 - DNA, 1509 bp, synthetic construct
  misc_feature 1..1509: note = Description of Artificial Sequence: Synthetic coding sequence
  source 1..1509: mol_type = other DNA
atgagctgccccgtgcccgcctgctgcgccctgctgctggtgctgggcctctgccgggcgcggccaaggaacgctctcctgctgctagcagacgatggaggatttgaatccggcgcatacaacaactctgccatcgcaacacctcatctggacgctctggcccgccggagcctgctttttaggaatgccttcacctccgtatccagttgttctcccagtcgggctagtttactcaccgggctgccccagcatcagaacggtatgtatggtctgcaccaggacgttcatcattttaacagcttcgacaaagtgcggtctcttccattgttgttgagccaggccggggtgagaaccggcattataggcaaaaaacatgtcggccctgaaacggtttatccatttgacttcgcatatacggaagagaacggaagtgtacttcaggtgggacggaacatcactcggatcaagctgcttgttaggaaattcctccaaactcaggacgataggccatttttcctatatgtcgcttttcacgacccccacaggtgcggacattcccagccccagtatggaactttctgtgagaagtttggcaacggagagtctggaatgggccgcatccccgactggactccccaggcctacgatcctctggacgtgttggttccttacttcgtgcccaacactccagctgcgcgggccgatttggctgcgcagtatacaactgtgggcaggatggatcaaggcgtggggctggttctacaagaactgagagatgccggcgttctcaacgacactctggttattttcacttccgacaatggcatccccttcccaagcgggcggaccaatctatactggcctggtacagcagaacctttgctcgtctctagcccagaacatccgaaaaggtggggccaagtcagtgaagcatacgtctcactgctcgatcttactcccaccattttggactggttttctatcccatatcccagctacgctatattcggtagcaaaacaattcatctcacgggcaggagcctgttgcctgctttagaggcagaacccctgtgggccactgttttcggtagccagagccatcacgaagtcactatgagctatcctatgagaagtgttcagcatcgacattttcgcctcgtgcacaatctcaattttaaaatgcccttcccaattgaccaggacttttatgtgagccctacgttccaggacctcctgaatcgaactaccgcagggcagcctaccgggtggtataaggacctccgccactactattaccgtgcaagatgggaactatacgatcggtcaagggacccccatgagactcaaaatctggccactgacccgaggttcgcacagcttctcgaaatgcttcgagaccagctcgccaagtggcaatgggaaacacatgatccatgggtatgtgcacctgacggtgtactggaggagaagctttctcctcaatgccagccccttcacaatgagctttag

SEQ ID NO: 197545 - DNA, 900 bp, synthetic construct
  misc_feature 1..900: note = Description of Artificial Sequence: Synthetic coding sequence
  source 1..900: mol_type = other DNA
atgggccggatccccgactggaccccccaggcctacgaccccctggatgtgctggtaccttacttcgtgcccaatactccagccgctcgtgccgacttagccgcccaatacaccaccgtggggaggatggaccagggggtggggttggttctgcaggaactcagggacgccggagtgctaaatgatacactagtgatctttacctcggacaacggtattcccttcccatctggcaggaccaatctctactggcccggaaccgccgaacctctcctcgtgtcttctccggaacatcctaagcgatggggccaagtgtccgaggcttatgtgtccctactggacctgacaccaacaatcctggactggttttccatcccctatccatcttatgccatctttggctcaaaaaccattcacctgacggggcgctcgcttctcccagcactggaggccgaacctctctgggctacagtctttgggtcccaatcacatcacgaggtgaccatgagctaccctatgagaagtgtgcagcatagacactttcggcttgtacataacttgaattttaaaatgccatttccaatagaccaggatttctacgtgagtcccacgttccaggacctgttaaaccgtactacagcaggacagccaacaggttggtataaagatctccgccactattactatcgtgcacggtgggaactttatgaccgcagcagagatccccatgagactcagaacttggccactgaccccaggttcgctcaactgctagagatgctccgcgatcagctggcgaaatggcagtgggagactcatgacccgtgggtatgcgcccccgatggggtccttgaagaaaaactcagtccacagtgccagcccctacacaatgaactgtag

SEQ ID NO: 197546 - DNA, 618 bp, synthetic construct
  misc_feature 1..618: note = Description of Artificial Sequence: Synthetic coding sequence
  source 1..618: mol_type = other DNA
atgagctgccccgtgcccgcctgctgcgccctgctgctggtgctgggtctttgcagggcccgaccacggaacgccctgctgttactcgccgatagagcgctttccgtcagtcatctcacgcagaggatgacagaagccctgcgcgtggctagaacaacaactgcacctagcccacccagaacctggactccctggcctgccgccgccagtagctttgcaatgccctccccccgctcagctgccgcactccccgcggcccctgctagctctcttgcctgtcccagcattaggatgggctgtactggttgtaccagaacgtgtacaacctcaactccttcaaccaggtgtggagcatgcaggtgttgttctgctaaactggtttgcgcccaggctagtagtggccgttctacttgggggaggagaccgtgcacccgccttacactccggacacgacgacgcatggccccctctagccgctggggaggcacttctctggagctctcatgctccagcggcaattcatgtcgtctgcggatgacagggctctcctcaagcacttcccccagcacaaccccaacactctgggctcttcccgcgccagtgagaaatctactgtag

SEQ ID NO: 197547 - DNA, 1191 bp, synthetic construct
  misc_feature 1..1191: note = Description of Artificial Sequence: Synthetic coding sequence
  source 1..1191: mol_type = other DNA
atggcctgcgccggcctgctgaccgtgtgcctgctgcggccccccgctcctcagccacaaccgcaaacaccacgccatcctcagctggctcctgatcctggtcccgctggccacactctcttccaggatgtattccgccgtgctgacaagaacgatgatgggaagttaagttttgaggagttccagaattatttcgccgacggcgtattgtctctgggtgagctgcaggaactgttttctggtatagatggtcacttgacagataacctcgagacagagaagctatgcgattacttctctgagcacttgggcgtctatcgccccgtcctggctgccctggaatcactgaacagggctgtgctggctgcaatggacgccaccaagttggaatacgaacgcgcgagcaaggtggaccagttcgtcacccggttcctgcttcgggagaccgtgagccagctccaggctcttcaaagtagcttggaaggggcttccgacaccctggaagctcaggcccatggttggcgatccgacgctgagtctgtcgaagctcagagcagattatgcggaagccggcgtgccggacggcgcgccctcaggagcgtgtcgcgctcaagtacctggagtccagggagctctgacacaggaagatcttccgaagcggaaatgcagtggaggctgcaggttaaccgcctgcaggagctaatcgatcagctggagtgcaaggtgagggcggtcgggcctggtccacacaagggagggccctcctggtacccacccgagcccggcccttgttggagaccgggcccgcactccgtcccctcgcaggcacccagattagagcctctgagggaggaagatctagctaaagggccggatctacacatccttatggcccagaggcaggttcaagtggcagaagaaggcctgcaggattttcaccgcgctctgaggtgctacgtggactttacgggcgcacaatcacactgtttacatgtttcagctcagaaaatgttggacggagcctcctttacactttacgagttttggcaagatgaggcttcatggagacgacaccaacagtctccaggcagtaaagctttccagcgcatcctgatcgaccatcttagagctccagacactctgacgacggttttttttccagcctcatggtggataatgaacaataattag

SEQ ID NO: 197548 - DNA, 1089 bp, synthetic construct
  misc_feature 1..1089: note = Description of Artificial Sequence: Synthetic coding sequence
  source 1..1089: mol_type = other DNA
atggcctgcgccggcctgctgaccgtgtgcctgctgcggccccccgctcctcagcctcagcctcaaactccccgtcacccacagcttgcacccgacccagggcccgccggccacaccctttttcaagacgtgtttaggcgggcagacaagaatgatgatggcaagctgagctttgaggagtttcagaattacttcgccgacggggtactctccctgggtgaactccaggaactgttttccggaattgatgggcacctcacagacaacctggaaacagagaagttgtgtgattacttttctgagcatctcggcgtgtacagaccagttctggccgcgctggagtccttgaatcgggcagtgctcgctgccatggacgcaacgaaactggaatacgagcgtgcctctaaagtggaccagtttgtgacccgattcctgctgagagaaacagtgtcacagttgcaagccctgcaaagttctttggagggagcatctgataccctggaagctcaagcccacggctggcggtccgatgctgaaagcgttgaagcccaatctaggctctgcggctcccggagggccggcagaagagctctgaggagcgtatctcgctcttcaacctggtctccaggctccagtgataccggccgaagttctgaggccgaaatgcagtggaggctgcaggttaacaggcttcaagagctgatcgaccaactggagtgcaaggctccccggctcgagcccctcagggaggaggatttagcaaagggaccagacctccatatcctgatggcccagcgccaagtacaggtggccgaggaaggcctccaggactttcaccgggcactgcgttgctatgtggactttacaggtgcccagtctcattgcctgcacgtgtcagcgcagaaaatgctcgatggggcctcattcactctctacgaattttggcaggacgaagcgagctggaggcgacaccagcagtctcccggatccaaagcgtttcagcgcatcctgattgatcacctgagagctcctgacaccctaacaactgtcttttttccagcaagttggtggatcatgaataacaattag

SEQ ID NO: 197549 - DNA, 870 bp, synthetic construct
  misc_feature 1..870: note = Description of Artificial Sequence: Synthetic coding sequence
  source 1..870: mol_type = other DNA
atggcctgcgccggcctgctgaccgtgtgcctgctgcggccccccgccccacaaccccagccccaaacccccagacaccctcagctcgcccccgatcctggccccgccggtcataccctatttcaagacgtcttccgtagggcagataagaacgacgacggcaaactttctttcgaagagttccagaattactttgctgatggggttctgtcgctaggcgaactgcaggagttgttttctggcatcgatggacacctgacggacaatcttgaaaccgagaaactgtgtgattacttcagcgagcaccttggggtctaccggcccgtccttgctgctcttgagagccttaacagagcagtgctcgccgcgatggatgctactaagctggaatacgaaagagccagtaaagtagaccagttcgtgacccgcttcctactcagagaaaccgttagtcagctccaggccttgcagtctagccttgagggcgcttcagataccctggaggctcaagcccacggctggcggagcgacgcagagagcgtggaggctcaaagccgtttgtgcgggagtcggcgagcaggtagaagggccctgcgaagcgtatctagatcttccacttggagcccaggaagcagcgataccgggagaagtagtgaagctgaaatgcagtggcgtctgcaggttaaccgtcttcaagaactgatagaccaactggaatgcaagcatattctaatggctcagcggcaggtccaggtggccgaggagggtctgcaagactttcatagggctctgcggtgttatgtcgactttaccggggcgcaaagtcattgcctgcacgtgtccgcccagaaaatgcttgatggggcctag

SEQ ID NO: 197550 - DNA, 423 bp, synthetic construct
  misc_feature 1..423: note = Description of Artificial Sequence: Synthetic coding sequence
  source 1..423: mol_type = other DNA
atggccagcgtggacttcaagacctacgtggaccaggcctgccgggctgcagaagaattcgtaaacgtctactatacaactatggacaagaggagacggctgctgagccggctgtacatgggcacggcaactctggtgtggaacgggaatgcggtgtctggacaggagtccctaagcgagtttttcgagatgctgcccagttccgaattccaaatatcagttgtggactgccaacctgtccacgacgaagccactccctctcaaactacagtcctggttgtcatatgcggtagcgtgaaattcgaaggcaacaaacagagagactttaaccagaactttatcctcaccgcccaggcctcaccaagtaatacagtttggaagatagcatcagactgctttaggtttcaggattgggccagctag

SEQ ID NO: 197551 - DNA, 984 bp, synthetic construct
  misc_feature 1..984: note = Description of Artificial Sequence: Synthetic coding sequence
  source 1..984: mol_type = other DNA
atggccgtgcccgccaagaagcggaagatgaacttcagcgagcgggaagtggagattattgtcgaggagctcgagttaaaaaagcacctgttggtgaaccactttaacgcaggcgtgccactcgccgctaaatctgccgcctggcacggaattctaagacgggtgaacgcagtggctacttgcaggagggagctgcctgaggtgaagaaaaaatggtccgacctgaaaactgaggtcaggaggaaagtggctcaagtacgcgctgctgtggaagggggcgaggcccctgggccgactgaggaagatggagctgggggaccaggcactggcggtggtagtggtggcggaggccctgcggtggcgcctgtgctgctgacacctatgcaacaacgcatctgcaacttgctgggggaagccacaataatctcacttccatccaccaccgagatccaccccgtggcactgggaccctctgccacagctgcggcagccacagtcactctgacacaaatccccaccgaaactacatatcatactttggaggaaggtgtagtggaatactgcacggctgaggctccgcctccactgcctcccgaaacaccagtggatatgatggcgcaacatgctgatacctcggttaagccccaggcgttgaaatctcgaatcgcattaaacagcgccaaacttatacaggagcaacgcgtcactaatctccacgttaaagaaatagcccaacacttagaacagcagaacgatctgctacaaatgatccgacggtcacaggaagtgcaggcctgtgcccaagagcggcaggcccaagccatggagggcacccaggcagcgctttctgtgctgattcaggtcctgagacctatgatcaaggactttcggcgatacctgcaatccaacaccgcaaacccagctccagcctctgaccccggccaggtggcccagaacggtcagcccgactccattattcagtag

SEQ ID NO: 197552 - DNA, 1485 bp, synthetic construct
  misc_feature 1..1485: note = Description of Artificial Sequence: Synthetic coding sequence
  source 1..1485: mol_type = other DNA
atggaggtggtggaggccgccgccgcccagctggagaccctgaagttcaacgggacagacttcggcgtgggcgagggccctgcagccccctctcctgggtccgctcccgtgcccggcacacagccccccctgcagtcttttgagggatccccagatgccggacagactgtggaagtgaaacccgccggcgaacaacccctccagcccgttctcaacgccgtggccgccgggacccccgctcctcagccacagcctcctgcggagagccctgcatgtggggactgcgtcacgtcccccggcgccgctgagccggccagagccccagattccctcgaaacctccgactctgattccgattcagacagtgaaaccgactctgactcctcttcgtcttcttcgagttcctcttcctcttccagtagtagcagtagttcgtgcatatcactgccccccgttctgagcgacggcgacgacgacctgcagattgagaaagagaacaaaaacttccctctgaagacaaaagatgagctgttgctgaacgaattaccttcagtggaggagctgaccatcatcctgcccgaagatattgaattaaagcccttgggaatggtcagcagcatcatcgagcaactggtgatcattgaatctatgactaatctgcctccagtaaatgaagaaacagtgattttcaaatccgatagacaggccgccggaaaaatatttgaaatttttggtcctgttgcccaccccttctacgtgttaaggttcaatagttccgaccacattgagtctaaagggattaagattaaagagactatgtactttgccccaagcatgaaggattttacccagtatatttttacagaaaagctcaagcaagataagggcagcgacgccagctggaagaacgatcaagagcctcctccggaggccctggacttctcagatgacgagaaggaaaaagaggccaagcagaggaaaaaaagccagatccaggggcgcaaaaagttgaaatctgaattcaatgaacctggagaagattttaccgaggtgcaccagaactggaacgcacactcttcagccagcgaacacgccaagggctaccgcaatagggagtttacccgcggcttcagtcgtgcaaggtacccaaggagctgtcatggtcgtccaccgcctcaacacttctacaattctgaacatatggtgtcccaggagacgtctgggttcccatctcagagacagaacaacccaattatgcctcagtatcctttccccctgcccgtctttgatatgcataactttccgctccgaccgccccctccccctcccccgccaccggtgaacatgggctgggctaccccgaacatggccgcacaccctcttctcaacttgccctattccttgcctcctcccccgcctcccccacccttacctccccctccttcgtctggagatagcaactcccattttggaccttattactag

SEQ ID NO: 197553 - DNA, 1170 bp, synthetic construct
  misc_feature 1..1170: note = Description of Artificial Sequence: Synthetic coding sequence
  source 1..1170: mol_type = other DNA
atggaggtggtggaggccgccgccgcccagctggagaccctgaagtttaatggcaccgactttggagtgggagagggtcccgctgccccctctccagggtccgctccagtccctggaacccagccgcccctgcagtcatttgagggtagccccgatgctggacaaactgtcgaggtcaagcccgccggcgagcagcctcttcagccagttttgaacgccgtcgccgcaggcacacccgcaccccaacctcagccccctgctgaatcgccagcttgcggagattgtgtgacaagtccaggtgcggctgagccagccagggctccggacagcctggaaacatctgactccgactcagattctgattcagagactgactcggatagtagctcttcctcttcctcgtcctctagctcaagtagttcatcctcctcatcctgtatatccctgccccccgtcttgtcagacggagacgatgacctccagatagagaaggagaacaagaactttccgctgaagacaaaggacgagctgctcctgaatgagctgccaagcgtggaggaactaacgatcatcctgccggaagatattgaactcaagccactcggcatggtgtcaagtattatcgaacagctggtgatcatcgaaagtatgactaaccttccccccgttaacgaagagacagtgatctttaaatcagatcggcaggcggctggtaagatatttgaaattttcgggcctgtggcacaccccttttacgtcctccgtttcaacagcagtgatcacatagagtcaaaggggattaagattaaagagacaatgtatttcgcaccctctatgaaagatttcactcagtacatcttcacagagaagctcaaacaggataaggggagcgacgccagctggaaaaacgatcaagaacctccacctgaggcactcgattttagtgacgatgaaaaggaaaaggaagccaagcagcggaaaaagtcacagattcagggaagaaagaaactgaaaagtgaattcaacgagccaggaacagggatatcccatcggtattgcgggctgggatcgcggccattacagtctagcgagagccacaaactatttgggtttcaaatgcatatcaaggtcacttttacatgttattttagcttgctgagtatgcagtag

SEQ ID NO: 197554 - DNA, 345 bp, synthetic construct
  misc_feature 1..345: note = Description of Artificial Sequence: Synthetic coding sequence
  source 1..345: mol_type = other DNA
ctggccagccggctgggccccgtgagcaccgccaacatgagccggcctgtgcgtaacaggaaggtggttgactactctcagttccaggagtccgacgatgccgatttcgaaagcgaagatagtgaggataaggatgtaaaaacaaaaaaagatgattcacattccgcagaggattctgaagatgagaaagaggatcacaagaatgtgcgtcagcagcgccaggctgccagcaaggctgcaagtaagcaacgggagatgctgatggaggatgttggctcggaggaggaacaagaagaagaagatgaggctccttttcaagaaagaaaagattccttcagccagtag

SEQ ID NO: 197555 - DNA, 732 bp, synthetic construct
  misc_feature 1..732: note = Description of Artificial Sequence: Synthetic coding sequence
  source 1..732: mol_type = other DNA
atgagccggcccgtgcggaaccggaaggtggtggactacagccagttccaagagagcgatgacgctgacgaggattacggccgcgactctggcccccctacaaaaaagatccggtccagtcctcgcgaggcaaagaacaaacggcgctccggcaagaacagccaggaggattccgaggactcagaggataaggatgtcaaaactaaaaaggatgacagccactccgccgaggacagtgaggatgagaaagaagatcacaaaaacgtgagacaacagcgtcaggccgcctccaaagccgcctcaaagcagagggaaatgctgatggaagacgtgggcagcgaagaggagcaagaagaggaggacgaagcgcctttccaggaaaaggattctggctccgacgaggatttcctaatggaggatgatgatgacagcgactacggcagctctaaaaagaagaacaagaaaatggtaaaaaagagtaaaccagagcgaaaagagaaaaagatgcctaagcccaggctgaaggccacagttacacccagccctgtaaaaggtaagggcaaagtcggacgaccgaccgcatctaaagcctccaaagaaaaaacccccagtcctaaagaagaagacgaggagccagagtcccccccagaaaaaaaaactagtacgtcaccaccaccagaaaagtccggggacgagggctctgaagacgaagctcccagcggagaggattag

SEQ ID NO: 197556 - DNA, 1122 bp, synthetic construct
  misc_feature 1..1122: note = Description of Artificial Sequence: Synthetic coding sequence
  source 1..1122: mol_type = other DNA
atgagcccctgccccccccagcagagccggaaccgggtgatccagttgagcacatccgagttaggtgagatggaactgacctggcaagagataatgagtataaccgaattgcagggtctgaatgcgccctctgaacctagcttcgagccacaggctccggctccgtatctggggcctccacctccaaccacctattgtccttgctcaatacaccctgattcggggtttcctctgcccccccctccatacgaacttccggcgtcaacatctcacgtccctgaccctccatatagttatggaaatatggctatcccagtgtccaaacctctgtcactatccgggcttctgtctgaacccctgcaggaccccctggccctgctggatattgggttacccgccgggcccccaaaacctcaagaggatccagaatccgattcaggactgtcattgaattactcagacgccgagtctctcgagttggaagggactgaggcaggtcggaggcgctccgaatatgttgagatgtaccccgtggagtatccttattctttaatgccgaactcattagcccacagtaactataccctccccgctgccgagactccattggcccttgaaccctctagtggaccagtacgggcgaagcctaccgcccggggagaagcaggctctcgagacgagaggagggctctcgcaatgaagatcccgttccctacagataagatcgtcaacctgcccgtagatgacttcaatgaactgttagcacgctaccccctaaccgagagccagctggctctcgtgcgcgatattcgaaggagggggaagaacaaggtggctgcgcagaattgccgcaagagaaagctggaaaccattgtccagctggagagggagttggagcggctgaccaacgagcgcgagcggctgttgagggcacgcggggaggcggatagaacgctcgaggtgatgagacaacagttgaccgagctgtaccgcgacatttttcagcacctgcgtgacgaatccggcaactcttacagtcccgaagagtatgcactccaacaggccgccgacggcactatattccttgtgcccagggggacgaaaatggaagcaaccgattag

SEQ ID NO: 197557 - DNA, 1122 bp, synthetic construct
  misc_feature 1..1122: note = Description of Artificial Sequence: Synthetic coding sequence
  source 1..1122: mol_type = other DNA
atgagcccctgccccccccagcagagccggaaccgggtgatccagctgagcacctcggaactaggcgagatggaactgacctggcaggaaattatgtctatcacagagctccaggggcttaacgctcccagcgaaccaagctttgagccgcaggcccctgccccttacttgggccccccacctccaacaacttactgcccttgttctatacaccctgatagcggcttcccccttccgccccctccttatgagctccctgctagcacatcgcatgtccccgatcctccctactcgtacgggaatatggcaatcccggtttcaaaacctctttcgctctctggcctgttaagcgagccattgcaggaccccctggcgctccttgacatcggactgccggccggtccccccaaaccacaggaagacccagagagtgactctggcctgtctctgaactattctgacgcagagagccttgagctggagggcaccgaagccgggagacgaaggtccgaatatgtggagatgtatcctgtcgagtatccatactccctcatgccaaactccctcgctcacagcaactacaccctccctgccgcagaaacccccctggccctggaaccctcgagtgggccggtgcgggccaaacccactgctaggggagaggcgggcagtagagacgagcggagggcattggcaatgaaaataccctttccaactgataaaatcgtgaatctgccagttgatgatttcaacgagctgttagcaagatacccccttaccgaaagccagctcgccctggtgcgagatatccggaggagagggaaaaacaaggtcgccgcccagaactgtagaaagcggaagctcgaaaccattgtgcagctggagcgagagctggaaaggcttactaatgagagagagcgactgcttcgagcccgaggcgaggcagaccggacactcgaagtgatgcgtcagcagcttaccgaactgtatagagacatctttcaacaccttagagatgagagtggcaatagctattctccagaggagtatgcacttcagcaggccgcagatggcaccatcttcctcgttcctcgaggcaccaaaatggaggccacagactag

SEQ ID NO: 197558 - DNA, 1122 bp, synthetic construct
  misc_feature 1..1122: note = Description of Artificial Sequence: Synthetic coding sequence
  source 1..1122: mol_type = other DNA
atgagcccctgccccccccagcagagccggaaccgggtgatccagctctctaccagcgagctgggggagatggagctgacctggcaggaaatcatgtctatcaccgaacttcaaggactgaacgccccaagcgagccgagctttgagccacaagctcccgcgccttacctcggccccccacctcccacgacgtattgtccatgcagtatccaccctgactcagggtttcccctacctccacccccatatgagctccccgcgagcacttcacatgttccagaccccccttactcctacggcaatatggccattccagtgtccaagccactgtccctgagtggactgttatccgagccactgcaggaccccttggctctgctcgacatcggtctccctgcagggccccctaagcctcaggaagatcctgaatccgattcagggctctcactcaattactccgacgcagaatccctcgagctggaaggtaccgaggccgggcggcgccgctctgaatacgtggagatgtaccccgtggaatacccttatagcctgatgcccaatagcctggcccacagcaactacacactgcccgcagctgagacaccactcgcattggagccttcctccggcccagtaagggctaagcctactgctcggggcgaagctggctcccgggacgaaagaagagcgctggcaatgaagataccattccccaccgataagatcgttaaccttccagtggacgattttaatgaactgttggcccgctatcctttgacagaaagccagctggctctggtgcgcgacatcaggcgtcgtggtaagaataaagttgctgcacagaattgtaggaagcggaaactcgagactatcgttcaactagaaagagagttggagcggctgaccaacgaacgcgagagacttttacgggcacggggcgaggcggaccgcactctggaagtcatgcgtcagcagctcactgagctgtatcgtgatattttccagcatctgcgagacgaatccggcaacagttactcccccgaggaatatgccctccagcaagctgctgacgggactattttccttgtaccaagggggaccaaaatggaggccacagattag

SEQ ID NO: 197559 - DNA, 1122 bp, synthetic construct
  misc_feature 1..1122: note = Description of Artificial Sequence: Synthetic coding sequence
  source 1..1122: mol_type = other DNA
atgagcccctgccccccccagcagagccggaaccgggtgatccagctctcgaccagcgagcttggcgaaatggagcttacatggcaggaaatcatgtctattaccgagctgcaaggcctcaacgcaccaagtgaaccctctttcgaaccacaggccccagctccatacctcggccctcctccaccaacaacctactgcccttgcagcatacaccccgactccggattccccctcccaccacccccgtacgagctgccagcatcaaccagtcacgtaccagatcccccatattcatatggaaatatggcaattccagtcagtaagccattgagcctgtctgggctgctgagtgagcccttgcaggaccccctcgcattgttagacatcggactcccagcagggccacccaagccccaagaggatcctgaatccgactcaggccttagtctgaattactctgacgctgagagtctggagctcgaaggcactgaggctggccgccgccggtctgagtacgtcgagatgtatccagtcgagtacccttactcgctcatgcctaactccctggcacactcaaattacacactgcctgcagctgagacaccactggccctcgagccttcttccggcccagtccgtgctaaacctaccgccagaggggaggctggaagtagagacgaacgccgagcccttgcgatgaagatccctttccctaccgataagattgtcaatctccccgttgacgactttaacgagcttctggcgagatatcctctgactgaaagtcaactggctctggtccgggacattcgccgacgcggcaagaacaaagttgcggcacagaactgcaggaagcgcaaactggagaccattgtgcagctcgaaagagagcttgaaaggcttacaaacgagagggaacgtctgctgcgtgctcgaggggaggcggaccgcaccctagaggttatgcgccaacagctgacagaactataccgggacatattccagcacttaagagatgagtccggcaacagctactctcctgaagaatacgccctccaacaagcagcggacggcaccatatttctggtgcctcgcggcactaagatggaggcaaccgattag

SEQ ID NO: 197560 - DNA, 1032 bp, synthetic construct
  misc_feature 1..1032: note = Description of Artificial Sequence: Synthetic coding sequence
  source 1..1032: mol_type = other DNA
atgagcccctgccccccccagcagagccggaaccgggtgatccagctcagcactagtgagctgggggagatggaactcacatggcaagaaatcatgtctatcaccgaactgcaggggctgaatgccccatccgaaccgtcgttcgaaccacaggccccagcgccctacctcggcccacctcccccaacgacctattgtccatgtagcattcacccagatagcggatttcccttgccacctcctccatatgagctgcccgcttcaacctcccacgtgcctgacccaccttactcatatgggaacatggcaattcccgtgtccaaacccctgtctctatcaggtctgctcagcgaacccctacaagacccgcttgcattactggatattggactgcctgcaggccccccaaagccccaggaggacccagagtctgattcaggccttagcctgaattattccgacgcagaaagtctcgaactggagggcacagaggccggcaggcgcaggtctgaatatgttgagatgtaccccgtggaatacccatatagtctaatgcctaactcgctcgctcatagtaattatacactgccagccgccgagacccctttagctctagaaccctctagtgggccagttagggcaaagcccactgcccggggcgaagccggtagccgagacgagaggagagcactcgccatgaagatccctttcccgaccgacaaaatagtgaacctgcccgtggatgatttcaacgagttactcgcacgctaccctctcactgagtcacagctggcgctggtccgcgatatcaggagaagaggaaagaacaaagttgctgcccagaactgccgcaaaagaaagcttgagaccatcgtccagctggagcgcgagctggagcggctgactaacgagagggagcggttgctgagggcacggggagaggccgataggacactggaagtgatgcgacagcagttaacagaactgtaccgtgatatctttcagcacctccgagacgagtccgggaattag

SEQ ID NO: 197561 - DNA, 2229 bp, synthetic construct
  misc_feature 1..2229: note = Description of Artificial Sequence: Synthetic coding sequence
  source 1..2229: mol_type = other DNA
atgctgagcctgaagaagtacctgaccgagggcctgctgcagttcacgatcttgctgagcttgattggggtcagagtggatgttgacacatatctgactagccagctacctccactccgagaaattattctgggtccatcctccgcgtacactcaaactcagttccacaacctgcggaacactctggatggctatggaatccacccaaagtctatagatctggataactatttcacggcccggagattgcttagtcaggtacgcgccttggacagatttcaggtgcctactactgaggtcaacgcctggctggtccaccgcgatcccgagggaagtgtttctggctctcaacccaactccgggctagcactcgaatcctcctccgggttgcaagatgtgaccggcccagacaatggcgtccgtgagtctgagacagaacaggggttcggcgaagatctggaggacctgggagccgtcgcccctcctgtctctggcgatctgaccaaggaagatattgatctgatcgacattctgtggaggcaagatattgatctgggtgccgggcgagaggtgtttgattattcccaccgccagaaagaacaagacgtggaaaaagaattaagggacggtggagagcaggatacttgggctggtgagggggccgaggccctagcccgaaatcttctggtggacggtgaaaccggtgagtcattccccgcccaatttcccgccgacatttcgtccataaccgaggctgtcccttcagagagtgaaccgcccgcactacagaacaatctcctaagccccttgctcaccggaactgaatcccctttcgacctcgaacaacagtggcaagaccttatgtcgattatggagatgcaagcaatggaggtgaatacaagcgcctccgaaatcctctattcggctcctcccggagatcccctctccaccaattactctctggcgcctaacacaccaattaaccagaacgtgtcactccatcaggcctccctgggaggttgttcacaagatttcttactttttagtcccgaagtggagtctctccctgtcgccagctcgtcaaccctgttgcccctggctccctccaactcaacctcactcaacagcacttttggttctactaatctcacgggcctgttttttccaccacagctgaacggaactgctaacgacactgccggaccagagctgcctgatcctctgggcggcctgcttgacgaagccatgcttgatgagatctccctgatggacctggcaatcgaagagggctttaacccagtgcaggcgtcccagttagaagaggaatttgattcagactcaggattgtcactggactcctctcactcgccgagcagtctctcaagctcagagggctcttcctccagttcttctagctcttcaagttcaagcagctccgcctcttcttcagcatcctcttccttttctgaggagggagcagtgggatattcatcggactccgagactctggatttggaagaggctgagggtgcagtcggataccagcctgagtacagcaagttttgcagaatgtcatatcaagacccggcacaactgtcctgcctgccatacctggaacatgtgggccataaccatacctataatatggccccctctgccttggattccgccgacttaccccctccttctgccttgaaaaaggggtccaaagagaagcaggctgacttcctggacaaacagatgtctcgggatgaacatcgagcacgggctatgaagataccatttactaacgataagatcataaatctccccgttgaggaattcaatgagctgctgagtaagtaccagctgtcagaggctcagttatccctgattcgagatattaggcggagggggaaaaataagatggcagctcagaattgcaggaagagaaagcttgacacaatcctgaatttggagcgcgacgtggaagatctacagagagataaggcacgactgcttagagagaaagtggaattcctgcggtctctcaggcagatgaagcagaaggtgcagtccctttaccaggaagttttcgggcgcctgcgggacgaaaatgggaggccatactcaccttctcagtatgccctgcagtatgctggtgacggctcggtactacttatacccaggactatggccgatcagcaggcccggagacaggaacggaaacctaaggaccgacgtaagtag

SEQ ID NO: 197562 - DNA, 2319 bp, synthetic construct
  misc_feature 1..2319: note = Description of Artificial Sequence: Synthetic coding sequence
  source 1..2319: mol_type = other DNA
atgctgagcctgaagaagtacctgaccgagggcctgctgcagttcaccattctcctctccttgatcggagtgcgagtggatgtcgatacttacctcaccagtcagctgcccccgctgcgcgaaatcattttgggcccctcaagcgcctacacacagacccagtttcacaacctgagaaacaccttagatggatacggcatccaccccaagagtattgacctggacaattacttcaccgcgcggcgcctactgtctcaggtgagggctctggaccgattccaagtccccacaacggaggtaaacgcgtggctggtccacagagatcctgaaggctctgtgtccggtagccagcccaatagcggactggcactagagagcagctctggactgcaggatgtgaccgggccagacaatggagtgcgcgaaagcgagacagaacagggctttggagaggatctcgaggatctgggcgcggtcgcacctcccgtgtccggtgatttgacaaaagaggatatcgacctgatcgatattttgtggagacaggacatcgacctaggtgctggaagggaggtgttcgactatagtcacaggcagaaggaacaggacgtagaaaaggagctgagagacggcggagagcaagacacatgggcgggagagggcgcagaagccctggcacggaacttattggtcgatggtgaaacaggtgagtcattcccagcccaggttccttctggcgaggatcagaccgccctaagcctcgaagagtgcctccgcctgttggaagcaacatgccccttcggcgagaacgctgaattccccgctgatatctcttctatcacggaggctgtgcctagcgagtcagagccccccgctctacagaataacctgttgagtccactgctgaccggcactgaaagcccttttgacttagaacagcagtggcaagacctcatgagtataatggaaatgcaggccatggaggtgaatacctccgcctcagagattctttactctgcacccccaggagaccctctgagtacgaactactcattggccccaaacactccaatcaatcagaatgtctctctgcatcaggcaagtcttggcggttgttctcaggacttcctcctcttttcccccgaggtcgaatcactgcctgtcgctagctcctcaacattactgcccctggctccttcaaattccaccagcctgaatagtacattcggatccaccaatcttactggattgttctttcccccccagttgaacggaactgccaatgacactgctgggcctgaacttcccgaccccttggggggactgctggatgaagcaatgttggacgagatctctctgatggatctagcgattgaggagggcttcaatcctgtccaagctagccagctggaggaggaatttgatagcgactctgggctgtccctcgattccagccactcacccagttccctgtcctcatcggaaggttcatcttcaagctcatcttcctcatcgagctcatcatcctctgcctccagttcagcaagctcatctttcagtgaggagggagcagtggggtactcttcagattctgaaacccttgatttagaagaggccgaaggagctgttggctaccagccagagtactcaaagttctgtcggatgtcctaccaggatcctgcgcagctgtcctgtcttccctatctggagcatgtaggccataaccatacatataatatggcaccttctgctctggatagcgctgatcttccaccacccagtgcgctgaagaaggggtcaaaagagaaacaggcagatttcctcgacaagcagatgagccgcgacgaacacagggcacgcgccatgaagataccattcaccaacgataagataattaaccttccagtagaagagttcaatgagttacttagtaagtatcagctgtccgaagcccaactctctctcattagagatataaggcggcgcggcaaaaacaagatggcggcccaaaactgcaggaaacggaagctcgacacaatactgaacctggagcgggatgtcgaggatctgcaaagagacaaagcaagactgcttcgtgagaaagtggagttcttgcgttctctgcgtcagatgaagcagaaagtgcaatctttgtatcaggaggtctttggtcggttgagggacgagaatggaaggccatactcaccatcccaatatgccctgcagtatgcgggtgacggctctgtcctccttatccccagaacaatggctgaccagcaggcacgacgccaggaaaggaagcccaaggatagacgcaaatag

SEQ ID NO: 197563 - DNA, 2376 bp, synthetic construct
  misc_feature 1..2376: note = Description of Artificial Sequence: Synthetic coding sequence
  source 1..2376: mol_type = other DNA
ttcgtgttctggaagatcctgaagaccaagaagcacaagcacagcggaccgagtgccatgctcagtctgaagaaatacctcaccgaagggctccttcagtttactatactgctgtcacttattggagttcgcgttgacgtagacacttatttgacttctcagctacctccgctcagggaaatcatactaggcccgtccagcgcctatacccaaacccagtttcacaatctgaggaatactctagatggctacggtatccaccctaagagcatagacctggacaattactttacagccagaagactactttcccaggtccgtgctctggataggttccaagtgcccaccacagaggttaatgcttggctggtgcacagggacccagaaggatccgttagcggcagccagccaaactccggactagctctggaaagttcctctgggctacaggatgtgacgggtcctgataacggcgtgcgagagtccgaaacagaacagggatttggagaagacctggaggacctgggggcagttgcaccaccggtttctggagacctcactaaggaagatatcgatttaatcgacatcctctggaggcaggatattgacctgggcgccggaagggaggtgtttgattactcccataggcagaaagaacaggacgtagaaaaggaacttagggatggaggtgaacaggacacttgggctggagagggcgcagaggccctcgccagaaaccttctggtcgacggagagaccggcgagagtttcccggcacaggtgccctctggcgaggaccagactgccctgagtcttgaagagtgtctgcgcctgctcgaagctacttgtccgttcggtgagaacgcagaattcccagctgacatcagttcaattactgaagccgtaccatccgaatctgagcccccagccctccagaacaatctcctgtcccccctgctgacaggaacagagtcaccgtttgaccttgaacagcagtggcaggatttgatgtctatcatggaaatgcaggcaatggaagtaaatactagtgcctcggaaatcctatactccgccccaccgggcgacccattgtctacaaactacagtttggcacctaatacccctattaatcaaaacgtgtcccttcatcaagcctcgctgggtggctgcagtcaggacttcctgctgttctcacctgaagtggagagcctgcccgtcgcgtctagctccaccttgttacccctggccccttctaatagcactagcttaaattccacttttgggagcactaatctgactgggctcttttttccaccccagctcaatggaactgccaacgacacagccgggcctgaacttcctgatcccttggggggcctactggatgaagccatgctggacgagatttctctgatggacctggctatcgaagaaggcttcaatcccgtgcaggcctctcagcttgaagaggagtttgatagcgatagcggtttgtcactcgacagctctcattcaccaagctccctcagctcatccgaggggtcgtccagttccagcagttcatcgtctagttcctcatcatcggcttcatccagtgctagcagcagtttcagcgaggagggcgcggtcggatacagcagtgattccgaaacactggatttagaggaagcagagggagccgttggctaccagccagagtatagcaaattctgccgaatgagttatcaggatccagcccagctgtcctgcctcccctacttagaacatgtgggccataaccacacttataacatggctccatccgctttggactctgccgatctgccgcccccatctgcccttaagaaggggagcaaagaaaagcaggccgattttcttgacaaacagatgtctcgagatgagcacagagcaagagccatgaaaatcccatttaccaacgataaaattatcaacctacctgttgaagagttcaacgaattgttgtcgaagtaccagctgtcagaagctcagctctctttgattcgcgatatccggcggaggggtaagaacaaaatggcggcccagaactgccgaaaacgcaagcttgataccatcctgaatctggaacgtgatgtggaggacctacagagggacaaagctcgcttgctccgagagaaggtcgaattcttacgaagtctgcgccaaatgaagcagaaagtgcagtctctgtatcaagaagtgtttgggcggctgcgcgacgagaacggaaggccgtatagccctagccagtatgccctgcagtatgccggagacggcagtgtgctgctgatcccacgcaccatggcagaccagcaggcccggcggcaagaaagaaagcccaaggaccggagaaaatag

SEQ ID NO: 197564 - DNA, 1851 bp, synthetic construct
  misc_feature 1..1851: note = Description of Artificial Sequence: Synthetic coding sequence
  source 1..1851: mol_type = other DNA
atgacccggctggaccggagcagccacagcggcggcggccacgccaaggggtcccggcccctgaatagtctgctggccggtcatcgggtcgcacagcccgcaagcgctcccggctcacgagcatctgttcaagacatagacctgatcgacatcctttggagacaggatattgatctcggcgcagggagggaggtgtttgactactctcatcgccaaaaagaacaggatgtggaaaaagagctgcgggatggtggagagcaggatacctgggcaggggagggtgcagaggctcttgcccgcaacctgttagtggacggagagaccggcgagtcgttcccagcccagttcccagccgatataagctctataacagaggcggttcctagcgagtccgagcccccggcgctgcagaacaatctattatctcccttactgaccggcacagagtcacctttcgaccttgaacagcagtggcaggatttaatgtccattatggagatgcaggccatggaagtgaatactagtgcatctgaaatcttgtattctgccccacccggcgaccctctgtctaccaactacagcttagctccaaacaccccaataaaccagaacgtgagtctgcaccaggcatctctgggaggttgctctcaagatttcttgctgttcagccccgaggtggagtcactgcctgttgctagcagcagcaccctgctgccactggccccttcgaatagtacttcccttaacagtacgtttgggagcactaatctgacagggcttttctttccgccccagttgaacgggaccgccaatgataccgccggtccggagcttcccgaccctctcggtggactcctggacgaagcaatgctggatgaaatcagtctgatggatctagccatagaggagggtttcaatccagtgcaggcctctcagctcgaggaggagttcgattctgacagtggtctgtcactggattccagccatagtccttctagcctttccagctccgaagggtcaagtagttctagctctagttcatcatcttcgagtagcagcgcatcttcatccgcgtcgtctagcttctcagaagaaggagcggtcggatacagttccgatagtgagacactggatctcgaggaggcggaaggggcagttgggtaccagccagagtattctaaattctgtcggatgagttatcaggatcctgcgcagctgtcctgcttaccgtacctggagcacgtcggccataaccacacatacaacatggcccctagtgctctggatagtgcagacctacccccaccctctgctctgaagaagggctccaaagaaaagcaggcggatttcctggataagcagatgagcagagacgagcaccgagcccgagccatgaaaatcccttttactaatgacaagatcattaatttgcctgtggaagaatttaatgagctcctaagcaagtatcaactaagcgaagctcagctctctctgattagagacattcggcgacgagggaaaaacaagatggctgctcagaattgtcggaagcggaagctggacacaatactgaacctcgaacgtgacgttgaggatctgcagcgcgataaggctcgactgcttcgggagaaggtcgagttcctccgatcccttcgtcagatgaaacagaaggtgcaatctctgtaccaggaagtgtttggccgcctgcgcgatgagaatggtagaccttacagccctagtcagtacgccctgcagtatgcaggagatggtagcgtgctgctgattcctcggacgatggctgatcagcaggcccgcagacaggaaagaaagcccaaagataggcggaagtag

SEQ ID NO: 197565 - DNA, 1818 bp, synthetic construct
  misc_feature 1..1818: note = Description of Artificial Sequence: Synthetic coding sequence
  source 1..1818: mol_type = other DNA
atgatggacctggagctgcccccccccggcctgcccagccagcaggacatggaccttattgacattttgtggaggcaggatatcgacctgggcgtatcccgcgaggtcttcgatttcagccagcggcggaaggaatacgaactggagaaacagaagaaactggagaaagaacggcaagaacaactgcaaaaggagcaggagaaggccttttttgcacagctgcagctggacgaggagacaggggaattcctgcctatccagcccgctcagcatatccagtctgagaccagtggtagcgccaattactcccaggtagcacatattcctaagagcgacgccttatacttcgacgactgtatgcaactcctggcccagacattcccgtttgtggacgataatgaagtgagctctgccacattccagagtttggtcccagatatccctgggcatatcgagtctcccgtgtttatcgctacaaatcaagctcaatcccccgagaccagtgtcgcacaggttgcaccagttgacctggacggcatgcagcaggacatcgaacaagtttgggaagaactgctgtccatccctgagcttcagtgtctgaacattgaaaatgacaagctagtcgaaacaaccatggtacctagtcctgaagctaaactgaccgaggtggataactatcatttctacagcagcattccgtctatggaaaaagaggttggtaactgctccccccactttttaaatgccttcgaggacagtttttcctccatattgagtaccgaggaccctaatcagctgacagtaaattctcttaatagcgatgccactgtcaatacggattttggagacgagttctactctgccttcatcgccgaaccctctatcagtaacagtatgccctccccagctacgctaagccacagtctgtcggagctcctaaatgggccaatcgatgtaagcgatctgtccctttgtaaggcctttaaccagaatcatccagagtcaaccgctgaatttaacgattcagactctggaatctctctgaataccagcccttctgttgccagccccgaacactccgtggagagctctagttatggcgacacactgctggggttgtcagattcagaggtggaggagctggactctgcgcctgggtccgtaaaacaaaatgggcctaagacaccagtccactctagtggagacatggtgcagcccctgagcccttctcagggccagtccacccacgtgcacgacgcacagtgtgagaacaccccggagaaggaactgccagtttcaccgggtcaccggaagaccccctttaccaaagacaaacactcatcccgactcgaggctcacctgactcgagacgagctgagagcaaaggccctccacattcctttcccagttgaaaaaatcattaatctgccagtggtggattttaatgagatgatgtcgaaagaacagtttaacgaggcccaactggcactgattcgggatatacgacgacggggcaaaaataaggtggcggctcagaattgcagaaaaagaaaattagaaaacatcgtagagctggaacaggaccttgaccacttaaaagacgaaaaggagaaactgctgaaggagaaaggcgagaacgataagtcgctgcatctactgaagaaacagttgagcactttgtacctggaggtcttcagtatgttacgggacgaagatggtaaaccatacagtccatccgaatattccctccagcaaaccagggacgggaacgtgtttttagtaccaaagtctaagaaacccgatgtgaaaaaaaattag

SEQ ID NO: 197566 - DNA, 1770 bp, synthetic construct
  misc_feature 1..1770: note = Description of Artificial Sequence: Synthetic coding sequence
  source 1..1770: mol_type = other DNA
atggacctgatcgacatcctgtggcggcaggacatcgacctgggcgtgtctcgtgaggtcttcgacttctctcagcggagaaaggaatatgaactggagaaacagaaaaaacttgaaaaagagaggcaggagcagctccaaaaggaacaggagaaggccttctttgcgcaactccaacttgatgaggagaccggtgagttcttgcccatccagcctgcccagcatatccagtctgagacttccggctcagcaaactatagccaggttgcgcacattcccaagtcagatgcactatactttgacgattgtatgcaattgttagcccagacctttcccttcgtggatgataatgaggtctctagcgccacttttcaaagcttggtccctgatatccctggccacatagaatcgcccgtctttattgcaactaaccaggcccaaagtccagagacctctgtggcccaggtggcccctgtagatcttgacggtatgcagcaggatattgagcaagtttgggaagaactcctgagtattcctgagctacagtgtctgaacatagaaaacgacaagctggttgagacaacaatggtgcctagcccagaagccaaactgacagaagtggacaattaccatttttattcttctattccttcaatggagaaggaggtcggcaactgcagtcctcatttcctcaacgccttcgaagactcgttctcatctattttgtctacagaggatcctaatcaactcactgtcaactctctcaattcagacgccaccgtgaacaccgacttcggtgacgaattctatagtgcctttatcgcggaaccgtctattagcaattcaatgccgtctcctgcaactctgagtcattcactgagtgaactactcaacggtccgatagatgtaagtgatttatcactatgtaaggcttttaatcagaatcaccccgagtcaactgctgaatttaacgattccgattccggaattagcctgaatacgtccccgtcagtagcgtctccagagcactctgtggaaagctcctcctacggggacacactactggggctcagcgattcagaagttgaagaactagatagcgcccccggcagtgtcaagcagaacggtccgaagactccagtgcatagcagcggagacatggtgcaaccactctccccctcccaggggcaatcaactcatgtgcacgacgcacaatgcgagaacacgcccgagaaggaactgcccgtttccccaggccatcggaagacaccctttacaaaggataagcactcttctagattagaagcccatctgacccgggacgaattaagggcgaaggcactccacatcccatttcctgtcgaaaagatcatcaacctccccgtggtagattttaacgagatgatgtcaaaagagcagttcaacgaagcccagctggccttaattcgggacatcagacgaagggggaagaacaaggttgcggcccagaactgccgaaagagaaaactcgaaaacatagttgaattggagcaggatttggaccacctaaaagatgagaaggagaagctgctgaaggagaaaggcgaaaatgacaagtctttgcatctcctgaagaagcagctgagtactctgtacctggaggtgtttagcatgcttcgcgacgaagacggaaagccatacagcccttcagaatacagcctgcagcagacccgggacgggaacgtgtttcttgtgccgaaaagcaagaagccagacgtgaaaaagaactag

SEQ ID NO: 197567 - DNA, 705 bp, synthetic construct
  misc_feature 1..705: note = Description of Artificial Sequence: Synthetic coding sequence
  source 1..705: mol_type = other DNA
atggacctgatcgacatcctgtggcggcaggacatcgacctgggcgtaagtagggaagttttcgactttagtcagcgcaggaaggagtatgaactcgaaaagcaaaaaaagctggagaaggaacgacaagagcagctgcagaaggaacaagagaaagccttttttgcacaactgcagctggatgaggagacaggagagttcttgcctattcagccagcgcagcatatacagagcgaaaccagcggctcagcgaactactcccaagtcgcgcacattcctaaaagtgacgcgttgtacttcgacgattgtatgcaattgctagcacaaactttccctttcgttgacgataacgaggtctcctccgcgacatttcagtctttggttcctgacatccctggccacattgagagtcctgtatttatcgccaccaaccaggcacagagccccgagacctccgttgcccaggttgccccagttgatcttgatgggatgcagcaggatatcgagcaggtatgggaagagctgctatctattcccgaactgcagtgtctaaacatcgagaatgacaagctagtcgagacaacaatggtcccttcccccgaagcaaagctcacagaagtcgataactaccacttttactccagcatcccctccatggagaaagaagtgggaaactgctctccacattttctgaatgccttctag

SEQ ID NO: 197568 - DNA, 843 bp, synthetic construct
  misc_feature 1..843: note = Description of Artificial Sequence: Synthetic coding sequence
  source 1..843: mol_type = other DNA
atggacctgatcgacatcctgtggcggcaggacatcgacctgggcgtgagtcgagaagtctttgatttctctcagaggagaaaagaatatgaactggagaagcagaagaagctcgaaaaggagagacaggaacaactgcagaaggaacaggaaaaggccttctttgctcaactgcaattggatgaggaaaccggtgagttcctgcccatccagcccgctcaacacatccaatctgagacaagcggctctgccaactattcacaggtcgcacacatccctaagtcagatgctctgtatttcgacgactgcatgcagctgcttgcacagacctttccatttgtcgatgataacgaggtatcctctgcgacttttcagtcgctcgtccctgacatcccaggccatattgaaagccccgtgtttatagctactaatcaggcccagtctcccgagacatccgtggctcaggtcgcaccagttgatctcgacggcatgcaacaggatattgagcaggtgtgggaggaactgctgtcaatcccggagctgcaatgtttgaacatcgagaacgataaactggtggagacgaccatggtgccaagccccgaggcaaagctgaccgaagttgataattatcacttctactcgtcaattccctctatggaaaaagaggtggggaattgcagccctcacttcctcaatgcattcgaggatagtttctcgtctatcttaagcacagaggacccgaatcaactcacggtcaactctttgaactctgacgctaccgtcaatacagactttggcgatgagttctattccgcgttcatcgcggaaccaagcataagctag

SEQ ID NO: 197569 - DNA, 1749 bp, synthetic construct
  misc_feature 1..1749: note = Description of Artificial Sequence: Synthetic coding sequence
  source 1..1749: mol_type = other DNA
atggacctgatcgacatcctgtggcggcaggacatcgacctgggcgtatctagagaagtgtttgacttctcacagcgtcggaaagagtatgagttagaaaagcaaaaaaaactggagaaagagcgacaagagcagctccaaaaagaacaggagaaggcattcttcgcgcaactgcaattggatgaagagaccggcgaatttctgccaatacagcccgcccagcacatccagtctgagactagtggctccgcaaattactctcaggtggcacatatccccaagtctgatgctctttactttgacgactgcatgcagctgctggcacagactttccccttcgtggatgataacgaatcccttgttcccgacatcccgggccacatcgagagtccggtgttcatcgctacaaaccaggcccagtccccagagacttcggttgcgcaagtggcaccagtggatctcgatggcatgcagcaggatatcgaacaggtgtgggaagaattactgtccatcccagaactgcagtgtctgaatatcgagaatgataaactcgttgaaaccacaatggtacccagtcccgaggctaaactcactgaggtagacaactaccatttttactcctccatacctagcatggagaaggaagtgggcaattgttcacctcattttctgaacgcgtttgaagactcttttagctcaattctgtctaccgaggatccgaatcagctcacggtgaacagcctgaactctgacgccacagtgaatacggacttcggggacgagttttactcagcttttattgccgagccttccatctctaactctatgccgtctcctgccactctatcacactcactgtctgaactattaaatgggccaattgacgtgtcagacttatccctgtgtaaggcttttaaccaaaaccatccagagagcactgctgagtttaatgacagcgattccggaatcagcttgaacaccagcccaagtgtcgccagcccagagcattctgtggagagtagctcttatggggatactttactgggcctctccgatagtgaggtagaggaactggattccgcacctggaagtgtgaagcagaatggccctaagactcccgtgcacagtagtggcgatatggtgcagccactctcccccagccaaggacaaagcactcatgtccatgatgcccagtgcgagaatacacctgagaaggaactccccgtgtctcccggccacaggaagaccccctttaccaaagataaacacagcagccgtctggaagcacatctgacgagggatgagctgcgcgcgaaagcgctacacattccgtttcctgtggagaaaattatcaatctgcccgtcgtggactttaacgaaatgatgagcaaggaacagtttaatgaagcacagctcgctctgattcgagacattcggcgaagaggcaaaaataaggtagcggcccaaaactgccggaagagaaaacttgagaatatcgtggaattagagcaggatctggatcacctgaaggacgaaaaagaaaagctgttgaaggagaaaggcgagaacgataaaagcctgcatctccttaaaaagcagttgagcacgttatacttggaagtgttcagcatgctgcgagatgaggacgggaaaccatactcaccctcggagtatagtctccaacagacacgtgatggcaatgttttcttggtacctaaaagtaagaaaccggacgtgaagaagaactag

SEQ ID NO: 197570 - DNA, 2085 bp, synthetic construct
  misc_feature 1..2085: note = Description of Artificial Sequence: Synthetic coding sequence
  source 1..2085: mol_type = other DNA
atgaagcacctgaagcggtggtggagcgccggcggcggcctgctgcatctgacacttcttctgtctctggccggcttacgagtggacctggacttgtatttgttactacctcccccaacccttctgcaggatgagctgctctttttaggaggtcccgcctccagcgcctacgcgctgtcaccattctctgctagtggcggatggggtcgcgcgggacatctccaccctaagggtagagaactcgatccagccgctccccccgaggggcagctcctcagggaggtgagagctcttggcgtacccttcgtgccccgaactagcgtcgatgcatggcttgtgcattctgtagctgccggctcagccgacgaggcacacggactgctgggagcagcggctgcatccagcaccggcggcgccggtgctagtgtagacggcggctcacaagccgttcaagggggcggaggcgacccgcgggccgcaaggagcggcccactcgacgctggcgaggaagagaaagcgcccgccgaacctacagcacaggtaccggacgccggagggtgtgcctccgaagaaaatggcgtgctgagagagaagcacgaagccgtggatcacagtagccagcacgaggagaacgaggagagggtgtcagcgcagaaagagaattcgttgcagcagaatgatgatgatgagaataagatagcggaaaagcctgattgggaagcagaaaaaacgactgagtcccgcaatgagcggcacttaaacggcaccgatacttccttctctttggaagatcttttccagttgttgagcagccaacccgaaaactctctcgaaggcatttcccttggagacattcctctgccaggtagtatcagcgatggcatgaatagtagcgcacattaccatgtgaatttttctcaggctatatcacaggatgtgaatctgcacgaagctatcctgctttgcccaaacaatacctttaggagagatcccacagcacgaaccagtcagtcacaggagccatttctgcagctgaactctcacaccacgaatccggaacagactctgcccgggacaaatctgacagggtttctgtctcctgttgataaccacatgagaaacctaaccagccaggatctgttatacgaccttgacatcaacatctttgatgaaattaatttgatgtctctggcgaccgaggacaactttgatccaatcgacgtttcacagctctttgatgagcctgattcagattccggcctttctcttgacagttcgcataataacacaagtgtcattaaatccaatagcagccattccgtttgcgatgaaggtgccattggctactgcacagaccacgagtcttccagccatcatgacttggaaggcgcggtgggtggctattacccggagcccagtaagctgtgtcacctggatcagtccgattccgactttcatggggatctgaccttccagcatgtgtttcataatcacacttatcacttacagcccaccgctccagagagcacgagtgagccctttccatggcctggaaaaagtcagaagattaggagtcgttacttggaagataccgacaggaacctgagccgcgacgagcagcgagccaaggcccttcatattcctttctctgtggacgagattgtgggcatgccagtagacagttttaactcaatgctaagccgatactatctgaccgatctacaagtctctttaattcgcgatattcggcggagaggaaagaataaggtggctgctcagaattgccgaaagcggaagctagatattatcctgaaccttgaagacgatgtctgtaacttgcaagctaagaaggaaaccctcaagcgggagcaggcccaatgcaataaagctatcaatataatgaagcaaaaactgcacgatctgtatcacgacatcttcagtcgcttacgggatgatcaaggaaggcctgtgaaccccaaccactacgcccttcagtgtacgcatgacgggtcaatcctcatcgtgcccaaagaacttgtggccagtggacacaagaaggagacacagaaaggcaaacggaaatag

SEQ ID NO: 197571 - DNA, 1200 bp, synthetic construct
  misc_feature 1..1200: note = Description of Artificial Sequence: Synthetic coding sequence
  source 1..1200: mol_type = other DNA
atgaacagcagcgcccactaccacgtgaacttcagccaggccatcagtcaggacgtgaatcttcatgaggctatcctgctctgtcctaacaacaccttccggagggatccaactgcgcgcacatcacaaagccaggaaccctttctccagctgaattcccacactacaaaccccgagcaaaccctgcccggaacgaatctcactggattcctgagccctgtggataaccacatgcgtaatctgaccagccaggatctgctctacgacttggacatcaacattttcgacgagataaatctgatgagcctggccaccgaggacaactttgatccgatcgatgtgagccagctgttcgatgagccggattcggatagtggcctcagtctggattcctcccacaacaatacaagcgtgattaaatcaaattcttctcactctgtgtgcgacgaaggggcaatcgggtattgtaccgaccacgagtcctcatcgcatcacgacctagaaggggcggtcggggggtactatccagaaccttcaaagctgtgccacctggatcaaagcgattcagattttcacggggatctgaccttccaacacgtgttccacaaccacacatatcatcttcagcctaccgctccagaaagtacctccaatctgttcaggccaggaaagagtcagaagatccggagtaggtacctcgaggataccgacagaaatttaagcagggacgaacagcgcgccaaagccctgcatatccctttcagcgtcgacgagatagttggcatgcctgttgactctttcaattcaatgctctcaagatactacttgacagatctccaggtaagcctgattcgagatatccgtcgaaggggcaagaacaaggttgcagcccagaattgccgaaagcgcaaactcgacattatcctgaacctggaggacgatgtgtgcaatttacaggctaaaaaagagacactaaagagggagcaggcccaatgtaataaggcaatcaacattatgaagcagaaattacacgatctttaccatgacatattctccagattgagagatgaccagggaaggcccgtgaaccccaaccactacgccctgcaatgcacccacgacggcagcattcttatcgtacccaaggaacttgtggcctctgggcacaagaaggagactcagaagggtaaacgcaagtag

SEQ ID NO: 197572 - DNA, 1143 bp, synthetic construct
  misc_feature 1..1143: note = Description of Artificial Sequence: Synthetic coding sequence
  source 1..1143: mol_type = other DNA
atgtacagccccctgtgcctgacccaggacgagttccaccccttcatagaggcactccttcctcacgtccgcgcatttgcttacacatggttcaatctccaggcccgtaaacggaaatactttaaaaagcatgagaaaagaatgtccaaggaagaggaacgagcggtcaaggacgagctgctcagtgagaagccggaagtgaaacaaaagtgggcttcccggctattggcgaaactcagaaaggacattcgccctgagtaccgcgaggattttgtcttaactgttactggtaaaaagccaccatgttgtgtactttcgaaccccgaccagaaagggaaaatgaggcgcatagactgcctaaggcaagcagataaggtgtggcgcctcgacctcgtgatggtgatactcttcaagggtattcctctcgagtccacagatggggaacgtcttgttaaatctcctcagtgctccaacccaggactatgtgttcagccccaccatatcggcgtgtcagttaaggaactggacctctatctggcctatttcgtgcacgctgcgggcatgccgtcacctaccacgctgaaaaaatcggaaaaaagtgggttctcaagtccttctcccagccaaacatcatccttagggactgcctttacccagcaccaccggccagtgatcacggggccacgtgccagcccccacgcaactcccagcacgctacactttccaacatcccccatcattcaacagccaggcccatacttcagccatcccgccattcggtatcatccacaggagaccttgaaggaatttgttcaacttgtgtgtccagatgcaggtcagcaagctgggcaagttggttttctgaacccaaacgggagctcccagggaaaggtgcacaatccttttctccctacacccatgctgcccccacccccacctccccccatggcgcgtccagtgccgctccctgtccccgacaccaaaccaccgacaacatcaactgagggaggcgctgccagccctacttcgcctacttattcgacccccagcactagtccggccaatagattcgtgtccgtgggtcctagagacccttctttcgttaacattccccaacagacccagtcctggtacctcggatag

SEQ ID NO: 197573 - DNA, 1464 bp, synthetic construct
  misc_feature 1..1464: note = Description of Artificial Sequence: Synthetic coding sequence
  source 1..1464: mol_type = other DNA
atgtacagccccctgtgcctgacccaggacgagttccaccccttcatcgaggccttgctgcctcacgtgagggcattcgcttatacttggtttaacctgcaggcaagaaagcgcaagtattttaagaaacatgaaaagagaatgtcgaaggaagaggaaagggctgtgaaggacgaactgctaagcgaaaaacctgaggttaaacagaaatgggcctcacgccttttagccaaacttcgcaaggacattaggcctgagtatcgcgaagattttgtgctgacagtcaccggcaaaaagcctccgtgctgcgtgctctctaatcccgatcagaaaggcaaaatgcgacgcatcgactgccttcgacaagctgacaaggtttggcggctcgatctggttatggttattctattcaagggcatccccctggaaagcacagatggtgagcgcctggtgaaatcaccacaatgcagtaatccaggattgtgtgtccagccacatcacattggggtatcagtaaaagaacttgatctgtacctggcctacttcgttcacgccgcgggccatctgggttttcaggattcttttgttacttcgggagtcttctccgtgaccgagctggtaagggtctcacaaactccaatcgcggcaggaacaggccccaatttttcactgagtgacctggagagctctagctattatagtatgtctccaggcgccatgagaaggtccctacctagcactagcagcacgagctcaaccaagaggttaaagtccgtggaagacgagatggacagtcccggtgaagagcccttttacaccggtcaaggacggtctccagggagtgggagtcagtcttctggatggcacgaagtggaaccaggaatgccttctccaacaactttgaaaaaaagtgagaagtctggcttcagcagtccatcgccttcacagacctcatctttagggacagcattcactcagcaccacaggccagtaatcacagggcctagggcgtcacctcacgccaccccttcaacattgcactttccaacgtctcccataatccagcagcctgggccatacttcagtcaccccgctatacgataccacccgcaggagacattgaaagaatttgtgcagctggtatgccccgatgccggccagcaggcaggtcaagtgggattcttaaatcctaacgggtccagccagggaaaggttcacaaccctttcctgcctactcccatgctcccccctccaccgcctccacctatggctcgacccgttcctctacccgtcccagatactaagccaccaaccacatcaacagagggaggagccgccagcccaacctcgcccacgtacagcaccccaagcacgtcccctgcaaatcgattcgtgagcgtcgggcccagagatccatcttttgttaatatccctcagcaaactcagtcttggtatctgggatag

SEQ ID NO: 197574 - DNA, 1401 bp, synthetic construct
  misc_feature 1..1401: note = Description of Artificial Sequence: Synthetic coding sequence
  source 1..1401: mol_type = other DNA
atgtacagccccctgtgcctgacccaggacgagttccaccccttcattgaggctctcctgccgcacgttcgggcctttgcttacacgtggtttaacttacaggcgcggaaaagaaagtattttaagaagcatgagaaaaggatgagtaaggaggaggaacgggctgtgaaagacgaactgcttagtgaaaaacccgaggtgaagcagaaatgggccagcagactgctggcaaaactgagaaaagacattcgacctgagtacagagaggactttgtcttgaccgtgactggaaagaagcctccctgttgtgtgctgagtaacccagatcagaagggaaaaatgcgacggatcgactgtttacgacaagccgataaagtctggcgactagacctggttatggttatcctctttaaaggaatcccactggagtctactgacggggaaaggctcgtgaagagtcctcaatgctcaaacccgggcttgtgcgtgcagccccatcacatcggcgtgagcgtaaaggagctcgatctttacctagcctactttgtgcatgcagccgactcgtcccaatctgagagcccgagtcagccctcagatgccgatatcaaagaccagcctgaaaatggtcacctgggatttcaggacagttttgtcacctccggcgtgttctctgtcacagaactagtccgggtttcccagactccaatcgcagctggcacagggccaaacttctccctatcggatctagagagtagcagctactactcaatgtctcccggggcaatgaggagaagtctgccctccacatcaagtacaagtagcaccaagaggcttaaaagcgtcgaggatgagatggattcccccggtgaggaaccattctataccggccaaggcaggtccccgggctccgggtcccaaagttcaggatggcacgaagtggagcccgcttctccccacgccacgccatccactcttcacttccctacaagccctatcatccagcagcctggaccgtatttcagccaccccgccattagatatcaccctcaggagactctgaaggagttcgttcagctggtgtgtccagatgctggacagcaggcaggccaggtgggcttcctcaacccgaatggaagctcgcaaggcaaagtacacaatcccttcctgcctaccccaatgctgccaccgccgcccccaccgcccatggccaggccagttccattgcccgtacccgacactaagcctcctaccacctctaccgaaggtggggcagcctctccaacctctccaacctattcaaccccttctacgagcccggcaaatcgcttcgtgtctgttggtcccagagatccttccttcgtcaatattcctcagcagactcagtcatggtaccttggctag

SEQ ID NO: 197575 - DNA, 1665 bp, synthetic construct
  misc_feature 1..1665: note = Description of Artificial Sequence: Synthetic coding sequence
  source 1..1665: mol_type = other DNA
atgcagatgtgccggcccgccagcagcagcgtgctgtacgtgcccacgagatggcctgggggctgtggagccacatggcaatcttgtccatcacccccccctcgccgaacgcgcatcccccagcggccagctgtgatgtattcccctctatgccttactcaggatgagtttcatccattcatcgaggctctcctcccccacgtgagggcatttgcttatacctggtttaaccttcaagcgcgcaagcgtaagtactttaagaaacacgaaaaacgcatgtcgaaagaggaggaaagagcggtgaaggacgagctcctgtcggagaaaccggaggtcaaacagaaatgggccagcaggcttttggcaaaactgcggaaggacatacggcccgagtatcgagaggatttcgttcttactgtaactgggaaaaagccgccttgttgtgttcttagcaatcctgatcagaaggggaaaatgagacgaatagactgcttgaggcaggccgacaaggtctggaggctagatctggtgatggtgatcctatttaagggaatccctctcgagagtactgatggcgagcgcttggtcaaaagtcctcagtgtagcaatccaggtctctgtgtgcagccccaccatatcggggtcagcgtgaaagaactcgatctgtacttggcatatttcgtgcacgccgccgactcaagccagagcgagagcccaagtcaaccttccgacgccgacatcaaggatcagccagagaacggccatctgggatttcaggattcttttgtcacctccggggtatttagcgtgacagagttagtgcgagtgagccagacacctattgccgcaggcactggacctaactttagcctatccgacttggagtcaagttcctactattctatgtcccccggtgcaatgagacgatctctcccatctacatccagcacaagctctaccaaacgactgaagagcgtcgaggatgaaatggactctccgggagaagagccattttacacaggccagggacgctcccccggtagcggctcgcagtcttcaggctggcatgaggtcgagcccggaatgccaagcccgactaccctgaaaaaaagtgaaaagagtggcttcagttctccaagccccagccaaacatcctctcttggcactgccttcacccagcaccaccgtccagtcatcactgggccgcgcgcaagccctcacgcgaccccgtcgaccctgcactttcccacttcaccaatcatacaacaaccagggccttactttagtcaccccgccatccggtatcacccccaagaaacactgaaggagtttgtccagctggtgtgtcctgatgccggccagcaagctggacaagtgggtttcctcaatcctaacggtagcagccaggggaaagtacacaacccattcctgcctacccctatgctaccaccgcctcctccacccccaatggctagacctgtccccctgcctgtgccagatacaaagccgccaaccacctccacagagggaggtgctgcgtcccctaccagccccacctacagcacaccatctacttcccctgcaaatcgtttcgttagcgtgggccctagagacccctcttttgtcaacattccacagcaaacccagagttggtacctgggttag

SEQ ID NO: 197576 - DNA, 1599 bp, synthetic construct
  misc_feature 1..1599: note = Description of Artificial Sequence: Synthetic coding sequence
  source 1..1599: mol_type = other DNA
atgaagctggccgacagcgtgatggccggcaaggccagcgacggcagtatcaagtggcagctctgctatgacatctcagcaaggacttggtggatggacgagttccatccattcatcgaagctctccttccccacgttcgtgcatttgcatacacatggtttaacctccaggcccgtaaacgtaaatactttaagaagcatgagaaaagaatgtctaaggaggaagagcgagctgtgaaggatgaactcctgtcggaaaagcccgaggtgaaacagaagtgggcatctcgcctcctggctaagctgcgtaaggatattagaccagagtaccgggaagattttgttctgaccgtgacagggaagaaacctccatgctgcgttctgagtaaccctgatcaaaaaggcaagatgcggagaatagattgtctgcgccaagctgataaggtgtggcgcctcgacctggtgatggtaatcctgttcaaaggcattccccttgagagtacagatggagaacgcctggtgaaaagcccgcagtgctccaatcctggcctttgtgtgcaaccccatcacatcggagtttccgtgaaagagctcgatttgtatctcgcttacttcgtgcatgccgccgacagcagccaaagcgaatcaccgtctcaaccttccgacgccgatataaaggaccagccggaaaacggacatctgggctttcaagactcattcgtgaccagcggcgtcttcagcgtcactgagttggtcagagtgtcacaaaccccaatagctgcagggaccggtcccaacttttccctgagcgatctggaaagcagcagttactacagcatgagtcccggagccatgcgccgctccttacctagcacctcatcaacttcaagtaccaagcgcctgaaatcagtcgaggatgagatggactcccccggggaagaacccttctatacaggacagggccggagcccaggatctgggagtcaaagttctggctggcacgaggtcgaacctgggatgcctagcccgacgaccctcaagaaatctgaaaaatcaggcttctcctccccaagcccgagccagaccagctctctcggtaccgcgtttacccagcaccacaggccagtgattacaggaccaagggcttcacctcatgcaactccctccaccctgcatttcccaacatcacctattattcagcaacctggcccctatttctcacatccggcaattcgctatcacccccaggagactctcaaggaatttgtccagctagtctgtcctgatgccggtcagcaagccggccaggttggtttccttaaccccaatggatcctctcaaggcaaggtgcataatcctttcctgcctaccccaatgctgccaccccctcctccacctccgatggcccgaccagtgcctctcccggttccagatacgaaacctcccaccacgtccaccgaagggggcgctgctagtcctacttcaccaacatactccactccatccacctcacccgcaaacaggtttgtgtctgtgggccccagagacccgtcattcgtcaatatcccacaacagacccagtcttggtacctcggatag

SEQ ID NO: 197577 - DNA, 1530 bp, synthetic construct
  misc_feature 1..1530: note = Description of Artificial Sequence: Synthetic coding sequence
  source 1..1530: mol_type = other DNA
atgtacagccccctgtgcctgacccaggacgagttccaccccttcatcgaggcccttctgccccacgtcagagcgtttgcatacacttggtttaacctacaggcaaggaagcgcaaatattttaaaaaacacgaaaaacgcatgtctaaggaggaggagcgtgctgtaaaggatgagctcctctcagagaaacccgaggtcaagcagaaatgggcatcacggctgctggcaaaactcagaaaggatatcaggcccgaatacagggaggatttcgtcctgacggtgacagggaaaaaaccaccatgctgcgtcctgtccaaccccgaccagaagggcaaaatgcgccggatcgattgcctccgtcaggcagataaggtgtggcgccttgacttggtgatggttatcctgttcaaagggatcccgttagaatctaccgacggcgagcgactggtcaagagtcctcagtgtagtaatcccggcctgtgcgtgcagccccaccacatcggcgtttctgttaaagagctcgacctatacctggcttatttcgttcacgccgccgattctagccagtccgaatcaccaagccagccctcagacgctgacatcaaagatcaacctgaaaatggtcatctcggattccaagattcctttgtgacatctggcgtgtttagtgtaactgaattggtcagagtgtcccagacaccaattgctgcaggcactggccccaacttttcattgtccgatctggagtctagcagctattactctatgtctccaggagctatgcggagatcacttcctagcacaagcagtacaagttcaacaaaacgcctgaagtctgtggaagacgaaatggatagccccggcgaagaaccattctataccggccagggacgaagccctggatctggctcacagtccagcggctggcacgaggtggaaccgggcatgccgtctccgacaactctcaagaagagtgaaaaaagcggattttcttcaccgtcgccttcccagaccagctctttgggaacggctttcacccaacatcatagacctgtcatcactggcccgagggcatctccacatgcaacaccgagcactcttcactttcccactagtcccattattcaacagcctggtccttatttcagccacccggctatacggtaccacccccaggagactctcaaggagtttgtacaattggtctgccccgatgcgggccagcaggcaggccaagtggggttcctgaatccaaacggctcgtctcaaggcaaagtccataatccgttcctccccacccctatgttgcctcccccccccccacctcccatggctcgtcctgtaccgctacctgtgcctgacacaaagccccccaccacaagcacagaagggggagcagcctccccgactagcccaacctatagcaccccgtccacgtcgcccgccaatcgctttgtttccgtgggaccccgcgacccctcctttgtaaatatacctcagcagacacaatcttggtacctaggctag

SEQ ID NO: 197578 - DNA, 1506 bp, synthetic construct
  misc_feature 1..1506: note = Description of Artificial Sequence: Synthetic coding sequence
  source 1..1506: mol_type = other DNA
atggacgagttccaccccttcatcgaggccctgctgccccacgtgagagccttcgcatacacatggttcaatctgcaggcgcgaaaacggaagtactttaagaagcatgagaaaagaatgtcaaaggaggaggagagggcggtcaaggacgaactcctgagtgaaaagccagaggttaaacagaagtgggcctctagattgttggcaaaactcagaaaggatatacgaccagagtacagagaagactttgtgctgacagtgaccggcaagaaaccgccttgttgcgtgttatccaaccccgaccagaaaggtaaaatgcgtaggatagactgtctgcgacaggcagataaggtgtggcgcctggacctcgttatggttatactgttcaagggcatccctctagagtccacagacggagaacgtttggttaagtccccacagtgctcgaaccccggcctgtgcgtacagccgcaccatattggtgtctctgtgaaagagctggacctatacctggcttacttcgtccacgcagctgacagctctcagtctgagagcccttcccagcctagcgatgctgacatcaaagaccagcccgaaaacggccatctaggattccaggacagcttcgtcactagcggcgttttttccgtaactgagctcgtccgtgttagtcaaactcccattgccgccggaactggcccaaacttctccttaagcgaccttgaaagcagctcctactactcaatgagcccaggcgccatgaggagatcattgccttccaccagctcaactagcagtacgaaacgactgaaaagcgttgaggatgaaatggattcccccggcgaagagccgttctacaccggccaaggaaggtcgcctggttccggcagccaatcctcagggtggcatgaggttgagcccggaatgccaagtcctaccacgttgaagaaatccgagaagtctgggttctcaagccctagcccctcacaaacatcatccctgggaactgcatttacccaacatcatagacctgtgataacgggcccccgtgcaagtcctcatgctaccccgtccacccttcatttccccacctcccctattatccaacagcctggcccttattttagccacccagcgattagataccatccacaagaaaccttgaaggagttcgtgcagctggtgtgtcctgatgccggacagcaggcaggacaggtgggcttcctgaaccccaacgggtccagtcagggcaaagtacataatcctttcctgcctacccctatgttgccacccccccccccgccccccatggcccgccccgtgccacttcccgtgccagataccaaacctcctaccacatcaaccgaaggcggggcagccagcccaactagccctacctattccacaccctctacttccccagccaatcggtttgtctcggtgggcccaagagacccttcttttgtgaatattccacagcaaacccaatcctggtatctcggctag

SEQ ID NO: 197579 - DNA, 1497 bp, synthetic construct
  misc_feature 1..1497: note = Description of Artificial Sequence: Synthetic coding sequence
  source 1..1497: mol_type = other DNA
atgtacagccccctgtgcctgacccaggacgagttccaccccttcatcgaagcactattacctcatgtgagagctttcgcttacacctggttcaacttgcaggcgaggaaaagaaaatatttcaagaaacacgaaaagcgtatgtcaaaggaggaagagagggcggtaaaggatgagctgctctccgaaaagcccgaggtcaaacagaaatgggccagcaggttgctggctaagttgcgtaaagacatccggccagaatacagagaggacttcgtactgaccgtgactggaaagaagcccccttgttgcgtcttatctaaccctgatcagaagggcaagatgcgacggattgactgtctcaggcaagcggacaaagtctggcgcctggatcttgtcatggtgatactgtttaaaggcatccccttagaatcaacagatggtgaaagactggtgaaaagcccacagtgttctaaccccggcctgtgtgtgcagccacaccatatcggagtctctgtgaaggagctggatctgtacctagcctacttcgtacatgctgccgactcttctcagagcgaatccccaagccagccatctgatgcggacatcaaggaccagccggagaatggccatctcgggttccaggacagtttcgtcacttccggggtattttcggtgacggagcttgtacgcgtttcccagactcccatcgccgccggtacagggcctaactttagtctgtccgacctggagagctcctcttactactctatgagtccaggagcaatgaggcgaagccttccgtccacatcgagtacatctagtaccaaaaggctaaagtccgtcgaggatgagatggattctcctggtgaagagcctttttataccggacagggaagaagtcctggatccggatcccagtcctccgggtggcacgaggttgagcctgggatgccatccccaacaaccctcaaaaagtccgaaaaatccgggttctcatcaccaagtcccagccagacttcttccctaggtacggcgttcacccagcatcaccggcccgtcataaccggacctcgtgccagcccccacgccacaccctcgactcttcatttcccaaccagccccattatccagcagccaggaccttatttctcacatccagcgatccgctaccatcctcaagaaactcttaaagagtttgtgcaactagtgtgtccagacgcagggcagcaggctggtcaggttggtttcttaaacccaaatggttccagccagggcaaggttcataatccctttctcccgacccccatgctcccaccaccccctcccccaccaatggctagacctgttccactgccagtacctgacacaaagccaccaacgacctccactgaggggggggcagccagtcccactagtccaatccttgtccccgggattaaggtggctgcgtcacaccatccccctgataggccaccagaccccttttctactttgtag

SEQ ID NO: 197580 - DNA, 603 bp, synthetic construct
  misc_feature 1..603: note = Description of Artificial Sequence: Synthetic coding sequence
  source 1..603: mol_type = other DNA
atgatgtacagccccatctgcctgacccaggacgagttccaccccttcattgaggccctgctgccccacgtccgagccatcgcatatacttggttcaacctgcaagctagaaagcggaagtactttaagaagcacgagaaaaggatgagcaaggacgaggaacgcgcagtaaaagacgagctgctcagtgaaaagcctgaaatcaagcaaaaatgggcaagtaggctgctcgccaaactccggaaggatatccggcaggaatatagagaagatttcgtgcttacagtcaccgggaaaaaacacccttgttgcgtgctgagcaatccggaccagaaaggtaaaattagaaggatagattgtcttaggcaggcggataaagtgtggcgactggatctggtcatggtgattctatttaaggggattccccttgagtctaccgacggcgagagacttatgaaaagccctcattgcactaacccagccctgtgcgtgcagccacatcatataaccgtttctgtcaaggagctcgatctattccttgcctattatgtgcaagagcaaggtaagaacttcttttcttctaataaatgcatcaagatctag

SEQ ID NO: 197581 - DNA, 507 bp, synthetic construct
  misc_feature 1..507: note = Description of Artificial Sequence: Synthetic coding sequence
  source 1..507: mol_type = other DNA
atgaacagcggcgtgaacctgcagcggagcctgagcagcccccccagcagcaagaggccaaaaactatttcaatagacgagaacatggaaccaagcccaaccggcgatttttacccttctccttccagcccagctgccgggagccgcacctggcatgaaagagaccaggacatgtcaagtccaactaccatgaagaagcctgagaagccactgttctcaagcgcctccccgcaggattcctccccgcggctgtctacattcccccaacatcatcatcctggtattcccggggtggcccatagtgtcatttccacaaggacgcccccacccccctccccgctgcccttccccacccaggcgatcctgccccccgccccctcaagctacttctcacaccctacaattcggtatcccccccatcttaatccgcaggacactctgaaaaattacgtgccgtcatatgatccatcctcaccacaaacctctcagtcctggtacttgggctag

SEQ ID NO: 197582 - DNA, 1341 bp, synthetic construct
  misc_feature 1..1341: note = Description of Artificial Sequence: Synthetic coding sequence
  source 1..1341: mol_type = other DNA
atggagcggatccccgtgagcgtggacttctgggtggtgtgctgcgctgtactgaaatgtaatcctggtattcccaaaagaatgagtaccctgtgcttcgggttttctgacgagttccatccgtttattgaagccctgcttccacatgtacgagcaatcgcctacacatggtttaacctgcaggctcgaaagagaaaatacttcaaaaagcacgaaaaaagaatgagtaaggatgaagagcgagctgtaaaggatgagctcttgtcagagaagcctgagattaagcagaagtgggcctccaggttgcttgccaaactacgtaaggacataagacaggaatatcgtgaagattttgtgcttactgtaacggggaagaaacacccatgctgtgtgctttccaatcccgaccagaaggggaagatcaggaggatagattgccttaggcaggctgacaaggtgtggagactcgacctagtcatggtgatcctgttcaagggaatccctctcgagtcaaccgacggcgaacgactcatgaagagtcctcattgcacaaaccctgccctttgtgtccagcctcatcatatcaccgtgtcagtcaaggaacttgacttatttttggcatactatgtgcaggagcaggattccggccagtcaggttccccatcccataatgaccctgctaagaaccctccggggtaccttgaggactcctttgtgaagagcggcgtctttaacgtatcagaattagtgcgggtctcccgcacaccaataacacaaggaaccggggtcaatttccctataggggagattccctcccagccctattatcatgacatgaacagtggggttaatctgcagcggagtctgagttcacctccttcctccaagcgtcctaagaccatttctatcgacgagaatatggagccatcccccactggcgatttctatccctccccttcttctcctgcagcaggaagcaggacatggcacgagcgtgatcaggacatgtcaagccccacaaccatgaaaaagcctgagaaacccctgtttagcagtgcctcccctcaggactcttccccccgcttgtccactttcccgcagcaccatcatccaggcataccaggcgtggcccatagcgtgatttcaacacgtacacccccgcctccgagtccgcttcctttccccactcaggctattctcccgcctgcaccatccagctacttttcgcacccaactatccgctatcctccacacctcaatccacaagatacgctgaaaaattatgtgccttcgtacgatccgtcctccccacagacctcccagtcttggtacctcgggtag

SEQ ID NO: 197583 - DNA, 1485 bp, synthetic construct
  misc_feature 1..1485: note = Description of Artificial Sequence: Synthetic coding sequence
  source 1..1485: mol_type = other DNA
atgatgtacagccccatctgcctgacccaggacgagttccacccctttatcgaagcgttgctaccgcacgtgcgagcaatcgcttacacctggtttaacttgcaagccaggaagagaaaatactttaagaagcatgaaaaacgcatgtctaaggacgaggagagggcagtgaaggacgaactgcttagcgagaagccagaaatcaaacagaagtgggctagccggctactggcaaaattgagaaaagatatcaggcaggagtaccgggaggattttgttctgacggtgaccggcaaaaagcacccatgttgtgtgttgtctaacccagaccagaaggggaaaattcgtcgcatagattgcctaaggcaggctgataaagtgtggaggctagacttggtaatggtgattctgttcaaagggatccccctggagtcaacagacggtgagcgcttgatgaagtctcctcactgtaccaacccagccttgtgcgtgcagccgcatcacataacagtgtctgttaaagaactcgatttgttcctggcctattacgttcaggaacaagactctggacagagcggctccccttctcacaacgacccagccaaaaacccccccggctatctcgaggactccttcgtgaaatctggagtcttcaatgttagcgagctcgttcgcgtgtctcgaaccccgatcacccaggggaccggcgtgaatttccctattggtgagatacccagtcagccttactatcacgacatgaattcaggcgttaatcttcagagaagtcttagttcacctccatcctctaagcgacctaaaactatcagtatcgacgaaaacatggaaccatcacctacgggtgatttttacccttccccttcctcacctgccgctgggtctcgcacgtggcacgagcgtgatcaggatatgtccagtccaactaccatgaaaaagcccgaaaaacctcttttctcctccgcttccccacaggattcttcgccaagactgtccaccttcccacagcatcatcatccaggaattcccggcgtggcccactccgtcatcagcactagaacccccccacccccgtcccccctgccctttcccacccaagctattctgcctccagcgccgagttcttacttttcccatcccactatccgctatccccctcacctaaatcctcaggataccctgaagaactatgttccttcatacgatccttcttccccgcagacaagtcagccaaacgggagtggccaggtggttggcaaagttccaggccatttcacaccagtactcgcgccctctccgcacccttcagccgtgcgcccggtgaccctgtctatgactgacacgaagcccattacaacctccaccgaagcctacacagcatctggcactagccaggccaaccgctatgtggggttgtcaccgagagacccatcttttctgcatcagcagcaatcctggtatctggggtag

SEQ ID NO: 197584 - DNA, 1263 bp, synthetic construct
  misc_feature 1..1263: note = Description of Artificial Sequence: Synthetic coding sequence
  source 1..1263: mol_type = other DNA
atgatgtacagccccatctgcctgacccaggacgagttccaccccttcattgaagcactgttaccccacgttcgcgcgatagcttacacttggtttaatttgcaggctcgcaaacgaaaatatttcaaaaagcacgagaagcgcatgagcaaggatgaggagagggccgtgaaggacgaactgctgagcgagaagccggaaattaaacagaaatgggcctcgcgcttgttggcaaagcttaggaaggacatccgccaggagtaccgcgaggacttcgtgctgaccgttactggaaaaaagcacccttgttgtgtgctgagcaacccggatcagaagggcaaaattcgcagaatcgattgcttgaggcaggcagacaaggtgtggaggctagatctggtgatggtcatcctgtttaaaggcatccccctcgagagcaccgatggcgaaagactgatgaagagcccgcattgtactaatcccgctctgtgcgtgcaaccgcaccacatcacagtgtccgtgaaagagcttgatctcttcctcgcctactatgttcaggagcaagattccggacagagcggctcacctagccataacgacccggctaagaacccacccggttacctggaggacagttttgtgaagagcggagtcttcaacgtgtctgaactggtgagggtgtcccggacgccaataacccagggaactggcgtgaactttccgatcggagagatcccgtcccagccatactaccacgacatgaacagcggggtcaacctccagcggagcctcagctcaccaccctcgtctaaacgaccaaagactatttctatagacgaaaatatggagccctctccaacgggagatttttacccttcacccagcagtcctgccgccggcagccgcacctggcatgaaagagaccaagacatgtcgtcaccgacaactatgaagaaaccggagaagcccctcttttcatctgctagcccgcaggatagttctccccggttgtctacatttcctcagcaccaccatccgggaatcccaggagtcgcccactccgtcatctccaccaggacaccccccccacctagccctctccccttccctacccaagccattctaccacctgcgcccagctcatacttcagccacccaaccatccgttacccaccccatctgaatcctcaggatacgctcaaaaattatgtgccctcgtacgatccatcctctccccagacttcgcaatcgtggtatttggggtag

SEQ ID NO: 197585 - DNA, 1686 bp, synthetic construct
  misc_feature 1..1686: note = Description of Artificial Sequence: Synthetic coding sequence
  source 1..1686: mol_type = other DNA
atgatgtacagccccatctgcctgacccaggacgagttccaccccttcattgaggccctacttcctcatgtgagggccatcgcttacacgtggttcaatcttcaggcacgtaagcgcaaatatttcaaaaagcacgaaaaaagaatgagtaaggacgaggaacgggcagtgaaggacgaattactttctgagaagccagagatcaagcagaaatgggcctcacggctactcgcgaagctcaggaaggatattcgtcaggaatatcgggaagatttcgtgcttacagtgacaggtaagaaacatccttgctgcgtcctttccaaccccgatcagaagggcaaaatcagacggatcgattgcctgagacaggccgacaaagtgtggagacttgatctcgtgatggtgatcttgttcaaaggaatccccttagagtcgaccgatggggagagattgatgaagagcccccactgcaccaaccctgctctgtgtgtccagcctcatcatatcaccgtgagcgtgaaggaactcgaccttttcttagcctattacgtgcaggagcaggactctggtcagtccgggtccccgagtcataacgatccagctaagaacccgcctggttacctggaagactcctttgtaaagagtggtgtttttaacgttagtgaattggtccgcgtgtcacggacccccattacgcagggtacaggcgtcaacttccccatcggagaaatcccgtcccagccatattatcacgacatgaactctggagtcaacctgcaacggtctttatctagtccaccttcctctaagcggcctaaaacaatcagtatcgatgagaacatggaaccctccccaactggagacttctacccctcaccctcctcccccgccgccggatcccgcacttggcacgagcgtgatcaggacatgagctcaccaactacaatgaagaaacctgagaaacctctgttctctagtgcctccccgcaggacagttcgcccaggttaagcactttccctcagcatcatcaccccggtatccctggcgtagcccattccgtcatttctacgagaactcccccgccaccatcccccctgcctttccctacacaagctatactccctcctgcgccatcttcatatttttctcacccaaccatccgatacccacctcacctgaatccacaggatacactgaaaaactatgttccttcttacgacccatccagtccccagacctcccagccgaacgggtctggacaggtggttggtaaggtgcctggacacttcacccctgtgctcgcaccatctccccacccttctgcggtgagacccgtgaccctgtctatgaccgataccaaaccaataaccactagtacagaagcctacaccgcctccggcactagtcaagcgaacagatatgttggtttgtcaccacgcgatccatcttttctccatcaacaacaactgcgcatatgtgactggactatgaatcagaatggtaggcatttataccccagcaccagtgaggacactctggggatcacatggcaatctcccggcacatgggctagtcttgtgcctttccaggtatccaatagaacccctattctgcccgctaacgtacagaattacggcctcaacattataggcgagccctttctgcaggcagagacctctaactag

SEQ ID NO: 197586 - DNA, 1464 bp, synthetic construct
  misc_feature 1..1464: note = Description of Artificial Sequence: Synthetic coding sequence
  source 1..1464: mol_type = other DNA
atgatgtacagccccatctgcctgacccaggacgagttccaccccttcattgaggccctgttgccccacgtgcgcgccatcgcctatacatggtttaacttgcaggcccgcaaaaggaagtacttcaagaaacatgagaagcgaatgagtaaggatgaggagcgcgccgtgaaggatgaactgctgtctgagaaaccggagattaagcagaagtgggcttcaagattgctcgccaagctcaggaaggacatccgccaggagtacagggaagatttcgtcctgaccgtgacaggcaagaaacacccatgttgtgtcttgtcgaatcccgaccagaagggcaaaattagacgaattgactgccttagacaggccgataaggtgtggcgcctggatctggtgatggtgattctcttcaaggggattcccctggaatccaccgatggagagcggctcatgaaatcgccccactgcaccaatccagctttgtgcgtacagccccatcacattacagtgagtgtgaaggagctggacctgttcttggcatactacgtccaggaacaagacagtgggcagtctggatcaccttcgcacaacgaccctgctaagaatccgcctggatatctcgaagatagtttcgtgaaatccggagttttcaatgtgtccgaattggttcgggtctcacggacccctatcacacaaggcactggtgtaaactttcccattggggagataccttcacagccctactaccacgatatgaactcaggggtgaatttacaaaggtcactgtcttcacctccctctagcaaacgtccaaaaaccatatcaatcgacgagaatatggaacccagtcccaccggggatttctatcccagccccagcagccccgcagccggtagccgcacctggcatgagcgagaccaggacatgagctcgcctaccacaatgaagaagcccgagaaacctctatttagcagtgccagcccccaagatagttccccaaggctcagtacgttcccccagcaccaccaccccggcattcctggggtcgcccactctgttatcagtactaggacccctccaccgccaagtcccctgccgtttcccacgcaggccatcctcccgcccgcaccatcctcatacttttcacacccaacaatcaggtatccaccgcacttgaatcctcaggataccttgaagaactatgtgccaagctacgatccttcatcccctcagacatcacaactgaggatatgtgattggactatgaatcagaacggacgacacctctacccctcaacgtctgaagataccctgggcatcacatggcagtcccctggcacgtgggccagcctcgtgcctttccaggtctcaaacagaaccccaatcctgcccgcgaacgtgcagaactatggcttgaacattataggagagccttttcttcaggccgagacctccaattag

SEQ ID NO: 197587 - DNA, 1713 bp, synthetic construct
  misc_feature 1..1713: note = Description of Artificial Sequence: Synthetic coding sequence
  source 1..1713: mol_type = other DNA
atgatgtacagccccatctgcctgacccaggacgagttccacccctttatagaggccttgctccctcatgttagagctatagcatacacttggtttaaccttcaggcaagaaaacggaaatacttcaagaagcacgaaaagcgcatgagcaaggacgaggagagggccgtcaaggatgaactcctgtcagaaaaacccgaaataaagcaaaagtgggccagccgactcctcgccaagttaaggaaagatatccggcaagagtatcgcgaagatttcgtgctgactgtgacgggcaaaaaacatccttgttgtgttctctccaatccagaccagaagggcaaaatccgccggattgactgtctgcgccaggccgataaagtttggcgcctggatctcgttatggtgatactttttaaaggcatacccctggagagtaccgatggagaacgccttatgaagtccccccattgcactaaccccgcactttgcgtccagccgcaccacatcactgttagcgtgaaggaactcgacttgtttttagcctattacgttcaggagcaggattcaggacaatcagggtcccctagccataatgatccagcaaaaaacccccccgggtacttagaagattccttcgtgaaaagcggagtgtttaacgtaagcgagctggtccgtgtaagcagaactcccatcacccaagggacgggggttaatttccccatcggagaaatcccaagtcaaccgtactatcatgatatgaattcaggagtgaacttacaacgcagtctctcctccccccccagcagtaagcgccccaagactatcagtatcgatgaaaatatggaaccttcacctaccggcgacttctatccgtctccctccagccccgccgccgggtccaggacctggcatgaacgggatcaggacatgagctcacctaccaccatgaagaagcctgagaagcccctgttttcttcagccagcccccaggactcctctcccaggctgagcactttcccccaacaccatcaccccgggatccctggagtggcccattccgtcatatcaacaagaacgcctccgccacctagtccgcttcccttccccactcaagccatcttgccaccagccccatctagctacttttcacatccaaccatcaggtacccacctcaccttaatccacaggatacacttaaaaactacgtaccttcatatgacccgtcctccccgcagactagccagcccaacggatcaggccaggtggtggggaaagtgcctggccatttcacaccagtactggctccgagtccacaccctagcgccgtgaggccagtgactctgagcatgaccgacacaaagcctatcaccactagtacagaaggtgaggccgctagccctacagccacaacctacactgcatctggaacgagtcaggcaaacagatatgtgggcctttcaccgcgggacccaagttttctgcatcagcagcagctgcggatttgtgattggactatgaaccagaacggacgacacctctacccaagcacatccgaggacacactcggcataacatggcagtccccgggtacttgggctagcctggtgccgtttcaagtatccaacagaaccccgattttgcccgcgaacgtccaaaattatggacttaatatcatcggagaacctttcctccaggccgagacttctaattag

SEQ ID NO: 197588 - DNA, 930 bp, synthetic construct
  misc_feature 1..930: note = Description of Artificial Sequence: Synthetic coding sequence
  source 1..930: mol_type = other DNA
atgaacagcggcgtgaacctgcagcggagcctgagcagccccccctcttccaagaggcctaagacaatctcaatcgatgaaaatatggaaccgtcacccaccggagatttttatcccagtccctcgtcgcccgccgcgggttcacggacctggcatgagcgggaccaggatatgtcaagtcctaccacaatgaaaaagcccgagaagccgttgtttagttcagcgagccctcaggattctagtccccgactttccacatttccacaacatcatcaccccgggatccccggcgtcgctcactccgtgattagcacacgcacacccccgccgcccagcccccttccttttcccactcaggctattctgccacctgctccctcttcttatttctcacacccgacgattagataccctcctcacctgaatccccaggatactcttaagaactacgtgccttcttacgatccttcaagtccccagacctctcaacctaacgggtcaggacaggtggttggcaaggtgccagggcacttcacccccgttcttgccccgagccctcatccatctgcagtgcggcccgttacactgagtatgactgacacaaagcccatcaccacatctacagaagcctataccgcaagtgggacctcccaggccaatcggtacgttggactttcacccagagacccatcattcctccaccaacagcagttgcgcatctgcgactggacgatgaatcagaacggacgacatctgtacccttcaaccagtgaagacactctaggaattacatggcagtctccaggcacatgggccagcctggtaccatttcaggtatctaataggactccaatacttcccgccaatgtgcagaattatggtctgaacattatcggggaacccttcctgcaggcagagaccagtaattag

SEQ ID NO: 197589 - DNA, 1272 bp, synthetic construct
  misc_feature 1..1272: note = Description of Artificial Sequence: Synthetic coding sequence
  source 1..1272: mol_type = other DNA
atgtacagcagccccctgtgcctgacccaggacgagttccacccctttatcgaggccttactgccccacgtacgtgctttcgcatatacctggtttaacctgcaagcccggaaaagaaaatactttaaaaaacacgaaaaaagaatgtcaaaggacgaagaaagagctgtgaaagatgagttgctgggtgagaagcctgaggttaaacagaagtgggcaagcagactgttagccaagcttcgaaaagacatcaggcccgagtgtcgcgaagacttcgtgttgagcataacaggtaaaaaggccccagggtgcgtcttgtccaatcccgaccaaaagggtaaaatgaggcgaattgactgcctcagacaggccgacaaggtttggcggctggatctcgtaatggtgatcctattcaagggtattcctcttgaatccaccgatggtgagaggctggtgaaggccgcccagtgtggccatcccgttctctgcgtgcaaccacatcacatcggggtcgccgtcaaagagctggatctttacctagcctacttcgtccgggagcgagatgcagaacagtccggcagtccaagaaccggcatggggtctgaccaggaagactctaaacccataacactcgacactacggatttccaggagtctttcgtgacgagcggcgtgttttccgtgacagaactgattcaggtttctcggacaccagttgtgacagggaccggtcccaatttcagtctcggggagcttcagggacacctggcctatgatctcaacccggcaagtacgggtctgcggcgcacgttgccctcgacctccagtagcggcagcaaaaggcataaatccgggagtatggaggaagatgtggacaccagcccgggaggcgactattacacatccccatccagcccaacaagctcttccaggaattggacagaagatatggagggtgggatcagctcacctgttaagaagaccgagatggacaagagtccattcaattcaccgtctcctcaagactcaccacggttatctagctttactcaacaccaccggcctgtgatcgccgtgcattctggaattgcccgaagccctcatccatcttcagctctacacttccctacaacatctatcctcccccagactgctagtacttattttccccacacagccattaggtaccccccccacctcaacccccaggaccctcttaaggatcttgttagcctcgcgtgcgatcctgcaagtcagcagcctggtccctag

SEQ ID NO: 197590 - DNA, 1287 bp, synthetic construct
  misc_feature 1..1287: note = Description of Artificial Sequence: Synthetic coding sequence
  source 1..1287: mol_type = other DNA
atgtacagcagccccctgtgcctgacccaggacgagttccaccccttcattgaggccctgttgcctcacgtccgggccttcgcttacacatggttcaacttacaggctagaaagagaaaatactttaaaaaacacgagaaacgcatgagcaaggacgaggagcgcgctgtgaaggatgaactgttgggcgaaaaacccgaggtgaagcagaagtgggctagccgcctcttggcaaagctacgaaaagacatccggcccgaatgccgcgaggactttgtgttgagtatcacagggaagaaggccccgggttgcgtcctctccaaccccgaccagaaaggcaagatgaggcgcattgactgtctcaggcaggccgacaaggtgtggcgcctggacctagtcatggtcattctcttcaaaggcatacccttggaaagcaccgacggagagcgcctggtgaaagccgcacagtgcgggcatccggtgctctgtgtgcagccacaccatatcggagtggcagtaaaagaattagatctgtacctggcgtattttgtacgagagcgtgatgccgagcaatcagggtcccctaggaccgggatggggtctgaccaagaagacagtaaacccatcaccctggataccaccgatttccaggagagcttcgtgacttctggggtgtttagcgttaccgagcttattcaggtgtccaggactccagtcgtaacgggcacgggacctaacttttccttgggggaactgcaggggcatctcgcttatgacttgaatccagcatcgactggcttacggagaaccctgccctctaccagttccagcggcagcaaaagacataagagcggatcaatggaagaggatgttgacacttcccccggcggggattactataccagtccttccagtcctacatcatcatcacgcaactggaccgaagacatggaggggggtatctcgagccctgtgaagaaaaccgagatggacaaatccccttttaattccccttcaccgcaggactcaccacgcctcagcagcttcacgcaacaccatcggccagttattgctgttcacagcgggatcgctcggtccccacacccttcttcagcactgcactttcccactacttccattttacctcagactgcatccacttacttcccacataccgctattcgctatcctccccatttaaatccacaggatcctcttaaagatcttgtctcactggcctgcgaccctgcaagccagcagcccgggcccagctggtatctcggctag

SEQ ID NO: 197591 - DNA, 1527 bp, synthetic construct
  misc_feature 1..1527: note = Description of Artificial Sequence: Synthetic coding sequence
  source 1..1527: mol_type = other DNA
atgtacagcagccccctgtgcctgacccaggacgagttccaccccttcatagaggcactcttgcctcacgttagggccttcgcctacacctggttcaacctgcaggctaggaagagaaagtatttcaaaaagcacgagaaacgaatgagtaaagatgaggagagggctgtgaaggatgagttgctgggtgagaaacccgaagtgaagcagaaatgggcctctcggctgctggccaagctccgtaaggatatccggccagaatgccgagaggacttcgtattgagtattaccgggaagaaggcccctggctgcgtgctgtcaaatccagatcagaaggggaaaatgcgtagaattgactgtctcagacaagcagacaaggtgtggcgcctagatctcgtgatggttatcctgttcaagggcattcccttagaaagtaccgatggagaacgattggtgaaagccgctcaatgtggccacccagtcttgtgtgttcagccacaccacattggggttgccgttaaagaactggacctctacctggcatactttgtcagagaaagggatgcggagcagtcaggttcgccaaggacaggcatgggctctgaccaggaggacagcaaacccatcaccctggacaccaccgattttcaggagtctttcgtaacatccggggttttttctgtgaccgagttaatccaggtttcaaggaccccagttgttacaggtacaggccctaactttagtctgggcgaactccaagggcatctcgcgtacgacttgaaccctgctagcacaggtctaaggcgcaccctcccctcaaccagttctagtggatctaaaaggcacaagtcaggtagtatggaggaagatgttgatacatcaccagggggcgactactatacctcaccctcctcgcctactagctcttcccggaactggacggaagacatggagggcggcatttcctcccctgtaaaaaaaactgaaatggacaaatctcctttcaatagcccttcacctcaggattcccctcgtctgtctagctttactcaacaccatagacctgtgattgctgtacatagcggaatcgcacgcagcccccatccctcttctgccctgcacttcccaacaaccagcatactacctcaaacagcaagtacgtacttcccacacactgccattcgatatcccccccaccttaatccccaagaccccctgaaagacctggtctccctcgcctgtgaccctgcgagccagcagcctggaccccttaacgggtcaggtcaactgaaaatgcccagtcattgtctctctgcccagatgttagccccccccccacctggcctgccaaggctggcgctgccccccgctacaaaacctgccacaaccagcgagggaggagcgactagccctacatcacctagctattcccctcccgatacgtcgcctgcaaacaggagcttcgtaggcctcgggccgcgggaccccgccggaatctatcaggcccagtcatggggggatggttag

SEQ ID NO: 197592 - DNA, 1221 bp, synthetic construct
  misc_feature 1..1221: note = Description of Artificial Sequence: Synthetic coding sequence
  source 1..1221: mol_type = other DNA
atggacgagttccaccccttcatcgaggccctgctgccccacgtgagagccttcgcctatacgtggttcaatctgcaagcccgaaaaagaaagtatttcaaaaagcacgaaaaaaggatgtccaaagatgaggagcgagcggtcaaagacgaattactgggcgagaagcccgaggtcaaacagaagtgggccagccgcctgcttgccaagttaaggaaggacattcggcccgagtgtcgcgaggattttgtcctgtctatcaccgggaaaaaagcaccgggctgtgtgctgtctaacccggatcagaagggaaagatgcggcggatcgattgcctgcggcaggctgataaggtatggcggctcgatttggtcatggttattttattcaaagggatcccattggaaagtacggacggcgagagactggtgaaggcagcccagtgtggccatcccgtactctgcgtgcagccccaccatatcggtgtcgctgttaaggaattggatctctacttagcctactttgtcagagagcgcgataccaccgacttccaggaatccttcgtcacctccggagttttttctgtgaccgagctgatacaggtgagtaggacccctgtggtgaccggcaccggacccaacttttccctgggagagctgcaaggacatctcgcttacgacctcaatcccgccagcacagggttgaggcgaactctcccctccactagctcttccggctccaaacgacacaagagtgggtccatggaagaagatgtagacacatcacccggcggagattactatacttcccccagtagccctacttcttcctcgcggaactggacggaagatatggagggcggaataagctccccagtcaagaagaccgagatggataaatctcccttcaattccccatcacctcaagacagccctagactttcatcatttacccagcaccatcgaccggtgatagccgtccacagcgggatcgcccgctcaccacatccttcatccgcactacacttccctacgacaagcatactgccccaaactgcctccacgtatttcccacataccgccatccgctatcccccccatctgaatccacaggacccattgaaggatctggttagtctcgcttgcgatccggcctcccagcagcccgggcccccaactcttcgcccgacccgacccctccagacagtccccttgtgggactag

SEQ ID NO: 197593 - DNA, 1293 bp, synthetic construct
  misc_feature 1..1293: note = Description of Artificial Sequence: Synthetic coding sequence
  source 1..1293: mol_type = other DNA
atggacgagttccaccccttcatcgaggccctgctgccccacgtgcgagctttcgcttacacgtggttcaacctgcaggccagaaagcggaagtatttcaagaaacatgaaaagcggatgtccaaggatgaggaacgcgctgtaaaagatgagctgttgggcgagaagcccgaagtcaagcaaaaatgggcctcaaggttactagccaagctgcgtaaggatatcaggccagaatgtcgtgaggacttcgtcttgtccatcaccgggaaaaaggcccccgggtgtgtcctcagtaatcctgaccagaaagggaaaatgagaaggattgactgtctccgacaggccgacaaagtgtggcgcctcgaccttgtgatggtgattctcttcaagggaataccattggagagtaccgacggcgagagattagtcaaagcagcacagtgcgggcaccccgtgctgtgcgtgcagcctcaccacattggcgtggccgtaaaggaactagacctgtacctggcttacttcgtgcgagagagagatgcagagcagtctgggtcaccccgcaccggcatgggaagcgaccaagaggactcgaagcccattaccttggatacgaccgacttccaggagtcttttgtgaccagtggggtgttttcagtgacagaactgatccaggtgtcgagaacgcccgtcgtcacagggaccggacccaactttagtctcggcgagctacaggggcatttggcatacgaccttaacccagcctctacgggcttgagaagaacacttcctagcacttcttcaagcggcagcaaaaggcacaagtccggaagcatggaagaagacgtggatacttccccaggtggagattactacacatcgccaagctccccaacctcatcctcgagaaattggacagaagacatggaggggggcatctcaagtcctgttaaaaagaccgagatggataagtctcccttcaattctccttccccacaggatagtcctaggttatctagtttcacacagcatcaccgcccagtgattgctgtgcattcggggatcgctcggtccccccacccaagctccgcgcttcattttcccacaacgtccatcctgccgcagactgctagtacgtacttcccacatacagcaatcaggtatcccccccatctcaacccccaggatccactgaaagacctcgtgtccctggcatgtgaccctgcgtcgcaacaaccgggaccacctaccctgcgccccacgaggcctctgcagacagtacccctatgggactag

SEQ ID NO: 197594 - DNA, 1500 bp, synthetic construct
  misc_feature 1..1500: note = Description of Artificial Sequence: Synthetic coding sequence
  source 1..1500: mol_type = other DNA
atggacgagttccaccccttcatcgaggccctgctgccccacgtgcgagctttcgcatacacttggtttaacctgcaggcccgcaaacggaaatactttaaaaagcacgagaaacggatgtctaaagacgaagagcgggccgtgaaagacgagttactgggggagaaaccagaggttaaacagaaatgggcatcaagattgttggccaagctgcgaaaggacattagaccagagtgtcgggaagacttcgttctgtcgatcacaggcaagaaagcaccaggctgtgttcttagcaatccagatcaaaagggcaaaatgagaagaatcgattgtttgaggcaggcggataaggtgtggcggctggatcttgtgatggtcatcctgtttaagggaataccgctggagtcaaccgacggggaacgcttagtgaaagcagcacagtgcggacacccagtgctgtgtgtccagcctcaccatatcggagtggcagtgaaggagttggacctgtatttggcctactttgttagggaacgagacgcggagcagagcggttccccaaggacgggtatgggctcggatcaagaagatagtaaaccaatcaccctggatacaacggacttccaagaatccttcgtgacatcgggagtattcagcgtgacagagttaattcaagtgtctcggacgcccgtggtgacaggcaccggcccgaatttttccctgggggagcttcagggacatctggcatatgatcttaaccccgcctccacaggcttacgcaggactctgccttccacatcctcttcaggctccaaaaggcataaatctggatctatggaggaagatgtggacacctctccggggggggattattacacctccccctcgagccccacctcgtcgagccgcaattggaccgaggacatggagggaggcatttcctctcccgtaaagaagactgaaatggataaatctccctttaactcgccctcgccacaggattccccacggctatctagttttacccagcatcacaggccggtgattgccgtgcactcagggatcgctcgcagccctcatccttccagtgctctgcattttcctacgacctctattttgccccagacagcaagtacttactttccgcacacagcaatccgctacccgccccatctcaacccccaggatccattgaaggacctcgtctcactggcctgtgaccccgcttcgcagcagcctgggccactgaatggctctgggcagctgaagatgccaagccactgcctgagcgcccagatgctcgctcctccgccccccggtctgccccgacttgccctgccccccgccaccaagcctgccacaactagcgagggaggagccaccagccctacatcccctagctatagcccccctgatacctcccccgcaaatagaagttttgtcggactcggccctagggacccagcaggcatttaccaggctcagtcttggtatttgggttag

SEQ ID NO: 197595 - DNA, 1500 bp, synthetic construct
  misc_feature 1..1500: note = Description of Artificial Sequence: Synthetic coding sequence
  source 1..1500: mol_type = other DNA
atggacgagttccaccccttcatcgaggccctgctgccccacgtgagagcatttgcctatacctggttcaacctccaggcgcgcaagcggaagtatttcaaaaaacacgagaagcgcatgagcaaagacgaagagagggccgtcaaggatgaactcctgggtgagaagcccgaggttaagcagaaatgggccagtaggcttctcgccaaattgcggaaggacatcaggcctgagtgcagagaagacttcgttctttccattactggcaagaaagcacctgggtgcgttctgtccaacccggatcagaagggaaagatgcggaggattgactgccttaggcaggcagataaggtgtggaggctggatcttgtcatggtgattctgttcaaggggataccgctggagtcaacagacggagaacgcttggtcaaagcggcacagtgcggacatccagtactatgtgtgcaaccccaccacataggggtggccgtaaaagagctggacctatacttagcatattttgttcgggaaagggacgccgagcagtcaggctcaccaaggaccggaatgggatcagatcaagaagactctaaaccaattactctcgacacaactgatttccaggaaagctttgtaacctcaggtgtcttctccgtgactgagctgatacaagtcagcagaacgccagtcgtgaccgggacaggccccaacttctccctgggcgagcttcaaggccatctagcgtacgacctgaaccctgctagcaccggcttgcggcgtactctcccatccacatcaagtagcggtagtaagcgccacaaatcaggctcgatggaagaagacgtcgacaccagtcccggcggagactattatacctcccccagcagccccacatcgagttctcgcaactggaccgaagacatggagggagggataagcagcccagtgaagaagacagaaatggataagagccctttcaacagtccatccccacaggacagtcccagattaagcagctttacccagcaccaccgacccgtgatcgctgttcacagcggaatcgccaggagccctcacccctcaagcgccttgcactttcccacaaccagcattctgccccagacagcatccacgtacttccctcatacagctatccggtatcctccacatctgaaccctcaggatcccctgaaagatcttgtatctttggcttgtgatcctgcctcacaacaaccaggtcccctcaatggctccggccaactcaagatgcctagtcactgcctgagcgctcagatgctagcaccgccccccccggggctaccccgcctggccctgcctcccgctactaagcccgcaactacatcagagggcggggccacatccccaacttcaccatcctacagtccgccggatacttcccctgctaataggtctttcgtcgggcttggccctagggacccagctggcatttatcaggctcagagttggtacctgggctag

SEQ ID NO: 197596 - DNA, 1212 bp, synthetic construct
  misc_feature 1..1212: note = Description of Artificial Sequence: Synthetic coding sequence
  source 1..1212: mol_type = other DNA
atgggcgccaccgagcccggcggcgacaccagcagcgacgagttccatccatttatagaggcgctcttaccccatgtgagagcgttctcctatacttggtttaatcttcaagctagaaaaaggaagtatttcaagaaacacgagaaaaggatgtctaaagacgaggagcgcgccgtcaaggatgagctgttaggcgagaaaccagagatcaaacagaaatgggctagccgtctactcgccaaattgcgtaaggacattcggcctgaattcagggaggacttcgtcttgacaatcacgggcaaaaaaccaccttgttgcgtattgtcaaacccagatcagaaaggcaagattcgaagaattgactgcctgcggcaggctgacaaagtctggcggctggacctcgtgatggtgatcttatttaagggaattccccttgaaagcaccgacggtgagcgcctttataaaagtccacagtgtagtaaccccggcctgtgcgttcagccccatcatattggcgtaaccattaaagagttggatctttacctcgcttacttcgttcataccccagaatcaggtcagagtgacagctcaaatcaacaaggagacgccgacattaaaccactgcctaatggccacctgtcgtttcaagactgttttgttactagcggcgtatggaatgtcacggagctagtccgcgtaagccagacaccagtcgcgacagcttcaggtccaaatttttctttggctgaccttgagagtccctcctactataatatcaatcaggtgacgcttggtagacgcagcataacatcccctccttccacatctacaaccaaacgccctaagagcatcgatgatagtgagatggaatcccctgtggatgatgttttttatcccggaaccgggaggtctcctgcagccggatcttctcagtctagcggctggcccaacgacgtggatgctggatccccgcgtgccacagccagcgccctgcactttccgtctacatcaatcatccagcagagcagtccatactttacacatccaaccatcaggtatcaccatcatcacggtcaggactcgcttaaggaatttgtgcagtttgtgtgtagcgacggttctggccaggctacgggtcagcattcacagaggcaggctcctccgttacctaccggtctgagcgcatctgacccaggcaccgcaactttctag

SEQ ID NO: 197597 - DNA, 1383 bp, synthetic construct
  misc_feature 1..1383: note = Description of Artificial Sequence: Synthetic coding sequence
  source 1..1383: mol_type = other DNA
atgctgcccgcctgccggctgcaggacgagttccaccccttcatcgaggcacttctgcctcatgtgcgggccttctcgtatacttggttcaacctgcaggcccggaaacgcaaatactttaagaagcacgaaaaacgaatgtccaaggacgaggagcgcgcagtcaaagacgagttactgggtgaaaaaccagaaataaagcaaaagtgggccagtcgcctcttagctaagctcaggaaggacatcaggcccgagttccgcgaagatttcgttttgaccattactggaaagaagccgccatgttgtgttttaagtaatcccgatcagaaaggcaagattaggaggatcgactgcctgagacaggctgacaaggtatggagactcgacttggtgatggtcatactttttaagggaataccactggagtctaccgacggggaacgcctctacaagagtcctcagtgcagcaatccagggctgtgcgttcagccacaccacatcggggtgaccattaaagagcttgacttatatctggcatatttcgtccacacacctgagtccggccaatccgattcgagcaatcagcagggggatgctgacattaaacccctcccaaatggccatctctcctttcaagactgtttcgtgacctcaggcgtgtggaatgtgacagaattggttagggtatcacagacccctgtcgctactgcatcggggccgaactttagcctagcagatctggagtccccaagttactataatatcaaccaggtgactctgggacgtcggtctatcacatcaccaccaagcacttccaccaccaagcgtccaaaaagtatcgacgacagcgaaatggaatctccagtcgacgacgtattctaccccgggactggccgaagtcctgctgccggctcctctcaaagcagcggatggccaaatgacgtggacgcaggatcacctcgagccaccgctagcgccctacacttcccaagcacttcaatcatccagcaaagtagtccctactttactcatcccacaatccggtatcatcatcaccatgggcaggacagcttgaaagagtttgtgcaattcgtgtgttccgacggttccggtcaggccacaggtcaaccaaacggctccggacagggtaaggtgcctggcagcttccttctgcccccacccccacctgtggccaggcctgtgccgctgccgatgcccgactccaagtccacgtcaacggcccctgatggagcagccctcacgccccccagcccttctttcgccaccaccggcgccagcagcgcaaatcggtttgtatctattggtcctagagatggcaacttcttgaacattccacagcaatctcagtcctggtttctctag

SEQ ID NO: 197598 - DNA, 1326 bp, synthetic construct
  misc_feature 1..1326: note = Description of Artificial Sequence: Synthetic coding sequence
  source 1..1326: mol_type = other DNA
atgtacagcccctactgcctgacccaggacgagttccaccccttcatagaagccctgttgccccatgtgcgcgccttcagttacacatggtttaacttgcaagctaggaagcggaaatatttcaaaaaacatgagaagaggatgtccaaggacgaagaaagagccgttaaggatgaattgctaggagagaaacctgagattaaacagaagtgggcatctcgcctgctggccaagcttcgcaaggacattcgccccgagttccgagaagattttgtattaacaattactgggaaaaagccaccatgttgcgtgctgtcaaaccctgaccagaaggggaaaataagacgcattgactgcctccgacaggcagataaggtctggcgtttggatctggttatggtaatcctttttaaagggatcccgctggagtctaccgacggagagcgactctacaagagcccccagtgtagcaaccccggtctgtgtgtgcagccacaccacattggagtaactataaaagagctagatctctaccttgcatactttgttcataccccagaaagcgggcagagcgatagcagtaatcagcaaggcgatgccgatatcaaacccctcccaaacggacacctgtcatttcaagactgctttgttacttccggggtatggaatgtcaccgagcttgtccgagtgtcccagacgcccgtcgctaccgcttcgggccccaatttcagtctcgctgatttggaatcccccagctattataacatcaatcaggtcacactgggcaggcgctcaatcactagcccaccaagtacctctacaacgaaacggcctaaatctatagacgatagcgagatggagagcccagtggacgatgtgttctacccaggcactgggagaagccccgcggcaggcagttcccaatcttcaggctggccaaacgacgtggatgccggccctgctagcctcaagaagagtggaaaactagatttctgcagcgcactctcaagccagggatcatcacccagaatggcttttacccatcatcccctgcccgtgctggccggagtcagaccaggctcgcccagagcaactgctagcgctctccactttccatctacatctataatccagcaatccagcccatattttactcatcctaccatcagataccatcaccaccacggacaggactcactgaaggagttcgtgcaattcgtgtgcagcgacggatctggccaggctaccggacagcacagccagagacaggcacctccactgcctaccgggttgtccgcaagtgatccgggaacagccacattctag

SEQ ID NO: 197599 - DNA, 1509 bp, synthetic construct
  misc_feature 1..1509: note = Description of Artificial Sequence: Synthetic coding sequence
  source 1..1509: mol_type = other DNA
atgtacagcccctactgcctgacccaggacgagttccaccccttcatcgaggctctccttccgcacgtgcgggcatttagctatacctggttcaacctgcaggctcggaagcgaaagtacttcaagaagcatgagaaaagaatgagcaaggacgaggagcgtgccgttaaagacgagctactaggggaaaagcctgagatcaagcagaagtgggcctcccgccttctggctaagctccggaaggacataagaccggagtttcgggaggacttcgtgctgacaataaccggcaagaagcccccgtgttgcgtgctcagcaatcctgaccagaaaggaaagattagaaggatcgactgtctacggcaagccgacaaggtttggaggctggacctggtgatggttatcctttttaagggcatccccttggaatccacagacggggagcggctgtacaagagcccacaatgttccaaccctggcctctgcgtgcagccccaccatattggcgtcaccatcaaggagttggacctctatttggcttactttgtgcatacaccggagtctgggcaaagcgattcctccaatcaacaaggcgatgccgatatcaagccgctgccaaatgggcacttatccttccaagattgtttcgtgactagcggtgtgtggaatgtgaccgagttagtaagggtctcacagactccagtagctaccgcttctggccctaacttttccctggccgatctggagtcgcctagctactataacatcaatcaggtgactctcggtcgtcgatcaataacatcccccccttccacctccacgacaaaacggcccaagagtattgatgacagtgagatggagagtccagtggacgatgtgttttaccccgggaccgggcgctcccccgcagccgggtcatcacagtcatcgggatggcctaatgatgtcgacgctggccctgccagtctcaaaaagtcaggtaagctggatttctgtagtgccctctcctcccagggcagctcgccaagaatggccttcacgcaccatcctctgcctgtgctggcgggtgttcgcccaggtagccctagagcaaccgccagtgcgcttcatttccccagtaccagtataattcaacagtcaagtccatactttactcatcccaccatccgatatcatcaccaccatgggcaggactcgctcaaggagttcgtgcagttcgtgtgtagtgacgggtcggggcaggctacgggacagccgaatgggtctggacagggtaaagtgccgggtagtttcctattacccccaccccctccagttgcacgacctgtcccgctgcctatgccagactcgaaaagtacttcaaccgctccggacggcgccgctctgacgcccccaagcccgtcatttgcaaccactggggccagcagtgccaacaggtttgtttccatcgggccacgcgacggaaattttctaaacatcccgcagcagtcacaatcgtggttcctgtag

SEQ ID NO: 197600 - DNA, 633 bp, synthetic construct
  misc_feature 1..633: note = Description of Artificial Sequence: Synthetic coding sequence
  source 1..633: mol_type = other DNA
atgagcaaggacgaggagcgggccgtgaaggacgagctgctgggcgagaaaccagagattaagcagaagtgggcaagcaggctgctggccaaactgcggaaggacattagaccagaatttcgggaagattttgtcctgacgattacgggaaagaaaccgccttgttgcgtgctctctaatccggaccagaagggcaaaataaggaggatagattgtttgcgccaggcagataaagtgtggcgtcttgatctggtgatggtgattctgtttaaggggatcccactggaatctacagacggagagaggctgtataaatcccctcagtgttccaatccagggttatgcgtgcaaccgcaccacatcggtgtcacgattaaggagctggacctctacctcgcctatttcgtacatacccccgaatcggggcagagcgatagttccaatcagcagggagatgccgatatcaagcctttacccaatggacatttaagctttcaggactgtttcgtgacgtctggagtctggaacgtcaccgagctcgtatatcaccggctcctgctccaacaacatcaaggacctactagtccatggagaacctggcgagtgcctgccaccaccactagcactaggtag

SEQ ID NO: 197601 - DNA, 1071 bp, synthetic construct
  misc_feature 1..1071: note = Description of Artificial Sequence: Synthetic coding sequence
  source 1..1071: mol_type = other DNA
atggccggcgtggcctgcctgggcaaggccgccgacgccgacgagtggtgcgactccggtctaggctctctgggaccagacgctgcggcccctgggggccctgggctcggagccgaactcggcccaggcctaagctgggctcctctggtctttggctatgttacggaggacggggacacagcactgcatctggccgtgatccaccagcatgagccttttctagactttcttctcggcttctcggctggcactgagtacatggatcttcaaaatgatctggggcagaccgccctccatctggcagcaatcctgggcgagacctcaactgttgagaagttatacgctgctggagcgggcttatgtgtggcagagcgccgggggcacacagctttgcacctggcttgcagggttggggcacatgcctgcgcaagggcgctcctccagccaagacctaggcggccaagagaggcacctgatacataccttgcccagggcccagatcgtactcctgatactaaccacacacctgtcgcgctttaccccgactctgatctggagaaagaagaggaggaatcagaagaggactggaaactgcaactggaagccgaaaactatgagggacacaccccattacacgttgccgtcatccacaaggatgtagagatggtccggctgctgcgggatgctggcgcagatctggacaagccagagcctacttgtggtcgatcccccctgcatctggccgtagaggcacaagccgccgacgtgctggagctgctgctccgggccggtgctaaccccgctgcgcggatgtatgggggcaggaccccccttggatctgctatgctccgcccaaatcctatcttggcaaggttgctgcgagcacatggggccccagagcccgaaggtgaggacgaaaaaagcggaccttgcagttcgtcttccgactctgacagtggggacgagggcgacgaatatgacgatatcgtggttcatagcagtcgttctcagacaagattgcccccaaccccggcctccaagccactgcctgacgaccctagacccgtgtag

SEQ ID NO: 197602 - DNA, 921 bp, synthetic construct
  misc_feature 1..921: note = Description of Artificial Sequence: Synthetic coding sequence
  source 1..921: mol_type = other DNA
atgaacggcgccaccgccgcctgggccccctgggtgcggacccagaggccacctgaggacctgggctgggctagatcttgggcgaggggttgcagaggcctcccttcctctagcgctacctccttaagaatgggcacccggttctctgccgggaccgaatacatggatctgcaaaacgatctgggtcagacggccctgcacttagcggctatcttgggtgagacttccaccgttgaaaagctctatgctgcaggagccggtctttgcgtggccgaacggcgaggacatacagccctacacttggcatgcagggtgggggcgcatgcatgtgctcgtgccctgttgcaaccacgcccgcgacggcccagagaagcccccgacacttatcttgcccaggggcctgatcgcactcccgataccaaccatactcctgttgccctctaccctgatagcgatctggagaaggaagaagaggaatcggaggaggattggaaacttcaactggaggctgagaactatgagggccacactcccctgcacgtggctgtgatccataaggatgtggagatggtacgccttttgcgagacgcaggggccgatcttgataagccagaacccacttgcggccgctccccactgcatttagctgtggaggcccaggcagccgacgtgctcgaactgctcttgagggccggggcgaatccagctgccagaatgtacggcggaagaaccccactgggatccgccatgctgcggcctaacccaatcttagcacgacttcttcgggcccatggggcccctgagcccgagggtgaagacgaaaaaagcggtccctgctcctcctcatccgattccgacagcggagatgagggtgtgagccaagaggaaagacagggaagcccagcaggtggttctggatag

SEQ ID NO: 197603 - DNA, 1086 bp, synthetic construct
  misc_feature 1..1086: note = Description of Artificial Sequence: Synthetic coding sequence
  source 1..1086: mol_type = other DNA
ctgcagaacagccggcagagccccgccaccggcggccggctgcggggagcccccgaggctgctggagcgatggctggggtggcatgcctcggaaaagctgccgacgctgatgagtggtgtgacagcggcctggggagtcttggccccgacgcagctgcacccggagggccagggctaggcgccgaattgggacccggattatcttgggcccccttagtgttcggttacgtgacagaggacggcgacaccgcactacatcttgccgtgatccatcagcacgagcctttcctggatttcttgttaggtttttctgccggaacagaatatatggatctgcagaatgatctcgggcaaacagcattgcatcttgcggcaatacttggggagacttccactgttgagaaactctatgccgctggagcaggcctgtgtgtggctgaaagaaggggtcacactgctctccatcttgcatgccgcgtgggcgcacatgcgtgcgcacgtgcactactgcagccacggcctagacggcctagggaggccccagatacctatctcgcccaggggccagataggacccccgacaccaaccatactcccgtagctttgtatcccgactctgacttggagaaagaagaggaagagtcagaggaggactggaaattacaactggaagcagagaattacgaaggccacacaccgcttcatgtggctgttattcacaaggatgttgagatggtgcgcctgctccgagacgctggcgcagacctggacaagcccgagcctacctgtgggagaagcccccttcatctcgctgtggaagcccaggcagcggacgtgctggaactattgcttcgggccggggcaaaccccgcagcccggatgtatggcggacgaactcctctgggtagcgctatgctgagacccaaccccattctcgcccgcctgctccgggcccacggcgctccagaacccgaaggtgaggacgagaagtccggtccgtgtagttccagtagcgattctgacagtggtgacgagggcgtttcacaagaagaaaggcagggcagcccggctggtggctcaggatag

SEQ ID NO: 197604 - DNA, 1791 bp, synthetic construct
  misc_feature 1..1791: note = Description of Artificial Sequence: Synthetic coding sequence
  source 1..1791: mol_type = other DNA
atgatcgtggacaagctgctggacgacagccggggcggcgagggccttagggatgcagctggaggctgtgggctgatgacaagccctctgaatctatcctacttctatggtgcttccccccctgcggctgcacctggagcttgcgatgcctcttgttccgtgctggggcccagtgcacccggatctcctggctccgacagctctgatttctcctcagcgagctctgtctctagttgtggagctgtcgagagccggtctagaggaggggccagagctgagcgacagcccgtcgaacctcacatgggcgtcggcagacagcagaggggtcccttccaaggagtgcgtgtgaagaactctgtgaaggagcttctgctccatattcggtcgcacaaacagaaagcctctgggcaggctgttgatgattttaaaacccagggtgtgaatattgagcagtttcgggagctgaagaatactgtctcctacagtgggaaacgtaagggacccgattcactcagtgacgggcctgcctgtaagcgacctgccttattgcatagccaattcttaacaccaccccagacacccacaccaggggagagtatggaggatgtgcatctgaatgagcctaagcaggaaagtagtgctgatctgctgcaaaatattatcaacattaagaatgaatgttcacctgtgagtcttaacacagtacaaactagctcgagtgtccagcagcagaacgatgcccatttgcatagcttttcaatgatgccttcatctgcttgtgaggccatggtgggacacgagatggcctctgattctagtaacacatccttgcctttctctaacatgggaaacccaatgaataccactcagctgggcaagtcactgtttcagtggcaggtggagcaggaagagagcaagcttgctaatatctcacaggaccagttcttgtcgaaggatgctgacggcgatacgttcctgcacatcgctgtcgctcagggtagacgggccctttcctacgttcttgcccggaagatgaacgccctgcacatgttggatataaaagagcataatggacagtctgcattccaggtggcagtggctgcaaaccagcatctcattgtccaagacttggttaacatcggagcccaggtgaacacaaccgactgctggggacgaacccctctgcacgtctgtgccgagaagggacactcccaggtgcttcaggctatccagaagggagccgtcggctctaatcaatttgtggacctggaggcaaccaactacgatggattgacaccattgcactgcgctgttatcgcccataacgccgtcgtccacgaactccaacgaaaccagcaaccccatagcccagaggtgcaggaattgctgctaaagaataaatcgttagtggataccatcaaatgcctgattcagatgggagcggccgtggaggccaaggataggaaaagcgggcgcacagcactccatctggctgccgaggaagccaatctggagctgatacggttgtttctggaactgccaagctgtctctctttcgtcaacgcaaaggcctacaacgggaatacagcgctgcacgtcgctgcaagccttcagtaccgcttgactcagctggacgctgttcgtctgctgatgcgtaagggggctgatccttctacccgaaatctggagaacgagcagccagttcacctggtgcccgatggcccggtgggggaacaaatccggcgcatcctcaaaggcaagagcatccagcagagagctccaccctactag

SEQ ID NO: 197605 - DNA, 2157 bp, synthetic construct
  misc_feature 1..2157: note = Description of Artificial Sequence: Synthetic coding sequence
  source 1..2157: mol_type = other DNA
atgatcgtggacaagctgctggacgacagccggggcggcgagggcctgcgagacgcagctggcgggtgtggactcatgacttccccattgaatctgagttatttctacggagcttcaccgcccgcagcggctcccggtgcatgcgacgccagttgcagcgtgctgggtccatcagcccccgggtcacctgggtccgatagtagcgacttctcgagtgcatcttccgtctccagttgcggagccgtggaatcaaggagcagggggggagcccgagcggagcgccaacctgtggagccacatatgggcgtcggcaggcagcaacgtggaccatttcagggtgtacgggtgaaaaatagcgtcaaagagctccttttacatattcgttctcataagcagaaggcaagtgggcaggcggtggatgactttaagactcagggcgtgaatatcgagcagtttcgggaactaaagaatactgtgtcatactctgggaagagaaaggggccggatagcttgtctgacggcccggcgtgtaagagaccggccctccttcattctcaattcctaacgccgccacagacaccaaccccaggagaatcgatggaggatgtgcacttgaatgaacccaagcaagaatcatccgcagacctccttcaaaacataatcaacatcaaaaacgagtgcagccccgtctccttgaacactgtacaggtctcttggctcaatcccgtcgtggtgccccagtcttccccggctgaacagtgccaggacttccacggaggccaggtgttcagccccccacagaagtgccagccctttcaggtgcgcggttcgcagcagatgatagaccaggcttctctgtatcagtactccccacaaaaccaacacgtcgaacaacagccacactatacacataaacccaccttagagtacagtccttttccaattccacctcagtcacccgcctatgaacccaacctatttgacgggcctgagtcccagttttgtccaaaccagtcacttgtaagtctcctcggggatcagagggagtctgaaaatattgcaaacccaatgcaaaccagttcgtcggtccaacagcaaaacgacgcccacctccactccttctccatgatgccctcttctgcgtgtgaggccatggtggggcacgaaatggccagcgacagctcgaatacttcgctcccatttagcaatatggggaaccctatgaataccacgcagctagggaaaagcctctttcagtggcaagtggagcaggaggagtcaaaattggcaaatatatctcaggatcagtttctctccaaggacgcagatggcgatactttcctgcacatcgcagttgcgcaggggcgaagagccttatcttatgtacttgcacgaaagatgaacgcgctccatatgttggacataaaagaacacaatggccagagtgctttccaggttgcagttgctgctaaccaacatctcattgttcaggatctggtgaacatcggggcccaggtgaacacaacggattgctggggacgaacacctttacatgtatgtgccgagaagggacactcccaggtactccaggctattcagaagggagccgttggatccaaccagtttgtggacctcgaggctaccaactatgatggactaacaccactacattgtgctgtcatcgcacataatgcagtcgttcacgagttgcagagaaaccagcagccacactctcctgaagtgcaggagcttttgctcaaaaataaatcccttgttgacacaattaaatgtctgattcagatgggggctgccgtggaagccaaggacaggaagtcagggcgcactgcacttcatctggccgccgaggaagcaaatttggaactcatccgactttttcttgagctcccatcatgtctatctttcgtgaatgccaaagcctacaatggcaacacagcactacatgtcgcagccagtctccagtaccgtttgactcagctggacgctgtacggctcctgatgcggaaaggagccgacccctcgacgcgtaacctcgaaaacgaacagccagtgcacctggttcccgacggccccgtgggagaacagatccgtcgcatcctgaagggtaaatctattcagcaaagggcaccgccatattag

SEQ ID NO: 197606 - DNA, 1857 bp, synthetic construct
  misc_feature 1..1857: note = Description of Artificial Sequence: Synthetic coding sequence
  source 1..1857: mol_type = other DNA
atgggcgtgggccggcagcagcggggccccttccagggcgtgcgggtgaagaactctgtgaaggaactgctcctgcacatcagatcccacaaacagaaagcctccggccaggccgtcgatgatttcaagacccagggtgtgaacattgagcagtttagggaattgaaaaacacggtgagctactcaggaaagcggaaaggtccagatagtctcagtgatggaccggcttgcaagagaccagcactactccacagccagtttcttactccacctcagacgcccacccccggcgaaagcatggaggatgtgcacctgaacgagccaaagcaggagtcctcggctgacctgctgcagaatataattaacattaaaaatgagtgttcaccggtttcgctgaacactgtgcaggtttcatggcttaatcccgttgtggtgccacagtcctctcccgccgaacaatgtcaggatttccacggtggacaggttttctccccaccacaaaagtgccagcctttccaagtcaggggatcccaacagatgatagaccaagcttctctgtatcaatactccccacagaatcagcacgtggaacagcagcctcactatactcataaaccaacattagagtattctcccttcccaatcccccctcaaagccctgcttatgagcccaacctctttgacgggcctgagagtcaattttgtcccaatcaatcactagtgtcccttctgggagatcaaagagagtccgaaaacatcgcaaaccccatgcagacttcttctagcgtgcaacaacagaacgatgcccacctccactcttttagtatgatgccgagcagtgcgtgtgaagctatggttggtcatgaaatggcctctgacagttcaaacactagtctaccatttagcaatatgggtaatcctatgaacactactcaactgggcaagagtctgtttcagtggcaggtggagcaagaggagagcaagcttgccaatattagccaggatcagtttctcagtaaggacgccgacggtgataccttcctgcatattgctgtagcccaaggcagaagagcattgtcctacgtcttggcccgaaaaatgaacgcacttcatatgctagatatcaaggagcacaacggacaatccgcattccaggtggccgtcgcggccaaccagcatctcattgtccaagatcttgtgaatattggagctcaggttaataccacagactgctgggggaggactccactccatgtatgtgccgagaaagggcactctcaggtgctccaggccatccagaaaggtgcggtggggtctaatcagtttgtggatctagaggcaacaaattacgacgggctgacgccgctgcactgtgccgttattgcacacaatgcagtggtacacgagttgcaacgtaatcagcagcctcatagtccagaggtccaagagctgcttctaaaaaacaaaagcctagtggacacaattaaatgtctgatccagatgggcgctgccgtggaggcaaaagacaggaaaagtggaaggactgccctccatctggcggcagaagaggcaaacttggagcttattagactgttcctggaactgccgagttgtctcagtttcgtaaacgcaaaggcctataacggcaacaccgccctgcacgtggccgcatccttacagtacagattaacccagcttgatgccgtgaggctactgatgcggaagggggccgacccatcgacgcggaatctcgaaaatgaacagcccgtgcatctggtaccagatggcccagtgggcgagcagatccgacggatcttaaagggtaaaagtatacagcagagggctccaccttattag

SEQ ID NO: 197607 - DNA, 333 bp, synthetic construct
  misc_feature 1..333: note = Description of Artificial Sequence: Synthetic coding sequence
  source 1..333: mol_type = other DNA
atgatcgtggacaagctgctggacgacagccggggcggcgagggcctgcgggacgcggctggtgggtgcgggctgatgacctctccattgaacctctcttacttttatggcgccagcccccccgcggcagctcctggcgcctgcgacgcctcgtgcagtgtgctaggccctagcgcgcctggctccccggggtccgactccagcgatttctcttctgcttccagcgtttcttcttgtggcgcagtggagtctaggtccagaggcggagctagagctgaaagacagccggtcgagccccatatgggtgttgggagacagcagcggggaccatag

SEQ ID NO: 197608 - DNA, 1806 bp, synthetic construct
  misc_feature 1..1806: note = Description of Artificial Sequence: Synthetic coding sequence
  source 1..1806: mol_type = other DNA
atgggcgtgggccggcagcagcggggccccttccagggcgtgcgggtcaagaactccgtgaaggagctcttactacatattaggagccacaaacagaaggcctcggggcaagctgttgacgactttaagacccaaggcgtgaacatagagcagttcagagaattgaagaataccgtttcctacagcggcaagcgaaagggtcctgacagtctctccgatggcccggcctgtaaacgccccgccctgttgcactcccagttcttaacaccacctcagacccctactcccggcgaatccatggaggatgtgcacctaaacgagcctaaacaagagtcttccgccgaccttctgcagaacattatcaacataaagaacgagtgttcaccagtaagcctgaacactgtccaagtctcctggctcaaccctgtcgtggtaccacagagctctcccgccgagcagtgccaggacttccatgggggacaagttttttcccctcctcagaaatgtcagcccttccaggtgagagggtcccagcagatgatcgatcaagcaagtttataccagtattcaccacagaaccagcacgtggagcagcagccacattatacacacaagccgacgcttgaatattccccattccccattcccccccagagcccggcgtacgagcctaacctgtttgatgggccagagagccagttctgtccaaatcagagcctagtctcccttctaggcgatcagcgggaatctgaaaacattgccaatcccatgcagacttctagttcggtgcagcagcaaaatgacgcacatctccattccttctctatgatgcccagttctgcatgcgaggcaatggtggggcacgagatggcctccgactcatctaacacatctctccccttttcgaacatgggaaacccaatgaatacgacacagctagggaagtcactattccagtggcaagtggaacaggaggagtctaagctggcaaatattagtcaggatcagttcctcagcaaggacgctgatggggacacgtttctgcatatagcagtcgcccagggcaggagggccctgagctacgtgctcgcccgaaaaatgaacgctttacacatgcttgatatcaaggagcacaatggacaaagtgccttccaggtcgccgtcgccgcgaaccagcatcttatcgtccaagacttagttaatattggagcacaggtgaacactacagattgctggggtcgtacccccttacacgtctgcgccgagaaaggccactcccaggtactgcaggcaattcagaagggagccgtgggtagtaaccagttcgttgatttagaagccacaaactacgatggcttgaccccgcttcattgcgccgtgatcgcacataacgcagttgtgcacgaactccagagaaatcagcagccccattctcctgaagtgcaagagctgctgctgaaaaacaagtccctggtggacactatcaagtgcctgattcaaatgggcgcagctgtggaggccaaggataggaaatcagggcggactgctctgcatttggctgctgaagaagctaatttggaactcattagactgttccttgagcttccctcatgtctctccttcgtgaacgccaaggcatataacgggaatactgccctccatgtggccgcctcgctacagtatcgcctgacccagcttgacgcggtgaggcttctaatgcgcaagggtgctgacccatccactcggaacctggagaacgaacagcctgtacatttagttcccgacgggcccgttggcgagcaatag

SEQ ID NO: 197609 - DNA, 393 bp, synthetic construct
  misc_feature 1..393: note = Description of Artificial Sequence: Synthetic coding sequence
  source 1..393: mol_type = other DNA
atgggcgtgggccggcagcagcggggccccttccagggcgtgcgggtgaagaattccgtaaaagagttgctgcttcacatcagatctcataaacagaaagcttctggccaggccgtcgacgacttcaaaacgcagggcgttaacatcgagcagtttcgcgagttaaagaatacagtaagctatagcggcaagcgcaaaggtccggatagcctgtcggatggtcctgcctgcaagcgcccagccttgttacattcgcagtttctgacccccccccagactccaactcccggggagagcatggaggacgttcatctcaacgagccgaagcaggagtccagcgctgacttactgcagaacattatcaacatcaaaaacgagtgttcacccgtgtag

SEQ ID NO: 197610 - DNA, 1101 bp, synthetic construct
  misc_feature 1..1101: note = Description of Artificial Sequence: Synthetic coding sequence
  source 1..1101: mol_type = other DNA
atgagcaaccccagcccccaggtgcccgaggaggaggccagcaccagcgtttgccggcccaagagcagtatggcttctacaagcagaaggcagagaagggagaggaggttccggagatacctgagcgccggaaggttggttcgcgcccaagcactgctccagcgccaccccggactggatgtggacgcgggtcaacctcctcctctgcatcgggcatgtgcgcgccacgacgcccctgccctctgcctgcttcttagactcggtgccgatcctgcccaccaagacagacatggggatactgcccttcacgcagctgccaggcagggacccgatgcctacaccgactttttcctgcccctgttaagcaggtgtccaagcgctatgggaatcaaaaacaaagacggagaaacccctggacaaatcctagggtggggccctccttgggacagcgcagaagaagaagaagaggatgatgcctcgaaggagagagaatggagacagaaactgcagggcgatgctagtcatgaaacccaggagcccgagtccttcagcgcatggtccgataggctcgctcgggagcatgcccagaaatgtcagcagcaacagcgcgaggcagaaggcagtcggaggccacctagagcagagggaagtagccaaagctggaggcagcaagaggaagagcagcggctgttcagggagagagcgcgagcaaaggaggaagagttgagagaatccagggcccggagggcgcaggaagcgctcggagaccgggaacctaaaccaacacgcgcgggcccccgtgaggagcatccaaggggggccggcagaggatctctgtggcggtttggagacgtgccatggccttgcccaggcggtggcgatccagaggctatggctgccgctttagttgctcggggtcctccactggaggaacagggtgccttacgacggtacttgcgagtccagcaggtgcgatggcaccctgaccggtttctgcagcggttcaggtctcagattgagacctgggaactcggcagggtgatgggcgctgtgacggccctctcccaggccctgaatagacacgcagaagccctgaagtag

SEQ ID NO: 197611 - DNA, 1077 bp, synthetic construct
  misc_feature 1..1077: note = Description of Artificial Sequence: Synthetic coding sequence
  source 1..1077: mol_type = other DNA
atggccagcaccagccggcggcagcggcgggagcggcggttccggagatacctgagtgccggaagactagtgcgagctcaggcgcttctgcagagacacccggggctggacgtggatgctggccagccgccgccactgcatagggcctgcgctagacatgacgcccccgccctgtgtttgctgcttcgtctgggcgccgatcccgcccaccaggaccggcacggagatacggctctccacgctgccgcgaggcaagggcccgatgcctacacagatttttttctgccgctactgtctcgctgtccttctgccatgggcatcaaaaataaagacggagagacaccaggccagatattggggtggggtcccccctgggactctgctgaggaggaagaggaggatgacgcttcaaaagagcgcgaatggcgtcagaaattgcaaggggagctagaagacgagtggcaagaagtaatgggaaggttcgaaggggacgcctcccatgagactcaggagcccgaatcttttagcgcttggtcagataggctcgccagagaacacgctcagaagtgtcaacagcagcagagagaagccgaagggtccaggcggccaccacgggccgaaggatcaagtcaatcttggaggcaacaagaggaggagcagcgcttgtttcgggaacgggctcgggccaaggaagaggagcttagagaatcacgcgcccgcagggcccaggaggccctaggcgatcgggagccgaagcccacccgggccggtccacgcgaagaacatccacggggagctggtcgcgggtcattgtggaggttcggagacgttccatggccttgtcctggcggtggtgatcccgaggcgatggctgcagccctggttgcaagaggaccgcccctcgaggaacagggagccctcaggcggtacctccgcgttcaacaggtccggtggcatccggatcgattcttacagcgttttagatcccagattgagacttgggagttaggcagagtcatgggggcagtaacagccttgagtcaagccctaaataggcacgccgaggcactaaagtag

SEQ ID NO: 197612 - DNA, 1146 bp, synthetic construct
  misc_feature 1..1146: note = Description of Artificial Sequence: Synthetic coding sequence
  source 1..1146: mol_type = other DNA
atgagcaaccccagcccccaggtgcccgaggaggaggccagcaccagtgtttgtagaccaaagtcttccatggcctccacttctcggaggcaacgccgtgagcggcgttttcgacgctatctgtctgctggtaggctcgtcagagcgcaagctctgctgcagcgacacccggggctggacgtcgacgcagggcagccacctcctctccacagagcctgtgcaagacacgatgcgcccgcgctctgcctcctgctccggctcggagctgaccccgcgcaccaagataggcacggcgacactgcactgcatgccgctgcacgccagggacccgacgcctataccgacttctttctgccactgctgtcaaggtgtcctagcgcaatgggtatcaaaaataaagacggtgaaacccccggtcaaatactgggctgggggcccccttgggactctgccgaggaagaggaagaagacgacgcctccaaagagagagagtggagacagaagctgcaaggcgagttggaggacgaatggcaggaggtgatgggaaggtttgaaggggacgccagccacgagacccaggagccagagagcttttctgcatggtctgacagactggccagagagcacgcccagaagtgccagcagcagcagagggaagctgagggttctcggcggccaccgcgcgctgaagggagcagtcagagttggagacaacaggaggaagaacagagactgttcagagaacgagcccgagctaaggaggaagaactgagggagtcccgggcacgtagagcccaggaagctctgggcgacagggaacctaagcccacaagggcggggccgcgggaggaacatcccaggggggcgggacgcggctccctatggagattcggcgatgtcccatggccctgccctggcggcggcgacccagaggctatggctgctgctctcgttgctagagggcccccacttgaggaacagggtgcattgcggagatatctgcgggttcagcaagtgagatggcacccagacaggtttctgcagcgctttcgatcacagattgagacctgggaactcggacgcgtgatgggggccgtgaccgcgcttagccaggccctgaacagacatgccgaggctcttaagtag

SEQ ID NO: 197613 - DNA, 1101 bp, synthetic construct
  misc_feature 1..1101: note = Description of Artificial Sequence: Synthetic coding sequence
  source 1..1101: mol_type = other DNA
atgagcaaccccagcccccaggtgcccgaggaggaggccagcacctctgtttgcagacctaagtcaagtatggcttccacatcacgccggcaacggcgcgaacggaggtttcgacggtacctgagcgctgggaggctggtacgtgcccaagctcttctgcaacggcaccctgggctggacgtagacgcgggccagcctccaccgttacatagggcctgtgcgaggcacgacgccccggccctttgcttgcttctgaggttgggcgccgatcccgcccaccaggacaggcacggggatacagcgcttcacgcagcggccagacagggccctgacgcctacaccgacttctttctccccctgctgagccgctgcccttctgccatgggcattaagaataaggatggtgagacccccggacagattctaggttgggggccaccgtgggattccgctgaggaggaggaagaggacgacgcctcaaaagaacgcgagtggaggcaaaagctccaaggggacgccagtcacgaaacccaggagcctgagtcctttagcgcctggtctgacagactcgctagagagcacgctcaaaaatgccagcagcagcagagagaagccgaggggtcatgtcgcccccctcgcgccgaagggtcttcccagtcctggagacagcaggaagaggagcagagactttttcgagaacgagccagagccaaggaggaggaactccgggagtctagagcccggagggctcaggaagctcttggggatcgtgaacccaagcccacccgcgcgggcccgagagaggaacatccacgtggtgccggccggggaagcctttggcgctttggagacgttccgtggccctgtccgggcgggggggaccccgaagccatggctgccgcgttggtggctaggggaccacccttagaagagcagggggccctaaggcgctacttgcgggtccagcaagttcggtggcaccccgatcgatttctgcaacgctttcgatcacagatagaaacgtgggagctgggtcgggttatgggcgccgtgaccgccctatcacaggcactgaacagacacgccgaggctttaaaatag

SEQ ID NO: 197614 - DNA, 1077 bp, synthetic construct
  misc_feature 1..1077: note = Description of Artificial Sequence: Synthetic coding sequence
  source 1..1077: mol_type = other DNA
atggccagcaccagccggcggcagcggcgggagcggcggttccggaggtacttgtccgccggtcgtctggtgcgggctcaggctctcctgcagcggcatcctggcctcgatgtcgatgcgggccagcccccccccctgcacagagcgtgcgctcgtcacgacgcgcctgcactgtgtcttctgctgcgactgggcgctgaccccgcccaccaggatcgccacggggatactgcacttcacgctgcggcccgccagggacctgacgcctataccgacttcttcctcccgttgctgtcacggtgtccatccgctatggggattaagaacaaagatggagaaacgcccggtcagattcttggttggggccccccatgggattctgcggaggaggaagaagaggatgacgcatccaaggagcgtgagtggcgccaaaaactccagggcgagcttgaggacgaatggcaggaggtaatgggacgctttgagggtgacgccagtcatgagacacaggaaccagagtcattctcagcgtggtctgaccgcctggcacgggaacatgctcagaagtgtcagcagcagcagcgggaggctgaagggtcttgccggcccccccgtgcagaaggcagttctcagagttggcgccaacaggaggaagaacagcgcctgtttcgggagagagcacgggctaaggaagaggaactcagggagtcccgcgctcgacgcgcgcaagaggctctgggtgaccgggagcctaagccaactcgggcgggtccgagggaggagcatccaaggggtgctggacggggcagtctgtggcgctttggggacgtcccatggccatgtccaggcggcggcgaccccgaagctatggccgcagccttggttgcccgcggaccacccctggaagaacaaggcgctcttagaaggtacctgcgggtccagcaggtacgctggcatccagaccggttcctccagagattccgctcccagatcgaaacatgggagctggggcgcgtcatgggcgccgtcacagctctgtctcaagccctgaatcgacacgccgaagcccttaaatag

SEQ ID NO: 197615 - DNA, 1146 bp, synthetic construct
  misc_feature 1..1146: note = Description of Artificial Sequence: Synthetic coding sequence
  source 1..1146: mol_type = other DNA
atgagcaaccccagcccccaggtgcccgaggaggaggccagcaccagtgtctgtcggccgaagagttcaatggcctctaccagccgcagacagagacgcgaacgtcgtttccggcgatatctcagcgcgggaagactggtcagggctcaggctctgctgcagagacaccctggcttggacgtggacgctggacagccccccccgctgcaccgggcatgtgccagacatgacgcacccgccctgtgcctgcttctgaggttaggcgccgatccggcccatcaggaccgccatggggacacagcattacacgccgccgctcggcagggccccgatgcctataccgacttctttttacctctgctctcccgctgcccgagtgcgatgggtatcaagaataaagacggagagactcccggccaaatcctcggatggggccctccctgggacagtgcggaggaagaggaggaggatgatgctagtaaagaacgggagtggcggcagaaactgcagggggagctggaagacgaatggcaggaggtgatggggcgctttgaaggcgatgcctcccacgagacccaggagccagagtctttctctgcctggtctgataggctggctcgggagcatgcccagaagtgtcagcagcagcaaagggaggccgagggctcatgtcgaccacctcgggcagaaggttcttcccagtcctggcgtcaacaagaggaggagcaacggctttttcgagagcgcgcccgcgctaaggaggaagaactacgggaaagtagggcccgccgggcgcaggaggctctgggcgaccgggagccaaaacctactcgtgccggcccccgtgaagaacaccctcgcggagccggacgaggatccttatggagattcggtgatgtgccgtggccctgccctgggggaggggatcctgaggctatggccgcggcactcgttgctagaggcccaccacttgaggaacaaggggcccttaggcgctatctgagggtacaacaggtcaggtggcacccagatcgtttcctgcagaggttcagaagccagattgaaacctgggagttggggagagtgatgggagcagtgaccgctctgtctcaggctttaaatcgacacgccgaggcacttaaatag

SEQ ID NO: 197616 - DNA, 1101 bp, synthetic construct
  misc_feature 1..1101: note = Description of Artificial Sequence: Synthetic coding sequence
  source 1..1101: mol_type = other DNA
atgagcaaccccagcccccaggtgcccgaggaggaggccagcacctctgtgtgccgtccaaagagttctatggcttcaacatctcgcagacagcgtagagaacgccgattccgacgatatttatcggcaggtcgcctggtgcgcgcccaggccctgttacagagacaccccggactcgacgttgacgcaggccagcctcctccactgcatagggcctgtgcgaggcacgacgcgcctgcgctctgtttactgttacgactcggggcagacccagctcatcaggatcggcacggtgacactgccctgcatgcagcagcaaggcagggtcccgacgcctatacggacttcttcctacctctcctgagtcgatgcccttctgctatgggaatcaagaacaaggatggggaaacaccgggccagattctaggatggggacctccctgggactcagccgaggaggaggaagaggacgatgctagtaaggaaagggaatggagacaaaagctgcagggcgatgctagccacgagacccaggaaccggaatcctttagtgcctggtcggataggctcgccagagaacacgcgcaaaagtgtcagcagcagcaacgggaggctgagggaagctgccggccacctcgggccgagggcagttcacaaagctggagacagcaggaggaggaacagaggctgttccgcgaaagagcacgcgctaaggaggaagaactaagggagtcccgagcccgccgagcacaggaagctcttggggaccgggaacctaagcctacccgggccggccctcgcgaggagcaccctcgcggtgcaggaagaggctccctgtggcggtttggagatgtaccctggccatgtcccggaggtggagatccagaagcaatggctgcagctctggtagcccgcggtccacccctcgaagaacagggcgcactgcgccgatatttgagagtgcagcaggtacggtggcacccagatcgctttctgcagcgtttccgatctcagatcgaaacatgggaattagggcgcgtcatgggcgcggtgacagcactgagtcaggcattgaaccgacacgccgaggcgctcaagtag

SEQ ID NO: 197617 - DNA, 1146 bp, synthetic construct
  misc_feature 1..1146: note = Description of Artificial Sequence: Synthetic coding sequence
  source 1..1146: mol_type = other DNA
atgagcaaccccagcccccaggtgcccgaggaggaggccagcacctcagtctgcaggcccaagtccagtatggcctccacgtctagaagacagcggcgggagagaagattccggaggtacttgtctgcaggcagattagttcgggcccaggcattgctgcagcgacatcccggcctggatgtcgacgccggtcaaccaccacctctacacagagcttgcgcacgccacgacgctcctgccctatgcctattgctgcgcctgggcgctgaccccgcccatcaagatcgccatggcgataccgctctccacgccgctgccagacagggacccgacgcttacacagattttttcctcccattgctgagcagatgtccgtcagccatgggtattaaaaataaggatggtgagacacccggccaaatactgggctgggggccaccttgggactcagcagaggaagaagaggaagatgacgcctctaaggaacgggagtggcgccaaaaactgcagggcgagttagaagatgagtggcaggaagtgatggggaggtttgaaggtgatgcatctcatgaaacccaggaacccgaatcattctccgcttggagtgatagattagcccgggagcatgcccaaaaatgtcaacagcagcagcgtgaagctgagggttcctgtaggcctccccgggctgagggctcttcccaatcatggcggcagcaagaggaagagcagcggttgtttcgcgagcgggctcgggcaaaggaggaggaactgagggagagcagggcccggcgcgctcaggaagctctgggcgatcgcgagcccaaacccacacgagctgggcccagggaggagcaccctagaggcgcaggacgtggatcattatggagattcggagacgtcccatggccctgtcctggcggtggcgacccggaggcaatggccgcggccctggtggccagaggaccccctctggaagagcaaggagcacttaggcgctacctccgggttcaacaggtccggtggcacccagatcgtttccttcaaaggttccggtcgcagatcgagacttgggagctcggcagagtcatgggggctgtaaccgctctcagccaggctctgaaccgacatgcggaggctttaaagtag

SEQ ID NO: 197618 - DNA, 1101 bp, synthetic construct
  misc_feature 1..1101: note = Description of Artificial Sequence: Synthetic coding sequence
  source 1..1101: mol_type = other DNA
atgagcaaccccagcccccaggtgcccgaggaggaggccagcacctcggtgtgtcgaccaaagagcagtatggccagtacctctcgtcgccagaggcgagagcgcaggtttcgcaggtatctgtctgccggccgccttgtcagggcccaagccttgctgcaacggcatcctggcctagatgtggacgctggccagcctcctccgttgcacagagcatgtgccaggcacgacgcaccagccttatgtctgttactgcgcttgggcgcggatcctgcacaccaggaccggcacggagacaccgcattgcacgccgccgcccggcagggtccagatgcttatacagattttttcctgccattgttgtcacgttgtccgtctgcaatgggcattaagaataaagacggggagacaccggggcaaatccttggctggggcccaccctgggacagcgcagaagaggaggaggaagacgacgcgtctaaggaacgcgagtggcggcagaagttacagggggatgcttcacacgaaacacaagagccagaaagtttttcggcatggagcgaccgacttgctcgagaacatgcacaaaagtgccagcagcagcagcgcgaagctgagggatcttgcaggcctccccgcgcagaagggagcagccagagctggcggcaacaggaagaagagcagagactttttagagagagggcccgtgctaaagaggaagagctgcgggaatctcgggccaggcgggcacaggaggcacttggagacagggaaccaaaaccaacccgggccggcccacgggaagagcatccacggggtgccggcaggggcagcctgtggagatttggtgacgtgccttggccctgtcccggcggaggggacccagaggccatggcagctgccttggtggccaggggacccccactcgaggagcagggtgccctgagacggtatctaagagtgcaacaagtacgatggcaccccgatcggtttttacaacgcttccgctctcagatagagacttgggaactgggtcgggtgatgggggctgtgactgccctgtcacaggccctgaataggcatgctgaagcactcaagtag

SEQ ID NO: 197619 - DNA, 1101 bp, synthetic construct
  misc_feature 1..1101: note = Description of Artificial Sequence: Synthetic coding sequence
  source 1..1101: mol_type = other DNA
atgagcaaccccagcccccaggtgcccgaggaggaggccagcacctctgtgtgtcggccgaagagcagcatggcgtccaccagcagacggcaacgccgggagcgccgattccgacggtatttaagcgctggaagactggtgagggcccaggccctcctgcagcgccacccagggctggatgtggacgctggtcaaccgcctcctcttcatagggcatgtgccagacatgacgcccctgcactctgtcttctcctgcggctgggcgcagaccccgcccatcaggatcggcatggcgataccgcactgcacgccgcagctagacagggccctgatgcctataccgacttcttcctcccacttctctcgagatgtccctcagcaatggggatcaaaaacaaagatggcgagacacctggccagatcttagggtgggggcctccctgggactcggccgaagaggaggaagaagatgatgcgtcaaaagaaagagagtggagacagaagttacagggagatgcgagtcacgagacccaggagcccgaatcgttttcggcctggtcagacagactggccagggagcatgcgcaaaagtgtcagcagcaacagcgggaagccgaaggctcgtgtaggcctccaagggctgagggatcatctcagtcttggagacagcaggaggaagaacagagactatttcgggagagggcaagggccaaggaggaggaattaagagagagtcgtgccagacgcgcacaggaagcactcggggacagggagcccaaaccaactcgggcaggaccgagagaagagcacccgcgcggcgcaggacgtgggagtctgtggagattcggcgacgtgccctggccctgccctggtggaggcgaccctgaggcaatggccgccgctctagtagcacgcggtccgccactggaggaacagggtgcacttcgcaggtatcttcgagtgcagcaggtccggtggcaccctgacagattcctccaacgttttaggagccagatcgagacttgggagctgggtcgtgtgatgggggccgtgaccgcattgagccaggctctgaataggcatgcagaggctctcaagtag

SEQ ID NO: 197620 - DNA, 1146 bp, synthetic construct
  misc_feature 1..1146: note = Description of Artificial Sequence: Synthetic coding sequence
  source 1..1146: mol_type = other DNA
atgagcaaccccagcccccaggtgcccgaggaggaggccagcaccagtgtgtgtcggcccaagagctccatggcaagcaccagccggcgtcaacgtagagagaggcgtttcaggcgatatctttccgctgggaggcttgtaagagcccaggctttactgcagaggcacccaggcttagatgttgacgccggacagccccctcctctgcaccgggcctgtgcacgccacgacgcgcctgcactgtgcctcctgttgcgtctcggcgccgacccagcccaccaggatcggcatggcgacacagctctccatgccgctgcccggcagggcccagacgcatacacagatttctttcttccgctgctttctcgctgcccttccgcaatgggcataaagaacaaggacggcgaaaccccaggtcaaatcttgggctggggtcctccttgggacagcgccgaggaagaagaagaagacgatgcatctaaggagcgcgagtggcggcagaagctgcagggcgagctggaagacgagtggcaggaagttatgggcagattcgaaggtgacgcatcccatgagactcaggaaccggagagcttcagcgcctggtccgatcgcctagctagggagcacgcacagaagtgtcagcagcaacagcgagaagccgagggctcctgtcggcctccgagagcagaagggtctagccagtcctggaggcagcaagaagaggaacaacgcctgtttcgggaaagagctcgggctaaggaggaagagctcagggagtcccgggcacggagggcccaggaagcattaggcgaccgcgaacccaaacctacccgggccggccctagagaagagcaccctaggggggcaggcagaggtagcctatggagatttggagatgtcccttggccctgtccaggtggtggcgatccggaagctatggcagctgcacttgttgctcgtggccccccattggaggaacagggcgctctgcgacgttacttaagggtgcagcaggtccggtggcacccagatcgttttctgcagcgcttccgctcacagatcgaaacctgggagcttggcagagtgatgggcgcagtcaccgccctatctcaggcccttaaccggcacgcggaagcgttaaagtag

SEQ ID NO: 197621 - DNA, 1077 bp, synthetic construct
  misc_feature 1..1077: note = Description of Artificial Sequence: Synthetic coding sequence
  source 1..1077: mol_type = other DNA
atggccagcaccagccggcggcagcggcgggagcggcggttccggagatatcttagcgcaggacgcctggtacgtgcccaggcattactccaaaggcatcccggcctggatgtggacgccggccagccaccccccctccaccgggcctgtgcccgccacgacgcccctgccttgtgcctgctactaaggctcggggcagatccagcccaccaggatcggcatggggatacggccctgcatgctgcagcccgacagggccccgacgcttataccgacttttttctgccactcctttcacggtgtccctctgccatgggcattaagaataaggacggagaaactcccgggcagattctgggctggggaccaccatgggactcagccgaggaggaagaggaggacgatgcttctaaggaacgtgagtggaggcagaaactgcaaggcgaattggaggacgaatggcaagaggtcatgggcagattcgagggggatgcctcacacgagacacaggagcctgaaagcttcagcgcctggtcagaccgactggcccgagaacatgcacagaaatgccaacagcaacaacgcgaagccgaagggagctgccgtccaccgcgggctgagggcagttcgcagtcatggcggcagcaggaggaagagcaaagactgttcagggaaagggcccgtgcgaaggaagaggagctgagggaatccagggctaggcgggcccaggaggcactgggggatcgcgagcctaagccgaccagggccggtccacgagaggaacacccaagaggagctgggagaggatccctctggcggttcggagatgtgccatggccatgtccaggagggggggatccggaagcaatggccgccgcactggtagcgcgagggcccccactagaggagcagggagccctcaggagatatctgagagttcaacaggtgagatggcaccctgacaggttcctgcagagattccgcagtcagattgagacctgggagttagggcgggtgatgggagccgtaacagctttgtctcaggcacttaatcgccacgccgaagcactgaagtag

SEQ ID NO: 197622 - DNA, 1101 bp, synthetic construct
  misc_feature 1..1101: note = Description of Artificial Sequence: Synthetic coding sequence
  source 1..1101: mol_type = other DNA
atgagcaaccccagcccccaggtgcccgaggaggaggccagcacctccgtgtgcaggccgaagagctccatggccagcacctcgcgtcgccagcgccgggaacggagattcaggcgatacctgagtgctggacggcttgtcagagcgcaagcgttattgcagaggcacccgggcctggacgtagatgccggacagcctcccccactacaccgcgcctgtgcacggcacgacgccccagccttatgtcttcttctgagattgggggccgatcctgctcaccaggatcggcatggggacacggccctccacgcagccgccaggcaaggcccagacgcctacacagatttctttctgcccctactgtctaggtgcccaagcgctatgggtatcaagaacaaagatggcgagacacccggtcagatcctggggtgggggccaccttgggactcggctgaagaggaagaggaggacgatgcctccaaagagcgggaatggagacagaagttgcagggcgatgcttcacatgagactcaggaaccagaaagcttttccgcgtggtcagaccgactcgctagagaacatgcgcagaagtgtcagcagcagcaaagagaggccgagggttcttgtagaccaccacgggctgaaggcagcagccagtcctggaggcagcaggaagaggagcaacgactcttccgtgaaagagccagagccaaagaggaagagctgcgggagtcccgcgcacggagagcacaagaggcactcggagaccgcgagccaaagcctacacgcgcgggcccccgggaggaacacccacggggagctggtcgcgggtccctatggagatttggtgatgtgccatggccatgccctggcgggggcgaccctgaggccatggctgccgctttagtcgccagaggcccccctctcgaagaacaaggagcactccggcgatatttgagggtgcagcaagttcgctggcacccggatcgttttttgcagcggttcaggagtcaaattgagacatgggagctgggccgggttatgggggcagtgacagcgctgtcacaagcgctgaataggcatgctgaggccctgaaatag

SEQ ID NO: 197623 - DNA, 1077 bp, synthetic construct
  misc_feature 1..1077: note = Description of Artificial Sequence: Synthetic coding sequence
  source 1..1077: mol_type = other DNA
atggccagcaccagccggcggcagcggcgggagcggcggttccggcgatacctctccgctgggcggctggtgcgcgctcaggcactgctgcaacggcacccaggactggacgtggacgccggacagcccccacctcttcatagagcatgcgcaagacatgatgcccctgctttgtgcctgctgctgcgcctcggagccgaccccgcccaccaggatcggcatggggacaccgctctccacgcggccgcacgtcagggtcccgatgcatacactgatttttttttacctctacttagtaggtgcccgtccgccatgggaattaaaaacaaggacggagagactcctggtcagattcttgggtgggggcccccctgggatagtgctgaagaggaggaggaggatgacgcttccaaggagagagagtggcgtcagaagctgcaaggtgagttggaggatgaatggcaggaggtgatgggtagattcgaaggcgatgcgtctcatgagactcaagagccagagtctttttccgcctggtccgatagattggcccgggaacacgcacagaagtgccagcaacaacagcgcgaagctgaggggtcctgccgccctcccagggccgagggctcctcgcagtcctggcgccagcaggaggaggaacagcggctgtttagggagagagcacgggctaaggaggaagagctccgagagagcagagcaagaagagcccaggaggccctcggcgatcgtgagcccaaaccaacccgggccggccctagagaggagcatcctagaggcgccggccggggctctttatggaggtttggtgatgtaccctggccatgcccaggtggcggagacccagaggctatggccgccgcccttgtcgcaagggggccacccctcgaagaacagggcgcactgaggcggtatttacgagtgcaacaggttcgctggcatcccgaccggttcctgcaacgctttcgctcacagatcgagacctgggagctggggagggtgatgggcgcggtgaccgctcttagtcaggcactgaatcggcacgccgaggcacttaaatag

SEQ ID NO: 197624 - DNA, 1146 bp, synthetic construct
  misc_feature 1..1146: note = Description of Artificial Sequence: Synthetic coding sequence
  source 1..1146: mol_type = other DNA
atgagcaaccccagcccccaggtgcccgaggaggaggccagcaccagtgtgtgccgacccaagagctctatggcctccaccagtcgcagacaaagaagggagcggcgctttcgtcggtatctttcagccggaagactggttcgggctcaggcactgttgcagcgtcacccgggcctggatgtcgacgccgggcagcctcctcctcttcacagggcctgcgcaagacacgatgcccctgccctctgcttgctgctgagattgggcgcagatcctgcccaccaagatcgccatggcgatactgccctgcatgccgccgccagacagggccccgacgcctatactgattttttcctgccgttgctgtctcgttgcccttccgccatgggtattaagaataaggatggagaaaccccggggcaaatcctgggctggggcccaccctgggattctgccgaggaggaagaagaggatgacgcgtctaaagagagagagtggcgccagaaactccagggggagctcgaggatgagtggcaggaggtcatggggcgtttcgagggcgatgcttctcatgaaacccaagagcccgagagctttagtgcctggagcgatagacttgcgcgggagcacgctcagaagtgccagcagcagcaacgagaggccgagggttcatgcaggccaccccgagctgaagggtccagtcagagctggcggcagcaggaagaagagcagcggctatttagagagcgcgcgcgggctaaagaagaagaactgcgcgagagtagagcgcgcagagcccaggaagcactgggcgaccgggagcctaagcccacaagggcaggtccgagggaggaacacccacgaggggcaggaagaggaagcctttggcgctttggagatgtcccatggccgtgtcctggtggaggggaccccgaagcaatggccgcggccttggtggcccgtggacctccgctcgaagagcagggagctctgcggcgatatttaagagtacagcaggtgcggtggcatcctgaccgcttcctgcagcgattccgtagccagatcgagacttgggagctgggaagagtgatgggtgctgtcactgccctgagccaggctctcaacagacatgctgaggcactgaagtag

SEQ ID NO: 197625 - DNA, 1077 bp, synthetic construct
  misc_feature 1..1077: note = Description of Artificial Sequence: Synthetic coding sequence
  source 1..1077: mol_type = other DNA
atggccagcaccagccggcggcagcggcgggagcggcggttccggcgatacctttctgctggtcgcctcgtgagggctcaggcgctgctccagcgtcatccaggtctggacgtcgatgccgggcagcctccccctctgcacagggcctgtgcccgccatgacgcaccagccctgtgcctgctgctgagactcggcgccgatccagctcatcaagacagacacggcgatacagctctgcatgcagcagcccgacaaggcccagacgcctacacagacttctttctccctttgcttagtaggtgcccctctgcgatgggcatcaaaaataaggatggcgaaacaccaggtcagatattaggttgggggcctccgtgggattcagcagaggaggaagaagaggatgacgcatccaaggagagagaatggcgccagaagctgcagggagaactcgaggatgaatggcaggaagtgatgggcagattcgagggggacgcctcacacgagacccaagaacctgaatctttcagcgcatggagtgacaggctggcccgcgaacacgcacagaagtgccagcagcagcagcgcgaggcagaaggaagttgccggcctcccagggcggagggttccagccagtcttggcgccagcaggaagaggagcagagattgttccgggaacgggcccgggcaaaagaagaggaactccgggaaagcagggcccgtagagctcaagaagcccttggtgatcgcgaacctaaaccaacccgcgctggcccccgggaggaacacccacgaggtgctgggagaggatcattatggcggtttggcgacgtcccatggccctgccccggagggggcgatcccgaagcaatggctgcggcgttggtcgcacgaggccctccattggaagagcagggcgccctccggcgctacttacgggttcagcaggtgcgatggcacccagataggttcttgcaaagatttcgatctcagatcgaaacatgggaactgggtcgagtgatgggggcagtgaccgctctatcgcaagccctgaacaggcacgctgaagccctgaagtag

SEQ ID NO: 197626 - DNA, 1146 bp, synthetic construct
  misc_feature 1..1146: note = Description of Artificial Sequence: Synthetic coding sequence
  source 1..1146: mol_type = other DNA
atgagcaaccccagcccccaggtgcccgaggaggaggccagcacctctgtctgtcggcccaaatcctccatggcatccacctcccggcgtcagcggcgtgaaaggagattccgacggtacctgtctgccggtcggcttgtgcgggctcaagcattactccagcgacaccctggactcgacgtagacgccggccagccccctcctctgcaccgagcctgcgctagacatgatgcgccagctttatgtctgctcctgcgtctgggagctgatcctgctcaccaggataggcacggtgacacggccctccatgcggccgcaaggcaaggacccgacgcgtatactgatttcttcctgccattgctgtcacgatgtccaagcgccatgggcataaaaaataaggatggagagactccgggacagattctgggttggggccccccttgggacagcgctgaggaggaagaggaagacgatgcctccaaggagcgggagtggcgacaaaagctccagggtgagctggaggatgaatggcaggaggtgatggggagattcgaaggtgatgcaagccacgagactcaggaacccgagagcttttcagcgtggtcagataggcttgctcgcgagcacgcccagaagtgccagcaacagcaacgtgaggccgaaggtagttgccggcccccgagagccgagggcagctctcaatcatggagacagcaagaggaagagcagcgtttatttcgcgaacgggcacgagctaaagaagaagagctcagggaaagcagggcaagacgagcacaggaagccctaggtgatagggaaccgaagcctacacgtgcaggaccgagggaggagcacccgaggggggcgggacgcggctccctctggcggttcggcgatgtgccatggccttgtccaggtggaggggatcccgaagcaatggctgcggctctggtggcgcgaggccctcctctggaagagcaaggcgcactgagacggtacctgcgagtacagcaggtgcgatggcaccccgatcggtttctgcagagattccggagtcaaatcgaaacatgggagctgggaagggtgatgggggccgtgacagccctgagccaggctcttaatagacacgccgaggcgctaaaatag

SEQ ID NO: 197627 - DNA, 1101 bp, synthetic construct
  misc_feature 1..1101: note = Description of Artificial Sequence: Synthetic coding sequence
  source 1..1101: mol_type = other DNA
atgagcaaccccagcccccaggtgcccgaggaggaggccagcaccagtgtgtgcagacccaaaagctcgatggcctcaacatctcggcgacagaggcgggagagacgattccgccgatatttgtctgccgggcggttggtgagggcccaagccctattgcaacgacaccctggactggatgtcgatgcaggacagcctccgccgctgcatagggcctgcgccagacatgatgcaccagccctctgtctgctgctccgcttgggcgccgatcctgcccatcaggatcggcatggagatacagccctccacgctgctgcacgccaaggtccggacgcttacactgatttctttctgccattactgagccgatgcccatcagccatggggatcaaaaataaggacggagaaactccgggtcagatactgggctggggcccaccctgggattccgcagaggaggaagaagaggacgacgcttcaaaggaacgcgagtggaggcagaagctgcaaggcgacgcttcccatgaaactcaggaacccgaaagtttctctgcctggagcgatcggttggctagagagcacgcccagaagtgccagcagcagcagagggaggccgagggcagctgtcgcccacctagggctgagggatccagccagtcctggagacagcaagaggaggagcaaagactcttcagagagcgggctcgagccaaggaggaagagttacgggagtcccgcgcccgaagggcgcaagaggcccttggagacagggaacccaagcccactcgagccggcccccgcgaggaacatccacggggcgcaggacgggggtctctttggcgctttggcgatgtgccctggccctgtccaggtgggggagacccagaggccatggccgcagctctggttgcaagaggccctcctctggaagagcagggggcgctcagacgctatctccgtgttcagcaagtccggtggcaccccgatagatttcttcagagatttagatctcagatagagacttgggaattgggtagggtgatgggtgccgtgaccgccctgagccaggccctgaacagacacgcggaagccttgaaatag

SEQ ID NO: 197628 - DNA, 1077 bp, synthetic construct
  misc_feature 1..1077: note = Description of Artificial Sequence: Synthetic coding sequence
  source 1..1077: mol_type = other DNA
atggccagcaccagccggcggcagcggcgggagcggcggttccggagatatctctccgcaggtcgcctagttcgcgcccaggcactccttcagaggcatcctggtctggacgtggatgccggtcagcctccacccctgcatcgggcatgcgccaggcacgacgcaccagcactgtgcttattattgagactcggtgcagatccagcacaccaggataggcacggtgataccgccttgcacgcagccgcccgacagggacccgatgcttacaccgatttcttcttacctttgctgtcccgctgcccaagtgcgatgggtattaagaataaagacggggaaactcccggtcaaatcctaggttggggccctccatgggatagcgccgaagaagaggaggaggatgacgccagtaaagaaagggagtggaggcagaaacttcaaggtgagttggaggatgagtggcaggaagtgatgggtagatttgagggggatgctagccacgagacacaggaacctgagtctttctctgcctggagcgatcgtctagctagggagcatgcccagaagtgtcagcagcagcaacgcgaagctgagggctcctgccgcccgccccgagcagaagggagctcccagagttggcggcagcaggaagaggagcagcggctcttccgcgaacgtgctcgtgccaaggaggaggagcttcgcgagtctagggccagaagagcacaagaggcacttggagatagggagcccaagccaactagggctgggccccgtgaggagcatccacgcggcgccggacgcggctcactgtggaggtttggcgacgttccttggccctgcccgggcgggggagatcctgaggccatggccgcagctctcgtggcccgcgggcccccactggaagaacagggcgccctgcgacgatacctgagagtccagcaggtgagatggcaccccgatcggtttttacaacgctttagatctcaaattgagacctgggagctgggccgggtcatgggagcagttactgctctatcccaggcacttaaccggcacgccgaagccctcaagtag

SEQ ID NO: 197629 - DNA, 1146 bp, synthetic construct
  misc_feature 1..1146: note = Description of Artificial Sequence: Synthetic coding sequence
  source 1..1146: mol_type = other DNA
atgagcaaccccagcccccaggtgcccgaggaggaggccagcacctccgtatgccggccgaagtcaagcatggcatcgacgtcacggcggcagcggcgcgaaaggagatttagacgatatctgtctgcaggccgtctcgtcagagcgcaggctctgctgcaacgccacccggggttggacgtggacgctggccagccacctcccctccacagagcctgcgccagacatgacgcccccgccctgtgtcttcttctccgtctcggtgccgacccagctcaccaggatcgtcacggggacacggcactgcacgctgccgcccggcaaggtccagacgcctacaccgacttctttcttccactgctgagccgttgcccatcagcaatgggaattaagaataaagacggcgagacacccgggcagatcctggggtggggacctccgtgggatagtgcagaggaggaggaggaagatgatgctagtaaagaacgggagtggcggcagaaactgcagggcgaactggaagatgaatggcaagaggttatgggaagattcgaaggagatgcttcccacgaaactcaggaacctgagtctttctctgcttggagtgacaggctggcccgagaacacgcacaaaaatgccagcaacaacagagagaagcagaaggaagttgtagaccccctcgtgccgaaggcagtagtcaatcctggcgccagcaggaagaggagcaaaggttgtttagggagcgggctcgggcaaaggaggaagaactcagggaatcgcgcgcccgtcgcgctcaggaggccctcggggatcgcgagcctaaaccaactcgcgcgggacctcgcgaagaacatcctcggggcgcaggaagaggatcactctggagattcggggacgtcccgtggccatgtcctgggggtggagatcctgaagctatggctgctgcgctcgtagcccgcggaccacccctagaagagcaaggtgccctccgcagataccttagggtccagcaggtccgctggcatccagacaggttcttgcagagatttcgctctcagatcgaaacatgggagcttggtagagtcatgggagcagttacggccctcagccaggccttgaaccggcacgccgaggccctcaagtag

SEQ ID NO: 197630 - DNA, 1077 bp, synthetic construct
  misc_feature 1..1077: note = Description of Artificial Sequence: Synthetic coding sequence
  source 1..1077: mol_type = other DNA
atggccagcaccagccggcggcagcggcgggagcggcggttccggcgatatctgtcagcaggcaggctggtgagagcccaggctttgttgcagcggcatcccggacttgatgtagatgccgggcagccaccccccttgcacagagcctgcgcccgccatgacgcacccgcgctgtgcttgcttctgcgtctgggagctgacccggcacatcaggataggcacggagataccgcactccatgcagctgcacggcagggccccgatgcatacaccgacttctttctccctcttctgagtagatgtccgtccgccatgggcattaaaaataaggatggcgagacaccgggccaaattctcggctgggggccaccttgggactctgcagaggaagaggaagaagatgacgcaagtaaagagagagaatggaggcagaagcttcagggtgagctggaggacgagtggcaagaggtcatgggccgattcgaaggcgacgcatcacacgagacccaggaacctgagagttttagtgcttggtctgatcgactcgcaagggagcatgctcagaagtgccagcaacagcaacgtgaggccgaaggaagctgtagaccaccacgggccgaagggtctagccagagctggaggcagcaggaggaagagcagcgcttgttcagggaaagggcccgtgccaaagaggaggagcttcgggagagccgcgcccgacgcgcacaggaggcgctgggcgatcgagagcccaagcccacgcgtgcaggaccccgggaggagcatccccggggggctggccgtggatccctgtggaggttcggcgatgttccatggccttgtcccgggggaggggacccagaagcaatggccgccgccctcgtcgcaaggggcccaccccttgaggagcagggcgcccttcgcaggtatctgcgtgtgcagcaagtgagatggcaccccgacagatttctacagcgcttcaggagccaaatagagacatgggagctcggtcgtgtcatgggggccgtcacagccctgagtcaggctctgaataggcatgctgaggctctgaaatag

SEQ ID NO: 197631 - DNA, 699 bp, synthetic construct
  misc_feature 1..699: note = Description of Artificial Sequence: Synthetic coding sequence
  source 1..699: mol_type = other DNA
atggccagcaccagccggcggcagcggcgggagcggcggttccggagatacctgtccgctggcagacttgttagggcacaggcattgctgcagaggcaccctggactggatgtcgatgcgggccagccacctcccttacacagagcgtgcgccagacacgacgcccctgctctgtgtctgttgttgcggctcggtgccgatccagctcaccaagatcgtcatggtgacaccgctctgcatgctgccgcaaggcaggggcccgatgcctacactgacttcttcctccccttactctcccgctgcccttcggccatggggattaagaacaaagatggtgaaacacccggtcagatcctcgggtggggacccccttgggatagcgccgaggaggaggaggaagacgacgcgtccaaggagagggagtggcgccagaagctccaaggcgaacttgaagacgagtggcaggaagttatggggcgtttcgagggtgatgcatctcatgaaacccaggagccggagagcttctctgcgtggagtgaccgactcgctcgtgaacacgctcaaaagtgtcagcagcagcagcgcgaagctgaaggctctaggagaccaccccgggccgagggcagcagccagtcttggcggcagcaggaggaggagcagagactgtttagggaacgcgccagagcaaaggaggaatag

SEQ ID NO: 197632 - DNA, 699 bp, synthetic construct
  misc_feature 1..699: note = Description of Artificial Sequence: Synthetic coding sequence
  source 1..699: mol_type = other DNA
atggccagcaccagccggcggcagcggcgggagcggcggttccggcgctacctgagcgccgggagattggtgagggctcaagccctgttgcaacggcaccccggtttggacgtagacgccggccagccgcccccacttcatagagcttgcgcacgccacgatgcaccagccctgtgcctcctccttcgcttaggcgccgaccctgcccaccaggaccgacacggcgatacagcactacatgcggctgctagacagggacctgacgcttatactgacttctttttgcctctgctgtcccggtgcccgtccgctatgggtatcaagaataaggacggagagaccccagggcagatcctcggctggggccctccatgggactcagctgaggaggaggaagaagacgacgcaagtaaggaaagggagtggcggcagaaacttcagggagaactcgaagacgagtggcaggaagtaatgggtagattcgagggggatgccagtcatgagacacaggagccagagtccttctccgcatggtccgacaggttggcaagggagcatgctcagaagtgtcagcagcagcagagagaggcagaaggctcttgtagacccccccgggccgaaggttcttcacagagttggcgccagcaggaagaggagcaaagactctttagggaaagggcccgggcgaaagaagagtag

SEQ ID NO: 197633 - DNA, 699 bp, synthetic construct
  misc_feature 1..699: note = Description of Artificial Sequence: Synthetic coding sequence
  source 1..699: mol_type = other DNA
atggccagcaccagccggcggcagcggcgggagcggcggttccggcggtatctctccgccggtagacttgtgcgcgctcaggcgttgctgcagagacatccggggctagatgtcgacgccggtcagccacctccactacatcgtgcatgtgcgagacacgacgctccagctctgtgtctgctgctcagactgggggccgatcctgcccatcaggacagacacggcgacactgctcttcacgccgccgctcggcaaggaccagatgcatacacggactttttcctgcctctcctgtctcgctgcccatcagccatgggcatcaagaacaaggacggggaaacacctggtcagatcctgggttgggggcctccatgggactcggccgaggaggaggaagaggacgacgcatctaaggagcgcgaatggaggcagaagctgcagggggagcttgaagacgaatggcaggaagtaatggggcgctttgagggagacgccagccatgagacccaggaaccagagtctttctctgcgtggagtgatcggcttgcaagagagcacgcccagaagtgtcaacaacagcaacgcgaggcagaaggttcatgtagaccccctcgggccgagggctccagtcaatcgtggcggcagcaggaggaggagcagcgtttatttagagaacgtgctcgggcgaaggaggagtag

SEQ ID NO: 197634 - DNA, 699 bp, synthetic construct
  misc_feature 1..699: note = Description of Artificial Sequence: Synthetic coding sequence
  source 1..699: mol_type = other DNA
atggccagcaccagccggcggcagcggcgggagcggcggttccggcggtatctctctgcgggtagactggttcgggcccaggctctcctccagagacaccctggcttggacgtggacgctggacagcctcccccactgcatcgtgcgtgtgcacgacacgatgcccccgctttatgtctgctcttgagactaggtgcagacccagcccaccaagataggcacggggacaccgctctgcacgcagccgcccggcagggcccagatgcctatacagattttttcctacccctgctttcacgctgcccatccgctatgggcatcaaaaataaagacggggaaacccccggccagattctgggctgggggcctccttgggacagcgcagaagaggaggaggaagacgacgccagcaaagagcgagagtggcggcagaaattgcaaggcgagctggaagatgagtggcaggaagtgatggggaggtttgagggagacgcctcgcatgagactcaagagcccgaatctttctctgcctggagtgacagactggcccgggagcacgcacagaaatgtcaacagcagcagagggaggccgagggatcgtgtcgtccacccagagccgaaggctcatcccaatcttggcggcagcaggaggaggagcagcgactgtttcgcgagagagctcgggccaaagaggaatag

SEQ ID NO: 197635 - DNA, 699 bp, synthetic construct
  misc_feature 1..699: note = Description of Artificial Sequence: Synthetic coding sequence
  source 1..699: mol_type = other DNA
atggccagcaccagccggcggcagcggcgggagcggcggttccggagatatctgtctgctggacgcctggtgagggcccaggctttgctgcagcggcaccccggattagacgttgatgccggccaacctcccccgctgcaccgggcttgcgcgagacacgacgcaccagcactgtgcttactcctgcgacttggagctgacccggcgcaccaggaccggcacggggacacagcgctgcatgccgcagcaagacagggccccgacgcctatactgatttttttcttcctctgctgagtcggtgccccagcgccatggggataaagaataaggatggcgaaacacccggtcagattcttggatggggcccaccctgggattccgctgaagaggaagaggaggatgatgctagcaaagagagagagtggagacagaaattgcagggtgaactcgaggatgaatggcaggaagtaatgggtcgctttgaaggcgatgcgagtcatgagacacaggaacccgagtccttctcggcctggtcagataggcttgcaagggaacatgcgcaaaaatgccagcagcaacaaagggaagctgaaggcagctgtcgccctcctcgagccgaggggagtagtcagtcttggagacagcaggaggaagaacagcgcctgtttcgtgagagggcaagggcgaaagaggagtag

SEQ ID NO: 197636 - DNA, 699 bp, synthetic construct
  misc_feature 1..699: note = Description of Artificial Sequence: Synthetic coding sequence
  source 1..699: mol_type = other DNA
atggccagcaccagccggcggcagcggcgggagcggcggttccggcgttatctgtccgcaggccgccttgtgcgcgctcaggccctgctgcagaggcatcccggactggacgttgatgccggccagccacctccactgcaccgggcttgtgctagacacgatgccccagcactctgcttgctgctcaggctgggtgccgacccggctcaccaagaccgacatggtgacaccgccctgcacgcggctgcacgacagggaccagacgcatatacggacttctttcttcccttgttgagcaggtgtcccagcgcaatggggatcaaaaataaggatggggaaacccctggacaaattctaggctggggtcctccttgggactctgctgaagaggaggaggaggacgatgcaagcaaagagagagagtggcgccagaagctgcagggggagctggaagacgagtggcaggaggtgatgggccggttcgagggagacgcttcacacgaaacacaggaacctgaaagttttagcgcctggtctgacaggctggcaagagaacacgcacagaagtgtcaacaacagcagagagaggccgagggtagttgcaggccaccacgcgccgaagggtcttcccaatcatggagacagcaggaagaagagcaaaggctgttcagggaaagggcccgggctaaggaggaatag

SEQ ID NO: 197637 - DNA, 699 bp, synthetic construct
  misc_feature 1..699: note = Description of Artificial Sequence: Synthetic coding sequence
  source 1..699: mol_type = other DNA
atggccagcaccagccggcggcagcggcgggagcggcggttccggaggtatctctccgccggaagactagttcgcgcccaggctcttcttcaaagacatcccggcctcgacgttgatgcagggcagccacccccactgcatcgagcctgcgccaggcacgatgcacccgccctttgtctgttgctcagactgggcgccgaccccgcccaccaggacagacacggcgacactgctctgcacgcggccgcccgtcagggtccagacgcgtacaccgatttctttttaccactcctgtctagatgtcctagcgccatgggcataaagaacaaagacggggaaacacccggacagattctgggttgggggcccccatgggatagcgctgaagaagaggaggaggacgatgcgtctaaggagcgcgaatggagacagaagctccagggggagctggaagacgaatggcaggaggtgatgggtcgcttcgagggggatgccagccacgagacccaagagcccgaaagcttctcggcctggagcgaccgattggccagagagcatgcacagaaatgtcagcagcagcaaagagaagccgagggtagctgtagacctcctcgagccgagggttcgagccagtcctggcggcagcaagaggaggagcagcggctgttcagggaacgcgcaagggccaaggaagaatag

SEQ ID NO: 197638 - DNA, 3900 bp, synthetic construct
  misc_feature 1..3900: note = Description of Artificial Sequence: Synthetic coding sequence
  source 1..3900: mol_type = other DNA
atggacagcctggaccacatgctgaccgaccccctggagctgggcccatgtggagatggccacgggacccgaatcatggaagactgtctcctgggggggacgcgagtgtcgctgccggaagacctgctggaagacccggaaatttttttcgatgtcgtgtccctttcaacctggcaagaagtgctctctgacagccagcgagagcacctgcagcagttcctgcctcaatttcccgaggatagtgccgagcagcaaaacgaattgatcctggcactcttcagtggcgagaacttcagattcggtaatcctctccacattgcacagaagctgtttcgggacggtcactttaaccccgaggtggttaaatatcgccaactctgtttcaagtcccagtataaacgctatctcaactcgcagcaacagtactttcaccggttgcttaagcagattctggccagccgctccgatcttctggaaatggctcggaggagcggcccagccctcccatttagacaaaaaaggccatcgccctcacgaacacccgaggagcgggaatggcgaacacaacaacggtacctgaaagtacttcgggaagtgaaagaagaatgcggagataccgcgttgtcttcggatgaagaggacctgtcgtcctggttgccgagtagtccagcaaggtccccttctcccgcagttccgctgcgcgtcgtgccgacgttatctaccaccgacatgaaaacggcggataaggtggagctgggcgactctgacttgaagataatgctgaaaaaacaccatgagaaaaggaaacatcagccagatcatccagacctgctgactggagacctgacacttaacgacatcatgactagagtgaatgccggacggaaaggctctttggccgctctgtacgatctcgctgtgctcaagaagaaggtcaaagagaaggaggaaaagaaaaagaaaaagatcaaaacaattaagagcgaggccgaagatctggctgagcccttaagttccacagagggcgtcgctcccttgtcgcaggccccttcccctctggccataccggcgattaaggaggagccgcttgaggacctgaagccctgcctgggcataaacgaaatttccagttccttcttctccctgctgctggagatcctccttctggaatcacaggcttcgcttcctatgttagaagaaagggtgcttgattggcaaagtagcccagctagcagtcttaatagctggttcagcgcagcccccaactgggccgagctggtgctgcctgcccttcaatacttagccggcgaatcacgggcagtcccatccagcttcagcccattcgtggagtttaaggagaagacacagcagtggaagctgcttggccagtcccaggacaacgaaaaggaactggccgctctgttccagttatggttggagaccaaggaccaggcattctgtaagcaggagaacgaggattcatccgatgccaccactcctgtgccccgggtccggaccgactacgtcgttcggccctctaccggggaagagaagcgtgtattccaagaacaagagagataccgctactctcaaccccacaaggcattcaccttccgtatgcatggattcgaaagcgtggtcggtccggtgaaaggcgtgttcgacaaggaaacatccctgaacaaggcacgcgaacacagtctcctacgatccgacagacccgcatatgttactatcttgtccctggtccgagatgcagccgcccgcttaccaaacggggaggggaccagggccgagatctgcgagttactgaaggactcccaattccttgcccctgacgtgacaagcactcaggtgaacacagtcgtgagcggtgccttggatcggctccactacgagaaagatccatgtgtgaagtacgacatcggtaggaaactgtggatctatttgcaccgcgacaggtccgaggaagaatttgagcgcatccaccaggcccaagctgctgccgccaaagcccgtaaggccctgcaacagaagcctaaacctccttcaaaggttaagagttcatccaaagaaagctcaatcaaggtcctttcgagtggtccgagtgaacagagtcaaatgtctctgtccgacagttctatgccacccacccccgtaacgcccgtcactcctaccacccctgctttgcctgccatacctattagtccaccaccagtctcagccgtcaacaaatctgggccctctacggtgtcagaacccgccaaatccagttccggcgtcttgttggtcagttcacctaccatgccccacctgggcacgatgctgagtccggccagttcacagaccgctcctagcagccaggccgctgctagagtagtgagtcactccgggtcagcaggactgtcccaggtgcgggtggttgcacagccatcccttccagcagttccacagcaaagtgggggccctgcccagactcttccacagatgcccgccggcccccagatccgggttcctgctacggccactcaaaccaaagtggtaccgcagaccgtcatggccactgttccggtgaaggcacagactaccgctgcaactgtgcagcgaccaggaccaggccaaaccgggctcaccgttacgagcttgccagcaacggcttccccggtgtcaaagcctgccaccagctctcccgggacctcagctccctccgcctcgaccgcagccgttatccaaaatgtaactggtcagaacatcattaaacaggtggctataacgggccaactgggggtaaaacctcagaccgggaactccatccccctgactgctaccaattttagaatccaaggcaaggatgtactccggctgcctccaagttctattaccacggacgctaagggccagacagtgctccggattaccccagacatgatggccactctcgccaaaagccaagtgactacagtcaagcttacgcaggacctgttcggcactggtggaaacacaacaggcaaagggatttcagctactctccacgttacatcaaacccagtgcacgcggctgactcgcccgctaaagcctctagcgcgtcggctcccagtagcactccaactgggacaacggtggtgaaggtcacccctgaccttaagccaaccgaagcctcttccagtgctttcaggctgatgcccgctcttggtgtctctgtagctgatcagaaggggaagagcaccgtggctagcagcgaggcaaaacccgcggcaactattaggattgtccaagggctgggcgtgatgccccctaaagctggtcagaccatcaccgttgccacccatgcaaaacagggggcatccgtcgcgagcggcagcggtaccgtgcacactagtgccgtgagcctaccttctatgaatgccgcagtgtcgaaaacagtggctgtagcctcaggcgccgcgagtacaccaatctcgatttcaacaggggcacctacggtaaggcaggtgcctgtgtccactacagtggtgtctaccagtcaagccggcaaattgccaaccagaatcacggtgccactctccgtgataagccagcctatgaagggaaagagcgtcgtcacagcccccattattaaaggcaacctgggcgccaacctcagcggactaggcaggaacattattctcaccacaatgccagctgggacaaagctcatcgccggcaataaacccgtgagtttccttacagctcaacagttgcagcagctgcagcagcagggtcaggctacccaggtccgaatacagaccgtccctgcctcccacttgcagcagggtacagcctccgggtcctctaaagccgtgtccacggtagtggtcaccaccgcaccatcacccaagcaggcacctgagcaacagtag

SEQ ID NO: 197639 - DNA, 3900 bp, synthetic construct
  misc_feature 1..3900: note = Description of Artificial Sequence: Synthetic coding sequence
  source 1..3900: mol_type = other DNA
atggacagcctggaccacatgctgaccgaccccctggagctgggcccctgtggcgacggtcatggtacccgcattatggaggattgtctgctgggcggcaccagggtgagtttacctgaagatttactggaagacccagagatcttttttgacgtagtgagcctgtctacatggcaggaagtcctgagcgactcacagagagagcatctccagcagttcctgccccagtttcccgaggactctgcagagcagcagaacgaactgatcctcgcattgttctcgggcgagaactttaggttcggcaacccattgcatatagcccagaagctcttcagggacgggcactttaatccggaagtggtgaaataccggcagctgtgttttaaaagccagtataagcgctatttgaattctcagcagcagtacttccaccgtctcctgaagcaaatcctggcttctaggtctgacttgctggaaatggcaaggcgctctggccctgcactgccctttcgccagaagcgccctagtccaagtcgaacccccgaggagagagaatggcggacccaacagcgctacctgaaagttctcagggaggtcaaagaagaatgcggcgacaccgccctatcaagtgatgaagaagatctttcgagctggttgccgagcagccctgcccgcagtccttctccagcagtaccactcagggtcgtaccgaccctatcgacaacagacatgaagaccgccgacaaagtagagttaggcgatagcgatctgaagatcatgctgaagaagcaccatgagaagagaaagcatcagcccgatcatcccgacctgctgacaggagacctgacactgaatgacatcatgactcgcgttaacgccggacgaaaaggctccctggctgctctgtacgacctcgccgtgctgaaaaaaaaggtcaaggagaaagaggaaaagaagaagaagaaaattaaaacaattaaatccgaagcagaggatcttgctgagccattgtcttccactgagggagttgctcctctgagccaggcaccatcacctctcgcgattcccgcaattaaggaagagccacttgaagacctgaagccatgtctcggcataaacgaaatatctagttcgttctttagtctgttactggagatcctgctgcttgaatcacaggccagtctcccaatgctggaggaacgcgtgcttgactggcagagctcacccgcctccagtttgaacagctggtttagcgcggcccctaactgggcggaactggtgctcccagctctgcaatacctggccggagaatcgcgtgccgtgccatcctccttttctccattcgtcgagtttaaagagaaaacccagcaatggaagctgctggggcagagtcaggataatgagaaagagctggcagctttgtttcagttgtggctggagacgaaagaccaggccttctgcaaacaggagaatgaggatagcagcgatgccactaccccagtgcccagggtacgaacagattatgttgtgcgcccatcaacgggcgaagaaaagcgcgttttccaggagcaggagagatatagatactcccagccacacaaggcatttacattcaggatgcacgggtttgagagcgtggtaggccctgtgaaaggagtgttcgataaggagacctctcttaataaggcccgcgagcattctctccttcgaagcgatcggcctgcgtacgttaccatcctctcccttgtcagggacgctgctgcccgcctccccaatggtgaggggacgcgagctgagatctgcgagttactgaaagattcgcagttccttgcacccgacgtgacatcaactcaggtaaacactgtggtgagtggggcacttgaccgacttcattacgagaaggacccttgcgtgaaatacgacataggccggaagctgtggatatacttgcatagagaccgtagcgaagaagagtttgaaagaattcaccaggcgcaggctgcagccgccaaggccaggaaagctctacagcagaagcctaagcctccaagcaaggtgaagtcctcatcaaaggagtccagcatcaaagtgctctcatccggtccctccgaacagtctcagatgagcctgagcgactcctcaatgcccccgactccagtaacacctgtcacaccgaccacacccgctttgcccgctattcctattagcccaccacctgtcagcgccgttaataaaagcggcccgtctactgtttcggaacccgctaagagtagctccggcgtgctactcgtctccagccccacgatgccccacctgggcacaatgctgagcccggcctcgtcccagaccgcaccatcgtcacaggcagctgcgagagttgtgagtcactctggctctgccggcctgtcccaggtccgggtggtggcacagccttccctgcctgcggtgccccagcaaagcggtggtcccgcgcagacactcccccaaatgcccgctggcccgcagatccgcgtgccagctactgccacccagacgaaggtcgtaccccaaaccgtaatggccacagtgccggtgaaggcccagacaaccgctgcaactgttcagcgtccaggccctgggcagaccggactaaccgtgacctcccttcctgctaccgcgagccccgtctccaaacctgctacgtcgtcgccagggacatcagcaccttccgcttcaactgcagccgttatacagaatgtgactggccaaaacatcattaagcaagtcgctatcaccggtcaactaggggtcaaaccgcagactggcaattccattccccttaccgccacaaacttccgcattcagggtaaggacgtgctgcggctgccgcccagctctatcaccaccgatgctaagggccagacagttctgcgaatcactccagacatgatggcaacactcgctaaatcacaggttacaaccgttaaactgacccaagacctgtttgggactgggggaaacacaacaggaaaagggatcagcgctacactgcacgtgacgtccaaccctgttcacgcagcagattctcccgcgaaggcaagcagcgccagcgcaccatcgtccaccccgactgggactactgtcgttaaagtgacacccgaccttaagcctactgaggcttcttcatccgctttcaggctcatgcctgctctgggcgtgtccgtggctgatcagaagggcaagtccaccgtggcctcgtcggaggcaaaaccagcagcgactattagaattgttcagggactgggggtcatgccacccaaggccgggcagaccattaccgtggccactcacgctaagcaaggcgccagtgtggcctcgggatcaggaacagttcatacttcagcagtaagcctcccttccatgaacgccgccgtctctaaaacagtggctgttgccagcggagccgcctccactcccattagcatatcaactggagcccctaccgtgcggcaggtacccgtaagcacaacggtcgtatccacaagtcaagcggggaagctgccaacccggatcaccgtgccgctgagtgtgatatcccaaccaatgaaggggaagagcgtggtgacagccccaatcattaagggtaatctgggggcgaacttatcagggctagggcgaaacatcatcctgacgactatgcctgccggtactaaacttattgctgggaataagccagtttcctttttgaccgcacaacagctacagcagctccagcagcagggccaggccacccaagtgaggattcagaccgtgcccgcctcacacctgcagcagggcacagcctccggcagcagcaaagctgtgagtacggtcgtggtgactaccgcaccaagccccaaacaggcaccggaacaacagtag

SEQ ID NO: 197640 - DNA, 3900 bp, synthetic construct
  misc_feature 1..3900: note = Description of Artificial Sequence: Synthetic coding sequence
  source 1..3900: mol_type = other DNA
atggacagcctggaccacatgctgaccgaccccctggagctgggcccctgcggagacggacacgggactaggataatggaggattgtctgctcggcggtacccgtgtcagtctcccagaggacctgttggaagacccggagatttttttcgatgtggtatcgctgagtacatggcaagaagtactatccgatagccaacgtgaacaccttcagcagtttctgccacagttccccgaagactctgccgagcagcagaacgagctgatcctggccctcttcagcggtgagaatttccgattcggtaaccctttgcatattgcccagaagctgtttcgtgacgggcacttcaatccggaagtggtgaagtacaggcagctgtgctttaagtcgcaatacaaacgctatttgaactcgcaacagcagtactttcataggctcctgaagcagattctggcaagcaggtcagacctcttggaaatggcacggagaagtgggcctgctctcccatttaggcagaagcggccatcaccctctaggacaccagaagagcgggagtggcggacccagcagcggtatctaaaagtgttgagagaagtcaaggaggaatgcggggatacggcactgtctagtgatgaagaggatttgagcagttggctccccagttccccagcccgaagccccagccccgcagtgcccttgcgtgtagtcccgacactgtctaccactgacatgaaaactgcagacaaagtagaactcggcgatagcgatctgaaaataatgcttaagaaacaccatgaaaaaagaaagcaccagccggatcatccggacctgctgaccggggatctgaccctaaacgatatcatgactcgcgtcaacgccggaaggaagggaagcctggccgccctctacgatctcgctgtgctgaagaaaaaagtcaaagagaaggaagaaaagaaaaagaaaaagattaaaaccattaagtccgaggccgaggatctggccgaacccctgtcctcgaccgagggagtcgcccccctgtcccaggccccctcacctctggccattcccgccatcaaagaagaacccctcgaagacttgaagccttgtctgggaatcaatgagatctccagtagctttttttcacttctgctggaaattctgctcctggaaagccaggcaagtctgcctatgctggaagagagggttctggattggcagagttcacccgctagctctttaaacagttggtttagcgccgctccgaactgggctgagctcgtgctgcccgcattgcaatatttggcaggcgaatcccgagccgttcccagttcttttagcccattcgttgagttcaaggaaaaaactcaacagtggaagctcctaggacagagccaggacaatgagaaggagctcgccgcactgttccagctgtggttggagacgaaagaccaagctttctgcaaacaggagaatgaggattcctcggacgccacgactcctgtgccccgggtgcgaactgattacgtcgtccgaccctccaccggagaagagaaacgagtttttcaagagcaggagcggtatcgctattctcagcctcataaagcgtttacattcagaatgcatgggttcgagtcggtggtgggccctgtcaaaggagtgtttgacaaggagacttctctcaataaggccagagaacactcactgttgcgctcagaccgccctgcctatgtgaccattctgtcattggtgcgcgatgcagccgcccgtctgccaaacggggagggtacccgcgcagaaatttgcgagctgctcaaggactcccaatttcttgctcccgatgtgacttccacacaggtcaataccgtggtgagtggggcccttgatcgactccattatgagaaggacccatgtgttaaatatgatattgggaggaaactgtggatctatcttcacagagaccggtccgaagaggagttcgagcgcatccatcaggcccaggcggccgccgctaaggcccgtaaggcgctccagcagaaacccaagccccccagtaaggtcaagtcgagctccaaggagtcatcaatcaaagtgctgtccagtgggccaagcgagcagagccagatgtcactgagcgacagctctatgccaccgaccccagtgacacccgtgacacccactacgcccgcgcttcctgccatccccatatctccgccccccgtgtctgccgtaaataaatccggtcctagcaccgtgtcagagcctgcaaagtcatccagcggagtccttttagtaagctccccgactatgccccacctcggtactatgctgagccccgctagctcgcagacagcaccgtcttcgcaggccgcggctcgggtcgttagccatagtggtagcgccggactgtctcaggtacgagtggtggcacagccgagcctgccggccgtgccacaacaaagcggcggacctgcacaaaccctaccacaaatgcccgcaggcccccagatacgtgtgccagctactgcaacccaaactaaagtggtgccccagactgtcatggcaaccgtgcctgtgaaggctcaaactaccgccgcaaccgtgcagagaccaggccccggccagacaggactaaccgttacctccttgccagccacagcgtccccggtgtccaaacctgccactagctcccccgggacgagcgctccttcagcctcaacagccgctgtgattcagaacgtaactggacagaacattatcaagcaagtggcaataacgggccagttgggcgttaaacctcaaactgggaactctatccctttgactgcaacaaactttagaatccaagggaaggatgtcttgcggctgccaccatcatcaatcactaccgatgccaagggtcaaaccgtgctgaggattacacctgacatgatggcaacactggcaaaaagccaggtgactacggtgaaactaacgcaggatctgtttggaacaggcgggaacaccaccggcaagggcatctccgctactctgcacgtgacttctaatcccgtgcacgccgctgactcacctgctaaggcgagtagtgcctcagccccaagctcaactcctactggcaccactgttgtaaaggtgaccccggaccttaagccgactgaggccagcagcagcgcctttcgtttaatgcccgcgctcggagtcagcgtggcggatcagaagggaaaatccacagtagcctcaagcgaagctaagcccgcagccaccatacgaatcgtgcaggggctcggcgtgatgcctcccaaagcaggccagactattacagtggcaacccacgccaagcagggcgcatcagtagcttcgggtagtgggacagtgcatacctccgccgtttccctgccgtccatgaatgctgctgtcagtaaaacagttgctgtggctagtggggctgcctcaacaccaattagtatatctaccggcgctccaaccgtccggcaggtacctgttagtactaccgtggtgagtaccagtcaggcaggcaaattaccaacacgtatcacagtgccgctgagcgttatttcacaacctatgaaaggaaaatcagtggttacggctccaattattaagggcaacttgggcgcaaacctgtccggcctgggacggaacatcattctgaccaccatgccggctggcacaaaacttatcgccgggaataagccagtgtcatttttgaccgcccagcagctgcagcagctgcagcagcagggccaggctacacaagtgcgcattcaaaccgtgcctgcctcccaccttcagcagggaactgcctctggctcaagtaaagccgtgtctactgtggtcgtgactactgctccctctcctaagcaggcaccagagcagcagtag

SEQ ID NO: 197641 - DNA, 3975 bp, synthetic construct
  misc_feature 1..3975: note = Description of Artificial Sequence: Synthetic coding sequence
  source 1..3975: mol_type = other DNA
atgcacgtgttcgtgcagagcacctgcggcgaggagaccatggactcactagatcacatgctcactgacccgctcgagctaggcccatgcggcgacgggcacgggactagaataatggaagattgcctcctgggtggaacaagagtgagcctgcctgaggatttactggaagatccagagatcttctttgacgtcgtcagtctatccacttggcaagaggttctgtcagatagtcagagagaacatctgcaacagttcctaccacagttccccgaagactccgctgagcagcagaatgagctgatccttgcgttattctcaggggagaatttcaggttcggcaacccactccatatcgctcagaaactgtttagagacggtcatttcaatcctgaggttgtcaagtaccggcagctgtgctttaaatcccaatacaagaggtacctcaactctcaacagcaatacttccatcgcctgctcaagcaaatcctggcttcacgttctgaccttctggagatggccagacgtagcggacccgccctgccgttccggcagaagaggccatcaccctctcggacacccgaagagagggaatggaggacacaacaacggtacttgaaggtgctccgggaagtgaaagaggaatgcggtgatacagcgctgagcagcgacgaggaagccaccctcgatctccaggagcaattttcattcgaggacctgtcgagctggctaccaagctccccagcacggagtccctcgccggccgtcccattgagggtcgtcccaacactctctacaacggatatgaaaactgccgataaggtggaactgggggacagcgaccttaaaatcatgttgaagaagcaccacgagaaacgcaagcatcagcccgaccacccagacctcctgacgggagacctaactctcaatgatatcatgacaagggtgaatgcggggaggaaggggtcgttagcagcactttatgacttggccgtcctaaagaagaaggtcaaagaaaaagaggagaagaaaaaaaaaaaaataaaaaccataaaaagtgaggccgaggaccttgctgagccattaagttcaacagaaggagtcgcccctctttctcaggccccctctcctctggcgattcctgctattaaagaggagcctctggaggatctcaagccttgcctgggcatcaacgagatatcatcgtcttttttcagcctgcttttggagatactcctcttggaatcccaggcgagcctgcccatgctggaggagcgggttctggattggcagtcttccccagcgagcagcctaaacagttggttctccgccgctccaaactgggccgagctagtgttgcctgctctgcagtacctcgccggagagtcgagagccgtcccgtcatctttttccccctttgtggaattcaaggagaaaacccagcaatggaagttgcttggtcagtcccaggacaatgaaaaggagctcgctgcccttttccaactgtggctggagacaaaggaccaggccttttgcaaacaagagaacgaggatagcagcgacgctacgactccggtgcccagagtgcggacagactacgtggtgcgcccttccaccggcgaagaaaagcgagtattccaggaacaggagagatacaggtactcccagccccataaggccttcacctttcgtatgcatggctttgaatcagtggtaggaccagtgaagggcgtttttgacaaagagacatccctgaacaaagccagggagcattcccttctgcgctctgacagaccagcttacgtcaccatcctgtccctggtgcgcgatgcagccgcgcggcttccgaacggggaaggcacacgggccgaaatttgcgaactgctgaaagacagccagtttttagcccctgatgtaaccagtacccaagtaaataccgtggttagcggggctctcgatcgactccactacgagaaagacccgtgcgtaaagtatgatatcggaaggaagctatggatttatttgcaccgggacagatcggaagaggagtttgaacggatccatcaggcacaggccgccgctgctaaggcccggaaggctctgcagcagaaaccgaaacctccgagcaaagtcaaaagtagctcaaaggaatcaagcatcaaagtgctctccagcggcccatccgagcagagccagatgtcattatccgacagcagtatgccccctacgccggtgaccccagtaactcctactacacctgcgctaccagccatccctatcagccctcctccagtgtctgctgtgaacaaatccggccccagtactgtctccgaacctgccaaatccagttccggcgtgctcctggtgagttcccctacaatgccccacctggggaccatgctgagtcccgctagttcccagaccgcaccgtccagccaggccgctgccagagttgtgtcccatagcgggagcgctggactgtcacaggttcgagtggttgcacagccaagtctgccagccgtccctcagcagagtggcggaccagctcaaaccctgccccagatgcccgctggtccgcagatcagagtgccagcgaccgccacgcaaaccaaggtggtcccccaaactgtgatggcaaccgtgccagttaaggcgcagacaactgctgccacagtgcagaggcccgggccaggacagaccggccttactgtaacatccctgcccgcgactgcctcaccagtttctaagcctgcaacaagtagcccaggaacaagtgccccttccgcatctacggctgccgtcatccagaacgtcactggacagaatatcatcaaacaggttgctattactgggcagcttggtgtgaagccccagactggcaactcaatcccactcaccgcgaccaacttccgcatacagggcaaagacgtcctgaggctgcccccaagcagcatcacaacagacgctaaagggcagactgttttacggatcacccccgacatgatggctacattggcgaagtcccaggtcaccacagtaaagttaacacaagatctgttcggaacaggcggtaacaccaccggaaagggcatctcagccaccttgcacgtgacgtctaatcccgttcacgccgccgatagccctgcaaaggcctcaagcgcctctgccccatcttccactcccacaggcaccaccgtagtaaaggttactccagaccttaagccaacggaggcctccagttctgctttccgcctgatgcctgcccttggagtcagtgtagccgaccagaagggcaagagtacagttgctagctcggaggctaagcccgccgctaccatcagaattgtccagggattgggggtcatgcctccaaaggctggccagactattacagttgccacccatgctaaacagggagcttccgtcgcatctgggtctggcaccgtacatacgagtgccgtgtctctgcctagtatgaacgccgcagtctctaagacagtcgcagtggccagtggcgctgcctccacccctatttccatctctaccggagcccctacagtgcggcaggttcctgtgagcacaaccgtcgtaagcaccagccaagccggaaaattgcccacaaggatcaccgtgcctctcagtgtaatctcacaacccatgaagggaaaatccgttgttactgcgcccatcataaagggtaacctgggcgccaacctgagcgggttggggagaaacataattcttaccaccatgcctgccggtaccaagctcatcgcaggcaataagcccgtcagctttctgaccgcccaacaacttcagcagctccagcagcagggtcaggcaacccaggtgaggattcagaccgtccccgccagccacctgcagcaaggcacagcaagtggctcttcaaaggcagtgagcaccgtggtcgtcaccactgcaccttctcctaaacaggctccggagcagcagtag

SEQ ID NO: 197642 - DNA, 1389 bp, synthetic construct
  misc_feature 1..1389: note = Description of Artificial Sequence: Synthetic coding sequence
  source 1..1389: mol_type = other DNA
atgcagctgcggaagatgcagaccgtgaagaaggagcaggccagcctggacgccagttctaacgtggataagatgatggtgctgaatagcgcattgaccgaggtgtctgaagacagcaccaccggggaggaactcttgttgtctgaaggtagtgtgggcaaaaacaaatcaagtgcttgtcggagaaagagggagttcatccctgatgagaagaaggacgctatgtactgggaaaagcggagaaagaacaatgaagctgcaaagcggagcagagagaagcgccgtctcaacgacttggtgctcgaaaataagctcatagcactcggagaggaaaacgctacattgaaagccgaacttttgagcttgaagctcaagttcggtctgattagcagtacggcttacgctcaggagatacagaagttgtctaattccacagcagtttatttccaggattatcagacttccaaatccaacgttagcagttttgtggacgagcacgagcccagtatggtctcatcctcctgtataagcgtaattaagcattctccacagtcaagcctgtctgatgtgtccgaggtctccagcgtagagcacacacaggagagctccgttcaaggatcctgtcggagccccgaaaacaagttccaaattattaaacaagagccaatggagctggagtcttacaccagggaaccaagagacgacagagggtcatacactgctagtatttatcagaactatatggggaattctttcagtgggtattcacactcgccaccccttctacaggtgaatcggagcagctctaacagcccccggacatccgaaactgatgacggcgtcgtggggaaaagtagcgacggcgaggacgagcagcaggtacccaagggtcctattcactcccctgttgagctgaaacacgtacacgcaactgtcgtgaaagtgccagaggtgaattcctctgcccttccccataagcttaggattaaggccaaggcaatgcaaattaaggtggaagccttcgacaatgagttcgaggccacccaaaagctaagttcccccatcgatatgacatccaagcgccacttcgagctcgagaagcactcagctccatccatggtccattctagtctgacgcctttctcggtccaggtaaccaacattcaggattggtccttgaaatctgaacactggcaccaaaaggagctgtctgggaagactcaaaattcgttcaaaacgggcgtagtggagatgaaagattctggctacaaggtgtccgatccggaaaatctctacttgaaacagggcatcgccaacctgtcggccgaggtcgttagcctgaaacgtctcatcgccacccagcctatttcggcctcagacagcgggtag

SEQ ID NO: 197643 - DNA, 1389 bp, synthetic construct
  misc_feature 1..1389: note = Description of Artificial Sequence: Synthetic coding sequence
  source 1..1389: mol_type = other DNA
atgcagctgcggaagatgcagaccgtgaagaaggagcaggccagcctggatgcctcttcaaatgtcgataagatgatggtgctgaatagtgcccttaccgaggtcagtgaggacagtacgacgggggaagagctacttctgtctgaggggagtgtcgggaaaaataagagtagcgcttgtcgtaggaagcgcgagttcataccagacgaaaaaaaagatgccatgtattgggaaaaacgccggaaaaacaacgaagcggccaaaaggagccgcgaaaagcgccgcttaaacgacctagtgctggagaacaagctaatagcactcggagaagaaaacgctacccttaaggccgagctgctcagcctgaagttgaagttcggcctgatttctagtaccgcttacgcacaggagattcagaagctgagcaatagcactgcagtgtacttccaggactatcagaccagcaagtccaatgtgagctcattcgtcgacgagcacgaaccctctatggtgtcaagcagctgcatctctgtgataaagcactctcctcaaagcagcctgtccgacgttagtgaggtatcctcagtcgaacacacccaagaatcttccgtgcaaggatcttgccgaagcccagagaacaaattccagatcattaaacaagaaccaatggagcttgagtcttataccagggagccacgagacgacaggggttcctacactgccagcatatatcagaactacatgggaaactcgttctcaggatactcacattccccaccactgctccaggtgaatcggagtagctccaactcccccagaacgagtgagaccgacgatggcgtagtgggaaagtccagtgacggggaagacgagcaacaggtgcccaaaggccctatccactccccggtcgagttgaagcatgtccatgctactgtagtaaaggtgccagaagtgaacagctcagccctgcctcacaagcttcggattaaagcaaaggccatgcagattaaagttgaggccttcgataacgaattcgaagcgacccagaaactgagctccccgatcgacatgacatcgaagcgtcactttgaattggagaagcactccgcccctagcatggtgcactcctcactaactcccttttctgtgcaggtgactaacatccaagattggtcactgaaatcggaacactggcaccaaaaggagctttccggaaaaacacagaatagcttcaagacaggggtggtggaaatgaaggactccggttacaaggtgagcgaccctgagaacctctatctcaagcaaggaattgccaacttatcggccgaggtggttagtctgaagagactgattgcaactcagcctatcagcgctagcgactccggctag

SEQ ID NO: 197644 - DNA, 1488 bp, synthetic construct
  misc_feature 1..1488: note = Description of Artificial Sequence: Synthetic coding sequence
  source 1..1488: mol_type = other DNA
atggccgagcccaccagcgacttcgagacccccatcggctggcacgcctccccagagcttacacctaccttaggccctttgtctgatactgcaccacccagagattcttggatgttctgggctatgctacccccacccccccccccactgactagttctctgccggccgcaggaagcaaaccaagctcagagagccagcctcccatggaggcacagtcactccccggggctccacctcctttcgacgcccagattctgcccggggcacagccccccttcgatgcacagtccccactggattcccagccccagccatccggtcagccctggaacttccacgctagtacctcttggtattggcgacagagctctgatcgtttcccccgtcaccagaaatcttttaacccggcagtcaaaaatagctactatccaaggaagtacgacgccaagtttactgatttctccctaccaccctctcgtaaacagaagaaaaaaaaaagaaaggaacccgtcttccatttcttctgtgacacatgtgacagggggttcaaaaaccaagaaaagtacgacaagcacatgagcgaacatactaaatgtcccgaactggattgctcattcaccgcacatgaaaagatcgtgcagttccactggcgcaatatgcacgccccgggaatgaagaagatcaaacttgatactcccgaagaaatagcccgatggcgggaggaacggcgcaagaactaccccactctcgccaatatcgaaagaaagaagaaactcaagctggaaaaagagaaacggggggcggttctgaccactacgcaatatggtaaaatgaaagggatgagcaggcattctcaaatggccaagatcaggagtcctggaaagaatcacaagtggaaaaacgacaattcccgtcaacgagcggtgaccggaagcggatctcatttatgtgacctaaagctggaggggcctccagaagccaacgccgacccgctgggagtcctgataaactctgactcggagagtgacaaggaggaaaaacctcagcactctgtgattcccaaggaagtaaccccagccctgtgctcactcatgtcttcctacggatctctttctggatccgaatcggagcctgaggagactcctattaagaccgaggctgacgtcctggctgagaaccaggtcctagacagctccgcccccaagtctccaagccaagacgtcaaggctactgtgcggaactttagtgaggcaaaatctgagaatagaaaaaagtcttttgaaaagacaaatccaaagagaaagaaggactaccacaattatcagaccctcttcgaaccaaggacccaccacccttaccttctggagatgcttctggcacctgatatcagacatgagcgaaacgttatactgcagtgtgtgcgctacatcatcaagaaggatttctttgggttggatactaatagcgcgaagagcaaagatgtgtag

SEQ ID NO: 197645 - DNA, 648 bp, synthetic construct
  misc_feature 1..648: note = Description of Artificial Sequence: Synthetic coding sequence
  source 1..648: mol_type = other DNA
atggagacccaggccgagcagcaggagctggagaccctgcccaccactaagatggcccagacgaacccgactcctggcagtttgggcccatggaaaatcactatctacgatcaggaaaatttccagggcaagaggatggaattcacatcgtcctgtccaaatgtgtctgagcgttctttcgacaatgttaggagcctgaaggtggaaagcggcgcttggatcggttatgaacatacctcgttctgtggccaacagttcattctcgaacgcggcgaatacccccgatgggatgcttggtccgggagcaatgcttaccatatcgagcgactgatgtcgttcaggcctatttgcagcgccaatcacaaagagtcaaagatgactatttttgagaaggagaatttcatcggacgccagtgggagatcagcgatgattaccctagcctgcaggcgatgggctggtttaacaatgaggtcggaagtatgaagatccagtcaggcgcatgggtatgctaccaatatcctggctatagaggttaccagtatattctggaatgtgaccatcatggaggcgattacaaacattggcgagagtggggctctcatgcccaaacttcccaaattcagtccatccgccgaatccagcagtag

SEQ ID NO: 197646 - DNA, 2940 bp, synthetic construct
  misc_feature 1..2940: note = Description of Artificial Sequence: Synthetic coding sequence
  source 1..2940: mol_type = other DNA
atgaccctgcacgccacccggggcgccgccctgctgagctgggtgaacagtctccatgttgcagatcccgtcgaggccgttctgcagctacaagattgctccatattcatcaaaattatcgatcgcattcatggtactgaggagggccagcaaatcctaaagcaacctgtcagcgaaaggcttgatttcgtgtgttcgttcctccagaaaaatcgcaaacacccttcaagcccagaatgcctcgtgtctgcacagaaagtgctggagggaagcgagctggaacttgctaagatgactatgctccttctataccactcaactatgtcctccaagtcaccgcgagattgggaacagttcgagtacaagatacaagccgagctggccgtcatactcaagttcgtattggatcacgaagacggcctgaatcttaatgaagatctggagaattttctgcagaaagcccctgtgccatccacatgcagctcaaccttcccagaggagttgagcccaccaagtcaccaagcgaagagagagataaggtttctagaactgcagaaggttgccagttccagctccggcaacaacttcttgagcggatctcccgctagtcctatgggggatatcctgcagacccctcagtttcaaatgaggagactgaagaaacaactggccgacgaaagatcaaatcgagatgaacttgagctggaactagccgagaacagaaagctgttgactgagaaagatgcacagatcgctatgatgcagcagcggattgaccggcttgccttgctgaacgaaaaacaggctgccagtcccctcgaaccgaaggaattggaggaactgagggacaagaatgagagtctgaccatgcgcttgcacgaaactcttaagcaatgtcaggacctgaagaccgagaaatctcagatggacaggaagatcaaccagttaagcgaggaaaacggtgacctctctttcaagcttcgcgaattcgcttcacacctccaacagctgcaggatgcactgaacgagctgaccgaggaacactccaaagctacccaggagtggctagaaaaacaggcgcagttggaaaaagaattatctgctgccttgcaggacaagaaatgtctcgaagaaaagaacgaaatactgcaggggaagttgagtcagttggaggagcacctgtcacagcttcaggacaatccacctcaggagaaaggggaggtattaggtgatgtcctacaggtggaagagctctccaagaaactcgccgactcagaccaggcatccaaggttcagcaacagaaactgaaagcagtgcaggcccagggaggtgagtcacagcaggaggcacagcggctgcaggcccagctcaacgaacttcaagcccagctgagccagaaggaacaagctgccgagcactataagctccagatggaaaaggctaagacacactacgacgctaagaagcaacagaaccaggaactacaggaacagctgagatccctggagcagttacagaaggagaacaaggaacttagagcagaggccgagaggctggggcacgaacttcagcaggcagggctgaaaactaaggaagcagaacagacatgcaggcacttaacagcccaggtaagatctctcgaagcccaggtggcccatgccgaccagcagctgagggatctagggaagtttcaagtcgctaccgatgccctgaaatcacgggagcctcaagccaagccccagttggatttatccatcgattcacttgatctctcttgcgaagaagggactcctctctcaataacttccaagctgccacggacccagcccgatgggacgagcgtacccggtgaacccgctagccccattagtcagcggttgcctccaaaagtggaatctctcgagagcctctatttcacccctatcccagctcgcagccaggccccactggaatcttccctggacagcctcggcgacgttttcctcgacagtgggagaaaaacacgcagtgctcgaaggcgaaccacacaaattataaatatcactatgactaagaagctcgatgtggaagaacctgacagtgcgaactcctccttctactcgacacgtagcgcccctgcgtcccaggccagccttcgggcaacaagttctacccaaagtctcgccagacttggctcacctgattacggcaatagtgcgctgctgtcccttcctggatacaggcctacaacccgctcaagtgctcggagaagtcaggccggcgttagcagtggggctcccccagggcgaaactccttctacatggggacctgtcaagacgagcctgaacagctggacgactggaatcggatagcagagctccagcagcgaaacagagtatgccccccacacctgaagacttgctaccctcttgagagtcggccttcgcttagcctgggaactatcacagacgaggaaatgaaaactggagatcctcaggaaaccctgagacgggcctccatgcagcccatacagatagctgagggcactgggattacgaccaggcaacagcgaaaacgcgtctctctcgagcctcaccagggaccaggaaccccagaaagcaaaaaggccacttcttgctttccacgcccaatgacgccgagagataggcatgagggccgtaagcagtcaaccacagaagctcaaaaaaaagccgccccagcatccaccaaacaggcagatcgacggcagtcaatggccttttcaatcctcaacactcccaaaaagctgggaaactctctgcttcgtcgtggagcgtccaaaaaagccttgtcaaaggctagccccaatacacgatctggaacgcggcgtagtcccaggatcgcgaccaccacagcctccgccgctacagccgcggcgatcggcgctacgcctcgtgccaagggtaaagccaaacactag

SEQ ID NO: 197647 - DNA, 6306 bp, synthetic construct
  misc_feature 1..6306: note = Description of Artificial Sequence: Synthetic coding sequence
  source 1..6306: mol_type = other DNA
atgaccctgcacgccacccggggcgccgccctgctgagctgggtgaattctctacatgtcgctgacccagtggaggctgtcctccaactgcaggattgctcaatcttcataaagattatagaccggatccacggcaccgaggaaggtcagcaaatattaaagcagcctgtttcagaaaggctggattttgtgtgctcatttctacagaagaataggaagcacccgagcagccctgagtgtctggtgtccgcgcagaaggtcctcgaaggctccgaactggaacttgctaagatgaccatgctccttctgtaccacagcactatgagtagcaagtcccctagggactgggagcaattcgaatataagatacaggcggagctggccgtcattctgaagttcgtgttggatcatgaggacggacttaatctaaacgaagacctggaaaatttcctacagaaggccccagtccctagtacatgctctagcaccttcccagaggagctctctcccccaagccaccaggccaaacgtgagattagattcctcgaactacaaaaggtggcctcctccagcagcggaaataatttcctaagcggatcacccgcttctcccatgggtgacatcctgcagacccctcagtttcagatgcgccggctgaagaagcagttagctgacgagaggtctaaccgcgacgaactggaactcgaactagctgagaataggaagttgctcactgagaaagatgcacaaatcgcaatgatgcagcaacgaatcgataggctcgcattgctcaacgagaagcaggcagccagcccactggagcccaaggagcttgaggagctgagagataagaatgaaagtcttacaatgaggctacacgaaaccctgaagcagtgtcaagaccttaagaccgagaaaagccagatggatcgaaaaatcaaccaactctctgaggagaacggggacctctcctttaaactcagggagtttgcgtcccatctgcagcagctacaggatgcactgaatgaattaacagaagaacatagcaaagccactcaggagtggctcgaaaaacaggcccagctggaaaaggagttgtctgccgcactccaggacaaaaagtgtcttgaagagaaaaacgaaatcttgcaggggaagcttagtcagcttgaagaacatctgtctcagttgcaggataacccaccacaagagaagggtgaagtgctgggtgacgttttgcagcttgagacactgaagcaggaggctgcaaccctggccgccaacaatacccagcttcaggccagagtggagatgttggaaaccgagcgcgggcaacaagaagctaaactgctggctgagcgcggccacttcgaggaggaaaagcagcagttatcttccctaattacagacctacagtcttccatctccaacctttcccaggctaaggaagaactggagcaggcttctcaggcacatggggcacgcctgactgcccaggtcgcctctctgacttcagagctgacaacattgaacgctaccattcagcagcaggatcaggaactggccggcttaaagcagcaggcgaaagagaagcaggcccagctggcccagaccctgcagcagcaggagcaggcctcccagggcctacgccatcaggtggagcaactgagctctagcctgaagcagaaggaacagcagttgaaagaggttgccgagaagcaagaggccacaaggcaagaccacgcgcagcagctggcgactgccgcagaggaaagagaggctagcttgcgtgagagagatgcggctttgaaacagttggaagcgctggagaaagagaaggctgctaagctggagatcctgcagcagcagcttcaggtggctaatgaggcgcgagacagtgcacagactagcgtaactcaagctcagagagagaaggccgagctctctcgcaaagtggaggagcttcaggcctgcgtcgaaaccgcccgtcaagaacaacatgaagcacaggcccaggttgctgagttggagctacagctccggtccgagcaacagaaagccaccgagaaggagagggtggctcaagagaaggaccagttacaggaacagttgcaagcactgaaggagagtctgaaagttaccaaaggttcactggaggaggagaaacggcgcgccgcagacgcactcgaggaacagcagagatgtatcagtgaactcaaggctgaaacgagaagcctggtggaacagcacaagcgtgagaggaaggagctcgaggaagagcgggccggtcgaaagggcctcgaggctagattgcagcagttgggtgaagcccaccaggcggaaacagaagtcctccgaagggaactggctgaagctatggccgctcagcatactgccgagtccgagtgtgagcagctcgtgaaagaagttgccgcctggcgggagcgctacgaagacagtcagcaggaggaagcacagtatggggcaatgtttcaagaacagcttatgacgctgaaggaagaatgcgagaaggcacgccaggaactgcaggaagcgaaggaaaaagtcgctggcattgaatcacattccgaattgcagatctctaggcagcagaacgaactggccgagctccatgcgaatctggcccgggccctgcaacaggtgcaggagaaggaggtccgagcccagaagttagcggatgatctcagtacactgcaggagaagatggccgctacatcgaaggaagtggcccgcctggagacgcttgtgcgaaaggccggagaacaacaggagaccgcaagccgggaattagtgaaggagccggcccgggccggggatcgccagcccgagtggttggaagagcaacagggtagacagttttgcagcacccaggccgcccttcaggccatggaacgggaagccgagcaaatgggcaacgagctggaacggctgcgagctgcgctcatggaaagtcagggacagcagcaggaagaacgtggtcagcaagagagagaggttgctaggctcacccaagagagagggcgggctcaggccgacctggcactagagaaggccgcacgggccgagctggagatgcgcctgcagaacgccctgaatgaacagagagtcgagtttgcgacactgcaggaagcattggcccacgcccttacggagaaggagggcaaggatcaggagctcgcgaagctgagggggctggaagcggctcagatcaaagaattagaggagctccggcagaccgttaagcagctgaaggaacagctggctaagaaagagaaagagcatgccagtggtagtggggcccagagcgaagcagccggccgaaccgagccgactggtcctaaactggaagcccttcgggctgaagtcagtaagctggaacaacagtgtcaaaaacagcaggaacaggctgattcgcttgagcgcagcctcgaggccgagcgggcatcccgagccgaacgtgattccgctctcgagacactccagggccagctggaagagaaagcgcaggagcttggacactcacagagcgctctggcctcagctcagcgggagctggccgcctttcgaacaaaggtgcaggaccactcaaaggctgaagatgagtggaaggcacaggtggcgagggggagacaggaagcagagagaaaaaactctctgattagctctctcgaggaggaagtcagtatcctgaatcgacaggtgctggaaaaagaaggagagagcaaagagctgaagcgactggtgatggccgagtctgaaaaatcgcagaagttggaggaaagacttcggctcctgcaggcagaaacagcctcgaactccgcgagggctgctgagcggtcttccgccctgcgggaagaagtgcaaagcttgcgggaggaggccgagaagcagagagtggcatccgaaaatcttaggcaagaactcacttcgcaggctgaacgcgctgaagaactgggacaggaattaaaggcttggcaggaaaaatttttccaaaaggagcaggcccttagtactctacagctggagcacacctccacccaagccctggtcagcgagttgctgcctgcaaaacacttgtgtcagcagctgcaggctgaacaggccgcggctgagaaaagacatagggaagagcttgagcaaagtaagcaggccgccgggggtctgcgagccgaattactccgggctcagcgagagctgggggagttgatccccctacggcaaaaggttgccgagcaggagagaacagcccagcagctgcgggctgaaaaggccagttacgcggaacagcttagtatgctgaagaaagcccacggactgcttgcagaggaaaacagggggctgggcgagcgggccaacttgggccgccagttcctggaggtggagctcgatcaggcccgggagaagtacgtgcaggaactggcggccgtccgggccgacgctgaaacaagacttgctgaggtgcagagggaggcacagtccaccgcacgtgagcttgaggtgatgacagccaaatacgagggtgcaaaagtcaaagtgctggaagagagacagcgcttccaggaggaacgccagaagttgaccgcacaggtagaagagctctctaaaaaactcgctgattccgaccaggcttctaaagtgcagcagcagaagcttaaggccgtgcaggcccagggcggagaatctcagcaggaagctcaacggcttcaggcacagctgaacgaattacaagctcagttgtcccagaaggaacaggccgccgaacactacaaactccagatggaaaaagccaaaactcattacgacgctaaaaaacaacagaaccaggagctgcaggaacagttgcgctctctggagcagctgcaaaaagaaaataaggagttaagggctgaagctgagagactcggtcatgaactgcagcaagccgggctgaaaaccaaagaagctgagcagacatgcaggcacctgactgctcaggtacgctcactggaggcgcaagtcgcccacgcagaccagcagttgcgtgacctgggcaagtttcaagtcgcaactgatgctctgaaatctagagagccccaggctaaaccccaacttgacctatccatcgactctttggatctttcctgcgaggagggaaccccactgagtattacctcaaaactcccccggacccagcctgacggtacctccgtccctggagagcccgcatctcccatttcccagcgcctgccccccaaggtcgagagcctcgagtccttgtatttcaccccaatccccgctagatcacaggcccccttagaaagcagcttagactccttgggagacgtgtttttagatagcgggcgtaaaacgaggagtgcccggagaaggacgacacagattatcaacattactatgacaaagaaacttgacgtggaagaaccagacagcgccaatagctccttctattcaactcggtcggctccagctagccaagcgagccttagagccacctcaagcacccagagcctggcacgtctggggagtcccgactacggaaactctgccctgctgagcctaccaggttatcgccccaccacgagatcttctgctcggcggtcgcaggcaggggtgtcttcaggggcacctcctggaaggaattctttctatatgggcacatgtcaggacgagcccgaacagctggatgactggaacaggattgcagagctgcagcagagaaacagggtgtgccctcctcatttaaaaacatgctacccacttgagtctaggccatctctctcattgggaacgatcactgatgaagaaatgaagacaggggatcctcaggaaaccctgcgcagggcctctatgcagcccattcagatcgcggaaggcaccggaattaccacccggcagcagagaaagagggtgagcctagagccccatcagggcccagggaccccagagtcaaaaaaggctacgtcttgtttcccaagacccatgacccctagagatcgacacgaagggaggaagcagtccacaaccgaggcgcagaagaaggcggcccccgcaagcacaaagcaggctgataggcggcagagcatggcattttcgatcttgaatacacctaagaagctgggaaactcactgttgaggagaggagcctcaaaaaaagctttgtccaaggccagtccaaatacaaggtcagggacgagacgcagcccgcgcattgccactaccaccgccagcgctgccacagctgccgccataggggcaacgcccagagctaaaggaaaggccaaacactag

SEQ ID NO: 197648 - DNA, 4995 bp, synthetic construct
  misc_feature 1..4995: note = Description of Artificial Sequence: Synthetic coding sequence
  source 1..4995: mol_type = other DNA
atgctggagaccgagcggggccagcaggaggccaagctgctggccgaacggggacactttgaggaggagaagcagcagttgagcagtctcatcaccgatctgcagtctagcatttctaatttatctcaggctaaggaagaactggagcaggcaagccaggcacatggggctaggcttaccgcccaagtggcaagcctgacatcggaactgactaccctcaatgccaccatccagcagcaggaccaggagctggccggcctgaagcaacaggccaaggaaaagcaggcccaactcgcccaaactctgcagcagcaggagcaggccagccaggggcttagacaccaagtagaacagttgtcaagtagtcttaagcagaaggagcagcagctgaaagaggtagccgagaagcaagaggcgactagacaggaccacgctcagcagttagcaaccgccgctgaagagagggaggcgtcgctgcgtgaacgtgatgccgccctgaagcaacttgaagcacttgagaaagagaaagccgctaaactagagatcctgcagcaacagctccaagtagccaatgaggcaagagactctgcccagacctcagtgactcaggcccagagggaaaaggccgaactctctcgaaaggttgaagagctccaggcctgtgtggaaactgccaggcaggagcagcacgaggcacaggctcaggtcgccgagcttgagttacaacttagatcagaacagcaaaaggccacagaaaaggaacgggtcgcccaggaaaaggaccaactccaggaacagctacaggcactaaaagagtcactgaaggtaactaaaggctcattggaagaggagaagcggagggctgctgatgccctggaggagcaacagaggtgtatcagtgaactgaaagcggaaactagaagcctagttgaacagcataaacgcgagcggaaagaactggaggaggagcgggcagggagaaagggcctcgaggccagactccaacagttgggagaggcccaccaggcagaaacagaggtgcttcgccgggaactagctgaggctatggctgcccagcataccgccgaatccgaatgcgaacagttggttaaggaggtggccgcgtggcgcgaacggtatgaggatagtcagcaggaggaggctcaatatggcgcaatgtttcaggaacagctcatgacacttaaggaggagtgcgagaaggcgagacaagagctgcaggaggcaaaagaaaaggtagctggcatcgaatcgcattccgagctacagatcagcaggcaacagaatgagctggctgagctgcacgctaacttagctcgagcacttcaacaggtacaagagaaagaagtgagggctcagaaattggctgatgatctcagcacactgcaggaaaaaatggccgccacctccaaggaagtcgccagacttgaaaccctggtgcgcaaggcgggggagcagcaagaaaccgcttctagggagctggtcaaagaacctgctagagccggggatcgccagcctgaatggctggaagagcagcaggggaggcagttctgcagcactcaggcggccctgcaggccatggagagagaggctgaacagatgggtaacgagctcgagcgccttagagcagcgttaatggaatcacagggtcagcagcaggaggagcgtgggcagcaggagcgagaggtggctcgactcacccaggagagaggcagagcacaggctgatctggccctcgagaaggcagccagggctgagttggagatgcgcctgcagaacgccctgaacgagcagagggtggaattcgccaccctgcaggaggctcttgcacatgccctgactgagaaagagggcaaggatcaggagctagccaaacttcgcggattggaagccgcccagattaaggagctcgaggaactacgccagactgtgaaacaactaaaagagcagctggccaagaaagagaaggaacatgccagcggctctggcgcacagtcagaggccgcaggccgcactgaaccgacgggacctaagctcgaagcgctgcgagcggaggtctctaaactggaacagcagtgtcagaaacaacaggaacaggcagattctctggagcggagtctggaggcagaaagggccagtcgagccgagcgggacagcgcacttgaaaccctccagggccagctggaagagaaagcccaggagttgggtcattcccagtctgccctggccagcgcccagcgagagctggctgcctttagaacgaaggtacaggaccattctaaagcagaagacgaatggaaagcccaggtggcccgagggcgacaggaggctgagcgtaagaactccctcattagttcactcgaggaagaggtctcaatactgaaccgccaggtgcttgagaaagagggcgagtccaaagaactgaaaagactcgtgatggccgaaagcgagaaaagtcagaagctggaggagaggcttcgcctgctgcaagctgagaccgcctcaaattccgctagggctgcagagagatcgagtgcgctgagagaggaagttcagagtttgagagaggaggccgagaagcagagagtggcttctgagaacttgcggcaagaattgaccagccaagccgagcgcgcagaggagcttgggcaggagctgaaagcctggcaggagaaattcttccagaaagaacaggctttgagcaccctgcagctggagcacacaagcacccaagcactcgtctccgaattgcttccagctaaacatctgtgtcagcagctacaggcagagcaggctgcagctgagaagaggcaccgcgaagagttagagcagagtaaacaggctgcaggggggcttcgggccgaactcctaagggcccagagggaattaggggaattaatcccattaaggcagaaagtggccgagcaggagcgcacagcccagcaacttagagctgaaaaggcgtcatatgctgagcaactgtcaatgttgaaaaaagcgcatggcctcctcgccgaagaaaatagaggccttggcgaaagggctaaccttggacgtcaatttctcgaggttgagttagaccaagcaagagaaaagtatgtgcaggagcttgctgcagtccgcgcagatgccgaaactaggctcgccgaagttcaacgggaagcccagtctaccgcaagagagctggaagtcatgaccgcgaaatacgagggcgcaaaggtcaaagtactggaggaaaggcagagattccaggaagagagacagaagctcacagcacaggtggaagagctgtccaagaaactcgctgactctgatcaagccagtaaggtccagcagcagaaactgaaggcagtgcaagctcaaggcggtgagagtcaacaggaggcgcaacggttacaggcccagctcaatgagttgcaggcacaactttcacaaaaggagcaagccgcagagcactacaagctgcagatggagaaggccaaaactcattacgacgccaagaagcaacagaaccaggaattgcaggagcaattacgctccctggagcaacttcagaaagagaacaaggaactcagagcggaagctgagagacttgggcatgagcttcagcaggcgggactgaaaaccaaggaagccgagcagacctgtcggcacttgaccgctcaagtaagatccctcgaagcacaagttgcacacgctgaccagcagctgcgcgacttaggcaagttccaggtcgccactgatgccctgaaatcccgcgaaccccaagctaagccacagctcgatctgagcattgacagcctggatctgtcttgcgaggagggtacccctctctccataacttccaagttaccgcggacccaacctgacgggacatccgtccccggggagccggcttccccaatcagccagagactgccgcctaaggttgaaagcctcgaaagtctttacttcactccaatcccggcccggtcccaggcgccgcttgagtcttctcttgactccctgggcgacgtgtttctggattccggacgcaagactcgtagtgctagaaggcgaaccacacaaatcattaatatcacaatgactaagaagctggacgtggaagaacctgactcagctaactcttccttttactccacgcggagcgctcctgcaagccaggcaagtcttagggcaacatcttccactcagtctctggcaaggctgggctcgcctgattacggtaatagcgccttgctttcactccccgggtaccggccaactacgcgctcctccgctcgccgttctcaggccggagtctcctccggagcacctccaggccggaacagtttctacatggggacctgtcaggatgaaccggagcagctggacgactggaacaggatcgctgaactgcaacagcgtaaccgagtctgtcctccccatttgaagacctgctaccctctcgaatccagaccatcgctctcgctgggaactataactgatgaagaaatgaagactggggacccccaagaaaccctgagacgagcaagcatgcagcctattcagatcgccgaaggaactgggatcaccactagacaacagagaaaaagagtatccctggaaccacaccagggcccagggacaccagagagcaagaaagccacgtcgtgttttcccagaccaatgactcctcgcgatcgccacgaggggaggaagcagtctacgaccgaagcccagaaaaaggctgctcccgcaagtacaaagcaggcagacagacgacagtcaatggccttcagtatattgaacacccctaagaagctggggaactccctcctgcggcgcggagcttcgaagaaagctcttagtaaggccagtcctaatacacgctcgggcacaagacgatcccctcgtatagcaaccacgaccgcatcggctgccaccgccgccgctattggggccaccccaagagcaaagggcaaggcgaagcactag

SEQ ID NO: 197649 - DNA, 228 bp, synthetic construct
  misc_feature 1..228: note = Description of Artificial Sequence: Synthetic coding sequence
  source 1..228: mol_type = other DNA
atgaccctgcacgccacccggggcgccgccctgctgagctgggtgaatagcctccatgtcgctgacccagtcgaggccgtgttacagctgcaggactgtagcatcttcatcaagattattgatcgcattcacggtacagaagagggccagcagatcctgaaacagcccgtgtcggaacgcctggatttcgtctgttcgttcttgcaaaaaaataggaaacacccctag

SEQ ID NO: 197650 - DNA, 276 bp, synthetic construct
  misc_feature 1..276: note = Description of Artificial Sequence: Synthetic coding sequence
  source 1..276: mol_type = other DNA
atgaccctgcacgccacccggggcgccgccctgctgagctgggtgaacagcctacacgtcgccgaccctgtggaggctgtgttgcaattacaggactgtagcattttcattaaaataatcgaccggatccacggcactgaggaggggcagcagattttaaaacagcccgtcagtgagcgcctagacttcgtttgctcctttttacagaagaatcggaaacacccgtcttctcccgagtgtttggtgtccgcacagaaggtgttggagggtagttag

SEQ ID NO: 197651 - DNA, 6348 bp, synthetic construct
  misc_feature 1..6348: note = Description of Artificial Sequence: Synthetic coding sequence
  source 1..6348: mol_type = other DNA
atgaccctgcacgccacccggggcgccgccctgctgagctgggtgaacagcctccacgtcgcagatcccgtggaggcggtgctccaactgcaggactgttccattttcattaaaatcatcgatagaattcatggtaccgaagaggggcagcagatactaaagcagccggtatcagaacggctggactttgtctgtagctttctccagaagaaccgtaaacacccatcatctccagagtgcctggtctctgcacagaaagtgctagagggcagtgagcttgaactcgctaaaatgacaatgctgctgctctatcattctactatgagctctaagagcccacgcgactgggagcagttcgagtacaagatccaggctgagcttgctgtcatactgaagtttgtgctggatcatgaagatggccttaatctcaacgaagacctcgaaaactttctacagaaagcacccgtaccttcgacatgctccagtacctttcccgaagagctgagtccgccctctcatcaagcaaagagggaaatacggttccttgaattacagaaagtcgcaagctcgagctccggcaacaatttcctgtccggctctccagcttcacctatgggcgacattctgcaaacacctcagttccagatgaggcgtctaaagaagcaactggctgacgaacgctcaaatagggacgaactcgagcttgagctcgcggagaatcggaagctcctgactgaaaaggacgcacagatcgccatgatgcagcagcgaatagatcgtttagctcttctcaatgaaaaacaggcagccagtcccctggaaccaaaggagctcgaggagctgcgggacaaaaatgagtctttgactatgcgacttcacgaaacactgaagcagtgtcaggacttaaaaacggagaagagccagatggaccgtaagatcaatcagttaagcgaggagaacggcgatctctccttcaagttacgggagttcgcttctcatttgcagcagttacaggatgctctgaatgagctcacggaagaacattcgaaggctacacaggaatggctggaaaagcaagctcagctcgagaaagagctatccgccgcactgcaggataagaagtgcctggaagagaaaaacgaaatactgcagggcaaactttcacaactcgaagagcacttatcacagttacaagataaccccccacaggagaagggagaagtgctcggagacgttctgcaattagagacgctgaaacaggaggcagctacgctcgccgccaataatactcagctgcaggccagagtggagatgttggaaacagaacgcggacagcaggaggccaaactcctggccgaacggggtcactttgaggaggagaagcaacagctctcttccttaattacggatctccagtcaagtatcagtaacctatcccaggccaaggaagagttagagcaagcaagccaggcacacggcgctcggcttactgctcaggtggcatctctgactagtgagcttactacactcaacgcaacaattcagcaacaggatcaggagctcgcaggcctgaagcagcaggctaaggaaaaacaggctcaactggcccaaacactgcaacagcaggaacaggccagccagggtttgcgccaccaagtagagcagctcagtagctcactaaaacagaaagaacaacagcttaaagaagtggctgaaaaacaggaagctaccagacaggatcatgctcaacagctggctacagctgccgaggagcgtgaggcatccctgagagaacgtgatgccgccctaaagcagctcgaagccctcgagaaagaaaaagcagccaagctggagattcttcagcagcagctccaggtcgcaaacgaagccagagacagcgcccagacctctgtgacccaggcgcagagagagaaggctgagcttagcagaaaggttgaagaacttcaggcttgcgttgagactgcaaggcaggaacaacacgaagctcaagcgcaggttgccgaactggaacttcagctgaggtccgagcagcagaaggccaccgagaaggagagagtcgctcaagagaaggatcagctgcaagagcagcttcaggcgctgaaagagtcactgaaagtcactaaaggctcgctagaggaggaaaaaagaagagctgcagatgcattagaagaacaacaacgatgcatctccgagctgaaggcggagacccgatcacttgtcgaacagcacaaaagggagcgtaaagaacttgaagaggaaagggccggccgtaaaggtctcgaagctcggctgcagcagctgggggaggctcaccaagcagaaaccgaagtcctgagaagagagctagccgaggctatggccgcacagcacaccgctgagagtgaatgtgagcagctggtcaaggaagtagccgcttggcgggaacgttacgaggactctcaacaggaagaagcccagtacggcgcgatgtttcaggaacagctcatgactctgaaagaagagtgcgagaaagccaggcaggaactgcaggaagccaaagagaaggtggcaggtatcgaaagccattctgaactgcaaatttcacgacagcaaaacgaactagcagagctacatgcaaacctcgcgcgggccttgcagcaggtccaggaaaaggaggtcagggcccagaaactcgcagacgatctgagcacccttcaggagaagatggcagctacgtccaaagaagtggctcgcctggagaccctggtgcggaaggcgggggaacaacaagagaccgccagcagggagctcgtaaaagaacccgcccgagccggtgacagacagcccgagtggctggaggagcagcagggtagacagttctgtagcacccaagccgctctgcaggctatggagagggaagctgaacagatggggaatgagctggaaagactcagggcagccctgatggaaagtcagggtcagcagcaggaggaacgtggccagcaggagcgagaggtagccagacttactcaggagaggggtcgcgcacaggcggacctggctcttgagaaggcagctagagctgagctggaaatgcgtttgcaaaacgccctcaatgaacagcgtgtcgaattcgccacactacaggaggcactcgcccacgcgctgactgagaaagaaggtaaggaccaagaattggccaaactgcgagggctggaagctgcccaaatcaaggagttggaagagctgaggcagactgtgaagcaactgaaagaacagttggcaaagaaagagaaagagcatgctagcggttccggggctcagtctgaggcagctggccgcaccgagccaacggggccaaagctggaggcactgagggctgaggtgtcgaaacttgaacagcagtgccagaaacaacaggaacaagccgactccctggagcggtctttggaagctgaacgggcgtcaagagcggaaagagactctgccctggagaccctccaaggacaacttgaggagaaagcccaagagcttggtcactcacagtctgctttggcctccgcccagcgcgagctggccgcctttcggacaaaagtgcaggaccactctaaagcggaggatgagtggaaggcacaggtagctcgaggcagacaagaagcggagaggaagaactctctcataagctccctggaggaggaagtgagtatcctcaaccgccaggttctcgagaaagagggtgagagcaaagagcttaagaggcttgtgatggccgaatctgaaaagtcccagaagctggaggagcggctgaggttgttacaggcggaaaccgctagcaacagcgcccgtgctgcagagcgttcctcggccctgcgcgaggaagtgcaaagccttcgcgaggaagcggaaaaacaacgagtggcctccgaaaatttgagacaggagcttaccagccaggctgagagagcggaagagcttgggcaagaactgaaagcatggcaagagaaattcttccagaaggagcaggctctttccacactgcaactggagcataccagcacacaggccctcgtgagcgagctgctccctgccaagcacctttgccagcagttacaggccgagcaggcggcggcagagaaacgccacagagaggaactggagcagagtaagcaggcagcaggcggtctaagggctgaattactccgtgcccaaagagagctcggagagttgatcccattgcggcagaaagtggccgagcaggagcggaccgctcagcagcttcgcgctgaaaaagccagctatgctgagcagcttagcatgctaaaaaaagcccacggccttcttgccgaggagaacagaggcctgggcgagagagcaaacttaggacgacagttcctggaggtggagttggaccaagctcgcgaaaagtacgtgcaggagctcgccgctgtacgggcagacgctgagactcgccttgccgaggtacagagggaggcacagtcaacagccagagaactcgaggtgatgacagctaagtacgaaggggcaaaggtgaaagtcctggaagagagacagcggtttcaggaggaacggcagaagctgactgcacaggtggagcagctggaagtgtttcagcgtgagcagactaaacaggtggaggaattgtcaaaaaaattggctgattccgatcaggctagcaaagtgcagcagcagaaactcaaagccgtccaggcacagggtggggagtcacagcaagaggcacagagattgcaggcacagcttaatgagcttcaggctcagctgtcacagaaggaacaggcggccgagcactacaagctgcagatggaaaaggcaaaaacacactacgatgcgaaaaagcagcagaatcaggagctgcaggagcagctgcgctccctagaacagctacagaaggaaaataaagagctgcgcgctgaggctgagagattgggccatgaactccagcaggccggcctaaagaccaaggaagcagaacagacgtgtaggcatttaacagcccaggtccgtagtctggaggcgcaggtggcccacgcggaccagcagctccgagatctcggcaaatttcaggtggccaccgacgccctgaagagccgagagccacaagctaaaccccagctcgacctctccattgattcattggatctgtcatgcgaggagggaacacctctgagcatcacttctaaactgcccagaacacagccagatgggacctctgtgcccggagaacctgcatctccaatttctcagcgcctcccgcctaaagtggaatccttagagagcctgtacttcacccctattcccgcccgctcccaggctcccctggagagttcattagactctctgggggacgtatttcttgatagcggcaggaagactcgctctgcacggcggcgcactactcagatcattaatatcactatgacaaagaaattggacgttgaagaacccgactcagccaatagctccttctattccactcgttccgcgcccgcgtctcaggcgtccttacgcgctacaagttctacccagtcgttagccagattgggtagccctgactatggaaatagtgcactgctgtcactcccaggctacaggcctactacaagatcaagtgccagacgctcccaagcaggagtctcatctggcgccccccccgggcggaactcattttacatgggaacttgccaggatgagccagagcagctggatgattggaacagaatcgctgagctgcaacaaaggaacagagtctgccctccccatctgaagacatgttatcccctcgaatccaggccatcactgagtctggggaccatcacggacgaagaaatgaagacaggagaccctcaggagacgctgcgccgtgcttcgatgcagcctatccagatagccgagggtactgggatcactacccgccagcagagaaaacgcgtgagcttggaaccccatcaaggacctggaactcccgagtccaagaaggccacttcatgtttccctcgccctatgacaccccgagaccggcacgaaggcagaaagcagtcaacaactgaggcccagaagaaggccgctccagccagtactaagcaagcagaccggcgtcagtctatggcatttagtatactgaatacccccaaaaaattagggaactcgttgctgagacgcggggccagtaaaaaagccctctcaaaagctagtcccaatacccgatctggaacacgccggagccctagaattgccaccacaaccgcttctgcagccacagctgcagcgatcggtgcaacaccccgcgccaagggcaaagccaaacattag

SEQ ID NO: 197652 - DNA, 330 bp, synthetic construct
  misc_feature 1..330: note = Description of Artificial Sequence: Synthetic coding sequence
  source 1..330: mol_type = other DNA
atgaccctgcacgccacccggggcgccgccctgctgagctgggtgaacagcttacacgtcgcggatcccgtcgaagccgtactgcaactccaagattgttcaatcttcattaaaatcatcgataggattcacggtaccgaggaggggcagcagattctgaaacagcctgttagcgagcgccttgacttcgtctgtagctttctgcagaagaatagaaagcaccccagttcacccgagtgtctcgtgtctgctcaaaaggtgctggagggatcggaactggaacttgcgaaaatgaccatgcttctcttatatcactccacaatgagctag

SEQ ID NO: 197653 - DNA, 186 bp, synthetic construct
  misc_feature 1..186: note = Description of Artificial Sequence: Synthetic coding sequence
  source 1..186: mol_type = other DNA
atgaccctgcacgccacccggggcgccgccctgctgagctgggtgaactcactccacgttgccgatcccgtcgaagctgtgctgcagttgcaggattgtagtatcttcataaagattatcgatcgcatccatggcaccgaagagggccagcagattctgaaacagcccgtgagtgagaggctgtag

SEQ ID NO: 197654 - DNA, 180 bp, synthetic construct
  misc_feature 1..180: note = Description of Artificial Sequence: Synthetic coding sequence
  source 1..180: mol_type = other DNA
atgaccctgcacgccacccggggcgccgccctgctgagctgggtgaacagcctccacgtcgcggatcctgtggaggcagtgctgcagctccaggactgctctatcttcattaaaattatcgaccgcatccacgggaccgaggagggacagcagattctgaagcagccggtttctgaatag

SEQ ID NO: 197655 - DNA, 441 bp, synthetic construct
  misc_feature 1..441: note = Description of Artificial Sequence: Synthetic coding sequence
  source 1..441: mol_type = other DNA
atgaccctgcacgccacccggggcgccgccctgctgagctgggtgaatagtttacatgtagcggatccggtggaggctgtactgcagctgcaagattgctctatcttcattaaaattatagatcgcattcatggaactgaagaagggcagcagatactgaaacagcccgtaagcgagcgactggacttcgtgtgctcttttcttcaaaagaacaggaaacacccgtcttcaccagaatgtctagtgtccgctcagaaggtcctcgagggctcagagctggaattggccaagatgactatgctcctgctctaccattccacaatgtccagcaagagtccccgcgattgggagcagtttgaatacaaaatccaagccgaacttgctgtgattctgaaatttgtgctggatcacgaggatggactcaatttgaacgaagattag

SEQ ID NO: 197656 - DNA, 3267 bp, synthetic construct
  misc_feature 1..3267: note = Description of Artificial Sequence: Synthetic coding sequence
  source 1..3267: mol_type = other DNA
atgcggctgcagaacgccctgaacgagcagcgggtggagttcgccacactgcaggaggcccttgcccacgctctaaccgagaaagagggtaaggaccaggagcttgccaagttacggggcctggaagctgcccagatcaaggagctcgaagaactgaggcagacagtgaagcagctcaaggagcaacttgctaaaaaggagaaggaacacgcttccggctcaggcgctcagtctgaggcagccggccgtacagagcctacaggtcctaagctcgaggctctgcgggctgaggtttcgaagctggagcagcagtgccagaagcagcaggaacaggccgatagcctggagcgcagccttgaagccgaacgcgcatcccgggctgagcgcgactctgccctcgaaacactccagggccaactggaagagaaggcccaagagctcggccatagccagtccgccttagcctccgcacagcgcgaactggccgcttttagaacgaaggttcaagatcacagtaaagccgaagacgagtggaaagcacaagtagctcgcggtcgtcaggaggccgagaggaagaacagcctgatttcatctcttgaggaggaggttagtatcttaaacaggcaagtactagagaaagagggtgaaagtaaagaactgaaacgtctcgtgatggccgagtctgagaaatcacagaaactagaagaacgcctgcgcctcctccaagcagaaacggcctcaaatagcgcccgagctgccgagaggtcctcagctttgagggaggaagtacagtcattgagggaagaagctgaaaagcagcgggtggcttcagaaaatctccgtcaggaactcaccagccaggccgaaagggctgaagaactgggacaagaattgaaagcttggcaggagaagtttttccagaaggagcaggcactgtctaccctgcagctggagcatacgtccacccaggccttggtgagcgaattgctgccagcaaaacacctctgccagcagctgcaggcagagcaggcagctgctgagaaacgccaccgagaggagctcgagcagtccaagcaggccgccggaggactccgcgccgagttgttaagggcccagcgagaacttggtgaattgatacctctgagacaaaaagtggcagagcaagaacggactgcacagcagctgagggctgagaaggccagctatgccgaacagctgagcatgctgaagaaggcccacggcctgctggcggaggagaatagaggacttggtgagagggccaacctgggccggcaatttcttgaggtggagttagatcaggccagggaaaaatacgtacaggagctggctgctgtccgggccgacgccgagacccggttggctgaggttcagcgcgaggcccagagcacagcccgcgaactcgaggtaatgaccgccaaatatgaaggcgctaaagtaaaggtgctagaagagaggcaacgattccaagaggagcgccaaaagctgaccgcccaggtggaggagctctccaagaaactagctgactccgaccaggcctccaaggtgcagcagcagaagctgaaggctgtgcaggcccagggcggggaaagtcaacaggaggcacaaaggcttcaggcccagcttaacgaactccaggctcagctctctcagaaggagcaggctgctgagcactataagctgcagatggagaaggccaaaactcattatgacgcaaaaaaacagcagaaccaggagttacaggagcagttacgaagcctagaacagctgcagaaagaaaacaaggagcttagggctgaggccgaacggctcggccatgaactccagcaggccgggctgaaaacaaaggaagccgaacaaacatgtaggcacttgactgcccaggtcaggagccttgaagcccaggtcgctcacgctgaccaacagctgagggatctaggaaagtttcaagtcgccacagacgccctgaagtccagagaacctcaggcaaaaccgcagctggacctatccatcgactcactggacttgtcatgcgaggaaggcacgcccctcagtattacccgacataaggcactcatgactattatccctgacctgtcccctaataacccccttagcaagctccccaggactcagcctgatggtacaagcgtgcccggggaacccgcgtctcccatttcccagaggctgccacccaaagtggagtccttggaatcactgtattttacacccatccccgcccgttcgcaggcgcccctggagtctagccttgattcactgggggatgtttttttggactcgggccggaagacccgcagtgccagaaggagaacaacccaaattatcaatatcaccatgactaagaaactagatgtggaggagcctgattccgccaactccagcttttactccacaaggtcagctcccgcctcacaggcttcccttcgggcgacaagcagcacccagtctctcgccagactgggatcacctgactatggcaattccgccctcctctctctccccgggtaccggcctaccacccggagttctgcacgcaggagccaagccggtgtgagcagtggcgcaccccctgggcgaaacagcttttacatgggcacttgtcaagacgagcccgaacagctggatgattggaaccgaatcgcggagttgcagcagaggaaccgcgtgtgtcctccacacctcaagacttgttacccactcgagtcccggcccagccttagtctgggcactataacagatgaagaaatgaagacaggagaccctcaggagaccctgagacgtgcgtctatgcagccgatccagattgccgaagggacaggtattaccactagacagcaacgaaaaagagtatcacttgaacctcaccaggggccagggactccagagagcaaaaaagctacgtcctgtttcccaagacccatgacgcccagagatcggcacgaaggccgcaagcaatcaactactgaggctcagaaaaaggccgcccctgcctccaccaaacaggcggaccgtcggcagagtatggccttctcaattctgaacacccccaagaaactgggaaatagcctcctccggcggggggccagcaagaaagccctctcgaaggcatcccctaatacgaggagtggaactcggcggtccccacgaatcgccaccacgaccgcgtctgccgcgactgcagccgcaattggcgctaccccgagggcaaaagggaaggcaaagcactag

SEQ ID NO: 197657 - DNA, 2076 bp, synthetic construct
  misc_feature 1..2076: note = Description of Artificial Sequence: Synthetic coding sequence
  source 1..2076: mol_type = other DNA
atgaccctgcacgccacccggggcgccgccctgctgagctgggtgaacagcctgcatgtggcagacccggtggaggctgtgctacagctccaggactgcagtatatttattaaaattattgaccggattcacgggacagaggaaggtcagcagatactgaaacagcccgtctcagagagacttgactttgtgtgcagctttttgcagaagaataggaaacacccttcatcgccagaatgcctcgtttccgctcaaaaagtcttggaaggctctgagttagagttagccaagatgactatgctgttgctgtatcacagtaccatgtcatccaagagcccacgcgactgggaacagttcgaatacaaaatccaagccgaattggctgtgattcttaagtttgttctcgatcatgaagacgggctaaatctcaacgaagatctggaaaattttctgcaaaaagcccctgtcccttcgacatgttcctccacatttcctgaggaactgagccctccatcacatcaggccaaaagagagatcaggttcttggagcttcagaaagtagcatcaagcagcagtggaaataatttcctttccggctcccctgctagcccaatgggcgatatcctgcagactccccagtttcagatgcgtcgcctaaagaagcaactggctgacgaacgttcgaatagagatgaactagaactcgagctcgcagagaataggaagctccttactgaaaaagatgctcaaatcgccatgatgcagcagcgaatcgatcggttagcactgctcaatgagaaacaggctgcgagccccctggaacccaaagagttggaagaattaagggacaaaaatgagagcctcacaatgcgtcttcacgaaaccctgaagcagtgccaggatcttaaaacggaaaaaagccaaatggaccgcaaaataaaccagttgagcgaggagaacggagacctgagttttaagctgcgggaatttgcctctcacctgcagcaattgcaggacgctcttaatgagctgaccgaggagcattccaaagctacccaggaatggctggagaaacaggctcagctggaaaaagaactgagtgccgctctacaggacaagaaatgccttgaggaaaagaacgagattctgcagggcaagctgtcgcaacttgaagagcacctcagccagttgcaggataaccctccccaagaaaagggtgaagttctgggggacgtcctacagcttgagacgctgaaacaggaggccgcaacactggctgccaacaatacacagctgcaggcacgagtggaaatgctcgaaactgaacgcggccagcaagaggctaagctgctggccgagaggggccactttgaggaggagaagcagcagctcagcagcctgattactgatctgcagagctccatcagtaacttgagccaggccaaagaagagctggaacaagcatctcaggcccacggcgcaagattgacagcgcaggtggcatcacttacgagtgagctcaccaccctgaatgcaaccattcagcagcaagatcaggagctggcaggactgaaacagcaggctaaggagaagcaggcccagctagcacagaccctgcagcagcaagagcaagctagccaaggcctgcgtcaccaagtagagcagctatcatccagcttgaagcagaaggaacagcagctcaaagaggtggcagagaaacaggaggcgacacggcaggatcacgctcagcagctggctaccgctgccgaagagcgcgaggctagtttaagggagagggacgcagcgctgaagcagctggaggcccttgagaaagagaaggcagccaagctggagatcctgcagcagcagctgcaggtggctaacgaggcccgggattctgctcagacgtccgtaacgcaggctcaacgcgagaaagcggagctgagcaggaaagtggaagaattgcaggcctgtgtcgaaaccgctcgccaggagcagcatgaggcccaagcccaggtagccgaacttgagcttcagctgcgctccgaacagcaaaaggccactgaaaaagagtag

SEQ ID NO: 197658 - DNA, 480 bp, synthetic construct
  misc_feature 1..480: note = Description of Artificial Sequence: Synthetic coding sequence
  source 1..480: mol_type = other DNA
atgaccctgcacgccacccggggcgccgccctgctgagctgggtgaattccttacatgtggccgatccagttgaagctgttctgcagcttcaggattgctccattttcataaagattatcgacagaatacacggaacagaggaggggcagcaaatattaaagcagccagtcagcgaacggttagactttgtttgcagttttctccagaaaaaccgcaagcacccgtcatcaccagagtgtcttgtgagtgcacagaaggtgctcgagggatccgagctggagctcgccaagatgacaatgctcctgttgtatcattcgacgatgagtagcaagtctccacgagactgggagcagttcgaatacaaaatacaggctgaactggccgtgatcctcaagttcgttcttgaccacgaggacggtcttaacctcaacgaagacctcgagaactttctgcagaaggcccccgtgcccagcacctag

SEQ ID NO: 197659 - DNA, 219 bp, synthetic construct
  misc_feature 1..219: note = Description of Artificial Sequence: Synthetic coding sequence
  source 1..219: mol_type = other DNA
atgaccctgcacgccacccggggcgccgccctgctgagctgggtgaatagcctacatgtggccgacccagtggaagctgtcctccagctccaggattgctctatcttcataaaaattatagaccgtatccatggtacagaggagggccagcagatcctaaaacaacccgtgtccgaacgactggatttcgtctgcagttttttacagaaaaaccggtag

SEQ ID NO: 197660 - DNA, 252 bp, synthetic construct
  misc_feature 1..252: note = Description of Artificial Sequence: Synthetic coding sequence
  source 1..252: mol_type = other DNA
atgaccctgcacgccacccggggcgccgccctgctgagctgggtgaactccctccacgttgccgatcccgtggaggccgttcttcagctacaggattgtagcatctttatcaaaatcattgaccgcatccatgggacagaagaaggtcaacaaatcctaaagcagccggtgtccgaacggctggattttgtatgtagtttcctacaaaagaacaggaagcaccccagttccccagaatgtcttgtgtcatag

SEQ ID NO: 197661 - DNA, 2559 bp, synthetic construct
  misc_feature 1..2559: note = Description of Artificial Sequence: Synthetic coding sequence
  source 1..2559: mol_type = other DNA
atgaccctgcacgccacccggggcgccgccctgctgagctgggtgaactcactgcacgttgcagatcccgtggaggccgtcctgcaactccaggattgtagtatcttcattaagattatcgatagaatccatggtactgaagagggccagcagatactaaagcagcctgtttctgagagactcgacttcgtatgtagtttccttcagaagaaccgaaagcatccatcctcacctgagtgcttggtgtctgcccagaaggttttggagggcagtgagctcgaactggccaaaatgaccatgttgctgctttatcacagcactatgagcagtaaaagcccacgggattgggagcagtttgaatacaaaatccaggcagagcttgccgtcattttgaagttcgtgcttgaccacgaggatggactgaatcttaatgaggacctggagaacttcctccagaaagctccagtgccatcaacatgcagttccacctttcccgaggagttgtctcctccttcccaccaagccaagcgcgaaatacggttcctggagcttcagaaagtggcttccagcagttcgggtaacaacttcctgtcaggaagcccggcgagtcctatgggagacattctgcagacccctcagttccagatgcggcggttgaaaaaacagttagcagacgaacggagcaacagagatgagctcgagctcgagctggctgagaataggaaacttcttaccgagaaggatgctcaaatagctatgatgcagcagcgtatcgatcgacttgccctcctcaacgaaaagcaggccgccagtcccctggaaccaaaggagttggaagaattacgagacaagaacgaaagcctaaccatgagactgcacgagactttaaagcagtgtcaggaccttaagaccgagaaatcacagatggaccggaaaattaatcagctgtccgaggaaaacggagacttgagttttaagcttagagagttcgcctctcacctgcagcagctgcaggacgccctaaacgaactgactgaggaacactcgaaggcgacacaggaatggttagagaaacaggctcagcttgagaaggagctgtcagccgccttacaggataagaagtgcctggaggaaaagaacgagatcctccagggcaaactgagccagctcgaagagcatctctcccagcttcaggataaccccccacaggagaagggcgaagtgttgggggatgtcctgcagctggagacgctgaagcaggaggcagccacacttgcagcgaataatacccagctccaggccagagtcgaaatgctggagacggagagaggacagcaggaagccaaattgctcgccgagaggggccacttcgaggaagaaaagcagcagttatcctctctcattaccgacttgcagtcatccatatccaacctatcccaggcaaaggaggaactggaacaggcctcccaagctcacggtgcacgcctgacggcccaagtcgcttctctgacctcagagctgaccactctgaatgcgacaatccagcagcaggaccaggaactggccggtcttaagcagcaggcgaaggaaaaacaggcacagctcgcccagaccctgcaacaacaagagcaagcttcccaggggttgagacaccaggtagaacagcttagttctagtttgaagcaaaaagagcagcagctcaaagaggtggctgagaagcaggaagctacaagacaggatcatgctcagcaattggcgactgccgccgaggagcgtgaagccagcttacgcgaacgggatgccgcactgaagcagctcgaagcgctggaaaaggaaaaggctgcaaagcttgaaatcctgcaacaacagctgcaggtcgccaacgaggctcgcgactcagcccaaaccagcgtgactcaggcccagagggagaaggcagagctgagtagaaaggttgaggagcttcaggcctgtgtagaaaccgcccgacaggagcagcacgaggcacaggcccaggtggcggagctcgagctgcagttgcgatccgaacagcagaaagccactgaaaaggagagagtcgcacaggaaaaagaccagctccaggagcagcttcaggcccttaaagagagcttgaaagtgaccaaagggtcattggaggaggagaaacgtcgtgctgcagacgctttagaagaacagcagcgctgtatttcggaactgaaagccgagacccggtcactggttgaacagcataaaagagaaaggaaggagcttgaggaagagagggcgggccgaaaaggacttgaggcccgactacagcaactgggagaggcccaccaggccgagaccgaggtgctgcggagagagctggccgaggctatggcggcacaacacacggcggaaagcgagtgtgagcaactggtgaaagaggtggctgcttggagagagcggtatgaagatagccagcaagaggaggctcagtacggcgccatgttccaggagcaattgatgacgctgaaagaagagtgcgaaaaggcccgccaggagcttcaggaggcctag

SEQ ID NO: 197662 - DNA, 525 bp, synthetic construct
  misc_feature 1..525: note = Description of Artificial Sequence: Synthetic coding sequence
  source 1..525: mol_type = other DNA
atgaccctgcacgccacccggggcgccgccctgctgagctgggtgaacagtttgcacgttgcagacccagtggaggcggtgctgcaactccaggattgttcaatatttatcaagatcatcgaccgcatccacggcacagaggaaggacagcagatcttgaagcagcccgtgagcgaaagactggactttgtttgtagcttcctacagaaaaatcgcaagcaccccagcagccccgaatgcctggtgtctgctcaaaaagtgctggagggatcagagttggaactcgctaagatgacgatgcttcttctgtaccacagcacaatgtcatcaaaaagcccacgagactgggaacagttcgagtataagattcaagccgagctagctgtgatcttgaaattcgtactggatcatgaagacggcctgaatctcaatgaggatctcgaaaatttcttgcagaaggcacccgtccccagtacatgttcatccaccttccctgaggaactctcacccccgagtcatcagtag

SEQ ID NO: 197663 - DNA, 606 bp, synthetic construct
  misc_feature 1..606: note = Description of Artificial Sequence: Synthetic coding sequence
  source 1..606: mol_type = other DNA
atgaccctgcacgccacccggggcgccgccctgctgagctgggtgaactctctgcacgtcgcagaccccgtggaggcggtgctgcagctgcaggattgttctatcttcatcaagattatcgaccgcatccatggcactgaagagggccaacagatcctgaagcagccagtctcggagcggctggacttcgtgtgctcattcctgcagaaaaacaggaaacatccaagcagtcccgaatgtctagtatctgcccaaaaagtcctggagggctctgaacttgagctggctaaaatgacaatgttgcttctgtaccattcgacgatgtcatctaaatcacctagagattgggaacagttcgagtacaaaatacaggccgagctcgccgtgatcctcaaatttgttctggaccacgaggatgggctcaatctcaatgaagatctggaaaactttctgcagaaggcacccgttccatccacgtgtagtagcaccttcccagaggaactgagcccaccttcccatcaggctaaacgtgagatcagatttcttgagctgcaaaaggttgcatcctcatcatctggcaataattttctatctggttccccttag

SEQ ID NO: 197664 - DNA, 480 bp, synthetic construct
  misc_feature 1..480: note = Description of Artificial Sequence: Synthetic coding sequence
  source 1..480: mol_type = other DNA
atgaccctgcacgccacccggggcgccgccctgctgagctgggtgaactcccttcatgtggccgacccagtggaagcggtcttgcagctccaggattgctcgattttcattaagatcatcgatcgcatccatggtacggaggaggggcagcagattcttaagcagcccgtctctgagcgcttggatttcgtctgctcattccttcagaagaaccggaagcacccctcctctcctgagtgccttgtgtcagcccagaaggtgcttgaaggttccgagctggaacttgcaaagatgaccatgctcctgttataccacagcaccatgagcagcaagagcccaagggactgggaacaattcgaatataaaatccaagccgagctggctgtcatactaaaatttgtcctggaccatgaagatggcttaaatctgaatgaggacctggagaacttcctccagaaggctccggtgcccagcacctag

SEQ ID NO: 197665 - DNA, 663 bp, synthetic construct
  misc_feature 1..663: note = Description of Artificial Sequence: Synthetic coding sequence
  source 1..663: mol_type = other DNA
atgaccctgcacgccacccggggcgccgccctgctgagctgggtgaactcactgcatgttgccgaccctgtggaggcagtcctacagctgcaggactgctcaatcttcatcaagatcatcgaccgaatacacggcacagaggagggtcagcagatcttgaaacaacctgttagtgaaaggcttgattttgtgtgctccttcctccagaagaatagaaagcatccttcttcacctgaatgcctggtatctgcgcaaaaagtcttagaaggctctgagctggaactggccaagatgactatgctcttgctataccattcaactatgtcaagcaagtccccaagggactgggagcagtttgaatataaaatccaggcagagctggctgtcatcctgaagttcgtgctggaccacgaagacggtctgaacttgaacgaagacttggagaattttctccagaaagcccctgtcccaagcacctgctcctctaccttcccggaggaactgagtcctccgtcacatcaagctaaacgggaaatccgctttctagaactacaaaaagtggcatcttccagctctggcaataacttcctcagcgggtcccccgcgtctcccatgggagacatcctgcagactccgcagtttcaaatgcgaaggctgaagtag

SEQ ID NO: 197666 - DNA, 171 bp, synthetic construct
  misc_feature 1..171: note = Description of Artificial Sequence: Synthetic coding sequence
  source 1..171: mol_type = other DNA
atgaccctgcacgccacccggggcgccgccctgctgagctgggtgaactcactgcacgtagcagatccggtggaagcagttctgcaacttcaggattgttcgatattcatcaagattattgaccgaattcatggcaccgaggagggccagcaaatactcaagcaaccctag

SEQ ID NO: 197667 - DNA, 1053 bp, synthetic construct
  misc_feature 1..1053: note = Description of Artificial Sequence: Synthetic coding sequence
  source 1..1053: mol_type = other DNA
atgttctgctgcctgggctacgagtggctgagcggcggctgcaagacctggcattcggcatgggtcatcaataccttagccgaccaccgacacagagggactgatttcggaggttcaccctggctgctcattatcacagtgttccttcggagttacaaattcgctatcagcctgtgcaccagctatctttgtgtctccttcctaaaaaccatttttccttcacagaacggtcacgatggaagcacggacgtgcagcagcgggcgcgtcgcagcaacagacggcggcaggagggcatcaagatcgtgctggaggatatatttacactgtggcggcaagtggaaacaaaggtgcgggctaagatccgcaaaatgaaagtgactacaaaggtgaacaggcatgacaagatcaatggtaagaggaagacagcgaaggagcacctaagaaaactatccatgaaggagcgggagcacggcgaaaaagagagacaggtgagtgaagcagaggagaacggcaagcttgacatgaaggagattcacacctatatggaaatgtttcaaagagctcaagcccttcgcagaagggcggaggattactacagatgcaagatcacgcccagcgctcggaagcctctttgtaatcgggttcgcatggctgcggtggagcataggcattcctctggcttgccctactggccatacctgactgctgagacccttaaaaacaggatggggcaccaaccacctcctccaactcagcaacacagcattatcgacaacagcctgtcccttaaaacaccttccgaatgcctgctgaccccccttccccctagcgcattaccaagtgcagacgacaacctaaaaacacccgcagaatgtctgctgtatcccctgccacccagtgccgacgataaccttaaaactcccccggagtgtctcctgacgccactgccccctagcgcaccaccctctgtagatgacaaccttaagacacctcccgaatgcgtgtgttctcttcctttccaccctcagcgaatgatcataagcagaaactag

SEQ ID NO: 197668 - DNA, 1053 bp, synthetic construct
  misc_feature 1..1053: note = Description of Artificial Sequence: Synthetic coding sequence
  source 1..1053: mol_type = other DNA
atgttctgctgcctgggctacgagtggctgagcggcggctgcaagacctggcattccgcatgggtcattaacacattggctgaccataggcacagaggtacagatttcggtggcagcccctggttactgattatcacggtctttttgagatcctacaagtttgcgatctccttgtgcaccagctatctgtgcgtcagtttccttaagactatcttcccatcccagaacggccacgacggtagcacagacgtgcaacagagggctcgcagaagcaatagaaggcgtcaggaaggaatcaaaatagtgctagaagatatcttcactctgtggcgccaagttgagactaaggtcagggctaaaattaggaaaatgaaggtcacaaccaaagtgaatagacacgataagatcaatggtaagagaaagaccgccaaggagcacctgcggaagctctctatgaaggaaagggaacacggggaaaaggaacgacaggtttccgaggccgaggaaaatggcaaactggacatgaaagagatccatacctacatggaaatgttccaaagagcccaggccctgagacgaagggccgaggattactacagatgcaaaatcacacccagtgcacgtaaacctctgtgcaaccgggtgcgcatggccgccgtggagcatcgccacagcagtggactaccctactggccctatttgactgctgaaacgctcaaaaataggatgggacaccagccccccccaccaacccagcagcatagtataatcgacaactccctctctctgaagacaccgtccgaatgcctgttgacacccctgcctcctagtgccctgccttctgctgatgacaaccttaagacccccgccgagtgcctactttacccccttcccccgtcagccgacgacaatcttaagaccccccccgagtgtctactgacacctcttccaccttcagctccaccctccgttgatgacaaccttaaaactccccccgaatgcgtttgctccctcccattccacccacagcgaatgatcatttccaggaactag

SEQ ID NO: 197669 - DNA, 1431 bp, synthetic construct
  misc_feature 1..1431: note = Description of Artificial Sequence: Synthetic coding sequence
  source 1..1431: mol_type = other DNA
atggccagccccttcagcggcgccctgcagctgaccgacctggacgacttcattggcccgtcgcaggagtgtatcaagcctgtgaaagtggaaaagcgagcagggtctggggtcgccaaaattcgcatcgaagatgacggctcctattttcaaatcaaccaggacggcggcacacgtaggcttgaaaaagcaaaggtgagcctcaatgactgcctggcctgtagtggatgtataacatccgccgagacagtcctcattacgcaacaaagccatgaggaacttaagaaggtcctcgatgcgaacaagatggccgctccctcccaacaacggctcgtggtggtcagcgttagccctcagagccgggcgtctctggcggcacggttccagttaaacccaaccgatacggccaggaagcttacctcgttttttaaaaagatcggcgtgcacttcgtgttcgatactgccttctctagacacttctcattactcgagagtcaacgcgagttcgtgcggagatttaggggacaagccgattgtcggcaggccctgcctcttttggcgtccgcttgccctggctggatatgctatgctgagaagactcatggtagttttattttaccacacatttctaccgctcggtctcctcaacaagtgatggggtctctggtaaaagactttttcgcgcagcagcagcacctgaccccagataagatatatcatgtgaccgtgatgccatgctacgataagaagctggaagcctccaggccagacttttttaaccaggaacatcagacaagagacgtggactgcgtcctcacaacgggtgaggtgttccggctcctcgaagaggaaggcgtaagcttaccggacctcgaacccgcccctttagactccctctgttcaggagcaagcgcggaggaaccaacttctcacagaggggggggcagcggtgggtacctggagcatgtcttcaggcacgcagctcgcgaactatttggcatccacgtagcagaggtaacttacaagccactgcgcaacaaggactttcaggaagtaacactggagaaagagggccaggtcctcctccacttcgccatggcgtacgggtttcgaaacatacaaaatctggtccagcgactgaagagggggcggtgtccgtaccactacgtggaagtgatggcttgccccagcggatgcctcaatgggggagggcagttgcaggcccccgatagacctagcagggaacttctgcagcatgtagagagactgtacggaatggttagggcggaagcaccggaggacgcacccggagtgcaagagctgtacacccactggcttcaggggacggacagcgagtgcgccgggagactgcttcacactcagtaccatgcagttgagaaagcctctactggtctaggcattcgctggtag

SEQ ID NO: 197670 - DNA, 567 bp, synthetic construct
  misc_feature 1..567: note = Description of Artificial Sequence: Synthetic coding sequence
  source 1..567: mol_type = other DNA
atggccagccccttcagcggcgccctgcagctgaccgacctggacgattttatcggccctagtcaggagtgcatcaagcctgtgaaggtagagaaaagagctggttccggcgtcgcgaaaatccggattgaggatgacggtagctattttcagatcaaccaggacggaggcacccggcggctggagaaagctaaagtgagtctcaatgattgcctcgcctgttcagggtgtatcacctctgctgagacagttctgattacccagcagagccatgaggagttaaagaaagtgttggatgctaataagggctgtacctctagcagtacacctccttcccagggcacctcagcatcgtggagggctagcgaatcactatgtggcgattcggaggataggcccaccgcggaccgaaggtgtccttgttggccccttcccgcacaggccggttccgccatgcccaggagattgactgcagcctcatcgtccccaacatctgcaccccctggccctagatctagatcctgggcgccttggagtaggacatcttcaccctcaagcagcacttag

SEQ ID NO: 197671 - DNA, 1125 bp, synthetic construct
  misc_feature 1..1125: note = Description of Artificial Sequence: Synthetic coding sequence
  source 1..1125: mol_type = other DNA
atggccgcccccagccagcagcggctggtggtggtgagcgtgagcccacagagccgggcctcgcttgcagcgagattccaactcaatccaaccgacaccgctcgcaaactcacgagctttttcaaaaaaatcggggtgcactttgtgttcgacaccgccttctccaggcacttctcccttctcgagtctcagcgagagtttgtccgaagatttagggggcaagcagactgcaggcaggccctgcccctgctcgcgagtgcttgccccggatggatctgttatgccgagaaaacacatgggagctttatcttacctcatatttcaactgcccgcagcccccagcaagttatgggcagtctggtgaaggacttcttcgctcagcagcagcatctaacccccgacaagatctaccatgtcacagtgatgccgtgttatgacaagaaattggaggcgtctaggccggacttctttaaccaggagcaccagacccgtgacgttgattgtgtcctgaccaccggcgaagtattcagactgttagaagaggaaggcgtatcattgccagaccttgagccagcccctttggatagcctgtgtagcggggcctccgctgaggagcccaccagtcatcggggcggagggagtggtggatatttggaacacgtcttccggcacgcagccagggagcttttcggcatacacgtcgccgaggtgacctataagccactgaggaataaggacttccaggaggtgacactggagaaagagggccaagttctgttacacttcgccatggcatacgggttcagaaatattcagaacctggttcaaaggttaaagagaggaaggtgcccataccactatgttgaggtcatggcatgtcccagcggctgtctaaatggtggcgggcagcttcaggctcccgacagaccttccagagaactcctacagcatgtggagagactgtacggaatggttagagcagaggcccccgaggatgcacccggagtccaggagctttacactcactggctccagggtaccgattctgaatgcgctggacgactgctgcatacacagtaccacgctgtggaaaaggcatccacaggtctagggatcaggtggtag

SEQ ID NO: 197672 - DNA, 4284 bp, synthetic construct
  misc_feature 1..4284: note = Description of Artificial Sequence: Synthetic coding sequence
  source 1..4284: mol_type = other DNA
atgctgctgcccagcgacgtggcccggctggtgctgggctacctgcagcaggaaaatctcatcagtacatgccaaacatttattcttgagtccagtgatctcaaggagtacgccgaacactgcactgatgagggtttcatcccagcctgtctgctgtcgttattcggcaagaatcttacaaccattctgaacgagtatgtcgcgatgaaaacaaaagagacttccaacaatgtgccagcaataatgagctctctgtggaagaaactggaccacacactatcccaaatccgttccatgcaaagtagccctcggttcgctggttcccagcgggcaagaaccaggaccggcatcgctgagatcaagcgccagcgcaaactcgcgagtcagactgctcctgcctccgcggaactgcttaccttgccatacctgtcaggacagttcacgacccccccttccacgggaacccaggtgactaggcccagcggccagattagcgacccctccagaagttatttcgtggttgttaaccactctcagagccaagatactgttaccaccggcgaggcactcaatgttatccctggagcccaggagaagaaagctcacgcatccctaatgtcgccagggaggagaaaaagcgagagtcagcgcaaaagcacaacgctgtctggcccacattctaccattcgcaatttccaggatcccaacgcgttcgccgtagagaagcagatggtaatcgagaatgcaagggagaaaatcttatctaacaaatccctgcaagagaaactggctgagaacattaataaatttcttaccagtgataataatatagctcaagtccccaagcaaaccgataacaatcctacagagcccgaaacatcaatagacgagttcctgggattgccgtctgagattcacatgagcgaagaggctatccaagacattctggaacaaaccgaatcggaccctgcatttcaggccttgttcgacttatttgattatgggaaaacaaagaacaacaaaaatataagccagagtattagcagccagcccatggagtccaatcctagcatcgtattggccgacgaaactaacctggcagtcaagggctcctttgagactgaggagtctgacggacagtcagggcaaccggcattctgcacgagttaccaaaatgatgacccgctgaacgcacttaaaaatagcaataatcacgacgtcctgcggcaggaggaccaggagaatttttctcagattagcacttctatccaaaagaaagcttttaaaacggctgtgcccactgaacagaagtgcgacattgacattacattcgagtcggttcctaaccttaatgatttcaaccaaagaggcaatagcaacgctgagtgcaatccacattgcgcagaactctataccaaccagatgagtacggagacagagatggccataggcatcgaaaagaatagcctctcttctaatgtgccaagcgagtctcaactccagccagatcagcccgatataccaattacaagttttgtgagtcttggctgcgaagcgaacaacgaaaatctgattctgtccggtaaatccagtcagcttctctctcaggacaccagcctaacaggcaagccatctaagaaaagccagttttgcgagaactcaaatgataccgtgaaactcaagattaatttccacggaagcaaatcttctgattctagtgaggtgcataagagcaaaatcgaaataaacgtgcttgaacccgttatgtcacaactctccaactgtcaggacaattcctgcttacagtccgagatactacctgtgtcggtagagtcttctcatttgaatgtgagcggccaagtggagatccacctaggagactcactttcaagtaccaagcagccgtcgaacgattccgctagcgtggagctcaatcacacagagaatgaggcccaggccagcaagtccgagaactctcaggagccgtcaagcagcgtgaaagaggaaaataccatcttcctgtctttgggcggaaatgcaaattgcgagaaggtcgccttgactccaccagaaggcacccctgtagaaaactcacatagtctgcctccagaatccgtctgtagtagtgtaggcgactctcaccctgagtcccagaataccgacgacaaaccgtcatctaataattccgcggaaattgatgcaagtaacatcgtgtcacttaaggtaatcatcagcgacgatccattcgtgagcagcgatacagagctgaccagtgcagtgtcctctatcaacggagaaaacctgcctaccataattctctcttcacccactaagagtcctaccaaaaacgctgagctcgttaaatgcttgtccagcgaagaaacagtgggcgccgtggtttacgctgaggtgggcgatagtgctagtatggagcagtctctgctgaccttcaagtcagaagactccgcggtaaataatacacagaacgaagacggcatcgcctttagcgccaacgttacaccctgtgtttcaaaagacggtggctatattcaactcatgcccgcaacttccacagcgttcggcaattccaataacatcctgatcgccacttgcgtgaccgaccctaccgctctagggacgtcggtctcccagtccaacgtcgttgtccttccaggtaattctgcgccgatgaccgctcagcccctcccacctcagctgcagacaccacccagaagcaatagtgtatttgccgtgaatcaggctgtgagccctaacttctcccagggctccgctattattatcgcctctcctgttcagccagttctacaggggatggtcggtatgatcccagtctctgtagtgggtcaaaacgggaataacttttctacccctccccgccaggtgcttcatatgcccctgacagccccagtgtgcaatcggagtattccacaattccccgtgccccccaaatcccagaaggcccaggggcttcgtaataaaccctgcatcggcaaacaggtaaataatttggtagacagctcaggacattccgtggggtgccacgcccaaaaaaccgaggttagcgataaaagtattgcgaccgacttaggcaagaagagcgaggagaccaccgtcccattcccggaggaaagcattgtgccagctgcgaagccgtgccacaggagggtactctgctttgactcaactaccgcgcctgttgctaatacacaaggtcccaaccataagatggtgagtcaaaacaaagagagaaacgcagtaagctttcccaatcttgacagtccgaatgtcagcagcaccctgaaaccaccatccaacaatgcaatcaagcgcgagaaggagaagccacccctgcctaagatcctttccaaatcagagtccgcaataagccgccacactacgattagagaaacacagtctgagaaaaaggtctcacctactgagatcgtcctggagagcttccacaaagccactgccaataaagagaacgagctctgtagtgacgtggagagacagaagaatcccgagaattccaaattgagcattggccagcagaacggaggactgcggtctgagaagagcattgcttctttgcaagagatgacaaaaaagcagggcacatccagcaacaataagaacgtgctctctgtcgggaccgccgtgaaggatctgaagcaggagcagaccaagtcagcttcatcactgataaccaccgagatgctacaggatattcagagacatagcagcgtctccagactggcagacagcagcgacctacctgtcccaaggacgcctggaagtggtgccggagagaagcataaggaagagccgatcgatatcatcaaagccccctcatcccggagattttctgaggatagttctacctcaaaagttatggtaccgcctgtaactccagatctgcccgcctgctcaccagcctccgaaaccggctctgaaaacagcgtgaacatggcagcacacaccctaatgatcctgagtagagcggccatcagccggactacctcagctaccccactgaaagacaatactcagcagttccgggcgtccagcagatcaaccacaaaaaaaaggaaaattgaagagttagacgagcgagagcgaaactcaagaccctccagcaaaaatctcacgaatagttcaattccaatgaaaaagaagaaaattaagaagaaaaagctgccaagttcctttccagctggtatggatgttgataaattcctactttcactgcactacgacgagtag

SEQ ID NO: 197673 - DNA, 7284 bp, synthetic construct
  misc_feature 1..7284: note = Description of Artificial Sequence: Synthetic coding sequence
  source 1..7284: mol_type = other DNA
atgcccctgaagacccggaccgccctgagcgacgaccccgacagcagcacctccaccctgggcaatatgctagaactaccggggacgtcgagctcttccacctcacaggaactccctttttgccagcctaagaaaaaatccacccccctgaagtatgaagtgggggacttaatttgggcgaagtttaaacgccgtccctggtggccttgtcgcatttgctccgatccgctcataaacactcatagtaaaatgaaggtcagcaaccggagaccctatagacagtattacgttgaagcttttggcgatccgtccgagcgcgcttgggtggccggcaaagctatcgtgatgtttgagggtcgccaccagtttgaggagcttcctgttctaaggcgaagaggtaaacagaaagagaaagggtatcggcacaaagtaccccagaagatcttaagcaagtgggaagcttctgtgggtctggccgagcaatacgacgtgccaaaaggctctaagaataggaaatgcatccctgggtctattaaactggattccgaggaggacatgccttttgaggattgcaccaacgacccagaatcagagcatgacctgctgctcaacggatgcttgaaaagcttagcattcgattcagagcattcagccgacgagaaggagaagccttgcgcaaagtctcgcgcaaggaaatccagcgacaacccaaagagaacctccgtcaaaaaggggcacattcagtttgaggcgcataaggacgagcgccgcggaaagatacccgaaaacctgggactaaatttcatcagtggggatattagcgacacgcaggcctctaatgagctctccaggatagcaaactccctcactggctctaatacagctccgggttccttcctgttctccagctgtggcaagaacaccgcaaagaaggagttcgaaacctctaacggtgattcactccttgggctacccgaaggcgccctaatctctaaatgttcccgagagaagaacaaaccccagcgaagcctcgtgtgtgggagcaaggtgaagctgtgctacatcggggccggcgacgaggagaagaggtccgattctatctccatttgtacaacatccgacgacggctcaagcgacctggaccctatcgagcacagttctgaatccgataactctgtgctggaaattcctgatgcttttgacagaactgaaaatatgctgtccatgcaaaagaacgagaaaataaaatactcaagatttgccgccaccaatactagagttaaagcaaagcaaaaacccttgatttccaactcacacacagaccaccttatgggatgcactaaaagcgcagaacctggaacggagacctcccaggtgaatctctccgatctcaaggcttctactctagtgcataagccccagtccgacttcactaatgatgctctctcacccaagttcaatctcagcagtagcatcagctccgaaaactctcttatcaaggggggggccgccaatcaggcattgctccattcaaagagcaaacagcctaaattccgctctataaagtgcaagcacaaggagaaccctgttatggcggagccaccagtaattaacgaagagtgctcactgaagtgttgctcctcagacacaaagggctctcctctcgctagtattagcaagtctggcaaagtcgacgggcttaaacttctcaacaacatgcatgagaagactcgcgattccagcgatatcgagacggccgtggtcaaacatgtcctgtctgagctgaaagagctgtcctacaggagtctgggcgaggatgtcagtgacagcggtacctcaaagccgtctaaaccactcctattttcaagtgcctcgagccaaaaccacatccccattgagccagactataagttcagcaccctacttatgatgttgaaagacatgcacgactcaaagacgaaagaacaaagacttatgaccgcccaaaatttggtgagctataggtccccaggtcgcggagactgttctacaaactctcctgtaggcgtaagcaaggtgctcgtttctggggggagcacccacaatagcgagaagaagggggatgggactcagaatagcgctaacccctcgcctagcggaggggatagcgccctttcgggggagctgtccgcctctctgccagggcttctctctgataagagagatctacctgcttctggtaagagccggagcgactgtgtgacgcgcagaaattgcgggaggtctaagccatcctccaagctcagggacgccttctctgctcaaatggtaaagaataccgtcaaccggaaagctctgaagactgagagaaaacggaaactcaatcagttgcctagcgtgactctcgatgctgtgcttcaaggggaccgcgaaagagggggtagtcttcgcggcggcgcagaggatccctcaaaggaggacccactacagataatgggccatctgacctccgaggatggggatcacttttccgacgtgcacttcgattctaaggtgaagcagagtgatccaggaaagatcagcgagaagggtttgagtttcgagaacggcaagggaccggagctcgattctgtgatgaactcagagaacgatgaacttaacggggtaaatcaagtcgtgcctaagaaaaggtggcagcggctgaatcaaaggcggactaaaccgcggaagcggatgaacaggttcaaggaaaaggaaaatagcgaatgcgctttcagagtgttgttacctagcgaccctgtgcaagagggccgggacgagtttcctgaacaccggactccctcagcatctatactggaagaaccattgaccgagcagaaccacgctgactgtcttgactccgccggcccacgactgaacgtgtgcgataaaagcagcgctagcatcggcgacatggaaaaggagccaggcatcccaagcctgactccacaggctgagctgcctgaacccgctgtcagaagcgaaaagaagcgcctcaggaagcccagtaagtggttgctagagtacaccgaagaatacgatcaaatattcgcacctaaaaagaagcagaaaaaggtgcaggagcaggtgcacaaagtctcatcaaggtgcgaggaagagtccctcctggcccgcgggaggagcagcgcacagaacaagcaggttgacgagaactccttgattagtactaaagaggagccgcccgtgctggaaagggaggctccattcctcgagggaccactcgcacagtccgaactcggaggtggacatgctgagctgccacagctgactctgtctgtgcccgtagcaccagaagtgtccccacgccccgccctggagtccgaggaactgctcgttaagactcctgggaactacgagtccaagaggcagcgaaaaccaacgaaaaaacttctggagagcaatgatctggatcctggatttatgcccaaaaaaggggacctgggtcttagtaaaaagtgttatgaagccggccacctggagaacggtatcactgaatcttgcgccaccagttattccaaggattttggagggggaacaacgaaaatcttcgacaagcctcgcaagcgtaagaggcagcggcatgcagctgcaaagatgcagtgtaaaaaggtgaagaacgacgactctagcaaggaaatcccagggtctgagggagagctgatgccacaccggaccgctaccagtccaaaagaaacagtggaggaaggagtggagcatgatccgggaatgccggcctccaaaaagatgcagggggagaggggaggaggcgctgccctgaaggagaacgtctgccagaattgcgagaagctgggagaattattactttgcgaggcacaatgctgtggcgcctttcatctggaatgcctgggactcactgagatgcctagaggcaagttcatatgtaacgaatgccgtaccgggatccatacttgttttgtctgcaagcagtctggggaagacgtgaagagatgtcttttacccctgtgtgggaagttttaccatgaggaatgtgtgcagaaatacccgcccacggtcatgcaaaacaagggcttcaggtgctctttgcatatctgtataacctgccacgctgcgaacccagccaatgtctccgcatctaaaggtaggttgatgcgctgcgttagatgccccgtcgcttaccacgccaatgatttttgtttggccgctgggagcaagattctcgctagcaattccatcatatgcccaaaccactttactccccggcgaggatgtcgtaaccacgagcatgtcaacgtgtcatggtgctttgtgtgcagtgagggtggtagcctcctctgttgcgactcttgtcctgctgcatttcatagagagtgcttaaacatcgatattccagagggtaactggtattgtaatgactgcaaagcgggcaaaaagccgcactatcgcgaaatcgtgtgggtgaaagtcggtagataccgatggtggcccgccgaaatatgtcacccacgagccgtgccttcaaacattgataaaatgcgacacgacgtaggagaattccctgtgctattcttcggaagcaacgattacctatggactcaccaggcccgggtctttccctacatggaaggagacgtttcaagcaaagacaagatgggaaaaggtgtcgacggcacatacaaaaaggcgctacaggaggccgccgcgcggttcgaggagctaaaagctcagaaggagctgcgccaactgcaggaagaccgcaaaaatgacaaaaaaccacctccatataaacatatcaaagtgaataggcccattggaagagtgcagatttttaccgctgatttgtccgaaatacctcgatgtaattgtaaggcgaccgacgagaacccatgcggcatcgactcggaatgtattaataggatgcttctctatgaatgtcacccaacagtgtgccctgcgggagggaggtgccaaaatcagtgcttctccaagagacaatatccggaggttgagattttcaggacacttcagagaggttggggcctccggactaagaccgatattaagaaaggggagttcgttaacgagtatgtgggcgagctgatcgatgaggaagaatgtcgtgcgcggattaggtatgctcaagagcacgacataactaacttctatatgcttaccctggacaaagatcggattatcgatgccggtcccaaagggaattatgccaggttcatgaatcattgttgccaacctaactgcgaaacccagaaatggagtgtgaatggggatacacgggtgggactgtttgcactgagcgatatcaaagcagggacagagttaactttcaattataatctcgaatgtctgggcaacgggaaaaccgtgtgcaaatgcggggcccccaattgctcaggcttcctgggagtgaggcctaaaaatcaacccatcgcaactgaagaaaaatcaaagaagtttaaaaagaagcaacaggggaagcgaaggacacagggagagatcactaaggagagggaagatgaatgtttctcttgcggcgatgccggccagttagtctcctgcaagaagcccggctgtccaaaggtgtaccacgccgattgtcttaatctcaccaaacgcccggccggaaagtgggaatgcccttggcaccagtgtgacatttgcgggaaagaagccgctagtttttgcgagatgtgtcccagctccttctgtaagcagcacagggagggaatgctttttatctcaaagctggatggccggctgtcttgtaccgagcatgacccttgtggccccaaccctctagaacctggcgaaatcagagaatacgtgccaccacccgtgcctctgccccctggaccttccacacatctcgccgaacagagcacaggtatggcggctcaagcgccaaagatgtcagacaagccccccgctgatacaaaccagatgttatcattgtccaagaaagcgctggccgggacctgtcagcgcccactactgccagagcgccccctcgagcgaaccgacagtaggcctcagcccctggataaggtgagggatctggcggggtcaggcacaaaaagccaaagtctggtctcaagccagagaccactcgaccgccccccggcagtggctgggcctcggccacagctctcagataaaccgagtcccgtcacttctcccagctcctccccgagcgtcaggagccaacctttggagagaccacttggcactgccgaccccagattagacaagtcgataggagctgcatctccacggcctcaaagcctggagaaaacatctgttccaacaggattacgcctgccccctccagaccggcttctcatcactagttcccctaagcctcagaccagcgatcgtcccacagataagccacatgcgagcttgagtcagaggttaccacctcccgaaaaagtgctcagcgccgtggtgcaaacccttgttgccaaggagaaagcgctccggccagtggatcagaatactcagtcaaaaaatagagccgcgctggtcatggaccttattgatttgacaccacgccaaaaggagcgtgccgcgtcaccacaccaagttactccccaggccgatgaaaaaatgcctgtactggagtcgtcctcttggcccgcgtctaagggcctgggacacatgcctagggccgtggagaagggttgtgtatccgaccctttgcagacaagcggcaaggcagccgcccccagcgaggacccctggcaggcagttaaatctttgacccaggcccgcttgttgtcacaaccccccgctaaggccttcttgtacgagccaacaacccaagcctcaggccgcgcgtcggcgggtgcagaacaaacccctggacccctgtctcagagccccggtctggtcaaacaagccaaacagatggtgggcggccagcagcttccagcattagcagccaagagtggccaatcattcagatccctaggcaaggcaccggctagcctgccaactgaagagaaaaagcttgtgactactgaacagtctccctgggcgttggggaaagcaagctcaagggcaggactgtggcctattgtcgccggtcagacactggctcagtcatgctggtccgcaggctccactcagacactagcacagacatgctggagtctgggccgtgggcaggaccccaagcccgaacagaacactttaccagccttaaaccaggcaccctccagccataaatgcgccgaatccgaacagaaatag

SEQ ID NO: 197674 - DNA, 7284 bp, synthetic construct
  misc_feature 1..7284: note = Description of Artificial Sequence: Synthetic coding sequence
  source 1..7284: mol_type = other DNA
atgcccctgaagacccggaccgccctgagcgacgaccccgacagctccacatccacactcggtaatatgctggaactacccggaacatcctcttccagtaccagccaggaacttccattttgccagccaaaaaagaagagtaccccgttgaaatatgaggtgggcgatctgatttgggccaagttcaagcggaggccttggtggccctgccgtatctgcagcgatccccttataaacactcattccaagatgaaggtttcaaatcgaaggccctacagacagtactacgtcgaggcctttggcgacccttcagagcgcgcctgggttgcgggaaaggcaattgtgatgtttgagggaaggcaccagttcgaagagctgccagtgctgcgcagaaggggcaaacaaaaagagaagggctaccgtcacaaggtgccccaaaagatattgagcaagtgggaggcaagcgtcggactggccgaacagtacgatgttcccaagggttccaaaaaccgaaagtgtatacccgggtccataaagcttgattccgaagaagatatgccattcgaggactgtactaatgatcctgaaagcgaacacgatttgctgctgaacggatgtctgaaatctctcgcctttgattcagaacactctgctgacgagaaggaaaagccttgtgccaaatctagagccagaaaatcctctgacaatcctaagcggacaagcgtcaagaaaggccatatacagtttgaggctcacaaagacgaacgacgtggaaagatacctgaaaatttgggactgaactttatctccggcgacatcagtgacacccaggcctctaacgagctttctaggattgcaaactcactcaccggaagcaacacagccccaggttcgtttctatttagcagctgcggaaaaaatacagccaaaaaggagttcgaaacttctaacggagacagtctgttaggccttcctgagggcgcactgatctctaagtgctcacgggagaaaaataaaccccagcggtctctggtttgtgggtctaaagtgaagctgtgctacataggggccggagatgaagagaagcgctccgattcaattagtatctgtactacttccgatgacggcagcagtgacctcgatcctattgagcactctagcgagtcagataacagtgtgttagagatacctgatgctttcgacaggacggagaacatgctgtctatgcagaagaacgagaagatcaagtactccaggttcgctgctacaaacactagggtaaaggctaagcagaaacctcttatcagtaactctcatactgaccacctcatgggctgcaccaaatctgctgagccgggaacagagacatcgcaagtaaacttaagcgatctcaaagcaagcacactcgtgcacaagccacaatctgacttcactaacgatgctctgtccccgaaatttaacctctcgtcctctatcagtagtgaaaattctcttatcaaaggcggggccgccaaccaagcgctgctgcacagtaagtcaaaacagcctaagttccgtagcatcaagtgcaagcacaaggaaaaccctgtgatggccgagccaccagtgatcaacgaggaatgcagtctgaaatgttgttccagcgatactaagggctccccactcgcctctataagcaaatcggggaaagtggacgggctgaagctccttaacaacatgcacgagaagaccagggattccagcgatattgagaccgccgtagttaagcacgtactctctgagctgaaggaattgagttaccgttctctaggcgaagacgtgtcggattccgggacgagcaaaccctcgaagccacttttgttttcaagtgcatcgagccagaatcacattccgatagagcccgattacaagttttcaacactgctgatgatgctgaaggatatgcacgactccaaaacgaaagagcaaagactgatgactgcccagaatctggtgtcttatcgctcccccgggcgaggtgactgttctacgaatagcccagtcggagtcagtaaggtgctcgtgagtggcggaagtacacataattcggagaaaaagggcgatggaactcagaattcagcgaatccgtctccttcgggcggcgacagtgcactctcaggagaactgagcgcctctctgcctggacttctgtctgacaaacgggacctgcctgcttctggcaaatccaggtctgactgcgttactaggcgtaactgtgggagaagtaagccatcctcaaagctcagggatgcattttctgcccagatggtgaagaacactgttaacaggaaggctctgaagaccgaaagaaaaaggaaactgaatcagcttccttcagtgactctcgacgccgttcttcaaggcgatcgggaacgtgggggctccttgcggggcggtgcggaggacccctccaaggaagaccctcttcagatcatgggtcatctgacatcagaggatggcgaccatttctcagacgtccactttgattccaaggtaaaacagtcagaccccggaaagatcagcgaaaaggggttgagcttcgagaacggcaagggccccgagctggattccgtgatgaattctgagaacgatgagcttaacggcgtgaaccaggtcgttccaaagaagcgctggcagcgtctaaatcagagaaggaccaaacctcggaaaagaatgaatagattcaaggaaaaggagaatagcgagtgtgcattccgtgtgcttctgcccagtgaccccgtccaggagggcagggacgagtttcccgaacaccggacaccctccgctagcattctggaagagccactcacagaacaaaaccatgccgactgcttggattcagccggtcctcgtctgaacgtctgcgacaagtcaagcgccagcattggtgacatggagaaggagccaggcattccatccctgacccctcaggccgaattacctgagccagcagtccgtagtgaaaaaaaacggctgaggaaaccctccaaatggctgctcgaatacacggaggaatacgaccagatcttcgcaccaaagaagaagcagaaaaaggttcaagagcaggttcacaaggtgtcatctcggtgtgaggaggagagcttgctggcaagagggcgcagcagcgcgcagaacaagcaggtcgatgaaaacagtctcattagtacaaaggaggagcctcctgtgctggagcgcgaagcgccgttcttggaggggcccctcgcgcagtcggagctcggcggaggacatgccgagctcccacaattgacattgtccgttccagtggccccggaggtcagccctaggcctgcgcttgagagtgaggagctcctcgtcaagactccagggaactatgagtcaaaaagacagcgcaaaccgacaaaaaagctgctggaatctaacgacctggatcctgggttcatgcctaagaagggagatcttggattgtccaaaaaatgctatgaggctggacacctggagaacggcattaccgagagctgtgccacaagctactccaaggactttggtggaggcacaacgaaaattttcgataagccccggaaacggaagaggcagaggcatgcagctgctaaaatgcaatgcaagaaggtgaaaaacgatgactcatctaaggagatccccggatcagagggtgagctgatgccacaccggacggcaacttctcccaaggaaactgtcgaggaaggggtcgaacatgaccccggtatgccggcttctaagaagatgcagggagaaagaggcggaggggccgctctaaaagaaaacgtgtgtcagaattgtgagaagctaggggagctgctcctctgtgaggcccaatgttgtggcgcattccacctggaatgtctcggacttacagaaatgcccagagggaaatttatttgtaatgagtgtagaaccgggatccatacgtgctttgtctgcaagcagagcggcgaggacgtcaagcgctgtctgctacccctatgtggcaagttttaccatgaagaatgtgtccaaaagtatccgcctacagtcatgcaaaacaagggctttcgctgttctctgcacatctgcatcacctgccatgcagccaaccctgcaaatgtgagcgcttccaaggggaggttaatgagatgcgtccgctgccctgttgcataccatgcaaatgatttctgcctcgcggctggatctaagattttggcttccaattctatcatttgccccaaccactttacccctcgtcgagggtgcaggaaccacgaacatgtaaacgttagttggtgttttgtgtgctccgagggaggatcgttactatgctgcgacagttgtccagccgcttttcaccgggaatgtcttaacatcgatatcccagaaggtaactggtactgtaatgattgcaaggcaggcaaaaagccccattatcgggaaattgtgtgggttaaagtgggccgctacagatggtggcctgccgaaatttgccaccccagggcagtgccttccaacatcgataaaatgcgacacgatgttggcgagttccccgtgttgttttttggatccaacgactatctgtggacgcaccaggccagagtgtttccatacatggaaggtgatgtgagttcaaaagacaaaatggggaagggcgtagacggcacctataaaaaggctctgcaagaggcagccgcaaggtttgaagaactgaaagcccaaaaggagttgcggcagctgcaggaagatcgtaagaacgataagaaaccaccaccgtataagcacatcaaagtaaatcggcccattgggcgcgtccaaatttttaccgccgatctgagtgaaatcccccggtgcaactgcaaagctaccgacgaaaacccctgcggcattgattccgagtgtataaatcggatgctcctctatgagtgtcaccccactgtttgtccggctggcggaaggtgtcagaaccaatgtttctctaaaagacagtaccctgaagtggaaatatttcgcaccctgcagcgaggttggggcctgagaacaaaaaccgacatcaaaaaaggagaattcgtgaacgagtatgtcggggagctgattgatgaggaggagtgcagagcgcggatccgatacgcacaggagcatgatattaccaatttttatatgctcacccttgataaagaccggatcattgatgccggccctaaaggcaattacgcacggttcatgaaccactgttgccagcccaattgcgaaacacagaaatggtccgtgaacggtgatactcgggttggcctgttcgccctcagtgatattaaggccggcacagagctgacttttaactacaacctcgaatgtcttgggaatggcaaaactgtttgtaaatgtggagcgccgaactgcagtgggttcctcggggtgcgaccaaaaaaccagcctatcgcgaccgaggaaaaatctaaaaaatttaaaaagaagcagcaggggaaacgacgaacccaaggcgagatcactaaagagagagaagatgaatgtttctcttgcggcgatgcgggccaattggtatcttgcaaaaagcccggctgtccaaaggtttatcatgcggactgtctgaacctgacgaaaaggcctgcaggtaaatgggaatgcccctggcatcaatgcgatatatgtggaaaagaagcagcctctttttgcgagatgtgtccatccagcttctgcaaacagcaccgcgagggaatgctattcattagcaagctagatggtagactgagttgcacagagcatgatccttgcggcccgaaccctctagaacctggagagatccgtgagtatgtgccgccccccgtgccattaccccccgggccttccacccacctcgcagagcagtctacaggaatggcagcgcaagcgcccaagatgtccgacaagccccccgcagatacaaaccagatgctatcattgtcgaagaaggctttagccggcacatgccaacgtccactgctcccagagcggccactagaaaggacagacagcaggccccagcccttggacaaggtgagggacttggcaggaagcggtacgaaatcccaatcactggtttcctctcagaggcccttggaccgacctcccgcggtggccgggcctcgacctcagctcagcgacaaaccttccccagttaccagtcctagttcttcaccatccgtcagatcacagcccctcgagaggcctcttggaacagccgaccctcgcctggataagtccataggagctgcatccccccggccccagagtttggagaagacctccgttcccaccggcctgagacttcctccaccagacagactgttaatcacaagctcaccaaaacctcagacgagcgatagacctacagataagcctcacgcttccttaagtcagaggttacctccgcccgagaaggtgctttcagcggtggtgcagaccttggtcgctaaagaaaaggccctgaggcccgtcgatcagaatactcaatccaaaaacagggccgcactggtaatggatctcattgacctgacgcctcggcagaaagagcgggcagcttccccacatcaggtgacacctcaggccgatgaaaagatgcctgtgctcgaaagcagttcctggcctgcttcgaagggtcttggtcacatgccccgggctgtagaaaagggctgcgtgtctgaccctctccaaaccagcggaaaagccgccgcaccttcagaagacccctggcaggcggtgaaaagcctaacccaggcaagactgttgtcacagcccccggccaaggcttttctatacgaacctacgacacaggccagcggccgtgcgtccgccggcgcagagcaaactccagggccgctctcccaatctcccggactcgtgaaacaggcaaagcagatggtcggaggccagcaattgcccgcactggccgctaagagtggccagtcattccggtcgttagggaaagccccagcttccttaccaactgaggagaagaagctagtgactacagaacaatcaccctgggctctggggaaagcctcaagcagggcaggactctggcctatcgtagccggtcagactttagcccagagctgttggtccgcagggtctacgcagactctcgcccagacctgctggtcccttggacgcgggcaggaccctaagcctgagcagaacactcttccagcactgaaccaggccccatccagccataaatgcgccgagtccgagcagaagtag

SEQ ID NO: 197675 - DNA, 1692 bp, synthetic construct
  misc_feature 1..1692: note = Description of Artificial Sequence: Synthetic coding sequence
  source 1..1692: mol_type = other DNA
atgcccctgaagacccggaccgccctgagcgacgaccccgacagcagcacctccactctgggtaatatgctggaactgcccggcaccagcagctcaagtactagccaggaactcccattctgccagcccaagaaaaaatcaaccccactgaagtatgaagtaggcgatctcatatgggcgaagtttaagcgacggccttggtggccatgtaggatctgcagcgacccgctcataaacacacattccaaaatgaaggtgtccaaccgccgaccatatagacagtactacgtggaagccttcggcgacccatctgagagggcttgggtagctggtaaagctattgtgatgttcgaaggcaggcaccagttcgaggaactaccagtgctgagacgaaggggcaaacagaaggagaaaggatataggcataaggtgcctcaaaaaatcctgagtaagtgggaggcatccgtcggcctggcagaacaatatgatgtccctaaaggttccaagaatagaaaatgtattcccggcagcatcaaactcgacagcgaagaagacatgccctttgaggactgcactaacgatccggagagtgaacatgatctgctgttgaatgggtgcctgaagtcgctggcttttgattctgaacattcggccgacgaaaaggagaagccttgtgccaagagccgcgcaaggaaaagcagcgacaacccgaaacggacatccgtgaagaaggggcacattcaatttgaggcccacaaggatgagcgcaggggcaagattcccgaaaatctcggtctgaattttatctctggtgacatatccgacacccaggcttctaatgagctcagtcggatcgcaaatagtctgacaggttctaatacagcccctgggagctttctattctcctcctgcgggaaaaatacagcgaaaaaagagtttgaaacgagcaacggagatagcctgttaggacttccagagggggcgctaatatccaaatgttcaagggagaagaacaaaccacagcgatcgctcgtatgtggtagcaaagtgaagttatgctacatcggagccggcgacgaggagaaacgcagtgattctatcagcatctgtaccacaagcgacgatggcagctccgatttagatcccattgagcattcctccgaatcagataactctgtacttgaaatcccggacgcgtttgatcgcacggagaacatgttgtccatgcagaagaacgagaagataaaatacagtcggttcgcagccactaacacccgggtgaaagccaaacagaaacccctgatttccaatagtcacactgaccacctcatgggctgcactaaatctgcagagcccggcacagaaacatctcaggttaatctgagcgacctgaaagccagtactttagtgcacaagccccaaagtgactttaccaatgatgctctgtcaccgaaattcaacctctcatcatcaatcagcagtgagaactctttaattaagggaggggcggcaaaccaggcacttctccattcaaaatccaagcaaccaaaatttcggtctatcaagtgtaaacataaagaaaaccccgtcatggctgaacctcccgtgatcaacgaggaatgctcccttaaatgttgtagttctgataccaaagggtcaccactggccagcatatccaagacgcccccttag

SEQ ID NO: 197676 - DNA, 7782 bp, synthetic construct
  misc_feature 1..7782: note = Description of Artificial Sequence: Synthetic coding sequence
  source 1..7782: mol_type = other DNA
atggaccagacctgcgagctgccccggcggaactgcctgctgcccttttccaatccagtcaacctggatgctccagaggataaggactccccattcggaaatggtcagagcaacttttccgagcccctcaacgggtgcactatgcagctgagcaccgtttctgggacctcccagaacgcctatgggcaggactcaccaagctgctacattcccctgcggcggctccaggacctcgcatctatgattaatgtagaatacttaaacggatcagcagacggtagtgagtcttttcaggaccccgaaaagtcagattctcgagctcagacacccatcgtttgcacgagcttgtcccccggtggaccaaccgctttggcaatgaaacaggagcccagttgtaataacagccctgagttgcaagttaaggttaccaaaactatcaagaacggtttcctgcacttcgagaacttcacatgtgtggacgatgccgatgtggacagcgagatggaccctgagcagcccgtgacagaggacgagagcatcgaagaaatttttgaagagactcaaacaaatgccacatgtaactacgagacaaagagcgagaatggtgttaaggtggctatgggctctgaacaggactccacacccgagtcaagacacggcgcagttaagtctccctttttgcccctcgcccctcaaacagagacgcagaaaaataagcaacgaaatgaggtcgacgggagcaacgagaaagcagcccttcttcctgcccctttttctctgggggacaccaatatcacaatcgaggagcagctgaattccatcaatctgagtttccaggacgacccggatagctcaacctcgactcttggcaatatgctggaactaccaggcacttcatcaagttcaacaagccaggagctgccgttcgtcccacagaaaatcctgtccaagtgggaagcctctgtgggattagctgagcagtacgacgtgcccaaaggaagtaaaaacaggaaatgcattcctgggagtatcaaactggatagtgaggaagatatgccttttgaggattgcacgaacgaccccgagagcgagcatgaccttctgctcaatggatgcctgaaaagtctggcctttgactctgagcattctgccgacgagaaagagaaaccatgtgcaaaatcccgcgcacggaaaagctctgataatcccaagaggacttccgttaagaaaggacacattcagtttgaggctcacaaggatgaaagaagaggcaagattccagaaaatcttggactgaactttatttcgggcgacatctctgacacgcaggcttccaacgagctgtcccgaattgcaaactccctcactgggagcaacacggctcctggcagcttcctattcagctcttgtggaaagaacaccgccaagaaggaatttgaaaccagcaacggggacagtttgttagggcttccggagggggcactgatctccaagtgcagccgtgagaagaataagccacagcggtccctggtgtgtggctctaaggttaagctatgttatattggggctggggacgaggaaaagaggagcgactcaatatcaatttgtaccacctccgatgatggcagtagtgaccttgaccccattgagcattcgtccgaaagcgacaatagtgttttagaaattccagacgccttcgatagaactgagaatatgctcagcatgcagaagaacgagaaaatcaaatactcccgctttgccgccactaatacaagagttaaagccaaacaaaagccattgattagtaattctcacacagatcatcttatgggctgtaccaaaagtgccgaacctggaaccgagactagccaggtgaatctctcggatctgaaggccagtacccttgtgcacaagccgcagagcgatttcacaaacgatgcactgagcccaaagttcaatctgtctagtagcatctcctccgagaattctctcatcaaggggggagctgctaaccaggccctgctccacagcaagagcaagcagcctaagttccgttccattaagtgcaagcataaggaaaaccctgtcatggctgaacccccagtaatcaacgaggaatgctccctgaagtgttgcagcagtgataccaagggcagtcccctggcctcgatttccaagtctggaaaagtggatggtctcaagcttctgaataatatgcacgagaagacccgggactccagcgatatcgaaacagcagtggtgaaacacgtactgtccgaactaaaagaactaagctaccggtccctgggggaagacgtgagcgactcagggacatctaagccaagtaagccactgcttttctccagtgcttcttcacagaatcatattcccattgaacctgactataaattctctacccttctgatgatgctgaaggatatgcatgattctaagaccaaagagcagaggctgatgacagcccagaatcttgtgagctacagaagtccgggtaggggagattgctcaacaaactctcccgtaggcgtgagcaaggtactggtatccggggggagtacccacaattcagagaagaagggtgacgggacgcagaattccgctaacccgtctcctagcgggggcgattccgccctctcgggcgaactgtccgcctcgctgcccggattactctcagacaaaagagatctcccggcaagcgggaagagcagaagtgattgcgtcacccgtagaaattgtggacgcagcaagcctagttccaagttaagggatgcattctctgcgcagatggtaaagaacactgtcaatcggaaagccctgaaaactgaaaggaagagaaagctcaatcaactgccatcggtcactttggatgccgttttgcagggcgatcgcgagaggggcgggtcgctgaggggcggcgctgaagacccttcgaaggaggacccgctgcagataatgggccatcttaccagcgaggatggggatcacttttcagatgtgcatttcgatagcaaagttaagcagtcggatccaggaaagatcagtgaaaaaggtctatctttcgagaacggcaaagggcccgagcttgattccgtcatgaacagtgagaacgatgagttgaacggcgtcaaccaagtcgtgcccaaaaagagatggcaaagattaaaccagaggagaactaagcctcggaagagaatgaataggttcaaggagaaggaaaattcagagtgcgcatttagagtgctgctcccaagcgatccagttcaagaaggacgcgacgagtttcccgaacatcgcactccctcagcatctatcctggaagaacccttaacagagcagaatcacgccgactgtctcgatagtgccggaccccgcctgaacgtttgcgataagagtagcgcgtccatcggggatatggagaaggagccaggcatcccctccctgacaccccaggcagaactgcctgaaccagctgttcggagtgagaaaaagcggttgagaaaaccgagcaagtggctgctcgagtacacggaagagtatgatcagatattcgcccccaagaagaagcagaaaaaggtgcaagaacaggtgcacaaggtgtcttctcggtgcgaggaggagtctctgctggccagaggtagatccagcgctcagaataaacaggtagatgagaactctttaatctctacgaaagaagaaccacccgtcctggaacgtgaagcccctttccttgaagggcctctggcacagagcgagttgggaggcggacatgcagagttgccgcagctgacgcttagtgtgcctgtagcacctgaggtgagccccaggcccgcactggagtctgaggagctgctcgttaagactccaggcaattacgagtccaaacgacaacggaagccaacaaaaaaactacttgaatctaatgatctcgatcccggcttcatgcccaagaagggagacctcggactgagtaagaagtgttacgaggccgggcatctagagaacggcataaccgaaagttgtgcaacctcatacagcaaggacttcggagggggaactacaaagatatttgataaaccacgcaaaagaaagagacaacggcacgccgccgctaaaatgcagtgcaaaaaagtgaagaacgatgattcctccaaagaaatacctggaagtgagggggaactgatgccacacaggacagcaacgtcccccaaggagaccgtggaggaaggcgtcgagcatgatcctggcatgcccgcttcgaagaaaatgcagggggagagaggcggcggagccgctctgaaagaaaatgtttgtcagaactgcgaaaagttgggggagttgttactgtgtgaggcacagtgctgcggggctttccatttggagtgcctgggcttaacagagatgcctagaggaaaatttatctgcaatgagtgtagaacgggcatccacacgtgttttgtctgtaagcagagtggggaagacgtaaagcgatgcctgctcccactgtgtggtaaattctatcatgaggaatgcgtgcagaaatacccacccactgtgatgcagaacaaagggttccgttgcagccttcacatctgcattacttgtcatgcagccaaccccgctaatgttagcgcctctaaaggtaggcttatgcgatgtgtccgctgcccagtggcctaccacgctaacgatttctgccttgctgctggtagcaaaatcctcgcatccaatagtatcatctgtccaaaccattttactccccgaaggggctgccgcaaccacgaacacgtgaacgtatcatggtgtttcgtgtgtagcgaaggaggtagcctcctttgttgtgattcttgccctgctgcctttcacagagagtgcctgaacattgatatacctgaagggaattggtactgcaatgattgcaaagccggaaagaagccacattaccgagaaatcgtttgggtaaaagtggggaggtaccgctggtggcccgcagaaatctgccacccaagggccgtgcccagcaatattgacaaaatgaggcacgacgtaggcgaattcccagtgttattcttcggctccaacgactacctatggacccaccaagctagggtgttcccttatatggagggcgacgtgagtagcaaagataagatgggcaagggtgtcgacgggacttacaaaaaagccctgcaggaagccgcagccagatttgaagagctgaaagcccagaaggagctcagacagctacaagaagacagaaagaacgacaagaagccacccccatataaacatattaaggtcaatagacccattggacgggtccagatcttcactgccgatctctcagagatcccaagatgtaactgcaaggctaccgatgagaatccctgtggcattgattccgagtgcatcaatagaatgctactgtatgagtgccacccaactgtgtgtcccgccggaggtcgttgtcaaaaccagtgtttctcaaagagacaatacccggaggtggaaatctttcgaactctgcaacgcgggtggggcctgaggaccaaaacggacattaaaaagggagagtttgttaacgagtatgttggcgagctgattgacgaggaagaatgccgagcgaggattcgttatgcccaggaacatgatatcacgaacttttacatgctaactctcgataaggataggatcattgatgccggccctaaaggcaactatgcacgatttatgaaccactgttgtcagcccaattgcgagacacagaagtggtccgtgaacggcgacacgcgggtgggtctatttgccctcagcgacattaaggccggtaccgagctgaccttcaattacaaccttgagtgcctgggcaatggaaaaacggtgtgtaagtgtggggcccccaactgtagtggcttcctaggagtaaggccaaagaaccagcctattgcgaccgaagagaagtctaagaagtttaagaagaagcaacagggaaagagacgtacccagggagagataacgaaggagagagaagatgaatgtttctcgtgcggtgacgctgggcagctcgtatcctgcaagaaacccggatgtcccaaggtgtaccacgcagactgtcttaacctcacaaagcggccagccggaaagtgggaatgtccatggcatcagtgtgacatctgtggaaaagaagccgcaagcttctgcgagatgtgtcctagcagcttttgcaagcagcaccgcgaggggatgctgttcataagtaagttggacggcaggctttcttgcactgaacacgacccgtgtggccccaacccgctggagccaggcgagatacgcgaatacgttcccccccctgtccccctaccgccaggcccgagcacgcatctggccgagcagagcacaggtatggctgcccaggcgcccaaaatgagtgataagcccccagcagatacgaatcaaatgctgtctctttccaagaaggccctggctggcacctgtcagaggcctttgctgccagagagaccattggagcgcactgactcacgcccccaacctctggacaaggtcagagatctggccgggtctggaactaaatcacagtcactggtgtccagtcagaggcctctggataggccgcccgcagtggctggaccacggccccagttatccgacaagccctctcccgtcacctctccttccagcagtcccagtgtgagatcgcagcctttagagcgacctctgggaacagccgatcccagactcgataagagcataggggcagcttcccctcggccccagtcacttgaaaaaacatcggtccccacaggacttcgcctcccccccccggacagattactgattacttccagtccgaagcctcagacctccgaccgccctaccgataagcctcacgccagcctgtcacaaagactgcctccccctgaaaaggtcctgagcgccgtagtgcaaactctggtggccaaagagaaagcgttgcggcccgtagaccagaacacacagtcaaagaatcgggccgcccttgtgatggatttgatcgatctaactcctcgccagaaggaacgagcagcctcaccacatcaagttacacctcaagccgatgagaagatgcctgtgctagaaagcagcagctggcctgcgtccaagggtttagggcatatgccacgtgctgtggagaagggatgtgtctctgatcctctccagactagtggcaaagcggctgccccctctgaggatccatggcaagccgtaaagagccttacccaagctaggctgctgtcccagcccccagcaaaagcctttctgtacgagccaacgactcaggcttccggcagggcgtcagccggcgccgagcaaacacccggccctctgtctcaaagtcctggtcttgtaaaacaggccaaacagatggtcgggggacaacagttacccgcgctggcagccaagagtgggcagtccttccggtccctggggaaagctcctgcctcactccccaccgaggaaaaaaagcttgtgactacagagcaatctccttgggcactaggaaaggcatccagccgagccgggctgtggccgatcgtggcaggccagacattagcacaatcttgttggagcgctggatccacacagaccctcgcccagacgtgctggagcctcgggcgcggccaggacccaaaaccggagcagaatacactccctgcactgaaccaggccccatcatcccataagtgtgcagagagtgaacagaaatag

SEQ ID NO: 197677 - DNA, 8091 bp, synthetic construct
  misc_feature 1..8091: note = Description of Artificial Sequence: Synthetic coding sequence
  source 1..8091: mol_type = other DNA
atggaccagacctgcgagctgccccggcggaactgcctgctgccctttagcaatcctgtcaatctggacgcccccgaggacaaagactcacccttcggtaacggccaatccaatttctcggagcctctgaacggctgcaccatgcagttgagcaccgtgagtgggaccagtcagaacgcctacggtcaggactctccttcttgctatattcctctgaggagacttcaggatctggcatctatgatcaatgttgaatatttgaacggctccgcagacggctccgagtctttccaagacccagaaaaatctgacagccgagcccagaccccaattgtctgcacctccttgtctccaggcgggccgaccgccctggcaatgaagcaggaaccgtcatgtaataattccccagagcttcaggtgaaggtcactaagactattaaaaacgggtttctccactttgagaactttacttgcgttgatgacgccgatgtggacagcgagatggatccagaacagcccgtgactgaagacgagtcaattgaggaaatatttgaagaaactcagactaacgccacctgcaattacgaaaccaagtccgaaaatggggtgaaagtggccatgggatcagagcaagactcaactccggagagtcgacacggagctgttaaatccccatttctcccgttggccccacagaccgaaacccagaagaacaaacagagaaacgaggtggacggatctaatgagaaggcggctctccttcccgccccattctcgctgggtgatacgaacattacaatcgaagaacagttgaattccataaatttgtctttccaagatgatcctgattcatctacttctactcttggcaatatgctcgaactccctggaacgtcttcttcttctactagccaggagttaccgttctgccagcctaagaagaagtccacgccactgaaatacgaagtgggcgaccttatctgggcaaagtttaagagacgaccttggtggccctgcaggatatgttcagaccctctcattaatacccattctaagatgaaagtcagtaatagaaggccttaccgacagtattacgtggaggcctttggcgacccatcagaaagagcctgggtggccggtaaggctattgtgatgttcgagggaaggcaccagttcgaggagctcccagtgcttcgtcggagaggaaaacagaaagagaagggctatcggcataaagtgccacagaagatactgagcaagtgggaagcttctgttggactggcagagcagtatgatgtgccgaaggggagtaaaaacagaaaatgtatccccgggtcaatcaagctcgatagtgaagaggatatgcctttcgaagattgtacaaatgaccccgagtcggagcatgatctcctgctcaatggatgtctgaagtcccttgcgttcgatagtgagcactctgcggatgagaaggagaagccctgcgctaagtcacgcgccaggaaaagctccgacaacccaaaacggacgtctgtcaagaaaggacacatccaattcgaagctcataaggatgagaggcgtggtaaaattcccgagaacctcggactcaacttcatctcaggcgatattagcgacactcaggcctccaacgagctgtctcgaatcgccaatagcctgacaggaagcaacaccgcacccggctcgtttttgttctcgtcatgcggaaaaaatactgccaaaaaagagttcgagacatcgaatggagacagtttgctggggctcccagaaggcgcgctgatttcaaaatgttcccgagaaaagaataagccccagcgttctcttgtctgcgggagcaaagtgaaactgtgctatataggggctggtgatgaagagaaacgatcagactcgatctctatatgcaccactagcgatgatggctcctccgatctggatcccatcgagcactcctctgaaagtgacaacagtgtcttagagatcccggacgccttcgatcggaccgagaacatgctttcaatgcagaagaatgagaagatcaaatacagtcgatttgcggccaccaatacacgcgttaaggctaagcagaagcctctgatctccaattctcacactgatcacttgatgggctgcaccaagagcgcggagcccggtaccgagaccagccaggtaaatctctcagatctcaaggcaagtacattagtgcataagccacagagcgacttcaccaacgatgcactatcacctaagtttaatctctctagctccatctcctccgagaattccctgatcaagggcggcgccgcaaatcaggctttgttacattccaaatccaagcaacccaagttcagatcaattaagtgtaaacataaagagaatccagtgatggcagagccccctgtgattaacgaggaatgctccctgaagtgctgtagctccgatacaaagggctcccctctggctagcatttctaaatcagggaaggtcgacgggctaaaactgctcaataacatgcatgagaagacaagagactcatctgatatcgaaaccgctgtggtcaagcacgttcttagcgagcttaaagagctgagctaccgctcccttggcgaagacgtgagcgactcgggtaccagtaagcccagcaagccgctcctttttagctctgctagctcgcagaaccacatccctatcgagccagattataagttttctacgttgctgatgatgctgaaagatatgcatgactccaaaacaaaggaacagagactgatgactgcacaaaatctcgtgagctaccgtagccctggccggggagactgctccaccaactctcctgtgggggtgagcaaggtcctggtgtctgggggttccacccataacagcgaaaagaagggcgatggtacgcagaactcagccaatcctagtccttctggcggcgattctgcgctctccggcgagctcagtgcttcgctgcctggccttctctctgacaaaagggatttaccggccagtgggaagtccagatcagactgtgtgaccagacggaactgcggcaggtctaagccatcttccaaacttcgtgacgctttctctgctcagatggtgaaaaacactgttaatcgaaaagctctaaagactgaacgcaagagaaaacttaaccaactgccttccgtcacattagacgccgtgcttcagggcgaccgcgagcgcggcggctcgctgagaggcggcgccgaggatccatccaaagaggatcccctacagattatgggacatcttacctccgaggacggagaccactttagcgacgtgcattttgatagcaaggtgaaacagtcagaccctggtaagatttccgagaagggactgtccttcgaaaacggcaagggtcctgaacttgattctgtcatgaattcagagaacgacgagctcaacggggtaaaccaagtggtaccaaaaaaacgctggcaaagactaaaccagcggcggactaaaccccgtaaaaggatgaacaggttcaaggagaaggagaattctgaatgtgcttttcgggtcctattgccatcagatcccgtccaagagggcagagacgagtttcctgagcatcgcaccccttcggcttctatactcgaagagccgctcactgaacagaaccacgctgactgcttggactcagcaggccccagacttaacgtttgcgacaaaagctccgcatccataggtgatatggaaaaggagccagggatcccatcactaactccacaggcggagctaccagaaccggctgtgagatccgagaagaagaggctgagaaaaccctcaaagtggctgctcgaatatacagaggaatacgaccagattttcgcccctaaaaagaagcagaaaaaagtccaagagcaggtgcacaaggttagttcacgctgtgaggaggaatctttgctcgcaagaggccgaagctctgcccagaacaagcaggtagatgaaaatagtctgataagcaccaaagaggagccccccgttctcgaaagggaggcgcctttcctggagggcccactggcgcagagtgagctcggcggcggacacgcagaactcccacaacttactttaagcgtgcctgtcgccccagaggtctccccacgacctgctcttgaaagtgaagagcttctggtgaagacaccagggaattacgaatctaaaaggcaaagaaagcccacaaagaagctgttggagagtaatgatctcgatcctggcttcatgccgaaaaagggggatctaggcctgtccaagaaatgctacgaggctggacaccttgagaatggcattaccgagtcttgtgccaccagctatagcaaagattttggtggtgggaccactaaaatcttcgataaaccccggaagcgcaagaggcagagacatgccgctgctaaaatgcagtgtaagaaggtcaagaacgacgactcgagcaaagaaatccctggtagtgagggcgaactgatgccgcaccgtacagccacgtctcctaaggaaacggtcgaggagggcgtcgagcacgaccccggcatgcccgccagcaaaaagatgcaaggtgagcgcggaggtggcgctgcactcaaggagaacgtgtgccagaactgcgagaagctgggggagctcctgctttgcgaggcccagtgctgtggcgcctttcacctcgaatgtctgggcctaactgaaatgcctcgggggaagttcatttgcaacgaatgccgtactggcatccacacctgctttgtttgtaaacaatcaggcgaggatgtcaagcgatgcctattaccactgtgtggaaagttttatcacgaggaatgtgtccagaaatacccccccaccgtgatgcagaataaaggcttcagatgctcactgcacatctgtatcacctgccatgcagccaaccccgcaaatgttagcgcgtctaagggcagactaatgcgttgcgtacgatgccccgttgcctatcacgcaaatgacttttgcctcgctgctggctccaagatccttgcgagcaactccattatttgtcctaatcacttcacaccgcggagaggatgtagaaaccatgaacacgttaatgtctcatggtgctttgtgtgctcggaggggggcagcttattgtgttgtgacagctgtcctgctgcgtttcatcgcgaatgcctgaacatcgatatcccagaaggcaattggtattgtaacgactgtaaagctggtaagaagccgcactatcgtgaaatcgtctgggtcaaagtcgggcgctacagatggtggcctgccgagatttgtcaccccagagcagtcccctccaatatagataagatgagacacgacgttggagaatttcctgtcctgttttttggatccaatgattatctctggactcaccaggcaagggtctttccgtatatggaaggggacgtatctagtaaggataagatgggaaaaggggtggatggcacgtacaagaaggcactccaggaggccgccgcgcggttcgaggaactaaaagcccagaaggaactgcgccagctgcaagaggataggaaaaatgacaaaaaaccaccgccttataagcacatcaaagtgaatcgccctattggacgggttcagattttcactgccgacctctccgagatccctagatgtaactgtaaggccactgacgagaacccctgcggaatagactccgagtgcattaacagaatgttgctgtatgagtgtcacccaactgtgtgtcctgccggcgggagatgccagaaccagtgtttttctaagagacagtaccctgaagtggagatctttcgcaccttacaacggggttggggacttagaacgaaaactgatatcaaaaaaggcgagttcgtgaatgagtacgtcggtgagcttattgatgaggaggagtgcagggcccgcatccgctatgcgcaggaacatgatattacaaatttttacatgctgactctggataaggaccgaattattgacgccgggccaaaaggcaactatgcccgatttatgaaccattgttgccaaccaaattgcgaaacacagaagtggagcgtgaacggggatacccgggtcggcctgtttgccctgtctgacatcaaagccggcactgagctcacatttaactacaatctggagtgtttaggaaacggcaaaacggtctgtaagtgtggcgccccgaactgttccggctttctcggcgtgcggcccaaaaaccaacccattgctaccgaggaaaagtctaaaaaatttaaaaaaaaacagcagggaaagcggcgtactcagggggagatcaccaaggagcgagaagatgagtgtttcagttgtggcgacgccggccagctggtgtcttgcaaaaaacctggatgccccaaggtataccacgccgactgcttgaacttaacgaagaggcccgctggaaagtgggaatgcccttggcatcaatgtgatatctgtgggaaggaggccgcttcattctgtgaaatgtgtccttcctctttctgtaagcaacatagagaaggcatgctcttcatcagcaagctggatggtaggctaagttgcacagaacatgacccatgcggtcctaacccactggagccaggagaaatccgcgagtatgtgccccctcctgtgcccctgccgcccgggcctagcacccatctggccgaacagtctactgggatggctgcccaggctcccaagatgtccgacaagccccccgcagacacaaatcagatgctgagcctgtccaaaaaggccctcgcaggaacatgtcagcggcccctgctccctgagcggcccttagagcgcaccgactctcggcctcagccactagacaaggtgcgtgacctggcagggtccggtaccaagtcacagtcgctggtatctagccagcggcctcttgatcggcctccggctgtggccggccctagaccccaactctcggacaaaccctcgccagtgaccagtcctagctcctccccctccgtgcggagtcagcctctggaacggcctctgggtaccgccgatcccaggctagataagagtattggagctgcttcccctagaccgcaatccctagagaaaacatctgtcccaactgggttgcggctgcctccccctgatagattattgattacaagcagtcccaaaccccagacttccgatagaccgacagacaaaccacacgcctcactcagccagagactccccccaccagagaaggtgctgtccgcagtcgttcaaacccttgtagccaaggagaaggccctgaggcccgtggaccagaatacccaaagcaagaatagggccgccttagtgatggatcttatagacctgaccccacgccagaaggaaagagctgccagtcctcaccaggtcaccccacaagccgacgagaaaatgcctgttttagaatctagttcgtggcccgcttctaagggacttggacacatgccccgtgctgttgaaaaaggttgcgtgtccgaccccctgcaaacttcagggaaagctgccgcaccgtctgaagatccatggcaggcagtcaagtccttaacccaggcccggcttctctcacaaccccctgccaaggcctttctgtacgagcctaccacacaggcttcaggtcgcgcctcggccggcgccgagcaaacgcccggacccctttcccagtcaccaggcctggttaaacaggccaagcagatggtgggtggtcagcaactgcccgccctcgcagccaagtctggacagtctttccggtctctgggcaaggctcctgcctcgctcccgacagaggagaagaagctagtgacaactgaacagtctccgtgggccttgggaaaagcgagttcccgtgccggtctgtggccgatcgtcgcagggcagacacttgcgcagagctgttggagtgctgggtctacgcagacattggcccagacctgttggagccttggacgcgggcaggaccccaagcccgaacagaatactctgccggccctgaatcaggcgccctccagtcacaagtgcgcggagagtgagcagaaatag

SEQ ID NO: 197678 - DNA, 468 bp, synthetic construct
  misc_feature 1..468: note = Description of Artificial Sequence: Synthetic coding sequence
  source 1..468: mol_type = other DNA
atgcccctgaagacccggaccgccctgagcgacgaccccgacagctctaccagcaccctcggcaatatgttggaactgccaggtacgagctcatcctcaacgtctcaggaactacccttctgtcagcctaagaaaaaaagcactccactgaagtatgaggtcggcgacttaatttgggctaagtttaaaagacgcccttggtggccttgccggatttgcagtgatccactgattaacacgcactctaagatgaaggtatccaatcgaaggccatacaggcaatattatgtcgaagcatttggcgatccttctgaacgggcctgggtggcaggcaaagctattgtgatgtttgagggccgccatcagtttgaagagttgcccgttctgaggcggaggggtaaacagaaggagaaggggtaccggcacaaggttccacagaagatactcagcaaatgggaggcttcatag

SEQ ID NO: 197679 - DNA, 375 bp, synthetic construct
  misc_feature 1..375: note = Description of Artificial Sequence: Synthetic coding sequence
  source 1..375: mol_type = other DNA
atgcccctgaagacccggaccgccctgagcgacgaccccgacagctccaccagcaccctgggtaacatgctcgagttgcctggtaccagttcttccagcacctctcaggagcttccattctgtcagcctaaaaaaaagtctacacctctgaaatatgaagtcggcgacctaatttgggcgaagtttaaacgacgaccgtggtggccctgcaggatttgtagtgacccactgatcaacacacactcaaagatgaaggttagtaaccgtcgcccataccgtcagtactacgtcgaagccttcggggaccccagtgagcgtgcttgggtggcaggaaaagcaatcgttatgttcgagggccggcaccaatttgagtag

SEQ ID NO: 197680 - DNA, 4200 bp, synthetic construct
  misc_feature 1..4200: note = Description of Artificial Sequence: Synthetic coding sequence
  source 1..4200: mol_type = other DNA
atgagcggcctgggcgacagcagcagcgaccccgccaaccccgactcccataagcgcaaaggaagcccctgcgacacgctggcctcgtctacggagaaaagacgacgggaacaggaaaataaatacttagaggagctggctgagttgctttcggcaaatattagcgacattgactccttgagtgtgaagcctgataaatgcaagattctcaaaaagaccgtggatcagattcagttgatgaagcgtatggagcaggagaagtccactaccgatgacgatgtgcaaaaaagcgacatcagcagttccagtcaaggagttatcgaaaaggaaagcctcggacccctgttgctggaagcacttgacgggttcttcttcgtggttaattgcgagggaagaatagtctttgttagcgaaaatgtgacctcttatttaggctacaatcaagaagaacttatgaatacctctgtgtattctatcttgcatgtcggcgaccatgctgaattcgtaaagaatttgctgccaaaaagcctggtgaacggagtgccttggccgcaagaggcaactaggcgcaacagccatacatttaactgccggatgctcatccatcctccagacgagccggggacagaaaatcaggaggcatgccagagatatgaagtgatgcagtgctttacagtgagccagccaaaaagtatacaggaagatggggaagatttccagagttgtctgatctgtatagctagacgtctcccccgccctccagccatcactggcgtggagtcgttcatgactaaacaggacacaactgggaaaatcatatcaattgatacctctagtctgagggcagctggaagaactggatgggaggacctcgttcggaaatgcatttatgcctttttccagccccagggcagagaaccatcatacgcccggcagctatttcaggaagtgatgacccgcggtactgcatctagcccttcttatcgcttcattctaaacgacgggacaatgttgagcgcccacacaaagtgtaagctctgttatcctcagtcccccgacatgcagcctttcatcatggggatacacattatcgatagggagcactccggcctgtctcctcaggatgacactaactcggggatgtccatcccaagagtgaatcccagcgtgaatccttccatcagccccgcccatggcgtggcacgctcatcaacactccccccttcgaactctaacatggtatccacccgcatcaacagacaacagagttctgacttacactcaagtagtcacagtaatagcagtaattcccagggcagctttggctgcagtccaggctcccagatagtcgccaacgtggcactaaatcagggtcaggctagctcccagagttccaacccctccctgaatctgaacaatagcccgatggagggtaccggtatcagcctcgctcagtttatgagcccaagacggcaggtgactagtggactagcgaccaggccccggatgccaaacaacagttttccgcctaatatttccacactgagttcccccgtgggtatgactagttctgcctgcaataataataataggtcttacagcaatatcccagttacgtcactgcaggggatgaacgaaggcccaaataacagtgtcggcttctcagcatcatctcccgtactgcgccagatgagctcacagaattcgccctcacgcttgaatatccagcccgcaaaggccgagtcaaaagataacaaggagattgcgtctatcttgaacgagatgatacagagcgacaatagctcaagcgatggcaagcctctcgactccggcctgctgcataataatgaccggttgagcgacggtgactcaaagtatagccagacaagtcataaactggtgcagctgctgactaccacggctgagcagcagctccgtcacgccgatattgacacgtcctgtaaagatgtgctcagctgtaccggaacatcaaattctgcctccgccaattccagcggtggcagctgtccaagttcccacagctccctgaccgagcgtcacaagatcctgcaccgcctcttgcaagagggtagtcctagtgatattacaaccctctccgtggagcctgacaagaaggattcagcgtcgacttcagtctcggtgaccgggcaggtgcaggggaattcatctataaaactcgaattggacgcaagtaagaaaaaggagtccaaggaccaccaacttctgcgctacttgctcgataaggatgagaaagatctgagatcgacacccaacctgagccttgacgacgtgaaagtcaaggtggagaagaaagagcagatggatccttgtaacaccaacccaactccaatgacaaaacctactccggaagaaatcaaactggaggcccagtctcagtttactgcagatctagaccagtttgaccagctgcttccgacactggagaaggccgctcagctgccaggcttgtgtgagaccgaccgaatggacggagccgtgacttccgtgaccattaaatccgagatccttcctgcctcactccagtccgccacagcacgcccaacatccaggcttaatcggctgccagaattggagctggaagctatcgataaccagtttggacagcccggcaccggcgatcaaatcccctggaccaacaacaccgttacagccataaaccagtcaaaatccgaagatcagtgtatctcaagccagctggacgaattgctttgtccccctacgaccgtagaggggagaaatgacgaaaaggctctcctcgagcaactggtgtcgtttctgagtggcaaagacgaaaccgagctagcagagttggacagagctttaggcatcgacaaacttgtgcaaggtggaggtctcgatgtgttgagtgagcgcttccctccacagcaggctacccctccgttgatcatggaggagcgacccaacttgtacagccagccatattctagcccgtctcctactgctaacttaccatctcctttccagggcatggtccgacagaagccgtctcttggaactatgcccgttcaagtgacacctccccgaggagctttttcaccggggatgggcatgcaaccaagacagacgcttaaccggcccccagctgctcccaatcagttgcgcctgcaactacaacagcggttacagggacagcaacagctgattcaccagaataggcaggccatattgaaccagtttgcagccacggccccagtgggtatcaacatgcgatccggaatgcaacagcagattacgcctcagccccccctgaatgcccaaatgttggcacagcgccagagagaactctattcacaacagcatcgtcaacggcagctcatacagcaacagcgcgcaatgctgatgcgccagcagtcttttgggaacaatctccccccttcttcgggcttgccagttcaaatgggcaatccacgcctcccacagggcgcaccccagcagttcccttaccccccaaactacgggaccaatcctggaacgccgccagctagcacaagccctttctcccagctcgctgccaatcctgaagccagtttagccaaccgcaactccatggtttcccgaggtatgactggtaacattggaggacagttcggcactggaataaaccctcagatgcagcagaatgtttttcagtaccctggcgccggcatggtgccacaaggagaagcgaacttcgccccgagtttgtctcctggtagctctatggtgcctatgcctattcctcccccacagagcagcctgctccaacagacgccgcctgcgtcaggctatcagtccccagatatgaaagcttggcagcagggcgctattggaaataataacgtgttttctcaagccgtccagaaccagcccacaccagcccagcccggcgtttataacaatatgtccatcacagtctctatggcgggcggaaataccaatgtccagaatatgaatcctatgatggctcagatgcagatgtcatccctgcaaatgccaggcatgaacaccgtttgccctgagcagattaatgatccagcgctgcggcacacaggattatattgcaatcagctgtccagcacagacctgcttaagactgaagccgacggcacacaggataaaaaaacagaggaattcttttccgtggtgaccacagattag

SEQ ID NO: 197681 - DNA, 4326 bp, synthetic construct
  misc_feature 1..4326: note = Description of Artificial Sequence: Synthetic coding sequence
  source 1..4326: mol_type = other DNA
atgagcggcctgggcgacagcagcagcgaccccgccaaccccgacagtcataaacggaagggctcaccctgtgacactctggcttcgtcgacagagaagcgacgccgggagcaggagaataaatatctggaggaactggccgagctgctttctgcgaacattagcgacatagacagccttagcgtaaagcctgacaagtgcaagattctgaagaaaactgtggaccagattcagctgatgaagcggatggagcaggagaaatctaccacagatgacgacgttcaaaaatccgacatctcttcatcgtcccagggggtaattgaaaaggaatctttaggacccctgctgttagaagccttagatggtttcttttttgttgtgaattgtgaggggcgcattgtctttgtgtccgaaaacgtcaccagctatctaggatataatcaagaagaacttatgaacacgtccgtttatagcatactccatgtgggcgatcacgcagagtttgtgaagaacctgcttcctaagagcctggtgaacggcgtgccctggccccaggaagccacccgacgaaatagccacacctttaattgccgcatgctgatacatcccccagacgaacctgggacagagaatcaggaggcctgtcagcgctacgaggtgatgcaatgctttaccgtgtcacaacccaaatccatacaggaggacggcgaggattttcagtcctgcctgatttgtatcgcccgtaggctgccacggccacccgctatcactggggtggagagtttcatgacgaaacaggatacaaccggaaagattatcagcatcgatacatcgtcactgcgagctgcaggaagaacagggtgggaagatctcgtcaggaagtgtatctacgcgtttttccagcctcagggccgagagccctcatacgctcgtcaactgttccaagaggtcatgacccgcgggactgcgagctctccctcctatcgcttcatacttaatgacggcactatgctgagcgcacatactaaatgcaaactctgctatccgcagtctcccgacatgcagcctttcatcatgggtattcatatcattgaccgggagcattcaggcttgtctccccaggacgataccaactccggcatgtccattcctcgggtcaacccgagcgtgaatccatctatctccccagcacatggcgtggctaggagttccacccttcctccatcaaattcaaatatggtgtctacgcggatcaaccgccagcagtccagtgatcttcactccagttctcacagtaattcgagcaactctcaaggctcctttggatgtagcccggggtcgcagattgtagcaaatgtcgccctgaaccagggtcaggctagttcacaatcctctaatccaagtctgaatctgaacaacagtcctatggagggcacaggcatctccctcgcgcagtttatgtcccctaggagacaggtgacttcaggactggccaccagacctagaatgccgaacaacagcttcccccccaacatcagcaccttatcaagccccgtgggcatgacctcctccgcatgcaacaacaacaaccgctcctacagcaatatcccggtgacctctttgcagggaatgaatgaggggccaaacaatagtgtggggtttagtgcctcctccccggtgttaaggcagatgtcaagccagaacagcccgagccgcctgaacattcagcccgcaaaagctgagtccaaagataataaggagatagccagtattctcaacgaaatgatccaatccgacaatagctcctctgatggaaagccactggatagtgggttactccacaacaacgaccgcctatccgacggggactcaaagtatagtcagacaagtcataaactggtgcagctcctgaccacgactgcagaacaacagctcaggcatgcagacatagacacatcttgtaaagacgtcttgagctgcaccgggacctccaatagcgcaagcgccaactcctctggcgggtcatgcccatcaagccattcatccttaaccgagagacacaagatcctacatcgattgcttcaagagggttcaccatctgacatcaccacgctgagcgtagaaccagataaaaaggactccgcttctactagcgtgtccgtcacagggcaagtacaggggaactcaagcattaagctggagctggatgcctccaaaaagaaggagagtaaggatcaccagttattgcgatatctgctagacaaagacgaaaaagatttaaggtcaactccaaacctctcactagacgatgtaaaagttaaagtcgaaaagaaagagcagatggatccctgcaataccaatcccacacccatgaccaaacctacaccggaagaaataaagctggaggcccagagtcagttcacagccgacctcgaccagttcgaccagctccttcctacactcgaaaaggcagcacaattaccagggttgtgcgaaactgatcggatggatggagccgtgacaagcgttactattaaaagcgaaatcctgcctgcaagcctgcaatctgctactgccaggccaacttcacgtcttaatcgcttacccgaacttgaactagaggctattgacaatcagtttggacaacctggcaccggagaccagatcccgtggacaaataataccgtgaccgcaatcaaccaaagcaaatctgaagatcagtgcatcagttcccagctcgacgagcttctttgccccccaacaaccgtggaggggagaaatgatgaaaaggccttgctcgagcagcttgtcagttttctatcaggcaaagatgaaacagagctggctgagctggatcgcgcgctgggaattgacaaattagtgcagggcggcggacttgatgttctgagtgagagattccctcctcaacaggcgaccccacctttaatcatggaggagagaccgaatctctacagccagccatattcatcgccctcaccgacagcaaatctcccctcacctttccagggcatggtccgacaaaaaccatctttaggcacgatgcctgtacaggtaacccccccacgcggggcattcagccccggcatgggcatgcaacctcgccaaacgctgaaccgccctcccgccgcacccaaccaattacggctgcagctgcagcagcgcctccaagggcagcagcaactgattcaccagaaccgccaggccattcttaaccagttcgcggccacggctccagttggtataaatatgcggtctggtatgcagcagcagattacccctcagcctcccctgaacgctcaaatgttggctcagagacaacgcgaactgtactctcaacaacacagacagagacaacttatccagcagcagcgagcaatgttgatgagacagcagtccttcggcaacaacttgcccccctccagcggcttacccgtccagatgggcaacccacggttgccccagggcgcccctcaacagttcccatacccacccaattatgggaccaacccgggcacacccccggcatccacaagccctttctcacaactagcagccaaccccgaggcctcgttagccaaccggaattccatggtatccagaggaatgacagggaacatcggcggccagttcggtacgggcattaatcctcagatgcagcagaacgttttccaataccccggcgctggaatggttcctcagggagaagcgaattttgcacccagcctgtctcctggttcaagtatggtccctatgcccatccctccgccacagagttcgctgttgcagcaaacccctcccgcatctgggtaccagtcccctgacatgaaggcttggcaacagggggcaattggcaacaataatgtgttctcgcaagcagtccaaaaccagcctaccccggcccaacccggcgtctataacaacatgagtatcactgtcagcatggctggcggaaacaccaatgttcagaatatgaaccccatgatggcacagatgcaaatgtctagcctccaaatgcccgggatgaatactgtgtgccccgagcagataaacgatcctgccttacggcatacagggctgtactgcaaccagcttagtagtaccgacttgctaaagacggaggcagatggcacccagcaagttcagcaagttcaggtgtttgccgacgtgcagtgtacggtgaacctcgttggcggagacccatatctcaatcagccagggcccctggggacccagaaacccacttctggaccgcaaaccccccaggctcagcagaagtctctattgcaacagctgcttactgaatag

SEQ ID NO: 197682 - DNA, 4323 bp, synthetic construct
  misc_feature 1..4323: note = Description of Artificial Sequence: Synthetic coding sequence
  source 1..4323: mol_type = other DNA
atgagcggcctgggcgacagcagcagcgaccccgccaaccccgactcccacaagcgcaagggcagcccgtgcgacactctcgcgtccagtaccgagaagcggaggcgggagcaagagaacaaatatctagaggaactcgccgaattactctccgctaacatttcagatatcgattctctatccgtgaagccagataagtgcaagattttgaagaagacagtggatcagattcagttgatgaagcgtatggaacaagagaagagcactactgatgatgacgtccagaaaagtgacatcagctcctcctctcagggcgttatcgaaaaggagtcgctcggcccccttttactggaagccctggatggattcttcttcgtcgtgaattgcgaagggagaatcgttttcgtgtctgagaatgtcacctcatacctgggatataaccaagaggagctgatgaatacatctgtgtattctatcctccacgtcggcgaccacgccgaattcgtgaagaacctgttacccaaaagtctagtgaacggtgtgccctggccgcaggaggccaccagaaggaactctcacacttttaactgccggatgctgatccatccaccagacgaaccaggaactgaaaaccaggaagcgtgtcaacgatacgaggtgatgcaatgctttactgtttctcagccaaagagcatccaggaagatggagaggattttcaatcttgtctgatatgtatcgccaggaggctaccacgcccccctgctattacaggcgtggagtctttcatgacaaaacaggacacgaccggcaagattatctccattgacacgtcttctcttagagccgccggtcgcaccggctgggaagatttggtgcggaagtgtatatatgcattctttcagccccaaggtagggaaccatcctacgccagacagctgtttcaagaagtgatgactagggggactgcatccagcccctcttatagattcattcttaacgatgggactatgctgtctgcccacactaagtgtaagctgtgctatcctcagtctccagacatgcagccattcatcatgggaatccatattatcgaccgcgagcactctggcctgagcccccaggatgacacaaacagtgggatgtctattccccgcgtgaacccatcagtcaacccttctatcagccctgcccacggggtcgctcggtcatcgactctcccaccatccaacagcaacatggtgtcgacccgcattaacaggcaacagagcagcgacctgcactcaagctcacattccaacagtagcaattcccaaggctcttttgggtgcagcccggggtctcaaattgttgccaacgtggctttgaaccagggccaggctagctcacaatcttctaatccttctttaaacctaaacaactccccaatggagggaacaggaatatcgttggcccagttcatgagtcccaggagacaagtcacatccggcctggccaccagaccaagaatgccaaacaactctttcccaccaaatatttcaactttgagctcacctgttggtatgacttcctccgcatgcaataataacaaccgatcatactccaatattcctgtgacctcccttcagggcatgaacgagggacccaataactccgtcggtttcagtgcttcgtcaccagtgctgcggcaaatgagcagtcagaatagcccctctcgcttgaacatccagccggcaaaagctgagtctaaagacaacaaggaaattgctagcatcctaaacgagatgatccagtcagataactcaagcagcgatggaaagcctttagattccggactgctgcacaataatgaccgcctgtcagatggcgacagtaagtactctcagacctcccacaagctagttcagttgctgacaactacagctgagcagcagctgcgtcacgccgacattgacacctcatgcaaagacgttctttcttgcacgggtacctctaatagcgccagcgctaattcgagtggcggctcttgtccaagctcccatagctcccttaccgagcgacacaaaatcctgcaccggctgctgcaggaaggctccccctctgatattactacgctgagcgtggaacctgacaagaaggactcagcttctacaagcgtttccgtgacaggtcaggtgcagggaaattcttcgattaaattagagttggacgcgtctaaaaaaaaggagtcgaaggatcaccagctgctccgatacttactagacaaggatgaaaaggatctccgatcgacacctaatctgtcactggacgacgttaaggtgaaggttgagaagaaggagcagatggacccctgcaatacgaatcccaccccgatgaccaagcccacccccgaagagataaagctggaggcccaaagtcaattcacagccgacctggatcagtttgaccagctattgccgaccctcgaaaaggctgctcagctgcctgggctctgcgagaccgaccgcatggacggggccgtgacatcagtcacaatcaagtcagaaattttacccgctagccttcagtcggccactgccaggcccacgagtcgcttgaacagactgcctgagctggagctcgaagctatcgacaaccagttcggccagcccgggacgggcgatcagatcccatggactaacaatacggtgacggcaattaatcagtccaagtcagaggaccaatgtatcagtagccaactagatgaactactatgccctcccaccactgtggaggggaggaatgatgagaaggctctgttggaacaactggtttcattcctgtccggaaaagatgaaactgagcttgccgagttagacagggctctggggatagacaagttggtccagggcggcggtcttgatgtgctctccgagcgtttcccaccgcaacaggccacaccgccactgattatggaggagaggccaaatctgtactctcaaccctattccagtccatcgcccacagctaatcttccaagccccttccagggcatggtcagacagaagcccagccttgggactatgccagtgcaggtcacccctcctcgcggcgctttctcgccgggtatggggatgcaaccccgacagacattaaatcggcccccagcagctcccaaccagctgagactccagttacagcagcgcctgcaaggccagcagcaacttatccatcagaataggcaggctattctgaaccagttcgctgcaactgctcccgtgggtatcaatatgcgctcaggcatgcagcagcagattaccccacagcccccactcaacgctcagatgctcgcccagaggcagagagagctctactcccagcaacaccgtcagaggcagcttatccagcaacagagggccatgctcatgaggcaacagtcctttggaaacaacctgccgccctcctctggcctccctgtgcagatgggaaacccacgcctgcctcagggcgcgccgcagcagttcccctatcctcccaactacggcaccaatccaggaaccccgcctgcgtccacctcaccattttcccagcttgccgccaaccccgaagcctccctggcaaacagaaattctatggtgagcagaggaatgactggaaatatcggcggacagtttggtactggtataaatcctcagatgcagcagaacgtgttccagtatcccggagcagggatggtcccacagggagaagcaaacttcgccccatctctctcccccgggagctctatggtgccgatgccaataccacccccgcagagcagccttttgcagcaaacacccccggcctcaggttaccagtcccccgacatgaaagcttggcagcagggagctatcgggaataacaatgtcttttctcaagcagtgcaaaaccagccaacccccgcacaacccggagtatataataacatgtctattacagtctcaatggcgggggggaacaccaacgtgcagaacatgaaccccatgatggcacagatgcagatgtccagcctgcaaatgcccgggatgaatacagtgtgccccgaacagattaacgatccagccctacgacatacagggctctactgcaaccagctttcatccacagacctgcttaaaactgaggcagacggaacccaggtgcagcaggtgcaggtgttcgcagacgtgcagtgcacagtcaatttggtggggggggatccatacctgaaccagccggggccactggggactcaaaaaccgaccagcggccctcaaactccccaggcccagcaaaaatctctgctgcagcaactgcttacggagtag

SEQ ID NO: 197683 - DNA, 4200 bp, synthetic construct
  misc_feature 1..4200: note = Description of Artificial Sequence: Synthetic coding sequence
  source 1..4200: mol_type = other DNA
atgagcggcctgggcgacagcagcagcgaccccgccaaccccgacagtcacaagcgcaagggttcaccttgtgacactttagcaagttctactgagaaacggagacgcgagcaggagaacaagtatctggaggaactcgccgaattactgagtgcaaacattagcgacatcgattctctatccgttaagccagacaagtgcaaaattctgaagaaaactgtggaccaaattcagctgatgaagcggatggagcaggagaaaagtaccactgacgatgacgtacagaaatccgatatctcttcgtctagtcaaggcgtgatcgagaaagagtcccttggcccacttctgctcgaagcgctggatggctttttctttgtcgttaattgtgaaggaaggatcgtgttcgtttccgaaaacgtgacaagctatttaggctataaccaagaggaacttatgaatacaagcgtgtattccatactgcatgtaggcgaccacgctgaattcgtcaaaaacctgttgcccaagagcctggtgaatggtgtgccgtggccgcaggaggctacaagaaggaactctcacacctttaactgtaggatgttaatacacccacccgacgaacccgggactgagaatcaggaagcctgtcagaggtacgaagtgatgcaatgctttacagttagtcagcctaagtcgatacaagaagacggcgaagacttccagtcttgtctgatctgcatcgctcggcggctccccagacctcctgcaatcacaggagtggagagctttatgacaaaacaggacaccactgggaaaattattagcatagacacctcctcccttagggctgccgggcggacagggtgggaagacttagttcgcaaatgcatatatgcattctttcaaccacaaggaagagagccttcctacgcacgacaattattccaggaggtcatgacgcgaggtacagctagctctccttcctatagatttatcttgaatgacggcacgatgttgtccgcccacactaagtgcaaactgtgctacccacagtccccagacatgcagccgttcataatgggtatccacattatcgatagagagcacagcggcctcagcccccaggacgatactaactcaggaatgtctatccctagagtgaacccctctgtgaacccatcaatcagtccagcgcatggagtcgcaaggtcgagtaccttgcctccctccaacagcaatatggtgtccactaggataaacaggcagcagagctctgatctgcactccagtagtcattccaattcatccaactcacagggtagcttcggatgtagtcccgggagccagatcgtagcaaacgtggcacttaaccagggacaagcctcttctcaatcaagtaacccgtcattgaacctgaacaacagtccaatggaaggaactggcatttcattagcacagtttatgagcccccggcgccaggtaacttcagggctggccactcgccccaggatgcctaacaattcatttccacccaacatcagcacgctgtcgtcgccggtggggatgacatcttccgcatgcaacaacaacaatagaagctatagcaatatccctgtgacctctcttcaaggcatgaacgagggacctaataattcagttggattctcagcctctagcccagtactaagacagatgtcctctcagaactcgccatctagattaaacatacagcctgctaaagctgagtccaaagacaataaggaaattgcctcaattctaaatgaaatgattcagtcagacaattcctcatcagatggaaagccactggattccggactgctgcataataatgaccgccttagcgacggggacagtaaatacagtcagacgtcccacaaattagttcagctcctgactacaactgctgaacagcaacttcgacacgccgatatcgatacatcatgtaaagatgtgttgagttgcacgggaaccagtaacagcgcgagcgcgaattcttccggcggcagctgtcctagcagtcattcttccctgaccgagcgacataagattttgcacagactgttgcaagagggaagcccttctgacatcaccacactctcagtcgaaccagataaaaaggattctgcctccaccagcgtttctgtgaccggccaggtccagggaaactcttctataaagctggaacttgacgcatccaaaaagaaggagtcaaaggaccaccagctgttacgatacttactagataaagatgagaaagatctcagatcaacccccaacttgagcctggacgacgtgaaggtgaaagttgagaaaaaagagcaaatggacccatgtaacaccaaccccactccaatgaccaagccaactcctgaggaaatcaagctggaagctcagagccagttcacggccgacttggatcaatttgatcagctgttgccaaccctggagaaggctgctcagcttcctggcctctgtgaaacagaccgaatggacggcgccgttaccagcgtgacaattaagtctgagattctccccgcaagtctccagtcagctaccgcccggccgacatcgaggcttaatcgtctccccgagctggaactcgaagcgatcgacaaccagttcggccagcccggtacaggggatcagatcccctggaccaacaatacagtaactgccatcaaccagtctaagtctgaggaccagtgcatttcttcccagcttgacgagctgctctgtcctccgacaacagtagagggccggaatgacgagaaagcactattggagcagctggtgtccttcctgagtggcaaagatgagaccgagcttgcagagctggatagagctctgggaattgacaagctcgtccaggggggcggcctagacgtcctttcagaacggtttcctccacagcaggcgacccctcctctgataatggaggagaggcccaatctgtacagccagccctactcctctcctagcccaacagccaatttaccatcccctttccaggggatggtgcggcaaaagccgtccttgggaacaatgcctgtacaggtgacgccaccacgcggggcattttctcctggcatgggcatgcaacccagacagacactgaacaggcctcctgctgctccaaatcagctaagattgcagttgcagcaacgcctgcaaggacagcagcaactgattcatcagaatcgtcaggccattctgaatcagttcgctgccacagcccctgttgggataaacatgagatctgggatgcaacaacagatcaccccccagccaccccttaacgcccagatgctagcacagcgacaacgcgaactatatagccagcagcatcgacagaggcagctgatacaacagcagcgagcaatgctaatgcgccagcagtcctttggaaataatcttcctccctcctctggcttgccagtccagatgggcaatccccgcttgcctcaaggagcaccacagcaattcccatacccgcccaactatgggactaaccctggaaccccccccgcctctacttcgccattttctcaactggctgccaaccccgaggcctctctagccaacaggaacagtatggtgtctcgcggcatgacaggaaatattggtggtcagtttggcaccggtatcaacccccagatgcagcagaatgtgtttcaataccccggcgcaggaatggtgccacagggggaggcgaactttgccccatctcttagtcccggctcatccatggtcccaatgcccattccccctcctcagtccagccttctgcagcaaaccccccccgctagtggatatcaaagtccggacatgaaagcttggcaacaaggggcgatcggcaacaataacgtgttttcgcaagccgtccaaaatcagcctacaccggcccaacccggggtctacaataacatgtctatcacagtctcaatggccggagggaacactaatgtccagaacatgaatcccatgatggctcagatgcagatgtcctctctccaaatgccagggatgaataccgtgtgccccgagcaaatcaacgatccagctctgagacataccgggctttattgtaatcagctgtcctcaaccgaccttctgaagacagaggcagatggaacccaagacaagaaaacagaagaatttttctccgtggtcaccacagattag

SEQ ID NO: 197684 - DNA, 4326 bp, synthetic construct
  misc_feature 1..4326: note = Description of Artificial Sequence: Synthetic coding sequence
  source 1..4326: mol_type = other DNA
atgagcggcctgggcgacagcagcagcgaccccgccaaccccgactctcataaaaggaagggcagtccatgtgacaccctggcctccagcaccgaaaagcggcggagggagcaggagaataagtatctggaagagctggccgagctgcttagtgccaacatatctgacatagatagcctgagtgttaagccggataagtgcaagattctcaaaaagacagttgaccagattcaattaatgaagagaatggaacaggagaagtctaccaccgacgatgatgttcaaaagtcagacataagcagctcatctcaaggcgtcatcgagaaggaaagtttaggccccctgctactggaggccctcgacggctttttctttgttgtcaactgcgaaggcaggatagtgttcgtttctgagaatgtcacatcctatctggggtataaccaggaagaattaatgaacaccagtgtgtacagtattcttcatgtcggcgaccacgccgagtttgttaaaaatctcttgccaaagtctctggtgaatggcgtgccctggcctcaggaggccaccagacggaactcccatacttttaactgtaggatgctaatccacccacccgacgagcccggtaccgaaaaccaagaggcttgccagcgctacgaggtcatgcagtgttttactgtgagtcagcctaagtctatccaagaagatggtgaggattttcaatcctgtctgatctgcattgctcggcggttgccccgcccacccgccattaccggggtggagtcattcatgacaaagcaagacactacaggtaaaattatctcaatcgatacttctagtctgcgagccgctggacgcaccggatgggaagatcttgtgcgtaaatgcatatacgccttcttccagcctcaagggagggaacctagctatgctcgtcaattgttccaggaagtaatgacgaggggtaccgccagctccccatcctacaggttcattttgaatgacgggacaatgctgagtgcccacaccaagtgtaagctgtgttatccccagagtcccgacatgcagccatttataatgggaattcacatcatcgatagagaacactccggcctgtcaccccaggacgataccaattccggcatgtcaatccctcgcgtgaacccatcggtcaacccatctatttctcctgcacacggtgtcgctcgtagtagtacgcttccgcctagcaacagtaatatggtgtctactaggatcaacaggcagcagtccagcgacctccactcctcctcgcactccaattcctctaatagtcagggatctttcgggtgcagccctggaagccagatcgtcgccaatgtggcactgaatcagggacaggcgtcatcccagtcatccaatccttctctgaacttgaataactcacctatggaggggaccggcatatctctggctcagtttatgtctccgaggcgccaggtgactagcggacttgcaacccgccccagaatgcctaacaattcttttccaccaaatataagtacacttagctccccagtaggaatgacaagcagcgcctgcaataataataacagatcctactccaacattcctgtgacgagcctgcaaggaatgaacgagggccctaacaatagcgtgggcttctccgccagctctccagttcttcgccagatgtcttctcaaaattctccatcaagacttaacattcagccagcaaaagccgagagtaaggataacaaggaaatcgcctctatcttaaacgagatgatccagtcagacaactccagtagtgatggcaagccactggactcaggacttctgcataacaatgaccgactttcggatggagacagcaagtacagtcagacctcccataaactcgttcaactgctgaccaccacagccgagcagcagctgcggcacgcagatattgacacatcctgtaaggacgtactgagctgtacaggaacctcaaattcagcgtctgccaattcttcaggcggctcctgcccctcgtctcactcctccctcactgaaagacataagatccttcaccgtttgctgcaagaggggagcccttccgatataaccacgctgagtgtcgagcccgataagaaagattcggcttccacatctgtgagcgtaacaggacaggtgcaggggaattccagcattaagcttgaactggacgcgtctaaaaaaaaggagtccaaagaccaccagctgctgcgctacctcctggacaaagatgaaaaagacctccgcagcacgcccaacctcagcctggacgacgttaaggtgaaggttgagaaaaaggaacagatggatccttgcaacacaaacccgacacctatgacaaaaccgacacccgaagaaatcaaactcgaggcccaatctcagtttaccgccgacttggaccaattcgatcagctgttgcctactctcgagaaagctgcgcaactgccaggtctgtgcgagaccgaccgcatggatggcgccgttacaagtgtgaccattaaatctgagatccttcccgcctctctgcagtcagcaacagccaggcctacctctcggctaaataggctgcctgaactggagctggaggcaatcgataaccaatttggccaaccggggacgggagatcagattccatggaccaacaatacagtgacagccattaaccaaagcaaatcagaggaccagtgtatctcttcgcagctggacgaactcctgtgtcctccaacaacagtggaggggaggaacgacgaaaaggcacttctcgagcaattggtcagcttcctgagcggaaaggatgaaacagagctggcagagctggacagggcgctggggatcgataagcttgtgcagggaggagggctcgatgtgttgtctgagagattccctccacaacaggccaccccacccctcattatggaggagcggccaaatctctattcccaaccatactcctcacctagtccaacggctaatctgccgtccccctttcagggcatggtgcgacagaagcccagtctgggtacgatgccagtgcaggtgacaccgcctaggggggcattttctccggggatgggcatgcagccgcgtcaaaccctgaatcgccccccagcggcccccaatcagctgagactgcagttacaacagcgccttcagggtcagcaacagctgattcaccagaaccgccaggccatccttaatcagttcgccgccacagcacctgttggtattaatatgaggtctggtatgcagcagcaaatcaccccacagccgcccctcaacgctcagatgctcgcccagcgacagagagaactttattctcagcagcaccgccagaggcagctcatacaacagcagagagccatgttgatgcgacagcagtccttcggaaacaacttacctccaagctctgggctgcccgtgcaaatggggaatccacgcctgccccaaggcgcgccacaacagtttccttacccccctaactatgggaccaacccgggcacaccccctgctagtacgagccctttcagccagctcgcagccaaccccgaggccagcctcgccaaccggaactcgatggtatcacgaggcatgaccggcaatataggagggcagttcggtacaggtataaatccgcagatgcagcagaacgtttttcaatacccaggagctggaatggtgcctcagggagaggccaattttgcgccctcactcagtcccggctcttccatggttcccatgcctattccaccacctcagtcttcgctactccagcaaaccccaccagcctctggctatcaaagtcctgatatgaaagcatggcagcagggagcaataggaaacaacaatgtattctcacaggccgttcagaatcagcccacgcctgctcagcctggggtgtacaataatatgagcatcacagtgtcgatggccggagggaatactaatgtccaaaacatgaatccgatgatggcacaaatgcaaatgtcatcactccagatgcccggcatgaacacagtttgccctgagcagataaatgaccctgcattgcgccatactggtctttactgcaatcagctgtcttcgaccgacctcctcaagactgaagcagatggcacgcaacaggtccagcaggtccaggtgttcgctgacgtccagtgcacagtcaacctggtgggaggtgatccttatctcaatcagcctgggcccctgggaacacagaagcccacctccgggccacagacaccacaggcgcagcagaaaagcttacttcaacagctcctcaccgagtag

SEQ ID NO: 197685 - DNA, 4200 bp, synthetic construct
  misc_feature 1..4200: note = Description of Artificial Sequence: Synthetic coding sequence
  source 1..4200: mol_type = other DNA
atgagcggcctgggcgacagcagcagcgaccccgccaaccccgactcgcacaagcgaaaggggagcccctgtgatacccttgcaagttccaccgaaaaacgacggcgggaacaggagaacaagtatctcgaggaactcgccgaactcctgtcagcaaacatttctgatatcgatagtctgtcagtgaaaccagacaagtgcaagattctgaagaagacagttgaccagattcagctcatgaagaggatggaacaggagaaatccactaccgatgatgatgtccagaagagcgacatctcaagctcaagtcaaggtgtgatagagaaggagtcactggggccgctgcttttggaggctctggacggctttttctttgttgtgaattgtgaggggagaattgtcttcgtgagcgaaaacgtgacctcctacctgggatacaatcaagaggaactgatgaacactagcgtctactctatactccacgtcggggaccacgccgaattcgttaagaacttgctacctaagtcactggtgaacggggttccttggcctcaagaagcaacccgcagaaattctcataccttcaactgtcgcatgctcattcaccccccagatgaacccggaacagagaaccaagaggcttgtcagcggtacgaagtgatgcagtgttttaccgtatctcaaccgaaaagcatacaggaggatggggaagactttcagtcttgtcttatctgtattgcccgccgactgccccgccccccagctattacgggggtggaaagtttcatgacaaagcaggataccactggcaaaataatcagcattgatacgagctctctccgcgctgcggggcgaaccgggtgggaggatttagtgcggaagtgtatttacgcattcttccagcctcaggggcgggagccatcttatgccagacagctattccaggaggtaatgactcggggaacggcctcgtccccaagctaccgctttattctcaacgacggcaccatgctgtcggcccacactaagtgcaagctgtgctatcctcagtcccctgatatgcagccctttatcatgggaatccatattatcgacagggagcatagcggcctaagtccacaggacgataccaactctggcatgtcaatcccgagagtcaatccctcggtgaatcctagtataagcccagcccacggcgtcgcaaggtctagcacactcccgcccagcaattcaaacatggtatccactcggataaacaggcagcagtcctccgatctgcattccagtagccattcgaacagttccaactcacaaggatcttttggatgctcacctggttcccagatagtcgccaatgtggcactcaatcaaggccaggcttcgagccaatccagcaacccttcccttaacctcaataactcaccaatggagggaaccggaatcagcttggcccagttcatgtctcctcgcagacaggttacatcaggcctggcaaccagacctcgcatgcccaacaattccttcccgcccaacatctcaactctgagctccccagtcggaatgaccagctccgcctgcaataacaacaatcggtcctactcaaacatacccgtcacctctctgcaaggaatgaatgaaggaccaaacaacagcgtggggttctctgcatcgagcccagtcctccgccagatgtcatcccagaactctccgagccgcctgaacatccagcccgctaaagcagaatccaaggacaacaaggagattgcttctattttgaatgagatgatacagagtgacaattcctccagtgacggcaagccactggacagcggcctcctccacaacaatgatcgtctgtccgacggagattccaagtatagccagaccagccacaaactggttcagctgttaacaaccaccgcagagcagcagttacgccatgctgacatcgacacttcctgcaaagacgtcctgagttgcacagggacctccaactccgcatctgccaactcgagtggaggttcttgcccaagtagccactctagcctcaccgagagacacaagatcctccaccgactgttacaggagggaagccctagtgacattacaactctgagtgtggaacccgataagaaagatagcgcctcaacttccgtaagtgtcaccggccaagtccaggggaatagctccatcaagcttgagcttgacgcttctaagaagaaagaaagcaaggaccaccagctccttagatacctgctagacaaagatgaaaaagacctgcgaagcaccccaaatttatctctggacgatgtgaaggtgaaggtggaaaagaaagaacagatggatccttgcaatactaaccccaccccaatgaccaaaccaactcccgaggagatcaaattggaagcgcagagccagtttacggccgacctggatcagttcgaccagttactacctacacttgaaaaggcagcgcaactccccggcctgtgcgaaactgacaggatggacggagctgtgacttcggtgaccatcaagtccgagatacttccagcctccctgcagtcagctaccgccagacccacaagcaggcttaaccggttgccagagttggaactggaagcgatagataaccagttcggccagcccgggaccggcgatcagattccctggacgaacaataccgttacagccataaaccagtcaaaatcagaggaccagtgtattagctcacaactagacgagttgctttgcccccccactaccgtagaagggcgcaacgatgaaaaagccctcctggagcaacttgtttcttttttgagcggaaaggacgagacggaacttgcggagttggaccgggctctgggcattgataaacttgtccagggcgggggactcgatgttttgagcgaacgattccctccacagcaggcaactcctcctttaatcatggaggagcggcccaacttgtatagccagccttattctagcccctcccctacagcgaacctcccctcaccttttcaagggatggtcagacagaagccttcactgggaaccatgcctgtgcaggttacacctccccgcggggcattcagccctgggatggggatgcagcccagacaaacgctgaaccgcccacctgcggctccaaatcagctaagactccagcttcagcagcgccttcaaggccagcagcagttgatacatcaaaataggcaggcaattcttaaccagtttgctgccacagctcctgtgggaattaatatgaggagcgggatgcaacagcaaattactccccaaccgcctctcaatgcccaaatgctagcccagaggcagcgggagctctatagccagcagcaccggcagcggcagctaatccagcagcagagggcgatgttgatgcggcagcagagcttcgggaacaatcttcctccaagttctggtcttcctgtccaaatgggaaatccgaggctcccccaaggtgccccgcagcaatttccctacccgcctaattacggaaccaacccagggaccccccccgcctcaaccagtcccttcagccagctggcagcgaatcccgaagctagcctcgccaataggaattctatggtctctagagggatgacaggcaatatcggagggcagttcgggaccggcataaatccacaaatgcagcagaacgtgtttcagtaccccggtgccggcatggtaccccagggggaagctaacttcgcaccgagtctctcaccagggtcatcaatggtgcctatgcccattcccccaccccagagctcgctacttcagcaaaccccacctgcttcgggctaccaatctccagatatgaaggcgtggcagcaaggagcaattgggaataacaacgtgtttagccaggccgtccagaatcaaccgacacctgcccaacctggcgtatacaacaacatgtccattaccgtcagtatggcgggcggtaacacgaacgtgcaaaatatgaatcccatgatggcccaaatgcagatgagcagccttcaaatgcccggcatgaacaccgtatgtcctgagcaaataaatgaccccgctctgagacacacaggtttatattgcaatcagctgtcttcaaccgacctcttaaaaacggaggccgacgggacccaggacaaaaaaacagaagagtttttcagcgtggtaactaccgattag

SEQ ID NO: 197686 - DNA, 1659 bp, synthetic construct
  misc_feature 1..1659: note = Description of Artificial Sequence: Synthetic coding sequence
  source 1..1659: mol_type = other DNA
atgcagctgaccgccgagaacagccccgtgacccccgtgggcgcccagaagacagcattacgcattagtcaaagccggatgattggaaattccgcaagtagacctactatgccgtctggggaatgggccccgcaaagttctgctgtccgcgtcacatgtgccgctaccacttctgccatgaatcgaccagtccaggggggcatgattcgaaaccctgccgcgagcattccaatgcgacccagttcccaaccaggtcaacgtcagacactgcagtctcaggtcatgaacatcgggccatccgagttagaaatgaatatgggcggtccccagtactctcagcagcaggccccccccaatcagactgccccttggcctgagagcatcctgcccatagaccaggcttcatttgcctcccagaacaggcagccatttgggtcttctcccgacgacctgctctgccctcacccggcggctgaatccccaagtgacgagggggcactcttggaccagctatatctggctctgcgcaatttcgacggcctcgaagaaattgatcgagctctgggcattccagaactggtgagtcagtctcaggccgtggatccagagcagttctcaagccaggatagtaatattatgctcgaacagaaggcccctgtcttcccccaacagtacgcgtcccaagcccagatggcacaagggtcatactcacctatgcaagacccaaatttccataccatggggcagagaccatcgtatgcaactctgaggatgcaacccaggccaggtctgcggccgacaggcctcgtgcagaatcagccaaaccagttgaggctccaactgcaacaccgtttgcaggcccaacagaataggcagccccttatgaaccaaataagtaatgtgtccaatgttaacctgacattgagaccaggcgtgccaacacaagccccaatcaatgcacagatgctcgcgcagcgccagcgcgaaattctcaaccagcatctcagacagcggcagatgcaccagcagcagcaggtgcagcagagaacgctgatgatgcgcggccaggggctcaatatgaccccgagcatggtggcaccctcaggaatgcccgctacaatgagtaacccacgaattcctcaagccaacgctcagcagtttccctttccaccaaattatggcatctcccagcagccggatcctggcttcactggcgccaccactccccaatccccccttatgtctccccggatggctcatactcaatcccctatgatgcagcagtcccaggccaatcctgcatatcaggccccctctgatattaatggctgggcccaagggaatatgggcgggaattctatgttctctcagcagtctccaccacactttggccagcaggcaaacacaagcatgtattccaataatatgaacattaatgtttctatggccacaaataccggaggaatgagctcaatgaaccagatgaccggccaaatctcgatgacgtccgtcacttccgtgccgacatcaggcctctcaagcatggggccggagcaagtgaatgatccagcactgcgcggcggcaatctcttcccaaatcagctcccagggatggatatgattaagcaggaaggcgacaccactcggaaatattgctag
